United States Patent Application Publication US 2007/0072175 A1 - sequence listing, part 16

SEQ ID NO: 43080 - DNA, 447 bp, Macaca Mulatta
gaggagccgaaagggcgctgggatccaggggaagggtctgtcctgcgcttcgaatctgtgtttgaactttttaaaaattcgaaaactttgggaaacgaatgcaacagggagtaaggactctcaccccagagctggcttctgccacttgccctgccggtttcttggtactgggaggctccaggcttccttctgtgcaccgagacttccttgagcaagtggagctgtgggaagtgcactcttggaagatcccgcatgggttcgaggtgaggctgcttcagaagctcaaatgaaagactgtctcctcgtgggagagcacctggggtcatcagaaatgtcttttcatcttttttctggaggagacgaatgatagggcctggtttacattcatttaactatttatgaccttcactcagctgtggatttggagacattttgtgggagacttgg

SEQ ID NO: 43081 - DNA, 778 bp, Macaca Mulatta
gggagtagctgcaccactagaaagatggcggagcaagagcaaagaaaaatccctttggttccagaaaatctgctgaaaaagaggaaggcttatcaagccctcaaagccacccaggcaaagcaggcacttttggcaaagaaggagcagaggaaaggaaaagggctcaggtttaagcgactggaatcattcctacatgattcctggcggcagaaacgtgacaaggtgcgtctcagacgactagaagtgaaacctcatgccttggaattgccagacaaacattccttggcctttgttgtacgcatcgaaaggattgatggcgtgagtttattggtgcagagaaccattgcaagacttcgcctaaagaaaatttttagtggtgtctttgtaaaagtcaccccccagaacctaaaaatgctgcgtatagtggaaccttatgtgacctggggatttccaaatctgaagtctgtccgagaactcattttgaaacgtggacaagccaaggtcaagaataagaccatccctctgacagacaacacagtgattgaggagcacctggggaagtttggcgtcatttgcttggaagacctcattcatgaaattgccttcccagggaagcatttccaggagatctcatggttcttgcgccctttccacctctcagtggcccgacatgctacccaaaatagagtgggcttcctccagggagatgggcacacctgggctatcgggggtgaacgcattccatcaagttcatcccgcccagctgaaactagacccc

SEQ ID NO: 43082 - DNA, 773 bp, Macaca Mulatta
  misc_feature (1)...(773): n = A,T,C or G
ggnnnnnnnnnnnnnnnnnnnnnnnnnnnnnnnnnnnnnnnnnnnnnnnnnnnnnnnnnnnnnnnnnnnnnnnnnnnnnnnnnnnnnnnnnnnnnnnnnnnnnnnnnnnnnnnnnnnnnnnnnnnnnnnnnnnnnnnnnnnnnnnnnnnnnnnnnnnnnnnnnnnnnnnnnnnnnnnnnnnnnnnnnnnnnnnnnnnnnnnnnnnnnnnnnnnnnnnnnnnnnnnnnnnnnnnnnnnnnnnnnnnnnnnnnnnnnnnnnnnnnnnnnnnnnnnnnnnnnnnnnnnnnnnnnnnnnnnnnnnnnnnnnnnnnnnnnnnnnnnnnnnnnnnnnnnnnnnnnnnnnnnnnnnnnnnnnnnnnnnnnnnnnnnnnnnnnnnnnnnnnnnnnnnnnnnnnnnnnnnnnnnnnnnnnnnnnnnnnnnnnnnnnnnnnnnnnnnnnnnnnnnnnnnnnnnnnnnnnnnnnnnnnnnnnnnnnnnnnnnnnnnnnnnnnnnnnnnnnnnnnnnnnnnnnnnnnnnnnnnnnnnnnnnnnnnnnnnnnnnnnnnnnnnnnnnnnnnnnnnnnnnnnnnnnnnnnnnnnnnnnnnnnnnnnnnnnnnnnnnnnnnnnnnnnnnnnnnnnnnnnnnnnnnnnnnnnnnnnnnnnnnnnnnnttttgcccggcctcattccggccaactaactaacaccaccttcaacatccaaaaccatcacctttcgggctttccaaagcccgcccggcttggaataatggaacccgttcccgtggaatgttt

SEQ ID NO: 43083 - DNA, 817 bp, Macaca Mulatta
  misc_feature (1)...(817): n = A,T,C or G
ggatcagataagaaaaaggaggtcaactttaactgtaaatgagtttaaacattcagagaggcacatacaacaaatacctatgcaccactgtggggacaagaggtttaagttttattatttactattattattttttttgcctttcaaatgagtctaataaacacaaatggtggaaaggagtgattttaaattctaatccacatcagagacttcttactaagcggcacgcaggtgaagcctataaaatgtcaagtagaggaattattcatgctgcagaacacgcaataatcgttccgagaaaaaaacgattaatactgtaacacaaagaaaaggcctgaagcaaaaaacccaaaacacaagcaaaaaaatgttaaaaaagagaaaagagaagaccagaaagaaagcaaaggcgatatgttaccaagaggtgtaaaaaannnnnnnnnnnnnnnnnnncnnnnnnnnnnnnnncaatagacgggaaagtgaatataaacacgaaaaaaaattaatcagaagaaggaaagagtaaggagaagatggccaaaaatacaaattagnnnnnnnnnnnnnnnnnnnnnccagaagataaaaaccgaaaaattcaaaacgcataaagggccagtgaaagaaaaaagtgaaagggaaattatgaaagaaagacaggggccacacgagaaaagacaggttaaaaggacgagaaaacgaaaacaatgagacaataaaaagaaaaatattgaataagaaaaaacaagaaaaatattaaacaggccgtttaatattttcagagaaactataaaaacaaagacagcaaaan

SEQ ID NO: 43084 - DNA, 828 bp, Macaca Mulatta
tgggagagtttctactatttgatatttgagtattatctgggatgtggttctagagctgcccagagctgtgctcagtagagcgtgtcttggaacgtgcgcctgggcagactgtatctagtacactggtgggctatctcttatctgcggtgtttgcttttgctaggaagaggatgtggaggaaggaggaggtgggcagtctggcttgagttgtgctgtatcctctaccttgttagcttgccttagtctcactggagaccatttgcggatagtgcttggtccatgcccagcaggacagggctttgctgcttctgaaagtctggtgttctgtatctggggctgtggattcctgtgtctagctgctcaggaaatcttgagaagcattccactctggggtgttaaccagtatgagtttgaaattcaagcctttgtacctgagttggggagagaattgcaaggtatactttctctgaaagtaacagaaccagtcaggctgccatgttattaaggaatctgaactgtttatagcagttaccttgtgggtgatacaatgggagggggcaaaaaaactacctgcataggggaccctgccctctatcaagagctgggagcacatttcatcagagtagcaggcccacctggtgccacagggcctgcccttcctgcttctattcctttgccttgcaatctcctggagagagcctctcttcctgtacagcctttgggccaaaatgcccttctagcttctccaaagaagatcctagtttatttcattctatgttttaaaaggtaaacaggacataacaagtaaaagaagttttgggctaaagt

SEQ ID NO: 43085 - DNA, 315 bp, Macaca Mulatta
  misc_feature (1)...(315): n = A,T,C or G
caaagtgnnnnnnnnnnnnnnnnnnnnnnntcacacctgacctttaatcaattttgacaattcctggctgtctatattttaaaattttccccccgaaaaaaaaggcgaaaagaaggggaagtatcctgctcccttatatgcatgtaactcatacaggactggcagttatatttccccagngttttttgggtggcctcacaagtcatcnnnnnnnnnnnnnnnnnnnnnnnnnnnccctttttcccccctttatatttaggggtttgagatggattaagaacaaaagggttaacatttgggtacaaactccttatt

SEQ ID NO: 43086 - DNA, 773 bp, Macaca Mulatta
  misc_feature (1)...(773): n = A,T,C or G
ggatattaaatgccaataaaattattcagatgttttcatattgaagccaatagaattcctgttgaaatactggttttgagaatgtcttcatctgtggagtatttgatggtttgttgaaagagatctgtatgctctttcaaagcttttcctggtttatatatatttccagaaataattttctatacattaaaaatattagcagtagaattattgtatcataggacatgtgtatattcagccttagtagatactattaagtgattttcctaactggtccagccaatttacacacctatcaggttatatgaatgctaggtgctctgaatgcacacatttggtattatcagtgtttctttgtctttttgccttttgattgtaactattgtgatggttatgtaatggtactttactgcggctttttggctgaatttctctcatggctaatgatgttgagcacctttttatatgtttcttggccatttggatattcttttttatgaaaatgcctgttcaagtcttttgcccatttaaagagtcagannnnnnnnnnnnnnnnnnnnnnggtatgtagggcttaatttacattttctgagtatgtgttttgtgatatatgtatattcaagttgtttatatgggttaatgtttattattgaagaaaaaacatattgcttaaatttttatttctatccatgctaataacttatattaaatgccctatattaagtattcagaatgaaaggtatggtttggtggatatatatatcacaaaaaga

SEQ ID NO: 43087 - DNA, 588 bp, Macaca Mulatta
  misc_feature (1)...(588): n = A,T,C or G
tctataacatgtaacctgtagcatctttaatactggggttattttgcacttttgtgtatgagagagaataagaacacacctgtaaggtatttatacctgaggtatcattctaggaaatgagaatgagtttgtgaaaaatnnnnnnnnnnnnnnnnnnnnnnnnnnnnnnnnnnnnnnnnnnnnnnnnnnnnnnnnnnnnnnnnnnnnnnnnnnnnnnnnnnnnnnnnnnnnnnnnnnnnnnnnnnnnnnnnnnnnnnnnnnnnnnnnnnnnnnnnnnnnnnnnnnnnnnnnnnnnnnnnnnnnnnnnnnnnnnnnnnnnnnnnnnnnnnnnnnnnnnnnnnnnnnnnnnnnnnnnnnnnnnnnnnnnnnnnnnnnnnnnnnnnnnnnnnnnnnnnnnnnnnnnnnnnnnnnnnnnnnnnnnnnnnnnnnnnnnnnnnnnnnnnnnnnnnnnnnnnnnnnnnnnnnnnnnnnnnnnnnnnnnnnnnnnnnnnnnnnnnnnnnnnnnnnnnnnnnnnnnnnnnnnnnnnnnnnnnnnnnnnnnnnnnnnnnnnnnnnnnnnnnnnnnnnnnnnnnnnnnnnnnnnnnnnn

SEQ ID NO: 43088 - DNA, 485 bp, Macaca Mulatta
cgggacgtgggaaaatgagtacgcgtcacacgtgaggtcgcgcatccgataggccctttccagatggcaacaggcctgaggatgaatctgggcgagctggttgagtccatgcgtttgtgcttcctctcagtcaactttcgcttaccatggggcaactcttgtctatcgtcgcctcaactggaaacttttcctgccggctcagttaatggtcccctgtaccatccccatcctgagtgactactgagcagccgcagggactcggggttgctccgtgaccacgttactcagttaccttcttgttccttggagaggcggagctgaatggcccgtgagtgcagtgtacttcagattcctgtgaaggattatgaaaaaaatggaaaaagttaactttcatttgaagagcatctgagatggcgtcccagataaggaggcacttgaaccccttagaagtgtcggccatcggaccccaagtctccagccgtgtt

SEQ ID NO: 43089 - DNA, 1061 bp, Macaca Mulatta
  misc_feature (1)...(1061): n = A,T,C or G
acgatggcaccgacgctccttatctaccacgtagactctaccgcatggctaggggacatccgtatctcntnncacctcagttgtgtctcgcattgcgcgtgngnttgactagtagngtagctacatagtggtagttgtctgcgagcttagtgaggatagtcaatgagtaggatataagtggataagggaatgttgagtaattgacataacgcgtacctcgtggcgcagtagtgaaattgtgtgtgtaggcgtatatcgttaggcagcgnnccgcatatcgtgacggttcctaaagataggtgacataaatttagctccatttagtactaaccagaggtgcgagtaaatagcatttgaatatgcancctaagggggttttttggtagcggcaccctctcactcttctgnncttatcatcgctatagcgggtcgtagaggggtatacacattggtatgggattatgaggaagatttataatatcatgggatggtgtataagtattggaaatttggttggaaaggtggttgggaataagcagaatgccggtcatccacgcccttacttgggagaataattaagaggtggagtagtttatatggttatngtttgggggtgttgagatatcagtaaattaattaattcgtgcttgctgtgtgttgtgttatatacctggatatggttatttttgagattattcctgcctgttgtttgtggcgcggcgcgtgtnttggggtgggggtacaaaaaaaaaattaattcacaccacccccgttttatttttttgtcaccccccacttttttttaatatccccccccaacccgggggaggggcctttcctgtttgtttttgcgcaggttgggtgtgaacaaaaaggttttccaacaaatnattctgnngntncganatnaggagccttgaatacagcaggcaaagtgacatttttgccagatgactcccccttttcggagtacaccgatatcagtgggcgagcacacgccatggcggagagaggagaaaaccacgttcctctcaccccggatgctgctacaggaaaagccc

SEQ ID NO: 43090 - DNA, 1355 bp, Macaca Mulatta
  misc_feature (1)...(1355): n = A,T,C or G
tgtcagtgctggcattattaaaagactctgccaacatcctgctgtatctatggaaaagccaagtggccttggaagaggttaagnnnnnnnnnnnnnnnnnnnnnnnnnnnnnnnnnnnnnnnnnnnnnnnnnnnnnnnnnnnnnnnnnnnnnnnnnnnnnnnnnnnnnnnnnnnnnnnnnnnnnnnnnnnnnnnnnnnnnnnnnnnnnnnnnnnnnnnnnnnnnnnnnnnnnnnnnnnnnnnnnnnnnnnnnnnnnnnnnnnnnnnnnnnnnnnnnnnnnnnnnnnnnnnnnnnnnnnnnnnnnnnnnnnnnnnnnnnnnnnnnnnnnnnnnnnnnnnnnnnnnnnnnnnnnnnnnnnnnnnnnnnnnnnnnnnnnnnnnnnnnnnnnnnnnnnnnnnnnnnnnnnnnnnnnnnnnnnnnnnnnnnnnnnnnnnnnnnnnnnnnnnnnnnnnnnnnnnnnnnnnnnnnnnnnnnnnnnnnnnnnnnnnnnnnnnnnnnnnnnnnnnnnnnnnnnnnnnnnnnnnnnnnnnnnnnnnnnnnnnnnnnnnnnnnnnnnnnnnnnnnnnnnnnnnnnnnnnnnnnnnnnnnnnnnnnnnnnnnnnnnnnnnnntgtggtgtccactagctggcaacaagggagcaggaagcctcatgatctacaggcgctgtcctacttgtggtcacacaccaagtacgtggagatgtttgttgttgtcaacaaccagcggttccagatgtggggcagtaacatcaatgagacggtccagagagtagtggatgtcattgctctggccaacggcttcactaggggaataaacacagaggtggtgctggccggaatggagatttggaccgagggggacctaatagatgtcgcagtggacttgcaaatcacactcaggaatttcaatcgctggagacaagagatgctcttccgtcgtgcgaagcacgatgttgcccacatgatcgtcgggcatcatcctggacagaatacgggccaggcctttctcagtggtgcctgctcaagcggttttgcggcggctgttgaatccttccatcatgaagatatgctgttgtttgcagtccctgatggtccatgagctcgggcacaaactgggtattcagcacgaccactcggcctgcttttgcagagagaagcacttttgcctcatgcatgaaaatatcacaaaagaaagtggcttcagcaactgcagctctgactacttccaccagttccttcgagaacacaaaggggcctgcctatttaacaagccacggcccaggggccgcaagcgtagggattctgcctgtggaaatggcgtggtggaggacacggaggagtgtgactgtggttc

SEQ ID NO: 43091 - DNA, 732 bp, Macaca Mulatta
cctttagctgggtctcagtcttcaataaacataacaaaattcatactggaaagaaattctataaatgtgaagaatgtggcaaagagttcaaccaatcctcacaccttactactcataagagaattcatacgggaggaaaaaccctacaaatgtgaaaaatgtggcaaagctttcaattagttctcaacccttactgaacataagggaatttatacagaagggaaaccctacaaatgtgaagaacgtggcagattttttaactcttcctcaatccttactaaacataaggtaattcatactggagggaattcctacaattgtgtggaatgtggcaaagcctttaaccagtccttaaggcttaccacatataagacaactcatactggacagaaaccatacacatgtgaagaatgtgggaaagcctctaacagatcctcaattcttaacagacacaggctaattcatactagagagaaactacaaacctgaaagatgtgacagtgcttctggcaacacctgaaacttttctaagtataaaagaaatcatactggtgagaaatcctagaaatgtgaagaatgtgacaaagccttcaaatggctgtcacacttgattgtaggtaagataactcatattggagaaaactagtgtgaacaatgtggcaaaacatttaaccaatgctcatgcctttttgcaaaggaaagcatttatactagcctgggcaacagagggaa

SEQ ID NO: 43092 - DNA, 1723 bp, Macaca Mulatta
  misc_feature (1)...(1723): n = A,T,C or G
ctgagtgaccagaccatggagaccctgcttggtggcctgctggcgtttggcatggcgtttgccgtggtcgacgcctgccccaagtactgtgtctgccagaacctgtctgagtcactggggaccctgtgcccctccaaggggctgctctttgtaccccctgatattgaccggcggacagtggagctgcgtctgggcggcaacttcatcatccacatcagccgccaggactttgccaacatgaccgggctggtggacctgaccctgtccaggaacaccatcagccacatccagcccttttcctttctggacctcgagagcctccgctccctgcatcttgatagcaatcggctgccaagccttggggaggacaccctccggggcctggtcaacctgcagcaccttatcgtgaacaacaaccagctgggcggcatgcagatgagnnnnnnnnnnnnnnnnnnnnnnnnnnnnnnnnnnnnnnnnnnnnnnnnnnnnnnnnnnnnnnnnnnnnnnnnnnnnnnnnnnnnnnnnnnnnnnnnnnnnnnnnnnnnnnnnnnnnnnnnnnnnnnnnnnnnnnnnnnnnnnnnnnnnnnnnnnnnnnnnnnnnnnnnnnnnnnnnnnnnnnnnnnnnnnnnnnnnnnnnnnnnnnnnnnnnnnnnnnnnnnnnnnnnnnnnnnnnnnnnnnnnnnnnnnnnnnnnnnnnnnnnnnnnnnnnnnnnnnnnnnnnnnnnnnnnnnnnnnnnnnnnnnnnnnnnnnnnnnnnnnnnnnnnnnnnnnnnnnnnnnnnnnnnnnnnnnnnnnnnnnnnnnnnnnnnnnnnnnnnnnnnnnnnnnnnnnnnnnnnnnnnnnnnnnnnnnnnnnnnnnnnnnnnnnnnnnnnnnnnnnnnnnnnnnnnnnnnnnnnnnnnnnnnnnnnnnnnnnnnnnnnnnnnnnnnnnnnnnnnnnnnnnnnnnnnnnnnnnnnnnnnnnnnnnnnnnnnnnnnnnnnnnnnnnnnnnnnnnnnnnnnnnnnnnnnnnnnnnnnnnnnnnnnnnnnnnnnnnnnnnnnnnnnnnnnnnnnnnnnnnnnnnnnnnnnnnnnnnnnnnnnnnnnnnnnnnnnnnnnnnnnnnnnnnnnnnnnnnnnnnnnnnnnnnnnnnnnnnnnnnnnnnnnnnnnnnnnnnnnnnnnnnnnnnnnnnnnnnnnnnnnnnnnnnnnnnnnnnnnnnnnnnnnnnnnnnnnnnnnnnnnnnnnnnnnnnnnnnnnnnnnnnnnnnnnnnnnnnnnnnnnnnnnnnnnnnnnnnnnnnnnnnnnnnnnnnnnnnnnnnnnnnnnnnnnnnnnnnnnnnnnnnnnnnnnnnnnnnnnnnnnnnnnnnnnnnnnnnnnnnnnnnnnnnnnnnnnnnnnnnnnnnnnnnnnnnnnnnnnnnnnnnnnnnncaggatgatcccagcctccaacaaggccttcgtggtcaacaacctggtgtctgggaccggctacgacttgtgtgtgctggccatgtgggatgacacagccacaacactcacggccaccaacatcgtgggctgcgcccagttcttcaccaaggctgactacccgcagtgccagtccatgcacagccagatactgggcggcaccatgatcctggtcatcgggggcatcatcgtggccacgctcctggtcttcatcgtcatcctcatggtgcgctacaaggtctgcaaccacgaggcccccagtaagatggcagc

SEQ ID NO: 43093 - DNA, 1264 bp, Macaca Mulatta
  misc_feature (1)...(1264): n = A,T,C or G
gggacacttgctcgatttatcacaaccctttcacgtggaccccttaaagctgtaaggctttaaaaaaggccaagaatttctttctcggggagctcgactcttaagacgtgagtctgccgaggctcccggccaaataaaaaacctcttccttctttaatccggtgtctgaggagttttgtctgtattcatcctgctacatttcttggttccttgactgggaagcgaggtgatttacggacggtagaggcagccccttaggcagcttatgcctgccctgtaggcggactctggccagcttgggcggatcctgagatgtacatcctgagatgaggatcctgagaacgctcccgggtaggcatttgccacagtggaacgtctcgtcaggaacgtctcgtcagagcagtgcacagcagacccccatggaggatcaacacagtggctgaacattgggagggcactggcactttaagtccagacatctgaaacttgttgcaggtgttgtgtctttaatccaccacagtcagataacactggcagctcaggacaatggaccagccagcaggatgcagatcacccaacccagcccatccctgggatgagaccaagctgcctgctgagaatgacagccctgcctctagtcacacaaccagcagcttgactagttctaccgcacgggccgaagacttgggggaatcattcaagcaagttaaaaatgtaagtttaaaaatacctttaagaaataaaacggggttttccccaatttggtgtcctgaggggcttggtaaattcaaacccctttttttttcccacagggctaaaggggaacccttcctctttttggttcgcaccttggcctggggggattattgggaaaattaatctcccttgggtacaacaacttggagtgtttgtgggattgggtttgtagaaaaacccccaccacccatagagaaccatttgtgcctttcggagaaagaaaaccaacacctatattatttataagggggggttcccccgccactcgtggtacacaaanttaaccaaatctcttaggggaaaaaacccacatagaccaccgttttaattgcgctccgaccggaaacaattttcccgcaaaatcatttttaatatcccttctccttttaaaacatatataacccccgagaatgttttagcccaaaaaccccctcctctttttgcgcggatgggaaataggtgaaaaaaaccttattttcctccacgcggggtgtgaaaacatttttcg

SEQ ID NO: 43094 - DNA, 657 bp, Macaca Mulatta
catgtaacagatggatgttactgcatgctgattacttcttcgagccagtacttttttgattgtgtaggatctttgtctcttcatctttgaatgcaattactggaaaataaaaggagttcatgtagtttttgtccaggcttgagtcaccatgagtagtagtttaggaaaagaaaaagactctaaagaaaaagatcccaaagtaccatcagccaaggaaagagaaaaggaggcaaaagcttctggaggttttgggaaagagagcaaagaaaaagaacctaagaccaaagggaaagatgccaaagacggaaagaaggactccagtgctgcccaaccaggggtggcattttcagttgacaatacgatcaaacggccaaacccagcacctgggactagaaaaaaatccagcaatgcagaggtgattaaagaactcaacaaatgccgggaagagaattcaatgcgtttggacttatccaagagatctatacacatattgccatcatcaatcaaagagttgactcaattaacagaactttatttatacagtaacaaattgcagtccctcccagcagaggtggggtgtttagtaaatctcatgacattggctctaagtgaaaattcacttaccagtttgcctgactctcttgataacttgaagaa

SEQ ID NO: 43095 - DNA, 331 bp, Macaca Mulatta
acaaagaccgatatctccaagatgaaccggaacatcagctggctccaggctgagattgagggccttaaaggccagagggcttccctggaggccaccatctcagatgccaggccgcactgggagctgaccattaaggatgccaatgccaagctttctgagctggaggctgccctacagcagaccaagaaggacatggtgtggcctctgcatgagtaccaggagctgatgaatgtcaagcttgccctggacatcgagattgtcacctacaggaagctctggagggtgaggagagctggctggagtctgggatgcagaacatgagtatccatat

SEQ ID NO: 43096 - DNA, 495 bp, Macaca Mulatta
  misc_feature (1)...(495): n = A,T,C or G
ggcttcaaagaaaactgaggaatgatacaatttggtgcccatatgggaaaaacaactgacttgaacttcacactgtaaagagcaattctaggtaaactacagatctaaatgggatgggtaaaaatataaagtgtgtggaggataatccaagagaatatcttcaagatttcagagaaaagaaatctaaacacttacacatgggtactaagccccccaaaaaagaatgatacattttacaacattaaaattaagatcttgtgttatcagaagaaaccattaggagaatgagaaggaaagttacacacacagtgggaaaggatttttaacacctatgactgacgaaaagcctgtatccaaaagaatatatagaacttcacnnnnnnnnnnnnnnnnnnngnnnnnnnnnnnnncccttcttcaaaacaactaaaaccaaaaaaccaacaacccaaaaagcnnnnnnnnnnnnnnnnnnnnnnnnnnnnnnnnnnnnnc

SEQ ID NO: 43097 - DNA, 693 bp, Macaca Mulatta
  misc_feature (1)...(693): n = A,T,C or G
cacaggaggctatctgtagccccaagctgactttctgttggacaccactttagtctcgggctgcaagccatcccagctgaggtgaagtggactccaggcaggaaatggcttgcccagttccagtccctttcctttgctcagccctctctgttctgctgatcgtagggatgtgcagggctgggagctggcactccccgagtggggaggtgacagcttgtcacagtagccaggcttgggtgggttcagcactggctcaggaccgtgtgtcacacatctatagtaaaccagttctctgggagggaaaaaaaagccctgatttgttgcatttgggcagtttctatggtgtaaattctcccagcagtggcccatgtcatactcccagcatcgctgaatgcactgaactcagagtcgggaagagatgcacataatcactctcctggtacacctcatacctcttccctgcctccccatccctgtagctacacttgcttgccttctatggggttgaaatgttgaagtctcaactgtctctgttcacaagagccaccaaaaggtaggggacttccgtcctagcccctagatggccgccctgaagctctctgggatcctcaacaataaagccaccttannnnnnnnnnnnnnnnnnnnnnnnnnnnnnnnnnnnggtacccattcgccctaggtgagtcgtat

SEQ ID NO: 43098 - DNA, 304 bp, Macaca Mulatta
cagactctggctttgataccagattcaccataggctgaaagctgcggttcttcggtgggagctcctcttacgcagcctcggaactcttcccagggcaaaagtacgatggaccccggtgggcatgtggagcttgggagtcactgtctacactatggtgtccggggcctgccatctgtcggacagacttttgtggggctgaggacgacactaatactgtgtgaatgatgacaggagatcccgtttctcatttccatagaactagaacgcctcataaacacatttctggtccttgactccagggagg

SEQ ID NO: 43099 - DNA, 411 bp, Macaca Mulatta
atcgcaggagcaagacgctgtcctcgggtccttttaaatcactgtgcaatggaggggaaatccctgccctctcttttccctttccgtaaacaacgaggtagaggatgcccccctcccacgagccccgccctcggatgccccgcctgtccccgcaggtgcgcagcgtggccgtgacgcacaccttccagatagccaaggctcgcgcccagcttggctatgcgcccgacaagttcaagttcgccgatgcagtggagctatacgtgcagtccactacacggcggccccgcggctccactgcgcggaccctcctgcggctgctgctcgggctgctgctgttcctcggcttgctcgccctggccctgcacttcctaggcctgcagcctctgcactcctccgtggagcgcctgtgac

SEQ ID NO: 43100 - DNA, 202 bp, Macaca Mulatta
catgaactctacatgtataagtagagttagtcagcccttaccagcatataaggaaaaacagtatgaggccattaacagtgatagtttagaatttattaacattgactctactgatggtggtattcaagcttccctaaaattcacaatcagttattttcagactcatacgacatcttttcctgattcttcggcattatttctt

SEQ ID NO: 43101 - DNA, 685 bp, Macaca Mulatta
  misc_feature (1)...(685): n = A,T,C or G
tctccaaatggtgtccttgtggtactctcagtttaacattgtcattttcctgtggaaatgctgggaaacacaatatgtggaagttaaacaacatactcctaaataactcatgggtcaaagaacaaagaagaaatcaaaagagaatctgaaaataatttgagaggcaaaaagtactttgaaaggaggaaaaatgaagacacaacataccaaaacttaggggatagaactgaagcctcctgtgtacagaatagaggggacttcaaaaagttcatggaaaattattaaattaaaagataaaaatgaaaaatataagctttatttttcaacataagctccatcaagtccaagacacttttgtaaacaatgataccagccatttaatcttttcctaaagaacgcagggtcctgggaatgtaaccatgtcaaggcannnnnnnnnnnnnnnnnnaaatggagtctcactctagcctaggcannnnnnnnnnnnnnnnnnnnnnnnnnnnnnnnnnnnnnnnnnngccacagagagggacagtggcttgctgacttgtcggagccaggatttttacctacgctgtctgctttagagcctgtgtcatgaacctctctccagttctataagccaacttcttttaaaataattataataataacattttgtgttctaattataaaactaagtcat

SEQ ID NO: 43102 - DNA, 791 bp, Macaca Mulatta
  misc_feature (1)...(791): n = A,T,C or G
gggttacattangaaaaacatcaataattcatatttaagtttctagtagttactactgatttgataatcacttaaattttatatatcttaatgtatttttcagactcctaattcccacattcactgtacctaggggcctggtccattctgttaggattatatcctctccttagaaatgttttccatcttgttgtggggatttggtattaatgtttcttcattgattatgaaacttttgttccctgaaactaattgactttgtctaaagttaaagaaataaggcagaatgattgttgtagcctgctcaaactgatacaagtccctgaaaccatgattggcatatgttagataacaaatgaggatgtctaagaggcatatgctgctttggaggtgtagtgaacgggtgtacagaagttttcaatcttaactatatagtgttagtgtgatgctatactattggaaaaataccaacttttttctattttataagttgtatgcatgaacataagatttgtaatgtttcattgataaactgccttcttcgagacatggtaataagtgggtttccccagaagatgggagaagtagggtccttccgaaaatgttcgagaatattggcttagcagtaaataaggttgcttaaggcgtggttggaagattggctaagaatgcctttgtgtcggggggcttcgcgtttgttggaaattcccacccaggggggctggttagcaagcgaaccacctcacgacagagaaccgacgacgggagcagacaagaggccgcgtgcagag

SEQ ID NO: 43103 - DNA, 210 bp, Macaca Mulatta
ctggctgccgtgctgggccctgctgggacagtgtgctggacttggagccccttgtagtatggcttttcacaccggcttctacaccacttcaactggaagatccacctccccactgccttttctcactcagatggggacaccgaagtccagaggaaaagacacctgtcccacgttactgatctgggaggggactcaggacctatcatgcca

SEQ ID NO: 43104 - DNA, 620 bp, Macaca Mulatta
  misc_feature (1)...(620): n = A,T,C or G
gggggcagctactggaagagagaggagcatatcagttgtttaaaacaaaaagccagtgttaacaggctcagagaaatgaagttgaaaggaatagttgtagctgctgaatagaagcgaaattccaacgtggttccattaaaatgacttctcagcgatctctccctgcagatgacttcgtgcagagtgcacagattactatgatacccttccagttaaggaggctgatgggagccagccctgttctcagggcgtcactggcttgcggaacttgggcaacacatgctacatgaatgccatcttacagtgtctctgcagcatctcgccgctggtggaatacttcctctccgggaagtatatcactgctnctcaaaacgattgcagtgaggttgccactgcttttttgctacctgatgacnaacatgtggctgggaaactcagactgtgtctcaccaaaaatattccgtcagctctgggcacctcttacccggcttttcaaaaaaacccacagatgccccggaattctgattttggccaaaagaatcctgaaccctaaaaagtcccctcccccgaaaaatccccaaaaatttgcccaaaagccgggagggtttccccgaaccccc

SEQ ID NO: 43105 - DNA, 1366 bp, Macaca Mulatta
  misc_feature (1)...(1366): n = A,T,C or G
agatttaccaaaaatttatctcctgacaagataaatctaagtacccttaaaggagaaggtgaactgaagaatttggagttagatgaagaagtgctccagaatatgttggatttgccgacatggcttgctatcaacaaagttttttgtaataaagcgtccatnnnnnnnnnnnnnnnnnnnnnnnnnnnnnnnnnnnnnnnnnnnnnnnnnnnnnnnnnnnnnnnnnnnnnnnnnnnnnnnnnnnnnnnnnnnnnnnnnnnnnnnnnnnnnnnnnnnnnnnnnnnnnnnnnnnnnnnnnnnnnnnnnnnnnnnnnnnnnnnnnnnnnnnnnnnnnnnnnnnnnnnnnnnnnnnnnnnnnnnnnnnnnnnnnnnnnnnnnnnnnnnnnnnnnnnnnnnnnnnnnnnnnnnnnnnnnnnnnnnnnnnnnnnnnnnnnnnnnnnnnnnnnnnnnnnnnnnnnnnnnnnnnnnnnnnnnnnnnnnnnnnnnnnnnnnnnnnnnnnnnnnnnnnnnnnnnnnnnnnnnnnnnnnnnnnnnnnnnnnnnnnnnnnnnnnnnnnnnnnnnnnnnnnnnnnnnnnnnnnnnnnnnnnnnnnnnnnnnnnnnnnnnnnnnnnnnnnnnnnnnnnnnnnnnnnnnnnnnnnnnnnnnnnnnnnnnnnnnnnnnnnnnnnnnnnnnnnnnnnnnnnnnnnnnnnnnnnnnnnnnnnnnnnnnnnnnnnnnnnnnnnnnnnnnnnnnnnnnnnnnnnnnnnnnnnnnnnnnnnnnnnnnnnnnnnnnnnnnnnnnnnnnnnnnnnnnnnnnnnnnnnnnnnnnnnnnnnnnnnnnnnnnnnnnnnnnnnnnnnnnnnnnnnnnnnnnnnnnnnnnnnnnnnnnnnnnnnnnnnnnnnnnnnnnnnnnnnnnnnnnnnnnnnnnnnnnnnnnnnnnnnnnnnnnnnnnnnnnnnnnnnnnnnnnnnnnnnnnnnnnnnnnnnnnnnnnnnnnnnnnnnnnnnnnnnnnnnnnnnnnnnnnnnnnnnnnnnnnnnnnnnnnnnnnnnnnnnnnnnnnnnnnnnnnnnnnnnnnnnnnnnnnnnnnnnnnnnnnnnnnnnnnnnnnnnnnnnnnnnnnnnnnnnnnnnnnnnnnnnnnnnnnnnnnnnnnnnnnnnnnnnnnnnnnnnnnnnnnnnnnnnnnnnnnnnnnnnnnnnnnnnnnnnnnnnnnnnnnnnnnnnnnnnnnnnnnnnnnnnnnnnnnnnnnnnnnnnnnnnnaacagagaaggactaccctctgaaagggacatgcagaacaccttcagtattttctcaacaatcaaaagctaagctaatgtctagttctgttgtggttagacttgcagatttcaatatataccagg

SEQ ID NO: 43106 - DNA, 462 bp, Macaca Mulatta
  misc_feature (1)...(462): n = A,T,C or G
ggggagaaacactcatgccatctgtgctgggctgtctggaccaagaaggtttggatagagggcggactttcctgtggagtcaaaggccagccgcactgccctggctcagggtaaagatttttaaggtagctctacctccatgcagcaacttctcacatggtgtcttagaagaggtgcagaattatcagacctgagtgtcgatccattcaaactctgagtgtttccagacaagaagaaggcacctccatgacctgttctaccccattagctaccccagagatggagggaaaaaaaagttacacgaggagaagaatcaagaacaaaggatgatttctctccttagacctacacagaagtgctctacttgacttcccaaggatgacagcatgctcttccagctggtatctccattccaaccatttaaatnnnnnnnnnnnnnnnnnnnnnnnnnnnnnnnnngtg

SEQ ID NO: 43107 - DNA, 914 bp, Macaca Mulatta
attctttctgctgatgataaaactgcttgactttgggatcatgctactctgacagaagtgaaatctctaaattttaatatgtctgttaatgatataaaaatatattcctgaaattttggttataacttatggacaatcgattgcttttcatagtgcagtaagtttgaacccaattaaatcctttgaagctcctgcaaccatcaattctgcatctcttcatcctgagaaagaatttcttgttgcaggtggtgaaatttttaactttgtaagtatgattataaccatggagaagaattcgaatcctacaagggacactttggtcctactcactgtgtgagatttagtcctgatggagaacactatgccagtggttctgaagatggaacattgagactagggcaaactgtggtaggaaaaacttatggcctttggaatgtgtgcttcctgaagaagagagtggtgagctggcaaagccaaagattggttttccagagacaacagaagaggagcgagaagaaacggcttcagagaattctgattacatctattcttcaactcctaatgtgaaggcctgagggtcaatcatatgacgcagttagtatccaacttatggactaaaacgagcaagcagagaaaagcatcagccttccagagttactctctgcttaaggcagaaagagcagtaaataatggggaaaataaattagctccagtgctggaacaattaacttggtgttacctttaagtcaaaactcaagagtatcagatgaagagaggtggagttatcctcttgtagtacagtggcctgttatctttttaatgactatatacaagccaacatccaatttctcttattacaattagggttcttgtagctgtttatgttattatggagaagaaaatattggcttatt

SEQ ID NO: 43108 - DNA, 758 bp, Macaca Mulatta
  misc_feature (1)...(758): n = A,T,C or G
gnnnnnnnnnnnnnannnnnnnnnnnnnnnnnnnnnnnnnnnnnnnntgatccgcccannnnnnnnnnnnnnnnnnnnnagattacagttgtgagccaccatacccggtcttagataatggatattccattaaaatgctgatacttttcgatgtatttgatcggttcatccagtaaaaacttgattcttcaaactaatatagctacagtctaaaggaaattgaatttgttggacaccaactaggcttttcagtgtaatttaggatataaattactataggaatacacatcatttaattcctgcacatttgccaacaaagtagatgttaaatcaaaatgctattgttggaatgaaacggatgctgccttgtcctttgatctcattctggggacttttgaaggtgtgtaggttgctataggctttgtacaccactgttggtttattactaaccacctcttttaaaaattaatgagcctgttggttaacttagtgcttcaggtcacactgatccatcagatgaatcacaagtgaggtagcactctcaggctctatcaacttcctgtcaacattttccttggaggcatgaaatgctagattagaaaaagccctggcccctgttgcccagagtgctgcatctggccattgacctgggggcatcgggtgctactttaaccagttgagcagagcaaaccctttctgctatgtatccatagttgggacaaaaaagaaaccaccactttgtcttccaaacctcaaaa

SEQ ID NO: 43109 - DNA, 716 bp, Macaca Mulatta
ggctgtccatgcccttgccttaactttcaaatctgataaaaacaacatttataaaatatctgtcttagaaatattagctaaaattatattggggaaagtatgtttgaaaatagaattgtaagccactacatcgtgatattactaaatgtgtttattgacttgtcaggaagcaagaaaatgaattaaagaaaactccagagaatgagctgacaacttactccctggtcagtggctctccatgcctacctgtggtttcttggacacccttgcagaagatgacttcctgggaactcttctgagagtgaatgttatcagcaaattcccgaaacaacaccccttagacaaaaagcctcctcacctatgcattgcctaggccacccactaaaggtgatggccacaaagaggtggatttgttgagttggtgccattccttctactgccagcttcaccaaaacaatgattcagtcttccttatgcatggggactcttctctttcctgtgttgcagtggatacctcctgcagataagaaatgcttaactgagaaatgctcatgttgggatatcatcgatgagactttaattggggcatggtgactgtttcccttgctgccacttgactcaatccccaggagcctcagtagagggataaaatattacacaaagatgcctcaaaatgggtgggaatttgctcaagtggcttcccataaaaataataa

SEQ ID NO: 43110 - DNA, 599 bp, Macaca Mulatta
gagtgggtagggaagaaaagaactcattgcctggcatgcaatctggtcatagatgccaagaaaatgatctgtgcacactgattttatcatttagacaggcaagattcagtacccaagagtggtgcagggcagttgtaattttggcagtaatcagcatctgaggtaagttatgcgtgaaacctgcagatatctttctgcatttatgtcattcattcgtgtgagacatgcttcactgtaagttaccatatttagaagatggtcagttttgcgacagttttcctggaggtgattccaaatgattcttgacatgattatcctcagaacaaaaacagtaaatcaaccatttcttccttattttctcaaacagggataaagaagaaataacctttagttgacccaccggttacatttctccattttcagtgttcattgagccattggatatcagtgtgaatacagagcagtacatacatgacacttgcacttctctgtttaacaccttagagtttacttgcagtccttctaccaagccaagaatcaatatttctaaggcaagaatcatttaggatcgtatgttacataatataaaagttatttaa

SEQ ID NO: 43111 - DNA, 809 bp, Macaca Mulatta
  misc_feature (1)...(809): n = A,T,C or G
ggnnnnnnnnnnnnnnnnnnnnnnnnnnnnnnnnnnnnnnnnnnnnnnnnnnnnnnnnnnnnnnnnnnnnnnnnnnnnnnnnnnnnnnnnnnnnnnnnnnnnnnnnnnnnnnnnnnnnnnnnnnnnnnnnnnnnnnnnnnnnnnnnnnnnnnnnnnnnnnnnnnnnnnnnnnnnnnnnnnnnnnnnnnnnnnnnnnnnnnnnnnnnnnnnnnnnnnnnnnnnnnnnnnnnnnnnnnnnnnnnnnnnnnnnnnnnnnnnnnnnnnnnnnnnnnnnnnnnnnnnnnnnnnnnnnnnnnnnnnnnnnnnnnnnnnnnnnnnnnnnnnnnnnnnnnnnnnnnnnnnnnnnnnnnnnnnnnnnnnnnnnnnnnnnnnnnnnnnnnnnnnnnnnnnnnnnnnnnnnnnnnnnnnnnnnnnnnnnnnnnnnnnnnnnnnnnnnnnnnnnnnnnnnnnnnnnnnnnnnnnnnnnnnnnnnnnnnnnnnnnnnnnnnnnnnnnnnnnnnnnnnnnnnnnnnnnnnnnnnnnnnnnnnnnnnnnnnnnnnnnnnnnnnnnnnnnncccnnnnnnnnnnnnnnnnnnnncccttcccaataattctcctacaaatccaccctaatttctgaaatttcttggccccccgagcctaatttatattccaacattcaattttgaaaaccccccctaatttcccccccctaattattcctttactaaaatgggggccacaccaatcaaaaagcccttaaaggcaaggaaaccaaattttctaattctaaaacacctaagccgggctcctttatacccttaatctt

SEQ ID NO: 43112 - DNA, 79 bp, Macaca Mulatta
gtcagacccagtcaggacacagcatggacatgagggtccacggtcagttcctggggctcctgctgctctggatcccagg

SEQ ID NO: 43113 - DNA, 798 bp, Macaca Mulatta
  misc_feature (1)...(798): n = A,T,C or G
gggaaacagctgtgaagctcatagtccagaggtataagtacactaaaaaactgagacctaatcagagaaccattcccctcccagcacactttaccatcacattactaaaggcctatttatagcaattccttttaccatgtacatcatgtttggttatcagaaagttacaagttatactaataaggcactaaaaacaatttgatgagacataagcaagcatcagaaccagatgtggcagggatgttagaattaccagactgagaattttaaacaaccatgattaatatgttgtggtctttaatggataaatggacattatgcaagaacagatgggtaatgtaagcaaaaagatggaaattcgaagaaagaacaaaaaaaagttagaaatcaaagtcactgtgtagaaatgaatgcctttgatcagtgtattagtggactggacatgactgaggaaagaatctctgagcttatggatatatcagttgaaacccccaaaactaaaaagcaaaaagaacaaattctgaaaaataaaagaacagcatttctaaggaccatagggcaactacaaatgatgtaaatacacataatgggacagacagaagagagagaaaagaatactggaaatatttgaaagtataatgactgaaaatttccacaaattattatcagaaacgaaatttgtacaaagctacttgaggaaaactacaaaattatcttgaaagaaaccaaagaactaaatgaatagatataccatatttcatgggatagggaaagcttaaatnnattgtcatgatttcc

SEQ ID NO: 43114 - DNA, 730 bp, Macaca Mulatta
  misc_feature (1)...(730): n = A,T,C or G
taggacttctctcaaacttgtgtgctgagnnnnnnnnnnnnnnnnnnnnnnnnnnnnnnnnnnnnnnnnnnnnnnnnnnnnnnnnnnnnnnnnnnnnnnnnnnnnnnnnnnnnnnnnnnnnnnnnnnnnnnnnnnnnnnnnnnnnnnnnnnnnnnnnnnnnnnnnnnnnnnnnnnnnnnnnnnnnnnnnnnnnnnnnnnnnnnnnnnnnnnnnnnnnnnnnnnnnnnnnnnnnnnnnnnnnnnnnnnnnnnnnnnnnnnnnnnnnnnnnnnnnnnnnnnnnnnnnnnnnnnnnnnnnnnnnnnnnnnnnnnnnnnnnnnnnnnnnnnnnnnnnnnnnnnnnnnnnnnnnnnnnnnnnnnnnnnnnnnnnnnnnnnnnnnnnnnnnnnnnnnnnnnnnnnnnnnnnnnnnnnnnnnnnnnnnnnnnnnnnnnnnnnnnnnnnnnnnnnnnnnnnnnnnnnnnnnnnnnnnnnnnnnnnnnnnnnnnaagctaatcagaactatgctggtgccaaatttagtgagccaccatcaccaagtgttcttcccaaaccaccaagccactgggtccctgtttcctttaatccttcagataaggaaataatgacatttcaacttaaaaccttacttaaagtacaggtataaagtaagacaaatgttaaaattatgttcgcgggtagttgtcaattggtctgaaacattcgctaaggaattaatctatttgtgtagaac

SEQ ID NO: 43115 - DNA, 719 bp, Macaca Mulatta
  misc_feature (1)...(719): n = A,T,C or G
ggggtttcaagtgagaatcctggcctttaccaacagatctaaattccagtttcagctccatcatttctcactggagtgatttcagacaactctttgaggcagaaaatctccattagtgtggagttgtcatatgcatttccagaaacgaaatttccaagaaagaaaatctgtgcaaagaaaccgacacttaaaattttatatgaaaagaaagtcataacagatattctgtggaattatagttattctagtatgatatagcctagttaaagtggttttaagtgcagtagagtgaaatatttggatctttttgtgttcttaaatgtcttctaagtcttaaatgtcttttaaatggggcttatacttattcattgccaagacctagatttatgacatgaattaaagaaaaacatatattttaaccaaaataaaaaatacacctctggaactctaaaaataaacagagaagtctaaacttttgaagatagaagttgctgaaagaatggatcataatcaagggaaaataattgaagagccaagagatttctcatcagcaataccagaagactatggngaaaaatgtcttcaaatctngaagtcaagtactctggcctagaagattatactttagccaaattaccctaaccgaggaagaagaaggaaggaattttggccctagataattgtttatttttccccaaattttaacggaattggaaaaa

SEQ ID NO: 43116 - DNA, 264 bp, Macaca Mulatta
  misc_feature (1)...(264): n = A,T,C or G
gctccgggagcaacgcatctcctcacgtgnnnnnnnnnnnnnnnnnnnnnnnnnnnnnnnnnnnnnnaaaacggttgacaagcggacacatgacccaggcacagacgcagagggaggctcaccaaagataggccgacatgcnnnnnnnnnnnnnnnnnnnnnnnnnnnnnnnnnnnnnnnnnnnnnnnnnnnnnnnnnnnnnnnnnnnnnnaccgacagagagagggcaagaaactcacagagtgtgagagacagacagagaag

SEQ ID NO: 43117 - DNA, 850 bp, Macaca Mulatta
agctcttccctggccaggcggcagaactttctttctcacttgccagggagccattccttctgcagctgtctcgcaggcatggacaacctgcgcgagactttcctcagtctcgaggatggcttgggctcctctgacagccctggtctgctgtcttcctgggactggaaggacagggcagggccctttgagctgaaccaggcctccccatctcagagcctttccccggctccatcgctggaatcctattcttcttctccctgtccagttgtgactgggctgccctgtgagcatggcggggccagcagtgggggcagcgatggctgcagtgttggtggggccagtggcctggtagaggtggactacaatatgttagctttccagcccgcctacctgcagggtggtggtggccccaaggcccagaagggcaccaaagtcaggatgtctgtccagcggaggcggaaagccagcgagagggagaagctcaggatgaggaccttggcagatgccctgcacaccctccggaattacctgccacctgtctacagtcagagaggccagccgctcaccaagatccagacactcaagtacaccatcaagtacatcggggaactcacagacctcctcaaccgcggcagagagcccagagcccagagcgcatgaactccgtccagggaaactgaccggttccaccctcccgggcaggagtagaggagctttgaagacctggatatcttattgaacaatgattggcgtggagtgatttttatgtagtaagcgtggtaatcttgtgatctgcaaaacactaagggaattcacatctgacctgttggagccaccggaacacttacct

SEQ ID NO: 43118 - DNA, 749 bp, Macaca Mulatta
aggcaggaaattgtgtttgtctttctccttggatttaaaaaagaaacgagcaaaacagcaagaagttttccagggagggagaaaaacagcccagctaaactcccctcaccggggttaacaggattgctgacagatcaagcccacgtgatggtcaagaaaagaggctcaagctgatgaaaatccaagaaatcttcttaggagccttcctttctaaatgtaaatgactgagtcattgctttgctaaggagggaaggaagttacaatcacaccaagtgactcattcattgctgttagctctggcagttggataaaaagttttagcaaaagcagcaacaaatgtacttgaaatactagcacagtaagggaattcctctctttcaggatgaatgccatccacacaaaagagctcctgttgacatctcatttacaatctcccccaggacacagacaagaccctttcaataaactcggctcagaaacacctattgttcaaaatcttcaactcgccacaggctaccaccactccctacggctttgcaaaattaaagatttagaagaaggatggggacggtggaagctatgaaaagaggcaggaaaaaagcccctttgacccgatgctgtcagagagcgtgcatgaagaagaaagttaatggtatttccatttatataagaagtgcctaagaaatgcctgtgacgttcgtgaactagtgattgtgaattccaaatttgatgccaactttatgtgtaaa

SEQ ID NO: 43119 - DNA, 805 bp, Macaca Mulatta
ggccaggaatgcaggaagtgcttcaggacaggattacggcacactggcaagaacggccctgccggctcatgtgttgttggtactctgtgtgcctgtgcctgtgcctgtcccacaatgaatgtttcgggcattctccccttcttacccccttcccacatctcaaacaaaagagggaaagagtgcagctcagagtgtacagaagtgccctggcttgatcccataatcacacaaagcaagccccaccttggatcttttaccatctcgcctttgaaaatcaacagaaagctcatcccacccttcccttgcttataaagcacttttatcctttcaacagtcatcatctcttccctgggccaggcactaggaataccaaaaacaccaccaacaataatagtaaacatttacaggttcttcctatgtgccacgagctctgctaaagactttatgtgcattttcttacttaatcctaacaacaacctagggaggtagatgctgtggttatttccatttttacagatgaggaaactgaacctcagaagaattcatccaaagtcacacccagcctggtgaatggggccaagtatttgaaaatcagaatcccaggtggcgaaaccccacatgaacttttccaagaactaacctcagaagtcccagtaaaaatggggaagaacaccatgaaatttttggttattaaggccagggcgtgggtggcctcctggcccggttaaccctttaacccttttttgggggggccacaaggtgaactgaaatccccctttgaaacctggagaaaaatttgccaaaa

SEQ ID NO: 43120 - DNA, 2506 bp, Macaca Mulatta
  misc_feature (1)...(2506): n = A,T,C or G
gtgagcaacggggtgctgcagcagctgtccccggcctctgagagcagctccagcgtctcttcgtgcgcctccagcgccccctacagctcaggctccctgccctcggaccgcctggacgactgcttggggccggaggagcccggcggccgcggcccaggctgggggcgggccgacacagccatgcagacggagcctgatgccgggggccgggtggagacctggtgcagcgtgcggcccacagtcatcctcagggacaccgccatccgctcggacagcccccaccacggccgccgccttgactctgccctctctgagtcccccaagacggccttgctactggccctcagccgaccccggccccctattacgcgctcccagagccacctgaccttgtgggnnnnnnnnnnnnnnnnnnnnnnnnnnnnnnnnnnnnnnnnnnnnnnnnnnnnnnnnnnnnnnnnnnnnnnnnnnnnnnnnnnnnnnnnnnnnnnnnnnnnnnnnnnnnnnnnnnnnnnnnnnnnnnnnnnnnnnnnnnnnnnnnnnnnnnnnnnnnnnnnnnnnnnnnnnnnnnnnnnnnnnnnnnnnnnnnnnnnnnnnnnnnnnnnnnnnnnnnnnnnnnnnnnnnnnnnnnnnnnnnnnnnnnnnnnnnnnnnnnnnnnnnnnnnnnnnnnnnnnnnnnnnnnnnnnnnnnnnnnnnnnnnnnnnnnnnnnnnnnnnnnnnnnnnnnnnnnnnnnnnnnnnnnnnnnnnnnnnnnnnnnnnnnnnnnnnnnnnnnnnnnnnnnnnnnnnnnnnnnnnnnnnnnnnnnnnnnnnnnnnnnnnnnnnnnnnnnnnnnnnnnnnnnnnnnnnnnnnnnnnnnnnnnnnnnnnnnnnnnnnnnnnnnnnnnnnnnnnnnnnnnnnnnnnnnnnnnnnnnnnnnnnnnnnnnnnnnnnnnnnnnnnnnnnnnnnnnnnnnnnnnnnnnnnnnnnnnnnnnnnnnnnnnnnnnnnnnnnnnnnnnnnnnnnnnnnnnnnnnnnnnnnnnnnnnnnnnnnnnnnnnnnnnnnnnnnnnnnnnnnnnnnnnnnnnnnnnnnnnnnnnnnnnnnnnngcggcctaactggctgctgacagaacccctgagccgagagcaccctccacatgtccaggtccggggccaggctcannnnnnnnnnnnnnnnnnnnnnnnnnnnnnnnnnnnnnnnnnnngggtcaaggcaagtctccgggtagacgctccccgtcccctgcgcctacccctgcccccagcatggccaatgggcgctaccacaagcctcggaaggccaggccccctctaccacgatctctggatggggaggcagccaaggtgggggccaagcaagggccctcggagaatggaactgaggggacggccgaggaggcagccatgaagacccccagtggcgagctgaagacagtgacactgtccaagatgaagcagtccttaggnnnnnnnnnnnnnnnnnnnnnnnnnnnnnnnnnnnnnnnnnnnnnnnnnnnnnnnnnnnnnnnnnnnnnnnnnnnnnnnnnnnnnnnnnnnnnnnnnnnnnnnnnnnnnnnnnnnnnnnnnnnnnnnnnnnnnnnnnnnnnnnnnnnnnnnnnnnnnnnnnnnnnnnnnnnnnnnnnnnnnnnnnnnnnnnnnnnnnnnnnnnnnnnnnnnnnnnnnnnnnnnnnnnnnnnnnnnnnnnnnnnnnnnnnnnnnnnnnnnnnnnnnnnnnnnnnnnnnnnnnnnnnnnnnnnnnnnnnnnnnnnnnnnnnnnnnnnnnnnnnnnnnnnnnnnnnnnnnnnnnnnnnnnnnnnnnnnnnnnnnnnnnnnnnnnnnnnnnnnnnnnnnnnnnnnnnnnnnnnnnnnnnnnnnnnnnnnnnnnnnnnnnnnnnnnnnnnnnnnnnnnnnnnnnnnnnnnnnnnnnnnnnnnnnnnnnnnnnccatgacccttcccctaacttcagattcccacactgactccaacatcccattatccccaggatctattctaccaacttcctcaggactgtccggttcctgcctgcccacccttcctcataccagtgccacaatggtggctcacatctttccactttcttccttcgtcagctgtcattaaggctcttccttagtgtccaaggacaaggtgttagtgggcagcgtgtgtcatccgcactcacgactcccctatctcacaagccaggaaagggggtaagaaacccaaggtctggaccttgggattggtggtcactttctcacacgccgcctcttactttgtaagtcatccaagcctccagggacacaggctgtcagacagggccctcaaggggtcaaagtatccattcctcagccccaagcagcattctgtgcaaggaaaaggattaaaggcttttatagtccctgaaatcctgagagaccatttcatgttggggtccattaagacctcagacattctactggatttgtccttccgtccatcaccttttctccccaagagagct

SEQ ID NO: 43121 - DNA, 1353 bp, Macaca Mulatta
ggggctttttcgcaacgggtttgccgccagaacacaggtgtcgtgaaaactacccctaaaagccaaaatgggaaaggaaaagactcatatcaacattgtcgtcattggacacgtagattcgggcaagtccaccactactggccatctgatctacaaatgcggtggcatcgacaaaagaaccattgaaaaatttgagaaggaggctgctgagatgggaaagggctccttcaagtatgcctgggtcttggataaactgaaagctgagcgggaacgtggtatcaccattgatatctccttgtggaaatttgagaccagcaagtattatgtgactatcattgatgccccaggacacagagacttcatcaaaaacatgattacagggacatctcaggctgactgtgctgtcctgattgttgctgctggtgttggtgaatttgaagctggtatctccaagaatgggcagacccgagagcatgctcttctggcttacacactgggtgtgaaacaactaattgttggtgttaacaaaatggattccactgagccaccctacagccagaagagatacgaggaaattgttaaggaagtcagcacttacattaagaaaattggctacaaccccgacacagtagcatttgtgccaatttcctggtttggaatggtgacaacatgctggagccaaagtgctaacatgccttggtttcaagggaatgggaaggtcccccgtaaaggatgggcaatgcccagtgggaaaccacgcccctgctttggagggctctgggactgcatccctacccccaaacttcgttccaaactgaaaaagcccctttgccgcctggcccttttcccaggaaaggtcctaccaaaaaattgggtgggtaatttggggtaacctggttcccctgttttgggccccacaatggggagaaacctgggtggttttctctccaaaaccccccgggtaattggggtgggtctccaacccttttttggcctccacaagtctccaacagctttttcctaccgctggaaaggtaaaaaaatcccctggtccccgaaatattccacccccactggaagcccttttgtaaatgggaagaactctttttcccggtggggaacacaaaagtgtgggggcttttcaaatggtcacataaataagatggttctttgttcaacgggaaagtttttcgcccttgggagcaacactttttcttggggggtaaaccctcaaataaccacccccccctcaattgtgaacacagcccgggggctctccccggcgacccagggggaatatttccctctataaccacctcccagggcccaacaaaagggcgccggggcgggcgg

SEQ ID NO: 43122 - DNA, 613 bp, Macaca Mulatta
gaggaaataggaccttttcttcttaaaagtgctccatattgcagtactattacttaaaagttatttatgaagttggaagccttctagtttgcctaacagtgttgatgtattttgaaaacaaaattgcaataaaggatgagcttccatcggtgtatatgttataccagatacagatggttgcaaggaaacctttccccctacccagaatagtctgttagtaactgctaagtcctggcttgcatttttgaaaatgcttttctgcatgttagcacccagactttcctttgtcatattcctttatagctacaacttaactgtagcttatcagagaagctctgtagtcctacactgaagtgtgttcccttggctgttatatggggctgggtttggttgaacttctattctgtataaatgttagaacacagttactacagattgatttacaaactgcatgtgctggtgcttcaggcagccaaaatggaatgctgtggaaagcatatatctacatcttaaaaaacactcagacaggagttaaggacagctttaataatttttttgtttaccacttaatctttatcaactctgattttagttaggacttagctcatggttg

SEQ ID NO: 43123 - DNA, 325 bp, Macaca Mulatta
aaaacactgactagtatgtgacttatttagcaaaatatttaattacttttcttccatatttttgatagggaaaatgttggtttggagagagtggagaaataatgtcattacctacacctattaaacagtcatggaatttcagactaaacgtaaggaaggaacctttaaatccgttacttaagaccatatacaggaaggtaaccaacaacaatttatttgtaattatggttaaaattcttgtaaaatcaattatatctggtggttttgtggtgatgatttatcctttaaagatactaagtctactaatataatatctaaatcatga

SEQ ID NO: 43124 - DNA, 680 bp, Macaca Mulatta
  misc_feature (1)...(680): n = A,T,C or G
ctaatcacaattccttaacaaatcggtgtaaggaccactgacatatagaacactcaagccaaagaaccatcacagaatttagtaactttagttctgtgaacatgaaaacatttcttttttggtttccaaaggagattatttatttttccacaaggaaaaacatcttgcagagactctgaattccaaatctgagtgannnnnnnnnnnnnnnnnnnctgtttcatcgtggatttctaagcaacatatatacgtgtttttaagacaaccttttgttggcagtgtttttcctgaacaccacatgcaccctaggaaacatgtttttcctttaaagtaatcttgttcacatatcggaaaaggacatgaaatgctcatactggcatataagtttctataagtagttatttttgggctacttatatactgtatccccaaaagctcacagtgccttgttgagattttttttttccatgaaatagccattattttaaatgagtgggagaggataagtctttagacagaggtcattcatcagttcaagactattcctcttcaagaacatgtcaggaattaagtagttgtatgtggaaacactggtaattctttccacagtattgttttggataatctgttctagtatatttaactaattgtatggtggacctgtactctgatacacatct

SEQ ID NO: 43125 - DNA, 144 bp, Macaca Mulatta
tggaaatatacaggctgtcgccctgcgggacatttttgttcaggcccaaaatcgagacagctcaccaccttctctgcagatagaagagccagaatgggagaagcgaagatccatcaacctctctgagctcattgatgtttacag

SEQ ID NO: 43126 - DNA, 845 bp, Macaca Mulatta
ggggctgaatgttgagtgtggacttgactgagagtaagaaatctcacgggaatttttgcattgatgttcatcaaggatattgtcttgaagttttcatttttagttgcatttctgccaggttttggtatcagggtgatgctgacctcataaaatgagttaggaaggactccttccttttcaatttttgaaatagtttcagtagaaatattaccagctctttgtacacctgctagaattcagctgtgaatccatttggtcctgggcttttcttggctagtagactatttattactgtcttaatttcagaactcgttattggtctgttcaggaattcaatttctttctggtttagtcttaggagggtgtatgtgtccaggaatttatccatttcttctagatgttctagttgatgtgcatagaggtgtttataatattctctgatggtttttgtatttctggggggtcagtggtaatatcgcccttatttcttattgggcctatttgcatcttctctcccttcccgctttattacgctagcccaggggcctagccacttctcttatcttttcttccacccaaaccaatcccccagacccgttggaccttgttgagggggccttgccgcgggcctcccccccgggcccagtccgtaacctttgcgcccattttatttgcccttccggcgcctggttagtgccacggcattgcttcgtgcatcccgtggcttcccggcgccgcgtctccgtttcacatctgtagtgttttgggacccttttgttgacgctggtcctccgccccgcttagtggaacacccccttagacgaaccgcacacaccagtaccccg

SEQ ID NO: 43127 - DNA, 1055 bp, Macaca Mulatta
  misc_feature (1)...(1055): n = A,T,C or G
nttttaattttgttggagggactctactcagcaggtgtatatgtttgaacccctcataggtcttgttagagtatattactaatttggccacctattattgtagaggggtttacccggccaggggcatagntctatagtggtgatcctgtaccccgtgggtgttttctctaagagcctaagtgtgttttatcaacaaggtccttattttaactttgcctttgtccctcgcaaagactagatgttattggggggagtttttttatttagggtctcgcatctcgaggggccctatactccataagggttaaggtggggatgagaaatatgtctttgtatgggttcaaatccatttctcttgggnttttatggtgaggacctcagggtgtgatatatcttcccatcctcctaattggtattatggagagccataaggggtgtactggattttttcttgttggtaatatcttaccctggtgaaccttttcccttggtggtggaattncaaatccgggttgccttgatgggctcttccccctagaggagtggtgggggaatttaaccaggggtggtgaagcccaattttgagccggggccttccctttcttagatttnnnnnnnnnnnnnnnnnnnnnnnnnnggtacttccgggaaaattttaaaaatatattttggatgtaatataattaaacccccatgtacccaccatactgtttgaacattttaagttatgccaatannnnnnnnnnnnnnnnnnnncatgccctgcccttccttgccttcttttgacannnnnnnnnnnnnnnnnnnnnnnnnnnttgcagtggtgcaatcttagttcactgcaacttctgcttcccgagttcaagtgattctcctacttcagtctcccacgtagctgggattacaggagcccaccaccacaccagagtgnnnnnnnnnnnnnnnnnnnnnnnnnnannnnnnnnnnnnnnnnnnnnaggtctcaaattcctggcctcaagtaatccgcccatcttggtctcccaaaatgctaggattataggtgggagccaccc

SEQ ID NO: 43128 - DNA, 784 bp, Macaca Mulatta
gggagatttaaatattatcagatactggtaagaactatggcttttaaaaagtgtcgtcttagaatcagtttctaattacttgttcacagaagagtcctgcagctgtgaggtgatcacagcctttggcctaagccgctgccaggtgagtgaaagccaggctggagtcacagagtggtagtgactgcaccggagatgtgtgtgccgtttgttaagatgattcgaatggtagttatggcaacgaagatccacagagggagaaagaaagagatgctggaaaagcagcagcacagtttaataacagtcatcgttcacgatggcaaggttgtttactataaaaattccatccttcttgcctctgtgctgccctccaccattttttttgcttgacattagagcttgctgatttatggcataacgcagtacatttcacctctgaaacaaagtctgtaaaggcttgagatatattaaagtctttattcctcaatgctaaagacctcctactgtttagccctctatacatttagccctttatgcttggggagggggcggttataaatttctagagggaaatggattggcagtggtatgtctgatggtgaaatgccttgactaaacaaaacaagctgctcccgaaatgcacacaccgcaaacatatatgccatataaagtaatgtgttatggttggggggttactttaggtttaaaaaccaaatgtcatactccttgatgctttttaggtagctatttatcttgggtaagggataagaccgaaatattggtgaaa

SEQ ID NO: 43129 - DNA, 856 bp, Macaca Mulatta
  misc_feature (1)...(856): n = A,T,C or G
gggattcgattcttctttgagaaaggcgtttttgacgagaaaggaaatttcctggtccctccggagaaatccgtcaacaaaattggccacgctctgcacgcccacgaccctgtcttcaagagcatcacacactcccccaaggtgcagtctcccctcatcaggacgcctccttcctgtacgcggagcccctgggccgggtgctgggcgtatggatcgcagtggaggacgccacgctggagaacggctgtctctggttcatccctggctcccacaccagtggcgtgtcaagaaggatggtccgggcccctgttggctcagtgcctggcaccagcttcctcgggtcagagccagcccgggataacagcctctttgtgcccaccccagtgcagagaggggccctggtcctcatccatggagaagtggtgcacaagagcaagcagaaactctccgatcacttgcgccaggcctaaacttttcacctcatggaaggcctctgggtaccacctggaaacccaaaaaaatgggttccagccaacagcttaaactggcccttttcccccaccggtaacacctaaaaggctttttcacagggggcaggagccccttgggccccctccccggggtgaaaccctggggggctttgcaaaaaaccaaacgggtttttgtttcagccccctttgtggtgtgcaacaagggagagggtctttgttctccccccctcctgggggcctttcccctcccgggccccgcggggggccaccccccccctttggtcttgtggtccacgcgagagccttctcccaaaaggagatctgcgacctcgggccgggccccccccatatcgggtgcgcgaaan

SEQ ID NO: 43130 - DNA, 369 bp, Macaca Mulatta
acagacatataatttgcttccaatgttttgctcttggtactcatggttccactatttacatcaaccttttgagaaacagatctatacactgtcttctatttccctcctttgccacagaatgaatctacttgtaatctaccaaaaatttatcctgtcacatttccccagctgctggtttaaaaataaatatcctggatttaaagccaattgtgtctagcaggtgccgccatccaagtgaggatttcactgttcacaggcatttgagacacaccagcagctggcggttctcactgctcttcatatggaggcaaccatatatggataagtcattcagtctcttaggtaggagaattgaggccaatctcccca

SEQ ID NO: 43131 - DNA, 790 bp, Macaca Mulatta
cccccagtggagaaggcggaggtcaccatcagatttgaaatatttaaagtggatacaaaactatttcagcaatgcagacaattaagtgtgttgttgtgggcgatggtgctgttagtaaaacatgtctcctgatatcctacacaacaaataaatttccatcggaatatgtaccaactgtttttgacaattatgcagtcagttacgattggtggagacccatatactcttgggctttttgatactgcagagcaagagcattatgacagattactactactgagttatccacagacagatgtatttctagtctgtttttcagtggtctctccaccttcatttgaaaatgtgaaagaaaagtgggtgcctgagataactcaccactgtccaaagcctcctttcttgcttgctgggacccaaactaatctcagagatgacccctctattattgagaaactttccaagaacaaacagaagcctatcactccagagactgctgaaaagctggcccatgacctgaaggctgtaaggtatgtggagtgttccgcactcacacagaaaggcctaaagaatgtatttgacaaagcaatattggctgccctggagcctccagaattgaagaagagccgcaggtgtgtgctgctatgaacatctctccagagccctttctgcccagctggtgctgtcataatactaaaagcagtgtttaaatcaaactaaagattaaaaattaaaattcatttttggaataatgacttataaggtgcacctacccacatgcactcatgtgaga

SEQ ID NO: 43132 - DNA, 205 bp, Macaca Mulatta
aaatcaaagacattattagcagccagatgatccttccaccctacttcttccccacatctcctcgtcaataaacaaacttgcctctgggctgcaaaaacctcaccactaaaagagcggaactgcagcaagagatgttgcagattctgctttacttccagatgccgttataaaggcactcgccatgttatctcttggttattatttt

SEQ ID NO: 43133 - DNA, 671 bp, Macaca Mulatta
attgccaacctcggagatagtcgggtatgtggctctggagccacccacttagatgacaatacgttgtatggggaaaagactttagcaagtacttgttgaataagattaaaatgatgatatctggttgaaacctttcttctcccggggttgctgcagagtgttctgctgcagttcaacttctgggtaagggaacagcagcccagctagaggccatttgttctctggggagacttacgccctgtgatagacttgtgctttaaaacccagatcctgtcttttttgtttcttttttcctcccgtggtttgtgtgtgtgatgctgtggatcagaatgtaatcagtatgtaagtagcctagatcttcttttatttcatttctctgaccttagacagtaatgaatgaaaagctttaacccctgcctctcaaagttgctgtgatttcagagtaactcgaaagctgtagctagaaaataacagatgaggtgccattcatcccctgagccgtccctagctgagggagaaagcccagggtgttgttccccttggtgacagtcatggggatgttgtaaagcctagagggtgctgctgtggaaagctggatgcagaccctgctgactctgtgtcaggaccgtacgttccgttccattgccactttttcaaccggcttccttgct

SEQ ID NO: 43134 - DNA, 172 bp, Macaca Mulatta
cagatgccccggcaagccatctctccaggctcaggaacctaaagaagaatctgcccagatgtggtggctcacacctgtgatcccagcattttgggaggctgaggcaagaggatcacttgagcccaggagttggagaccaacctaggcaatacagcaagactcccatctctac

SEQ ID NO: 43135 - DNA, 347 bp, Macaca Mulatta
tttctttaccagaccaggaatcttgagttttgagcggataaggtgacagcagcagcagcagtggcaatgctagaggccaaatcagatgagaagggtgttgcaggcaagaagcttgttctagggaagaaaataaagaaggctgtttttgttaagaagaataagaaacctatgatggggaaaaaggaagcagttcccaataaagtggcacttgcaaagtagccagcagaaaaaaaaacctaccacaaaacaaaagaaatctgctgcataaactattaaatttgcttattctataaaagtcaaatcatttttacagcttattttgaatacagacctgatcaaataggcag

SEQ ID NO: 43136 - DNA, 1804 bp, Macaca Mulatta
attggacagtcacgtttatttgaagacgagagagcaacatagaaatcacaacaaatttttataaggtttactgatgacagaagactgaaaaatcgtctgaggggaagtggaacagcatgagggaaggtggaacagcacgagtctaagtgccatgttaagacggagcctcttgtatgtttggaattgtgagctcctcagtgtgactgcagcctcaagtaggactaggaagcaagccagttagtttggagaagtgggcaggggtcaagtgaaatggagaattgtaggataagcaaaggagtgcgttttctctccagcaggcagtgggaaccgcagacattggtaagcaagacagagccagcagatttgtggtgtgaggaagagcaatgctctaagatgcagagtcgagatttcagataccagctgctggtacattggagctgtgaagctggttttgagaaagggctgtggtctccctagaagaccccctccaggcctgtctgtggtgctcctgggctggagacaacgatctgggctcagcatctggaagctctatgtacacgctggtatctgttgggggtctcttgggcctctgagaagggcgagtgatttttccccgtgtgaaaacgcagtgatccaactgtgcgtatgtcacctcctgagggtcttgttcttcagagtctctttttgtcggagcaccaacgacgaaggagaaagaagaggaggatggtgaagatgatggtggccaccgagtacctaatcacaataggcaggtgtctggtgatactggttttgcagcttggttcagtgggtgaaggccaactacgtgaagggtttcctgtgacagaaacgggcagtgggtcactcgggtctgaccacttgtagggtgcggtacggaaagaaccgaagcatctgtaggttcctccgtgggtggcagggcccagagggaagtcggcctggaatgttccattgacgcttggcactgcagagagactaagttcacgggcctccccctccctggatagatggtacatgtcaaacgagatctgggagctgcaggacaaggtcacgttctctcctgcctgaaccgtggggcccggctgggctgagagagaaggtttctcatatagacctgtgatcacgatgtccagggggtcactgggagctgacaacacatagggggagtgagtgacagaaccgtagcatctgtaggtccctgcaaggtcagacgtcgtggaattgatggaatagttggcctgggaacccccaccatggagctctccaacaaggtgcaagggcttctcaaaggtcacctcactgtgcagaaagaagtgcccaaacacggtatctgaggaacattgtagggtgaccgtctctcctgatttcaccaggggacctgggagggccaggagggaaggttttctgtggactcctgtgaccatgatcgccagggggtcactgagtgccgaccactcagtgggggagtgcgggtatgagccccgacatctgtaggtccctgcgtgtgccggggtcacagggcccatgaggaagctctgctggaatattctgctgtggaagatgggaacgtggcttctgtcgtctttgtacagagtgaagttggtaaagttgttaagtcctcgacgatagtaacactgaaaagtcacgtgtcctccctgaggcaccacagcgctaggccgggcagataggaaggtcttgtcctgaccacccgtgtgtggacaggccctctggaccaagaagaacccaacacacgccaggctgacgaccatgagcgacatggtgctgccgg

SEQ ID NO: 43137 - DNA, 229 bp, Macaca Mulatta
caggtactgggctgattattctctcacttattctttgtaacaattatatatgagataggataattcccctatttttttatagaagaaaaactcagagaagttaaaccttactcaggaaaaatgacaaagctaaacatcaaatgtataaataacagcaaaccgacaacttaaatccatttttaaaggggccaaagcaaatgattaacctccaaagatctttacaactttc

SEQ ID NO: 43138 - DNA, 861 bp, Macaca Mulatta
  misc_feature (1)...(861): n = A,T,C or G
ggggactccctgctgagtcatcacccatgggtaagcctcgtccacttttggagagtctcagaagacacagggtcgcagtccagaaagtatccagaaaagaacagccttgccacaaagccaaagcagcccactgctgaggttgcccacatgagctgattctgcacattctcaggcaaaatcggccagagccacgtcttgtccgcccataccttgtctgtgcatgaggccgaaggtgccacctgtgagcccaatagcaagtgttctagggcgaccccaggcccagcacacagttgctcctgacctcttcccgctggcagtcactgcatgtcttatgctgctcaattctccgctttttattccgattaacggtggtgaaaggaaacgtggcctgccctgaggactgtctgccaggaaaaccagcaattgaattgaatttcaaaattaacacggcatcccccagctggggaaaccactgagcaaaaaaaaatgaaacaaccccctctggggtttgtctacctgcccttaagaaaaaccacttttatatcttacaccgcaatcctgaataaaaggaccaaaacattttatggtacccaaggaaaggaacttctcccccccttaccttggcagggaatttaaatacaataacgcataataggcaaaaatccaaaacagaaccccccaacgatatatctttcctcgtccccgcgaaggggtttattaaccctagcgcgaattatataacctattataatccccccaagtacaaattatatcggaaaacnnnnnnnnnnnnnnnnnnnngctaagaccgccatcacacacaaaacgccgcggatataccccatccaacaagaaagaaaa

SEQ ID NO: 43139 - DNA, 898 bp, Macaca Mulatta
  misc_feature (1)...(898): n = A,T,C or G
nnnnnnnnnnnnnnnnnnnnnnnnnnnnnnnnnnnnnnnnnnnnnnnnnnnnnnnnnnnnnnnnnnnnnnnnnnnnnnnnnnnnnnnnnnnnnnnnnnnnnnnnnnnnnnnnnnnnnnnnnnnnnnnnnnnnnnnnnnnnnnnnnnnnnnnnnnnnnnnnnnnnnnnnnnnnnnnnnnnnnnnnnnnnnnnnnnnnnnnnnnnnnnnnnnnnnnnnnnnnnnnnnnnnnnnnnnnnnnnnnnnnnnnnnnnnnnnnnnnnnnnnnnnnnnnnnnnnnnnnnnnnnnnnnnnnnnnnnnnnnnnnnnnnnnnnnnnnnnnnnnnnnnnnnnnnnnnnnnnnnnnnnnnnnnnnnnnnnnnnnnnnnnnnnnnnnnnnnnnnnnnnnnnnnnnnnnnnnnnnnnnnnnnnnnnnnnnnnnnnnnnnnnnnnnnnnnnnnnnnnnnnnnnnnnnnnnnnnnnnnnnnnnnnnnnnnnnnnnnnnnnnnnnnnnnnnnnnnnnnnnnnnnnnnnnnnnnnnnnnnnnnnnnnnnnnnnnnnnnnnnnnnnnnnnnnnnnnnnnnnnnnnnnnnnnnnnnnnnnnnnnnnnctggaaccaaaaccctgtggccaaagccccacctttcatcctttatatttcccggggcggtcaaattttaaccctttcttttcccaaagcaacttcccttggggcctgtgccgggaaataccccccacacccttaactcctggattatcccccagatggccctacaacccacaattgaaaaatacccctaatcactcgctaatgaggcttgccctttccctcctcctcctagaggtgggtaacagagactttctaaaaacaaaactctccccccttggaatctgagaacgaacacctctctttgcccttgcc

SEQ ID NO: 43140 - DNA, 742 bp, Macaca Mulatta
ggaagtacacattcaatactcaatacttgagaatctacttcatgtgagttatatgacaaaagaaactaaagtgattcagatggctcccttgatgagcttactctctggcagggaaaatacagtatatcagtaagtatctacaatgcaagaagaaggggacacatgccttgtgggaggaacagacagtgaacacatttctatggagtccatagaagagagctggcttccaacagactgtttcaagacatgtttttggagattcaaggcatctgagtcgtatactgatttgggtggagttaggaagatagagagaatttaatgaaagatctagaagtggcatgagttttaacccataatgctgtggagtgtattcagccctaacattatgaatctgagattgtctagggcagtcctacaggcataataatattgtttccaggagcaataaataaggcacatagattaaaagagctcagtgtttacatctctgcaagacttcagtaagtttaagtttaagaaaattgtttatcaatgctcttgacatgatttgagaaattacacagctgttagtttacaaaatagtgaccctagcctattcctgagtgttaagagactgagttgtcctttaggacaattttctcttaagtaaaaaattatgtctttgtagacataagtcaaaatttataatttctataagacttccaactatatattttaaattttaatatctctttaaagggaa

SEQ ID NO: 43141 - DNA, 163 bp, Macaca Mulatta
cacagaagccatgtatctgcggaagtccctccgccagaacccgggcagcctggagaccgtcctgaagacaatggaggagaagcagatcccggatgcagaaaccttcgggaatcttctgcccgggatgctccagatcgacccctcggatcgaataacgataaag

SEQ ID NO: 43142 - DNA, 908 bp, Macaca Mulatta
gctggagatttccagtgattggggcattcaggtctccctcttcgccctgatcctggccatgtatttggtgactattgtaggaaacaccctcattcttcttctgatcagactggacagcaggcttcatacccccatatatttattccttagagttctgtcatttgtggacctttgttatacaaagagtattgttccacaaatgctggtccacttgctctcagcccgaaagcccatccccttccacagttgtgtgctgcagctctatgtttccctggcactgtgtgggtatgagttcttcctgctgggggccatggcctatgaccactacatggccgtgtgtcacccactgcgctacacactcatcatgcatggagggctgtgcctggggctggcggccggctgcctggtggctggcttctcaaattcactgatggaaacaattatcaccttccagcttcccctgtgtcacagttattaatcgctttgtctgtgagaccttagcagtgctacggctagcctgtgtggacgtctccttcaacaaagtcatggtggccatctctggattgctggtcatcctgcttccctgtaccctggctctattctcctatgctcgcatagttgctgacattttgcacatttgttctacccagggacgccgcaaagcctttgggacctgtgcctctcacctcattgtggtttgcatttgtttttgggctaccatcttcacctacctggagccacagtcagcctcctcggcagaggaagagaagatgattgctctcttctgtgggctggtgtcacccatgttgaacccctttatctacagcttgaggaataaggaagttatggctgctccccagaaagctttagaaagatgcagataaagggtcaagactctaagaacctct

SEQ ID NO: 43143 - DNA, 655 bp, Macaca Mulatta
  misc_feature (1)...(655): n = A,T,C or G
ggtatgtaggaagtcatcatcagtttagacctaagcaatgtcctaagtaaggtccttgcagccatataagctgtaccttgttttgagaaggaaaaacacagaactactgcaaccagccaggctgtggtgtcccaggtgcctgtaactctaattcatgatctcacagcctggtggtcagagttacatgcttacatcagagcttttagtagaattctgaaatatgttttgaaaagcaaagcattattctcagtgattccttaaaattacctgagtttataagataccacattgactaccctgttggttctgtcttcaaaaaaatagcaaagaaccagccannnnnnnnnnnnnnagnnnnnnnnnnnnnnnnnnnnnnnnnnnnnnatggacggatcacannnnnnnnnnnnnnnnnnnnnnnnnnntaacccnnnnnnnnnnnnnnnnnnnnnnnnnatataaaaaaactagccgggcgaggtggcgggcnnnnnnnnnnnnnnnnnnnnnnnnnnnnnnnnnnnnnnngtggcataaacctgggaggcgnnnnnnnnnnnnnnnnnnnnnntgnnnnnnnnnnnnnnnnnnnnnnnnnnnnnagagactccatcgcnnnnnnnnnnnnnnnnnnnnnnnnnnnnnnnnnnnnncc

SEQ ID NO: 43144 - DNA, 786 bp, Macaca Mulatta
gggggtgactttagctcactagaagcaggagctcttttcttcttgtcttctctcttctcctcatgttgcctttccttaaaacagtttctttttttattgttgttatcatttctacgtttgtcctttcattcagtcataatgatggtctcaaccagtaacagtagtaactgctgtagtgacaatctcaagtagtagttgtggcagtcagccaaaagtggtgtctgaacagggactaacagggactatcagggacaaacaaaactgaagagacctgaagggacccaaagaggcctgcagggataaatagaggagatgaacaagccatgcgggtgccctcaagatgtgtgtgaccatggaatgggagactggagggacccatgaattccaactatagacctggttcccccagtatgagccaaaagcccagttgaatttgaatttgaacgcgaaaacggaatgaggactgaccggagtcacgctgaaatccacccccataatatggggacagatcaagaaaaccacacaggaaactgagaaaatgcgggagcaccaagtttcacccttttggctggaactcaaaggtacaactgaatgattaacggaaaaatgctttctgaatgggctcctaccctaccctggaatacaagaaaacctaaaagtttaaccaagtatatcccaccccttattccgcctgaagaacattgtggaaaaaaaggaacttcatcctttctggaaacctttaagaaaaaggggtctcccttgaaaaaagaaaagggggaataaata

SEQ ID NO: 43145 - DNA, 667 bp, Macaca Mulatta
  misc_feature (1)...(667): n = A,T,C or G
ggggagttcataaccgttgactggtatgaaccgttcataacgggcgttcataaccacgccgtgttagactgagcatgaccagtctacagacccgcgaagcctctacagagatggccaagtgctggagtcctggctgcgtcctctaggccagccttgtgcaaaggaccttttcaccacagatcagccagaccatcttcctcctcccaagtcatcaaagagttccaagctggtcacctgtcccttgatgttcccaggaaactggcaaagaggacccctgcattttatcttcccattgggagtggcaggatctctgcctgggaaacaggctgcattcagcacaactgtggtagcattaacaaagcacagtgggcacatctagaagttgaagctaaaacattcaagaactccagtctgtttctgtggatgttagggggtgaagataaaacaatggaagtgatgaggaataacttgaagaccgtttaaagccacagtggtacaaagaatgaagagaaggaaggtgctgaattttactaagaagaaaacagaccgagttcangagtctcaccagtagaagtttatagtattgcattttgattacatgtgtgtgattttaaaatatgataccctccagtaaaatgcaaaccaacttgcattggattaaacatag

SEQ ID NO: 43146 - DNA, 549 bp, Macaca Mulatta
  misc_feature (1)...(549): n = A,T,C or G
tgggctgaggccctgaacgtgttccagcaggcggccgactggatcggcctggagtcacgcaagtccctgtggggccagttctggtcggcgcaccagcgcttcttcaagtatctgtgcatcgccgccaaggtgcgccggctggtggagctggcccgagaggagctggcgcgagacaagnnnnnnnnnnnnnnnnnnnnnnnnnnnnnnnnnnnnnnnnnnnnnnnnnnnnnnnnnnnnnnnnnnnnnnnnnnnnnnnnnnnnnnnnnnnnnnnnnnaggcgtgttcctgtcgctaattcagaagcactttccatccnnnnnnnnnnnnnnnnnnnnnnnnnnnnnnnnnnnnnnnnnnggcgacctcggggacgcggggccaaagccccccggctggcgtgcgaggcggcgggcatcatccgcatcagcgatgacagcagcacagagtcagaccccggcctggacagcgacttcaactcctcccccgagtccctgatggacgacgacgtggtcatcgttgatgccatcgggctccccagtgatgaccggg

SEQ ID NO: 43147 - DNA, 679 bp, Macaca Mulatta
gatgtttttagtagattaagagatgacgaaggtaggccagtcaatccaaaccactatgcacttcagtgtactcatgatggaagtgtcttgttagtacccaaagaactgggggcctcaggccacaaaaaggaaacccaaaagggaaagagaaagtgagaagaaactgaagatggactcattatgtgaagtagtaatgttcggaaactgatttggatcagaaaccatcgaaactgcttcaagaattatctttaagtactgctacctgaataactcagttaaggctctgttttgaagcttattatggacaaatgtttaggacttcaagatcacacttgtgggaaatctgggggagccacaacttttcatgaaatgcattgtatacaaaattcagttatgtccaaagaataggttaacattttgaaaacccagtaagactttttggcagccatcctttttagtaagtcagttacttcagaaagagcaaacactggggatcaaataaaattattttaagaggtatttcagttttttaaatgcaaaatagccttattttcatttagcactatagtaagcttttcaaacactattttaatctttatatttaacttataaattttgctttgttgaaataaattttgtatttgtattaaaaattaacttttcccttttatacagaaat

SEQ ID NO: 43148 - DNA, 747 bp, Macaca Mulatta
gggaacctaaaataaaagttgggaaaaaaaagaatgactcaatccaggagccaaataaagaccttctcccaatctgtgttgctcaactttcatcagtggtagctttattcttggtgttcacatgaagtaagttatctgtcaagagttttcatgtgcctggatccaagtccagagataattggaggacctgttcctcgcttgtcaatcagccatctctctgtgtctcctttagtgggactgggtcatattcttagccaactctggccaaggggctgagtttctctgaataaccaggccagagccacatgcttttcctatatctagggttaagccaatccacaggacacccatagagagatgaattgaatatggcttccaaagccatatggggctatagtcctctggggtggtgggtggggtagtaataaaaagtaacaaaagcagtggttttctaccacctaaattcatgagttctgttacctagaacaaaagtaagcctcaagatatactcatcaggtttatgaatatcttactttagtttgtttgacttctgattgatcaaagttatagtagaaaataaacaatttatcacctagtcctacaattagaaattaatacgaattttagaaataactaaagtagtaatttgaatgatttcccttaaccaaatattcaggtaagaaatttgggtaaatccttctttttcccgggtattacctaagatggaataatgaaaaaatttcgaaa

SEQ ID NO: 43149 - DNA, 756 bp, Macaca Mulatta
  misc_feature (1)...(756): n = A,T,C or G
ggaactgtctcactttcagaagtgatcatttgtttttatttagcacagttcataagataaaaaacatatagaaaaataatcaatttcatatataaaaggattatttccccacttttaattattggcctataatttgacaatgttatttggtcatattattgaactaatgtattattccattcaaagtccttctagattgaaaaatgtatgcaaaagtttaggattatatcatctgtaactaatatagataatactctcctgtaaaccttcagtttaggtatataattgggtgtatctcttttgtgatctgggtgtaatctcttttgtaatctgttttgacagatttctgaaattatgttagcatgatcaagtaagatttaccttgaagcactttccaaattgatatttccaaacttattttaaagcagtagaaccttttctatgaactaaatcccatgcaaaattccaacttgtagcatacataaaatggacttacttgttccctgcaccttctccagtgcctaggaatattctctgagccctaggattgattctactacacagagcaacattaatctaaatggtttagctccctcttttttctctaagaacaatcagcnnnnnnnnnnnnnnnnnnnagggcctaaatgattccaatggtntgttgaaatactcagttcagtttgtacgtgttagcagtcttttagtttggaagagaattaaatactgtgctaaactgggtgcttggatacatac

SEQ ID NO: 43150 - DNA, 187 bp, Macaca Mulatta
tttggccagggggcccaccacgctgtggggcaggccggaaatgaggcagggaggtttggccagggtatccaccatgctgcagggcaggcgggaaatgaggcagggaggtttggccagggggtccatcatggactcagtgagggctggaaggagacagagaagtttggccagggaatccaccatactg

SEQ ID NO: 43151 - DNA, 707 bp, Macaca Mulatta
ggtgatttgcattttttggaagatagttccaaaatggtcagatttgcattttttggaagatagttctggcatttagtaattgaggccaatgcaataatacaggtaagaaagaaatgctgatgttgcctctaagtagaggtagatttgagaagaaaatatgatggaggtgcaagcttgatgcatggtccaaataaatggggagatatgtttatgaatgggaagatttaatattgttaagatgttaattctccccaaattaatttagactcctggcagaggaatcattgggttgaagggttcttgatatacattaacaaatttgttttccagagagtagaatgtattgattcccttactggcactgtacctacttcactgtgtcttcaacaaaattgaatgtttaccttaaaaagccttgtgaggcttctcagtaaagatgacagattaagcatacacatggctacttccattctgtactgagactccacaaaaattacataaagggattttttaaggtgaagaaaattacagagatggagaatatgagagaggagacaatgataaaattcttgaaactggaaaacagatagatgagaaaactgaaacataagccaatactgaggacatcttgagaaccaacccaattcatacctcagaatcccccaaagatttgttatccggtggcacccaggcattctagggggtac

SEQ ID NO: 43152 - DNA, 771 bp, Macaca Mulatta
  misc_feature (1)...(771): n = A,T,C or G
gggaggctgaggcgtgtggattgnnnnnnnnnnnnnnnnnnnnnnnnnnnnnnnaaacatggtgagaccccatctctcaaaacaaacaaataaaaaacctaacgtattaattgaccattacatctgttgggattggaataaatcagaaatagtaaaggattagtagggatgttatgtccattggacccaagtctttgttttgtttaaaaagttatgtatgggtctctttcaaacttctggcttactgagattgtttcaatgaagtcacatatatgcacatacatttcatgggatgggggaaggggtaatggaagagtattgggcctttagtccagggtgtttagaataccagactaatacacctgctgccccctggtggcagtgtagtaaacagtgaagttcaaaagtaaggacttggggagagctaagtccagtggactgtgggtgtcaagaggattgtagaggaaacagggagatgccgcttctctcccactcttcttgtgattgctacctatatggtcttagaaaaatcatttagtttgattgaagtgtagatttcatgttcttcaactttaaaatgtactttctaaactttttccagcattaataccctgttcttctccaagggtattaataaaagatgccattgtatagcaagagatgtcaagttcagttttttcctttagcagctgtttccttnagaaccccagatatttattcagggaaagcaagttctaggggtacaccccggaagcctggatacagaattca

SEQ ID NO: 43153 - DNA, 156 bp, Macaca Mulatta
ggcagcagaagcttctagggtggcctgggcggaagctatgctggggccagcggcctgggaggcatcaccaccatcatgctcaaccagagccagctgagtccccttaacctggaggtggaccccaacatccaggttgtgcgcacccaggagaaggag

SEQ ID NO: 43154 - DNA, 784 bp, Macaca Mulatta
  misc_feature (1)...(784): n = A,T,C or G
aagtccaattttaagtttgcagatgttcaaggaattttgtttcccagcaggagttcaaatcttttggatcttttcgccaaacaactactgggattttcttttctgattttctcagcagcatcagctttgtaattgtaagagcaattgtgtacatctgagtaacggtgtacaccacagtaaacatttccacaccggcattcaaacccagtaagtcccactttcttcctgcacatgaaacagcgnnnnnnnnnnnnnnnnnnntttttcaagagacttgctntgctcttcagatggctgctgtgccgtgtctgatactgaagcctgcagatcttctgtttcaggtactgctttgtccacagatgtactgtccaattgagaagatgctacagattctgataaaagtgactgatttgatacagagcttggctgcatagatgaagatgtagagtctaatgttgactgggcttctgggacactgccatctgtgcattgaactggtaaagattcagacagactactgacagaggttgcaggtgggcttattctaccattactactattctgtctttgaagatgttctttatagcatactgaacacatgccatttgtacgagggtttccataaaatccacagccagtggaacaaagcataggcacttggctgtgattagtttcttgagccatgttcctccgttgcacaccaacaaaacctccacaattttctgtttgcttcacctcagattaacttcacttgaagctgtactccaaagcaaccaaacctccc

SEQ ID NO: 43155 - DNA, 861 bp, Macaca Mulatta
taaacaagattgggtgacttattcacgttcatacacatccacaatcaaactttaacagtcaagtgtacctcttttctaaataatcacatttgtaaaatgtgccatatggcccatttctttaaacaataaatggtaaattattattttagggaatgaaagctaaaagaaataatatgtctaatacaatgagtcattttctctatacaacacaatgttagcatcgaaaaggacctcagtgattccatttgccccgttttcagatgaggagattaaggctggtagttacagtggttttgcttcatgtcccatcccatcggggctgctatgcaagctctcagtctagtcttctttcgtctacacttggtggccatcagctgtaacaagttctgactagactggggctttgttgttgactacaattcaatgccttttttgcctgtgcttgttctgaccctgctaatcaaggctgcaaggcagctgcagaaagacacctgctattggcttacccgctcttcgccttccctctgcttgggtgtgagcatcagaaagccaccttccagtggatctttgtcttgcttttgtcttgtctttgctttttattcgtctttgcttttgtcttctcaggacgaataagaaatcctagacctcagatcactgttctttgcttcccaaaagacagaacagctcagtcctggctgccaccttctttctttacttttggtttaaatgtaatcccacatgccctagacaagcctcctgattatttttcatcaaacatgaaaatagcttacttttaactgctgggtgtcagtgtcttctaaaaattttgttcctaagaaagtgattttgcaaatcagtgct

SEQ ID NO: 43156 - DNA, 479 bp, Macaca Mulatta
agcttccaacacccaacttcattcacctggttggagaaggtagcaaaggacaacactggatgtttggccaaagggtcctgtttctatttcattccccctacctcttcccctgactgcagcaagtgctaacactgtctctagctgcccataaaacataacaatagggaacacagctagaaagggtcagcatcaaacccagcagaattagtcccagggacaaaactgggggttaccttccctgctttggccaacaggaacctctaatggctgaatttggcaccaaaaactctgtcctgaagggaaactcggggctcagcagccctggctcctggtgcccctgctgtggttgctgagacactgggaatgagcagggagggcacgggaaatgggccagctgggagcagtgctggctgtgagtctagagaagagggggagacgagcctggtttaataacatgccatgagctgtttttctccaca

SEQ ID NO: 43157 - DNA, 677 bp, Macaca Mulatta
agtgcagactctcgttatcaagtcgacggaactcggctaagttttattgggccacaggagtcagagatgaattaggccttctttggcctacagtagctcacaccctaacagggagacaagcctccgctgtgaccgcagtccagtgtgctgggtgatgtggttgaggtacccgggaatggtggggtgcagaggagtgagaagccacagtcactaactccgctgtggtgggtgcatgtctcgggaagttacggaccttatggatggaagaagctgcagggggccatgtggctcgcatgggaggtgaggctgggtggcgctggccacccaggaaggaccgtgcaggctctgcagatgagaagctttacccaaaagccaagccactagatgatttttagccatacaacccagttagatttccactgccacgtaaaggatgaagtagggaaaggaaagttggttgggcaagcaggccagtggcgcagtgcttggtccattcatgtgcataaaaagcatggattaatgaaaaaagaaagaaagcaagaaggaaggaaggaagaaggcaggcaggaaggaagaaaggcaggcaggagaaagagaagaaaagacaggaaaggaaaggaaaggagaatatgggtcctcctgtactttaagccgtataaggctgtgatgttcattag

SEQ ID NO: 43158 - DNA, 631 bp, Macaca Mulatta
  misc_feature (1)...(631): n = A,T,C or G
aaaatcccttactaatcatgacctttttaaatatttatactcanaatattttgtcaatacttttctatagttaattcatcatttgtcttctttatggaaattccaaagtaaaaatagtggcaaattggtcttttaactagaaaaattacaaaatcctcctgtctaaaaaatgatactacctccaggacatccgcaattttgtaaatttttcttccttggtagacaacatacttcctggtaaaacaaagccaaaagatggtaaacctctttgaattagattcttctttgatcccaacccactctcaattttggtagctagacctttaacttggaatgatcaaattaaagaccctttcgaatatgatacatgctgccttaattattatttagttgtatctccaacatctttgggggagcaggaaggaaggggggataacaaaaacttcattgcttcaggtaggtataagtatagaggtcaatcacatttttagttgtacatcaaaaataactaacatccattaaattataaaaattctccagccctattcagtatttagttgggtatggagttattcatttgtatgacccttattgcctgtgtagaatatacttattattaatactattctac

SEQ ID NO: 43159 - DNA, 179 bp, Macaca Mulatta
  misc_feature (1)...(179): n = A,T,C or G
ctggaggccgtctcaggcctggagagcaacagcagggtcttcacggcacaggtgcaggggctgctgcagctgcaggncaggctggacagtacgcttctgtgtttgtggacaatggctccggggccgtcctcaccatccaggcgggctccagcttctccgggctgctcctgggcacgtga

SEQ ID NO: 43160 - DNA, 780 bp, Macaca Mulatta
ggggcgggggtcagctgcatccgtccgctgctcactcacggagccaaagtcaatgcccaggactaccacggccaaacagccatccacgaggcatgctttggaggcagagaggcaatcatcaatctcctgcttgactttgaagcaaatgttaacattttaacaagaaacggggaatctccaatttatatgtaccttcagcgcagtttcaatgtaagagatacggcacttctggccaggctactttatcacacttatcctctgagaatgaccaataaccaaggaattctccctgcaggaatcatgctaccagaattccgcctcttaagggacaccctaataaagcaatcgcaaaaacctttatccctacagggtatctgcaaaagaaacatcaggaatatttacggggagaaatacaaacagcacttgaagcaacttctcccggtgacgatatggaattctgtctactgctgttacgacctggcatacctcctgcaacaagacctcccagcttcacagcagcagggacttccagccactcaaactgcattttctggctagacatgtcccagaaaatgcttaacctatcacctttgacatcccaaatgtacaaactactggttcttgaacactttccaaaaaataaagtgatttgcctactaacatttttgttcctagatttgttttttcatgccctttccatgatttaacttcgggctgaaaagtaagcaaattaatgtcaatctcttcagccaacgacacaaatgtattttctctctttct

SEQ ID NO: 43161 - DNA, 655 bp, Macaca Mulatta
  misc_feature (1)...(655): n = A,T,C or G
gggcacagggaggaattagggagctcagagcaggcccagctatgacagggatgggcatgtgtggggtggcctttctacctttttgggaatatcctgagggcacacttctttcctgtgtcctttgaaaatcagcctattcccagaggatgcctgtgtcatccaggcctgtctgtgacttggggggagagtttaattaaactgagggatgtattcagcacacagatataaatcatatttcgcctaatcagcctgtaccaaaaaaaaggcttcatggttggtctcgtttttttaaatcaaattttcgaaatttttaaaggggaaactttaagggggggggccccctttaaattaaaaccttttccttccaaaaatcccaaaccaattaaacctttccggaaaannnnnnnnnnnnnnnnnnnnnnnnnnttcccctccccctccaatccccccttaaannnnnnnnnnnnnnnnnnnnnnnggggggtttaaaaaaccggggggtttctcccccccccaaattataaggttnnnnnnnnnnnnnnnnnnnnnnnnnnnnttttccccgcnnnnnnnnnnnnnnngnnnnnnnnnnnnnnnnnnnnnnnnnnnnnnnnnnnnnnnnttccccccccaaaaggggccccccttggggggg

SEQ ID NO: 43162 - DNA, 732 bp, Macaca Mulatta
  misc_feature (1)...(732): n = A,T,C or G
attaggtctgttccttgtagctctgtggcttggtttacctcatatgagctctcagatccctttanttccaagaataaaaccaaggaaaaacaacaacaaaaaccccactagaggcttgcacctttattaagcttgctgaatttggaatgtgtgaaaacttcattataaggcaatttgccatgcaattttcacaacaaaccatatcatagaatactttaattactgaaataattacctacaggttgaaaggatcaaagaattaatagtctgttcttgcagaggcctgaacttgtttaattttaaactgaaactgcagaaattgccaagatagtggcagattaattttcagaggccagaatcaactgatctgagagtgcgaatggcaggggatggcaatggtccagaatttcctagggaacagaagggtcactcaaagtcctgtggggctcctcccactgctacatttccactgccattatggtatccccaacgctgtcaccttcaccctgccatcagtgccctcgccaacatcaccagctgtcaccatgactgccatcactaccagctgcttcccacagctgacatcagtgagaccacccacccactccacactgttgcccacctgtactctgtcaggccatcacaaagcccacgaggttgtttccataacagctctcctcattctccaggacaccgggaatcctcatcccgtcacctcttcaacactgtggg

SEQ ID NO: 43163 - DNA, 822 bp, Macaca Mulatta
  misc_feature (1)...(822): n = A,T,C or G
ggggatttgttcgcagcgacagcctcctctccaggactcacaggcacccacaggaggttatgccacagctgtttcctactcctctcctctcctgtcctctcccactttctgtttttcttcactttgcttttccagtgactagtaagccagtgaatgagatccttaagatttttaattttgggaattctgaacaatttttccgtggcataattcattttccaatatggttcatgtgtatttggggaaaataggtatcgttaagtttgttaagcattaagttctatttatagctattagagcatgattgttaatcaagtatacccctacttatttttttctacttgatttgttgatttctgagtgagaaatgttaacgtctcccattttgatcatagctttgtcaatttctccttttggtttctgtttttgctttatgtatttttaagctgtgttttaggtatgtaaagattaatgatttttatatgttatagatgttcatttatcagtagtaaacaaatgggtttgtctcttgaatttttttccttcttggtcaagccttctctgtgttccgacattaatacttttgtacctttttttcttatcatttgcctttatttggaattttttttccccgagaannnnnnnnnnnnnnnnnnnnnnnngaaggagtacccccggattgtattgaggcaccgaattccccaccaccttgaggactggatttaccgggttgaaccnnnnnnnnnnnnnnnnnnnccccctttttaataaggaaaattaaaccaattcccccgattggaggccttgccggtttcttccttc

SEQ ID NO: 43164 - DNA, 1053 bp, Macaca Mulatta
  misc_feature (1)...(1053): n = A,T,C or G
ggatttttgtcaaccgcagcctggcactggggaagattcgttgctttggcttcgacatggaccatacactctggctgnnnnnnnnnnnnnnnnnnnnnnnnnnnnnnnnnnnnnnnnnnnnnnnnnnnnnnnnnnnnnnnnnnnnnnnnnnnnnnnnnnnnnnnnnnnnnnnnnnnnnnnnnnnnnnnnnnnnnnnnnnnnnnnnnnnnnnnnnnnnnnnnnnnnnnnnnnnnnnnnnnnnnnnnnnnnnnnnnnnnnnnnnnnnnnnnnnnnnnnnnnnnnnnnnnnnnnnnnnnnnnnnnnnnnnnnnnnnnnnnnnnnnnnnnnnnnnnnnnnnnnnnnnnnnnnnnnnnnnnnnnnnnnnnnnnnnnnnnnnnnnnnnnnnnnnnnnnnnnnnnnnnnnnnnnnnnnnnnnnnnnnnnnnnnnnnnnnnnnnnnnnnnnnnnnnnnnnnnnnnnnnnnnnnnnnnnnnnnnnnnnnnnnnnnnnnnnnnnnnnnnnnnnnnnnnnnnnnnnnnnnnnnnnnnnnnnnnnnnnnnnnnnnnnnnnnnnnnnnnnnnnnnnnnnnnnnnnnnnnnnnnnnnnnnnnnnnnnnnnnnnnnnnnnnnnnnnnnnnnnnnnnnnnnnnnnnnnnnnnnnnnnnnnnnnnnnnnnnnnnnnnnnnnnnnnnnnnnnnnnnnnnnnnnnnnnnnnnnnnnnnnnnnnnnnnnnnnnnnnnnnnnnnnnnnnnnnnnnnnnnnnnnnnnnnnnnnnnnnnnnnnnnnnnnnnnnnnnnnnnnnnnnnnnnnnnnnnnnnnnnnnnnnnnnnnnnnnnnnnnnnnnnnnnnnnnnnnnnnnnnnnnnnnnnnnnnnnnnnnnnnnnnnnnnnnnnnnnnnnnnnnnnnnnnnnnnnnnnnnnnnnnnnnnnnagctgcttggggttcgggggaagggcatcctgtatattgtttaccacatttttgggggacttctgaagtccaagaagcggcagggctggcggacttgcctggtggttcctgagctgtcctgggagctggacatctgggcccgggag

SEQ ID NO: 43165 - DNA, 805 bp, Macaca Mulatta
  misc_feature (1)...(805): n = A,T,C or G
ggggaaatttactgtactgtttcaatgtgttaagtgccttgttgtaaagtaaaattttaagtctagaattcattattttcctgacatatatttttcattatatctactgtatgctattgtgatagttttatgaaatgcttacattttaatcaagtatgtaaatttcagaagctcttttctcctacccaccagtaccttaatcattggtttatcacattggattcaaattcaggttccttttttgataaagaggaaatttgttttccatgcttgtgattttgtgtttgtaaacatttcaggaggaatttaggagtgtaactatagtttatacttctaaaatgttgtcttacatttacatttttaagtgcctaactgttgaaactgatttatgtttctcttctaaaggggatatgtgtacttggtttctaatctctttggttttgcttttttaaaaatgcaagagcctatactttgtatttacctaataaaccacaatgatntctnnnnnannnnnnnnnnnnnnnnnnnnnnnnnnnnnnnnnnnnnacccnnataatnnnnnnnnnnnnnnnnnnnnnnnnntgtcggccccgccccgcccctnnnnnnnnnnnnnnnnnnnnnntttctttttggcggccccggggccccctttaggtaaaagtaaaacatggggtccataaccctggttttccctaaaagaaaaaccccggggtcaaaaaacaaagggggctttgggaaatttccccccccacannnnnnnnnnnnnnnnnnnnnnnnnnncacacacaaaaaggcggtttta

SEQ ID NO: 43166 - DNA, 409 bp, Macaca Mulatta
gaactcggtggtggccactgtgcagaccagactttgctcgttctcgcgcgcctcactctgcttttcctctgcaaccacgtctgacaaacccgatatggctgagatcgagaattcggtaagtcgaaactgaagaagacagagacacaagagaaaaatccactgccttccaaagaaacgactgaacaggagaaacaagcaggcgaattgtaatgaggcgtgcgccgccaatatgcactgtacattccacaagcattgccttcttattttacttcttttagctgtgaaactttgtaagatgcaaagaggctggatcaagtttaaatgactgtgctgcccctttcacatcaaagaactactgataacgaaggccgcgcctgcctctcccatctgtctatctggcggacaggga

SEQ ID NO: 43167 - DNA, 458 bp, Macaca Mulatta
  misc_feature (1)...(458): n = A,T,C or G
ggtatgacaaattgtgtcagaaatgccagataaagtaccttctcttagacttttcctgagtacttactttttttttccttagttatgactagatttaatcattgctgctgccaattaagtttctagcttctgatactcagttgcatataaaagagtatgaaatgtagtgatctgatagtttactagtatatttaaaggaaatatctttaaaaataagtagtttgtggcagacaccagtctataaaagggaagcctgtgtttgaaaatgataagcttccatattatataatatgtgaaaatctcacatatgtgaaaacattatctctgtgtatttcttaatagcattataccagaaatttttagaatattacatactttaaaagatagcagccaaaatagaaacaccagatgactgnnnnnnnnnnnnnnnnnnnnnnnnnnnnnnnnnnnnccttgtc

SEQ ID NO: 43168 - DNA, 2179 bp, Macaca Mulatta
  misc_feature (1)...(2179): n = A,T,C or G
actccaaactcaaccatctccagggaggccagcaccgagtctgcatcagctgcagctagccaaggctgtgttttaccagaaggcaaaatcatgccaaacactgtttttgttggtggaattaatgatagggtattgtattgatacctcatttttaccttaaaatacattaaaaacaaagagatttggaccctgttacaaacttaatattttttttgtatttcacagaggtttacagttggttttatgtttgacccataggtactaaaaatatctttgatgaagagctactggtcatttggggatgagtggggggagaaatttcaccttatggtagtaaagttgtggtaaatatgaaatttttgaatgctgcatttttactcttggagttcatttcttttccatagatggatgaaactgaggttcgaagctgctttggtagatatggttcagtgaaagaagtgaagataatcatggatagaactggtgtgtccaaagggtgagtaattttatcacaaatatctgaactctagtcacctataggtatcagagactacttgaaaactgatattctacattcgtataaatgaaattttttgcattgttgatttctttcatgtaggggataaaaggatattgccaactcttttctttcatcnnnnnnnnnnnnnnnnnnnnnnnnnnnnnnnnnnnnnnnnnnnnatccccnnnnnnnnnnnnnnnnnnnctgcagtgacaccatttcggcttacttcaagctccccctcatgggtttcaccccattcttctgccttnnnnnnnnnnnnnnnnnnnnnnngaaacaccagccaccacgcttttgctannnnnnnnnnnnnnnnnnnngcnnnnnnnnnnnnnnnnnnagccacaatggtctcaatctcctgacatcatgatccgcccgcctgctgttcccagagtgctggaattacacgtgtgagccactgtgcccagcctatttcatcatttttctaatgtttgcttttaaatgtcttttaactgatattctgacacttgtgtaaatgaaattttttgcattgttgatttcattcatataagggatgaaatgttattgccagctctttttatttcatcatttttctaatgtttgtttttaaatgtctccaatttttatttcatataaatgagttaatcagttttccaaataattgttttcttcatacgctgcacagtatctcaaattttagcaaccttgtcttagatagtaagtgaaattcaggttcacagataatgaattttttgttaatcaatcaagttttcacactgccctaatcttagcacactttgacatagttccgcttaaggaaaagtaatatttgtggaggatttgtcatgtacatcttaacaaacactatcgtggtatattactcatcttttgtcatgatcccttctgtatatagaatagtagaagttctggactatgtgctgtatgatggtgattttatacttcatctgtcttctgcctttatagctatggatttgtttccttttttaatgacgtggatgtccagaagatagtagaagtaagtaatctaacaggaaaatctcttttttattttactgatacgacatttagtcttagtgatatactcagtgttgtgtaaaattggagaacgatatgatacactctctgttcaaaaccgaaacttagagtaacctcacataacttgttagatcctgtttatttttgactggtcacctaggttcatggactacagacaggaagggttggagatagagtgatgaaaagtttctgatcgactttcacttgatgcgtgttgatactgattagagtagtaagggtaagtaaggtagcttcagggtgaccaactttaatttggtgtgtaattgtcaccgatcttctttgataataggaactttggaaggctttaggtatttacccaagtctcggaagtcaagacttgaaaattgattctcattttgttactgttttattttcagtcacagatacatttccatggtaaaaagctgaagctgggccctgcaatcaggaaacaaaaattatgtgagtaggaaaagaaattgttattttttgacacgtgtagcttttcaaataactgaaactaggctttttattcttgctttttataaggtgctcgtcatgtgcagccacgtcctt

SEQ ID NO: 43169 - DNA, 76 bp, Macaca Mulatta
  misc_feature (1)...(76): n = A,T,C or G
tgtgcgagaggcacccttatagcggcagctggaatctcggactggggccagggagtctnggtcatcgtctccgcag

SEQ ID NO: 43170 - DNA, 598 bp, Macaca Mulatta
  misc_feature (1)...(598): n = A,T,C or G
gggnnnnnnnnnnnnnnnnnnnnnnnnnnnnnnnnnnnnnnnnnnnnnnnnnnnnnnnnnnnnnnnnnnnnnnnnnnnnnnnnnnnnnnnnnnnnnnnnnnnnnnnnnnnnnnnnnnnnnnnnnnnnnnnnnnnnnnnnnnnnnnnnnnnnnnnnnnnnnnnnnnnnnnnnnnnnnnnnnnnnnnnnnnnnnnnnnnnnnnnnnnnnnnnnnnnnnnnnnnnnnnnnnnnnnnnnnnnnnnnnnnnnnnnnnnnnnnnnnnnnnnnnnnnnnnnnnnnnnnnnnnnnnnnnnnnnnnnnnnnnnnnnnnnnnnnnnnnnnnnnnnnnnnnnnnnnnnnnnnnnnnnnnnnnnnnnnnnnnnnnnnnnnnnnnnnnnnnnnnnnnnnnnnnnnnnnnnnnnnnnnnnnnnnnnnnnnnnnggactcatccaagtctcataaacaaggatcgaaaaacaaaaatcaaagcctattcatcaaaatctattcggccccttttccccctataaaattctcaaaaatttaagaccccttcccccccgaggattcaggttaaattttttttaccagggtccggggccccttttttggacccattn

SEQ ID NO: 43171 - DNA, 476 bp, Macaca Mulatta
tttgtgacctgctatagtggcataggactatttactgcatgtattataaactgaagattttcttggccttatttcaattgtttgtattgcacagcttcactacaaatttaaagactgctggcattattataaaactatcttcctccttcagtgtaagtaaatgtggaatatttgtgagctggattaggtaacatctgagacttgggattgactaaatttagttatcacctggaaatgaattacataagatacagtaatctgagaaaatacctttgtgcagcatgtatgttaacatctagaactgtccctcatctgcagtgcagtagatgactcagacattttaagaaatgtattcaaatatcattttgatcttatatgttagcagcctttacatgtttacaaatatgatttgtactataaatttctccagtatacaatgtaaacttcaatttctgacattccattttatacatata

SEQ ID NO: 43172 - DNA, 1517 bp, Macaca Mulatta
  misc_feature (1)...(1517): n = A,T,C or G
ggttttccagttcctgaggtgagctggatttgggatggccaggtgatttccacttccactctgcccggcgtgcagatctcctttagcgatggccgcgctaaactgacgatccccgccgtgactaaagccaacagtggacgatattccctgagagccaccaatggatctggacaagcgactagtactgctgagcttctcgtnnnnnnnnnnnnnnnnnnnnnnnnnnnnnnnnnnnnnnnnnnnnnnnnnnnnnnnnnnnnnnnnnnnnnnnnnnnnnnnnnnnnnnnnnnnnnnnnnnnnnnnnnnnnnnnnnnnnnnnnnnnnnnnnnnnnnnnnnnnnnnnnnnnnnnnnnnnnnnnnnnnnnnnnnnnnnnnnnnnnnnnnnnnnnnnnnnnnnnnnnnnnnnnnnnnnnnnnnnnnnnnnnnnnnnnnnnnnnnnnnnnnnnnnnnnnnnnnnnnnnnnnnnnnnnnnnnnnnnnnnnnnnnnnnnnnnnnnnnnnnnnnnnnnnnnnnnnnnnnnnnnnnnnnnnnnnnnnnnnnnnnnnnnnnnnnnnnnnnnnnnnnnnnnnnnnnnnnagaagattgaagcccactttgatgccagatcaattgcaaccgttgagatggtcatagatggtgccgctgggcaacagctgccacataaaacacctcccaggattcctccgaagccaaaatcaagatccccaacgccaccgtccattgctgccaaagcacagctggctcggcagcagtccccatcgcccataagacactccccttccccggtcagacacgtgcgggcaccgaccccatcgccggtcaggnnnnnnnnnnnnnnnnnnnnnnnnnnnnnnnnnnnnnnnnnnnnnnnnnnnnnnnnnnnnnnnnnnnnnnnnnnnnnnnnnnnnnnnnnnnnnnnnnnnnnnnnnnnnnnnnnnnnnnnnnnnnnnnnnnnnnnnnnnnnnnnnnnnnnnnnnnnnnnnnnnnnnnnnnnnnnnnnnnnnnnnnnnnnnnnnnnnnnnnnnnnnnnnnnnnnnnnnnnnnnnnnnnnnnnnnnnnnnnnnnnnnnnnnnnnnnnnnnnnnnnnnnnnnnnnnnnnnnnnnnnnnnnnnnnnnnnnnnnnnnnnnnnnnnnnnnnnnnnnnnnnnnnnnnnnnnnnnnnnnnnnnnnnnnnnnnnnnnnnnnnnnnnnnnnnnnnnnnnnnnnnnnnnnnnnnnnnnnnnnnnnnnnnnnnnnnnnnnnnnnnnnnnnnnnnnnnnnnnnnnnnnnnnnnnnnnnnnnnnnnnnnnnnnnnnnnnnnnnnaggtgagaaaggaggcggagaagactgctgtaactaaggtagtagtggccgccgacaaagccaaggaacaagaattaaaatcaagaaccagagaagtaattaccacaaagcaagagcagatgcacgtaactcatgagcagnnnnnnnnnnnnnnnnnnnnnnnnnnnnnnnnnnnnnnnnnnnnnnnnnnnngctaaagccaaagaacaagaaa

SEQ ID NO: 43173 - DNA, 160 bp, Macaca Mulatta
caagcgaggtgggggagagattgcatctgtttaaattaacaatcaatccatatgtcaactaaattcaaatggtgaaaatcaatcctagtgatggccctgagcaattttcataatgaggtttcatcatctgtgacccatttgttgtcctttgttgcgcgtt

SEQ ID NO: 43174 - DNA, 836 bp, Macaca Mulatta
  misc_feature (1)...(836): n = A,T,C or G
gggggctttcgcagtctccgtgtaatggcgatggccccctgttgttctaccttttttctctctcgctctttttctcctttgactctgtcagactttgttgttgggtctgatcacctcaacattcctggctgtccaatatggggtgacaaagactccagtgaaggaatagctagagcgtgtgattaagcggaggatgtctaaaagaagctcagtaggaaaactgagcacttagatagaaccaggataacaatgggacaaagtaaaagcagccattctactttaaatttcttaaagcatttattacgaagagggggagcgaacgtcattactcataacttaccactcttgagtaacataaagcatttttgcccatggttcccagaacaagggactattggattggatgaatgggaggaaatcataagagatttttaaaaggcgtattaatagagggagaaccataaatcccttttccattttgggccatcgtgggccctaattaaagggcaactccttgagcccctttccaaccttgagcgcccggctcaaatgaaagatgggggaatgcattataaattaacttctcaattctgaattgttagggaaccgggaaagggaaggaaaattaaattgggaaaactgaaaaatatcttttactaaccccgttcgccttccgcttcctgttctcaccttttttgggggaaaaaatatttactctcaaaaattggaaccatatccccgtttattttgcnaagtttataaacccttgaacataatttttgtgtattccacaaattctcttttacataaggcgctgagccccccaaggttaaact

SEQ ID NO: 43175 - DNA, 296 bp, Macaca Mulatta
caggcatcctcagctatcattagacttaaaatgagaggttccggttgtgttatttaaaaacttcccaactgagaagtgcccatgtaaagaatgaaaaggaaacctttttgcttagctctttccactctatgttttataaacacaataaattatagtgataatagaaaattcagtttgagataaggtagtagtcaatttatgaatgcgaacaatatctggatgtttataaggaaattataatagttctctgaactcaaggaaacggggcccggtgcattgacccaaattgtattgca

SEQ ID NO: 43176 - DNA, 800 bp, Macaca Mulatta
  misc_feature (1)...(800): n = A,T,C or G
ggtgtggtggcacatgcctgtagtcccagctgctcaagaagctgagataagagaattgtttgaactccnnnnnnnnnnnnnnnnnnnnnnnnnaatcannnnnnnnnnnnnnnnnnnnnnnntcagagagagaccctatnnnnnnnnnnnnnnnnnnnnnngcccgggcccannnnnnnnnnnnnnnnnnnnnnnnnnnnnnnnnnnnnnnnnntggtggatcannnnnnnnnnnnnnnnnnnnaaacctggccaagnnnnnnnnnnnnnnannnnnnnnnnnnnnngaaacttagccgggcatggtggcaggcgcttgtaatctcagctactttggagactgaggcannnnnnnnnnnnnnnnnnnnnnnnnnnnnngnnnnnnnnnnnnnnnnatgccactgcacaccagcctgggcaaccgagtgacactctgtctcaaaataaagnnnnnnnnnnnnnnnnnnnnnncttgattacacaggcatgactgattgaatcactggccaccggagatcaacaacctttagctcctctcccctcccagaggtcagaataaaagttctaacccctctcatcaagtggttggttctcctggcaaccagcctctgtctggaagctactaagagctccccacccatcagtcatttcattagcctaccaaaaagacccttagtcactcttgggagattccaaaggtttttaggagctgtgccagaaagttgttccaaagacctaagcttttattttctttataaatcaaaatatccttataaaccctgccgggaaaaaataactat

SEQ ID NO: 43177 - DNA, 833 bp, Macaca Mulatta
  misc_feature (1)...(833): n = A,T,C or G
gaaatttattgtccagcaccaccacaaattgacaatggaataattcaaggggaacgtgaacattatggatatagacagtctataacgtatttatgtaatagaggattcaccatgattggagagcactctatttattgtactgtgaatgacgatgaaggagagtggagtggcccaccacctgcatgtagaggnnnnnnnnnnnnnnnnnnnnnnnnnnnnnnnnnnnnnnnnnnnnnnnnnnnnnnnnnnnnnnnnnnnnnnnnnnnnnnnnnnnnnnnnnnnnnnnnnnnnnnnnnnnnnnnnnnnnnnnnnnnnnnnnnnnnnnnnnnnnnnnnnnnnnnnnnnnnnnnnnnnnnnnnnnnnnnnnnnnnnnnnnnnnnnnnnnnnnnnnnnnnnnnnnnnnnnnnnnnnnnnnnnnnnnnnnnnnnnnnnnnnnnnnnnnnnnnnnnnnnnnnnnnnnnnnnnnnnnnnnnnnnnnnnnnnnnnnnnnnnnnnnnnnnnnnnnnnnnnnnnnnnnnnnnnnnnnnnnnnnnnnnnnnnnnnnnnnnnnnnnnnnnnnnnnnngccaccaaagccccagcagcagctcacacatctttcatatcaaaaaccctatctacaaagacccctcctgcagctcagaatcccacaatgacaaattctgctacacaggccacactaacagcccaaagattcaccacagtaaaagttgcatttacgcagagtnnnnnnnnnnnncaacacggagtacacctgcttccaggacaaccaagcattttcataaaacaaccccagataaaggaagtggaaccagttcaggtcagttgacactg

SEQ ID NO: 43178 - DNA, 805 bp, Macaca Mulatta
ttttggcaaatttttctccaggtttcaaagggggatttcagttcaccttgtggcccccccaaaaaagggttaaagggttaaccgggccaggaggccacccacgccctggccttaataaccaaaaatttcatggtgttcttccccatttttactgggacttctgaggttagttcttggaaaagttcatgtggggtttcgccacctgggattctgattttcaaatacttggccccattcaccaggctgggtgtgactttggatgaattcttctgaggttcagtttcctcatctgtaaaaatggaaataaccacagcatctacctccctaggttgttgttaggattaagtaagaaaatgcacataaagtctttagcagagctcgtggcacataggaagaacctgtaaatgtttactattattgttggtggtgtttttggtattcctagtgcctggcccagggaagagatgatgactgttgaaaggataaaagtgctttataagcaagggaagggtgggatgagctttctgttgattttcaaaggcgagatggtaaaagatccaaggtggggcttgctttgtgtgattatgggatcaagccagggcacttctgtacactctgagctgcactctttccctcttttgtttgagatgtgggaagggggtaagaaggggagaatgcccgaaacattcattgtgggacaggcacaggcacaggcacacagagtaccaacaacacatgagccggcagggccgttcttgccagtgtgccgtaatcctgtcctgaagcacttcctgcattcctggcc

SEQ ID NO: 43179 - DNA, 290 bp, Macaca Mulatta
cgtgcctcaaggaatgtgaaaccatggaacacagataagcctctccgtgcatagagaagaaataagcagttaatattctttcctaacccaggcctccagaccagggggctatattacattctacctctaaggaaaagaataaacttcttgactaacataattataaaattcattaattcccccttcagtagtaagtattaaatacctgacttaggattccaacataggtcttggattttgctgcaggagcacctcaaagtctctgaattcccacaaccttttattagatc

SEQ ID NO: 43180 - DNA, 966 bp, Macaca Mulatta
ggggcagtcagtcatttggtgaaaccaatgacaaaaccgccttccacaaaagttgaaataagaaagaagagtattactttttctacaacagaacctggtgaaacttcagagagctgtctggaactcgagaatcacggcaccacagacgtgaaatggcatctgtcatctttagctccaccttatgtcaagggagttgatgaaagtggagacgtttttagagccacctatgcagcattcagatgttctcctatttctggtctactggaaagccatgggatccaaaaagtctccatcacatttttgcccagaggtagaggggattatgcgcagttttgggatgttgaatgtcaccctcttaaggagcctcacatgaaacacactttgagattccaactctctggacagagcatcgaagcggaaaatgagcctgaaaacgcacccctttccacggattccctcgttaaaatcgatcatttagtgaagccccgaagacaagctgtgtcggaggcttctgctcgcatacctgacaggcagcttgatgtgactgctcgcggagtttatgccccagaagatgtgtacaagttcctgccgactagtgtaggggaatcacggacactcaaagtcaatctgcgaaataattcttttattccacactccctgaagtttttgaggcccagagagcccttctatggtcatcattccaagtaaccctctgagaccccagcattccctcaacttgccccgtgcagttcaaaaccaacgtccgcgggcgaaatttgaaccttcggtttggcttctcaaccgaatggacgggaagacgtactggctattcgacctagcgggtggagacccctctgaccaagattcccctataattacccctttttgggcgtagggcacacttcccttgacgctggcacccccggtgaaaccctccgctcctttccaccacgctaccagccttgc

SEQ ID NO: 43181 - DNA, 762 bp, Macaca Mulatta
gggttaactatagttaagagcccaactttggtgttgggacagctcgttttgagtccttgctctgctatggtgccatctgtgaccttagatgacctccagtaagatagctagccaaaccaagataattactaattcatggttaagctgaagggataaaatgtacctgagagcattgttaatgctggctcaataagaggcatctgagaagggacttttgaaaggttcttggcctctggggtgaagactttcttttcttaaggtcagagccataagatgatggaaagttgtttcattgcagcctagaactctgtgtttgaacctcccttgagcccgtgccgtgtgcaagaggtaaactgtgagtgactgtccttaggcttctggattgtttggtcctgtggacttatgtagggagctatgtatattgggactccacattcacattctcataggactgaggctcaaacacatgcaatgtgttactttgcggtgtctacactagggaaatcaagcagggcattggtgatgggaggaagtgatcaagaaccaggtagcatgatggtaagtggacagggtttaaaaacccaggggcttttggccgtctgcccaaatctatgtctttagcccatgtttctccacctagtcttatttaattgcctcctggccatttatacctggatgccccagaggcacctctgccttctcacttgccctcatgctgggctttgtgtggactgtccatttcattgccctagcactaacctt

SEQ ID NO: 43182 - DNA, 687 bp, Macaca Mulatta
  misc_feature (1)...(687): n = A,T,C or G
gggaattgaaggggccaaagttagaaagacaaattaggaaggggtttcattgatagaaaaggtgatgaggcattcaactaagatcattgctatagagatggtaaaggggtaatagattcatgagatattaaggaggtaggatcacctatatttagtgactatttaaagttgagaaaaagagaaatcaagaatgactcacacataattttccgccttgcagactgagaagataactaaaaagatgcggtaatatctttctgaacagcatatctgggttgtggttaaaatcctattgcttactaaagtgatagattagtatctactctgatttatataaaaataaatgatgacacccgaagaagcccatactgtatttctaataattttgagattctttttaatagaaaacttaaggcccggattatattttcaactttttttctatctgtaagtttctttnnnnnnnnnnnnnnnnnnnggaatgagtagctaactatgtagctggtaccaaggcaaggtttttaaattttctgtgccatgacgtgattattcacatggtggacttttgactacagacagaaatacactcanaaacagcagaaagaatgtatttgtcagcagaccatccacccngctgagagtaggacatgactagacatcgatcagataagcttgatctgatatgta

SEQ ID NO: 43183 - DNA, 596 bp, Macaca Mulatta
catctatcatcagagagtaacactggagagaaacctcatggatgcagtatatgtgggaaagccttctccagaaggtccgggctgactgaacaccagagaaatcacacaggagagaaaccctatgaatgcactgaatgtgacaaagcattccgctggaaatcacagctcaatgcgcaccagaaaattcatacaggagagaaatcatatatatgcagtgattgtggaaaaggcttcatcaagaagtctcggctcattaatcatcagagagttcatacaggagagaaaccacatggatgcagcctgtgtgggaaagccttctccaaaaagtccaggctcactgaacaccagagaactcatacaggagagaaaccctatgaatgcactgagtgtgacaaagcattccgctggaaatcacagctcaatgcgcatcagaaagctcacacaggagagaagtcctatatatgcagtgattgtggaaaaggcttcattcagaagggaaatctcattgtacatcagcgaattcatactggggaaaaaccctatatatgccatgactgtgggcaaggcttcatcccaaagggtagtctccttattca

SEQ ID NO: 43184 - DNA, 761 bp, Macaca Mulatta
atctcccagagactgttcatggtgctgtgggtcaagggagtcaccttcaatgttaccaccattgacaccaagagatggaccgagagagtgcacaagctgtgcccaggagggcagctcccattcctgctgtatggcactgaagtgcacacagacaccaacaagatggaggaatttccggaggcagtgctgtgccctcccagataccccaagctggcagctctgaaccctgagtccaacacagccaggctggacatatttgccaaattttctgcctacatcaagaattcaagcccagcactcaatgataatctggagaagggactcctagaagccctgcaggttttaggcaattacttaacatcccccctcccagaagaagtggatgaaaccagtgctgaagatgagggcatctctcagaggaagtttctgaatggcaacgaactcaccctggctgacctcaacctgttgccaaagctgcacatagtacaggtggtgtgtaagaagtaccggggatttaccatccccgaggccttccccggagtgcataggcacttgagcaatgcttatgcatgggaagaatctgcctccacctgcccaggtggcgaggagatcaagctcgcctatgattaaggggccaaggccctcaagtaagcccctcctgggacttcctcaacgccctccgttttctccacaaaggccccagtggtttccacattgctacccaatggacacactccaaaatggccagtgggcagggcatc

SEQ ID NO: 43185 - DNA, 768 bp, Macaca Mulatta
ggccttgtttttccatgctattccacctactcttatatcatttcctttcttctgctgctgacttattatccattcttcaaaagctcaaatgtctttcacatacttttaaacttgattcaattgttctcactattaattatcttaattagtcatttatgccatttgcacattctacagtctactttggttatatagatatttgcattaggctttctcatctttcttcaatctacagaagtagtggagaattttgcttactaaatattgagctcaataaatattgctgaatttaattgagggtcagggatgcttctgtggaatgattaaacgaatactataaggaaagaagtgatgggcatatttatcataaatacccctaaatgaaatggagaggaacatacagcttggctgcagaggatgtggtcattatgtaagctaggacagtcacatccaatttcagatacatcctcagctctttacctcggaagtatgcattgccttggtcagaaatcatgttttcatccatctttaaatttcattttctaccatatggaaaggtgttaggtaaattacccttttaatggaatgtattgacatccctgccggcaagaatgaagttccggtcattccaaaatggggaagtcaaaaattttttgaaactcgaaaaaattaagccccaatataatatccccccacccttggaaaaacaccgcaattaacccggatggggtgtcccttttctccccaccttcaaagaaagcacaaaat

SEQ ID NO: 43186 - DNA, 654 bp, Macaca Mulatta
  misc_feature (1)...(654): n = A,T,C or G
gggggtcttcgccccgccttcggaccggaaggagttgttggcgcttccgttggcctgcgaccctgtaattgcctcggtgatgtcgtgggttcaaggagcgtccttggtccggggccctggagacaaaggggacgtgtttgacgaggaggcagacgagtcgctcctggcgcagcgggaatggcagagccacatgcagagacgagtcaaagaaggttatagagatggaatagatgctggaaaaacagttactcttcaacagggcttcaatcaaggtttataagaagggcccaaaattctttttaaacctatgggacaactcccgaggaacatttaatggctttggccccccgggggtccccctccaaataataattcaactttgacccataaaaaaaacatcccttcggaatgcctttggccctttggaaaaaaaatttgcccccaacctccgaaaatcaatccccccccccctccccctgttttaaaatttttttgcccccccttggagagtaagggaaatttttcccgtgacttcccccnnnnnnnnnnnnnnnnnnnngaacttaaaaatagaaacacctgcgtaaataatgggtgattttacaacaattttacaataccccctgggggaaacttccttattaaagaataaaa

SEQ ID NO: 43187 - DNA, 774 bp, Macaca Mulatta
  misc_feature (1)...(774): n = A,T,C or G
gggcaagcatctttgtaataatagagtattactggcaccccagaaactcttgatatactttcttttctttagaggtaaccagtatcatgactttaatggtaattatttatacaatttcgaatataattttgtcactttacatgtattcctaagcagtatgtnnnnnnnnnnnnnnnnnnctctttttaatctttatggaatcgtgtattctttcttccttcactcagcattatgttttgaagagttatccatgtagttatgtgtagttttatttcattcatttttgttgttatgtattatccctttgaattaaatgtgccagaatttattcattctttctgctgttggtagatcattgagttgtttctagtatttgatgacattgctgagaatgtgttttaaagaatatcctggttacatatcatgtatacatttctttatatcctgagagtaacagtattaaatgttggggaagattctaaaatgattatcatttcttttattgtaggccttacatatatagtaaagtgacatacagttcgagatagtttaaatatagaatacatacagatagatctagttatactattgatgtagatacaggacctaatgtagtaactttgtttcattttgttagcacactcattctatttagtaatatgtcatgccttctataactcctttccctttactgatgaagaaaactaaggactagagagattgagtcacttggaacaaggcccatttagcaaaattggagcctagaaactagaa

SEQ ID NO: 43188 - DNA, 1131 bp, Macaca Mulatta
  misc_feature (1)...(1131): n = A,T,C or G
ggatatttccaaattgcattctcttggggtcattcatggtcaaggtagaaaggggttatacaggccatcatgagactacaatggcatttcacagtaattcacattagtaaaatagaaaattgcttttaaaattttttaattcatgcataatacttgtacatatttatagggtacatgggatattctgatacattcatatagcatgtaatgatcaaatcagggtatttaggatagccatcatctcaaacatttatcatttcttggtgtcaggaacattctaaaccttttcttttacttattctgaaatatacagttaattattctttattctagtcaccctactgggctatatcaaaccctagaacttattctatttaaatttatggttggtttggacccaattaatggaacatactcattcatccctcagtatctaaaccaacaacacctattccgagagacatctgggaaaaaccaatcactttctttatgtggccataaacctcgcccaatgggataaatctcagatccctctttttttacaacctcgcgccccaattacatatattgataggcattgggaaagtcagaacaacgaagaggtgtttgaaaaaaaaagannttattcgggcgggttaagtaaaatttccccctgtcccattggagggcgctgagggtggggcccatttgcaaaaaattatatctaaatctctatataattacaccgaaattattatacctagaaaagcccccctctccgatgatgaattccccccaatatgggacacacatgagtttttatgacccctgacagcctaaataaatgtgctaaanaccaggagcgacaaatatgtggcaataagaaaaacgtagagttctcgtgctaaaaaacaaaagctcacttaggcggtaagaacagttaaatgtcgtggaaagaggagatgctctcttttatatcaacatacactacgcaatattatatcaaatgagtggcgttagactacactttgtcacagcctggtgtgtaaataaaaaaaagccgcgtaaaataaaagtgaggggtgacacatgccacaatgaccccaaaagaggtaaactacacatacgtttgtcccctagnnaggaggagga

SEQ ID NO: 43189 - DNA, 815 bp, Macaca Mulatta
  misc_feature (1)...(815): n = A,T,C or G
gggtgttcacagaaaagaagtgacaggatctttaactatataaataattttgaaagaaaatagaaaatgaaggtaaaataataggaaataatgttcatttactgaaaatacctataaccccctcctaagaaacacaggcataaaaatagatatataggctaggtgtagtggctcacactnnnnnnnnnnnnnnnnnnnnnnnnnnnnnttgggtgatcgcttgaggtcaagagttcaagaccagtctgaccaacatgannnnnnnnnnnnnnnnnnnnnnnnnnnnnnnnnnnnnnnnntcagccaggcatggtggcatgtgtgtctgtattcctagctactcaggaggctgtgacaggagaatcacttaaacccaggaggcagaggttgcaatgagccaagatcacgccactgcattccacnnnnnnnnnnnnnnnnnnnnnnnnnnnnnnnnnnnnnnnnnnnnnnnnnnnnatatatagatcaatggaattgaactgagactttataactagacccttatatttatggtcaattcattttcttcaagaatgccaagataattcaatggaggaagaaaaacctctctaacaaatgatgctgggataaatggaaattgacatgcagaagatgaagttggggacgctactcacaccatgcacaaaaattcatttaaaatgggataaaagatctagctttttaagtactaaaactgtacaactttgtagaaaaaaatggttatngtgaatattacatgttaagtaatccttgaaccctacctagtgggttttttttttatagatatggaaaacccc

SEQ ID NO: 43190 - DNA, 421 bp, Macaca Mulatta
  misc_feature (1)...(421): n = A,T,C or G
ggcggcgctgcatggaggggcagcagaccagactggagcaagagggccagagggaggcaagatgcaaagtaaagcctggaaatccagacgacaccgggaaccgcctgcactctctgaggttcaccagcgcccagacccgcctgtggatggactcacccttgtcctctgggtcccgcctgtgcccaggactcccaggacctcggaggtatactctaggcgtgatcttcattcttctgcagaactgttcgccttaatttgctggagattgtcttaaagcatggcctctatccatccacagaatttagcggaattgattaaaataaacaacacttggccgggtgcggtggcttcccaannnnnnnnnnnnnnnnnnnnnnnnnnnnnnnacgggaggatcanctaggtcaggaagaatcgagac

SEQ ID NO: 43191 - DNA, 761 bp, Macaca Mulatta
  misc_feature (1)...(761): n = A,T,C or G
ggccatttgcctgatttccttcaattctgctagctgctatttctcacactcctttgctctttctcctccaagagacttctaaattgtgacagaccctaaggcattatctccagccatcctttcttcctgtctgttttctctctttggaagatctcatcctgcccccatggtcttaaaaacaccttgtaggctgatgattctaaaatgtatacctgcagtttggacctctcccctgagtccagacttgtctctccctccttggcttagcacagtgacaaccagctagagcccctgagccagtggactaattcagactctgccatttattacaaccttagcagccacaataccagtccctatttccagatgaacttaagaggcataaatgagctactgtccgtaaaagggcttagagcagggcctgccacataataggcactgataaataatagctatgattatgacttaaatctctactttggatatctaaaaagcatctcatttttaacatgacaaaaacaggacaattggtgtcttccccccataccctctgacacaccagggtttcaaaccagatcaaacacccagaaagaaatttttgattctntcctcttttccttcaaatgactcatcccagtccaatgcatttattaaagtccctggcccaactttatcctacaaaaaaaaacttccctgaatggttttcccccccttggcccttaatcccttggccctnnnnnnnnnnnnnttnnnnnnnnnnn

SEQ ID NO: 43192 - DNA, 236 bp, Macaca Mulatta
tcaccagcactggcaggtttggagagctgtatctgattgggccttgggaactgaggtaggctgcattgaagagatttgaccatttttaactaagttatataagtttttttgaataggtaatacatttaaaaagtctttggcgccatctgatcagttctcaccaactgtcaccaataatattagtatttaatatggcacttgatatttgtatgcatattgcaagcaaatttataatt

SEQ ID NO: 43193 - DNA, 3999 bp, Macaca Mulatta
  misc_feature (1)...(3999): n = A,T,C or G
atatattagaaggtgaagttgaccattctttctttgacagtgactttgaagaaggaaagaaatgtgaaactaactcagtttttgacaagcaaaatgatgacctgaattttttaatagataaagatacaaaaaatgtgaactcgaacactgtaatgccaacaacagaggagggtgggactgagaagggaaatgaaagaaacctgaaacttcccccagaacaccctgtagagaacgatgttacacaaactgtaagttctttctcattgccagcctcttcaagatcaaaaaaattgtgtgatgatacaacaggacttaaaatacatgtgtccattcccagtagaattcccaacattggaaaataaggcgaagacgatcaccacccagatcggagacgaaaagcagcgatgatgggaagaaaaaccatgccaaggtctagtccaccaaaccatttacctacgttaataaagcttaaggataaagattgcaaagttatgttccctttcctccccctccttaacttccccatcttcannnnnnnnnnnnnnnnnnnnnnnnnnnnnnnnnnnnnnnnnnnnnnnnnnnnnnnnnnnnnnnnnnnnnnnnnnnnnnnnnnnnnnnnnnnnnnnnnnnnnnnnnnnnnnnnnnnnnnnnnnnnnnnnnnnnnnnnnnnnnnnnnnnnnnnnnnnnnnnnnnnnnnnnnnnnnnnnnnnnnnnnnnnnnnnnnnnnnnnnnnnnnnnnnnnnnnnnnnnnnnnnnnnnnnnnnnnnnnnnnnnnnnnnnnnnnnnnnnnnnnnnnnnnnnnnnnnnnnnnnnnnnnnnnnnnnnnnnnnnnnnnnnnnnnnnnnnnnnnnnnnnnnnnnnnnnnnnnnnnnnnnnnnnnnnnnnnnnnnnnnnnnnnnnnnnnnnnnnnnnnnnnnnnnnnnnnnnnnnnnnnnnnnnnnnnnnnnnnnnnnnnnnnnnnnnnnnnnnnnnnnnnnnnnnnnnnnnnnnnnnnnnnnnnnnnnnnnnnnnnnnnnnnnnnnnnnnnnnnnnnnnnnnnnnnnnnnnnnnnnnnnnnnnnnnnnnnnnnnnnnnnnnnnnnnnnnnnnnnnnnnnnnnnnnnnnnnnnnnnnnnnnnnnnnnnnnnnnnnnnnnnnnnnnnnnnnnnnnnnnnnnnnnnnnnnnnnnnnnnnnnnnnnnnnnnnnnnnnnnnnnnnnnnnnnnnnnnnnnnnnnnnnnnnnnnnnnnnnnnnnnnnnnnnnnnnnnnnnnnnnnnnnnnnnnnnnnnnnnnnnnnnnnnnnnnnnnnnnnnnnnnnnnnnnnnnnnnnnnnnnnnnnnnnnnnnnnnnnnnnnnnnnnnnnnnnnnnnnnnnnnnnnnnnnnnnnnnnnnnnnnnnnnnnnnnnnnnnnnnnnnnnnnnnnnnnnnnnnnnnnnnnnnnnnnnnnnnnnnnnnnnnnnnnnnnnnnnnnnnnnnnnnnnnnnnnnnnnnnnnnnnnnnnnnnnnnnnnnnnnnnnnnnnnnnnnnnnnnnnnnnnnnnnnnnnnnnnnnnnnnnnnnnnnnnnnnnnnnnnnnnnnnnnnnnnnnnnnnnnnnnnnnnnnnnnnnnnnnnnnnnnnnnnnnnnnnnnnnnnnnnnnnnnnnnnnnnnnnnnnnnnnnnnnnnnnnnnnnnnnnnnnnnnnnnnnnnnnnnnnnnnnnnnnnnnnnnnnnnnnnnnnnnnnnnnnnnnnnnnnnnnnnnnnnnnnnnnnnnnnnnnnnnnnnnnnnnnnnnnnnnnnnnnnnnnnnnnnnnnnnnnnnnnnnnnnnnnnnnnnnnnnnnnnnnnnnnnnnnnnnnnnnnnnnnnnnnnnnnnnnnnnnnnnnnnnnnnnnnnnnnnnnnnnnnnnnnnnnnnnnnnnnnnnnnnnnnnnnnnnnnnnnnnnnnnnnnnnnnnnnnnnnnnnnnnnnnnnnnnnnnnnnnnnnnnnnnnnnnnnnnnnnnnnnnnnnnnnnnnnnnnnnnnnnnnnnnnnnnnnnnnnnnnnnnnnnnnnnnnnnnnnnnnnnnnnnnnnnnnnnnnnnnnnnnnnnnnnnnnnnnnnnnnnnnnnnnnnnnnnnnnnnnnnnnnnnnnnnnnnnnnnnnnnnnnnnnnnnnnnnnnnnnnnnnnnnnnnnnnnnnnnnnnnnnnnnnnnnnnnnnnnnnnnnnnnnnnnnnnnnnnnnnnnnnnnnnnnnnnnnnnnnnnnnnnnnnnnnnnnnnnnnnnnnnnnnnnnnnnnnnnnnnnnnnnnnnnnnnnnnnnnnnnnnnnnnnnnnnnnnnnnnnnnnnnnnnnnnnnnnnnnnnnnnnnnnnnnnnnnnnnnnnnnnnnnnnnnnnnnnnnnnnnnnnnnnnnnnnnnnnnnnnnnnnnnnnnnnnnnnnnnnnnnnnnnnnnnnnnnnnnnnnnnnnnnnnnnnnnnnnnnnnnnnnnnnnnnnnnnnnnnnnnnnnnnnnnnnnnnnnnnnnnnnnnnnnnnnnnnnnnnnnnnnnnnnnnnnnnnnnnnnnnnnnnnnnnnnnnnnnnnnnnnnnnnnnnnnnnnnnnnnnnnnnnnnnnnnnnnnnnnnnnnnnnnnnnnnnnnnnnnnnnnnnnnnnnnnnnnnnnnnnnnnnnnnnnnnnnnnnnnnnnnnnnnnnnnnnnnnnnnnnnnnnnnnnnnnnnnnnnnnnnnnnnnnnnnnnnnnnnnnnnnnnnnnnnnnnnnnnnnnnnnnnnnnnnnnnnnnnnnnnnnnnnnnnnnnnnnnnnnnnnnnnnnnnnnnnnnnnnnnnnnnnnnnnnnnnnnnnnnnnnnnnnnnnnnnnnnnnnnnnnnnnnnnnnnnnnnnnnnnnnnnnnnnnnnnnnnnnnnnnnnnnnnnnnnnnnnnnnnnnnnnnnnnnnnnnnnnnnnnnnnnnnnnnnnnnnnnnnnnnnnnnnnnnnnnnnnnnnnnnnnnnnnnnnnnnnnnnnnnnnnnnnnnnnnnnnnnnnnnnnnnnnnnnnnnnnnnnnnnnnnnnnnnnnnnnnnnnnnnnnnnnnnnnnnnnnnnnnnnnnnnnnnnnnnnnnnnnnnnnnnnnnnnnnnnnnnnnnnnnnnnnnnnnnnnnnnnnnnnnnnnnnnnnnnnnnnnnnnnnnnnnnnnnnnnnnnnnnnnnnnnnnnnnnnnnnnnnnnnnnnnnnnnnnnnnnnnnnnnnnnnnnnnnnnnnnnnnnnnnnnnnnnnnnnnnnnnnnnnnnnnnnnnnnnnnnnnnnnnnnnnnnnnnnnnnnnnnnnnnnnnnnnnnnnnnnnnnnnnnnnnnnnnnnnnnnnnnnnnnnnnnnnnnnnnnnnnnnnnnnnnnnnnnnnnnnnnnnnnnnnnnnnnnnnnnnnnnnnnnnnnnnnnnnnnnnnnnnnnnnnnnnnnnnnnnnnnnnnnnnnnnnnnnnnnnnnnnnnnnnnnnnnnnnnnnnnnnnnnnnnnnnnnnnnnnnnnnnnnnnnnnnnnnnnnnnnnnnnnnnnnnnnnnnnnnnnnnnnnnnnnnnnnnnnnnnnnnnnnnnnnnnnnnnnnnnnnnnnnnnnnnnnnnnnnnnnnnnnnnnnnnnnnnnnnnnnnnnnnnnnnngtctnttctgttcataatggcattagtctctgaatacattttatattatctttgctgccacatgtcaggatacaacacaatagttttataaataaaaactgtactttgattttaggtactaatttaatgctttagtttttactactttgaaaggggaagttcatctaagtattactgataacagggatccaacttaaagtaaaagttggaaagggcaacagtcttttaagcagaacttacaattctgttgtcatggttacttatatataatgaatatgactagacaaataggagttggaaaatgtggtatattctctaagtcaagatgctctgaagttattatagtttaagggacattcttaaggaattacttaagtatattactctttttgttttcaaggacatgaaaaagtaaaggatggtcgagcactatttta

SEQ ID NO: 43194 - DNA, 649 bp, Macaca Mulatta
gttttattgtggtgattttcttatgagaaagtaggcaacttcaattttccttgagggggaaaaaacataaccccccaactttttttcacccatgacttgagccctgaaacaacagcctttgtgttttcagtgcaggatttcttggaatttcttgcttgtatcaatcctgatgatagccatcctgaacagatgcttctggtgtgtcttcctggaagagcagacatccttttgaacactaatgatgccaggaagagggtaaggctagaggaggagactgtcattttaaccccaatccagtggcttgtctcccaacaggccatttcccttgacattccttcacagacagaaatggctgttaaaaatgttttaacctcatgtatgaactgaatttaaaaaaccagtaaagtgatactttatacttctgatgttttactccctagtgggttttctttaatttggatttttgtcaggatgtagcttttcctcaactgtatttctgtagctctttttctctggagtattcatggaaagcatctactgccggatgacactagtactgtgccttctttcattgccctcggctctgcagctctcacccagcttggctgcttcaagtctgtgcagttgacttgactgtactgaaaagtga

SEQ ID NO: 43195 - DNA, 834 bp, Macaca Mulatta
  misc_feature (1)...(834): n = A,T,C or G
gggggttttttgcagagttcatttattaaaacaacttgtgtaaagacaaattgtgctttggtttgcttttttctcctgtacacattttgacattttccagtgtggagagtgttttgtcaaaagtgtaaagcattgtgagagtaatacaaaagcagataatgcccatttgtagtcctatccctgaagggcataaaatgctttaaaattctgagacagagctttactctaacaatgcagtgaaatacttcaacagttaaaatgtctgagaaaaatcaaaccccaaagtaatgggccaatagggagtttatatgacaaccctagtaaccagaacgtcagaaatagagaaatgttcagatctcttccaagctcagcttttttcagcatatgctggcatcctactcaaggagaaaaggaaactgcataaatgtctcaccaatctgacttaccagaatatctgtggtcatgttaataaacacctaaaggcaatatattctttttgtttggtgnnnnnnnnnnnnnnnnnnnnnnngagaaagggtctcaannnnnnnnnnnnnnnnnnnnnnnnnnnnnncaatcaaggctcctgcacctcaactccaggctcagcgatctctgcccacctccgagtactgaccaggcccactgccgtactttcgtttganaagggttcacatgcngtgctatctggagactcctaccattnnnnnnnnnnnnnnnnnnnnnnnnnnnnnnnnnnnnnnnnnnnnnnnnnnnnnnnnnnnnnnnnnnnnnnnnnnnnnnnnnnnnnnnnnnnnnnnnnnnnnnnnnnnnnnnnnnnnnnnnnnnnnnnnn

SEQ ID NO: 43196 - DNA, 4087 bp, Macaca Mulatta
  misc_feature (1)...(4087): n = A,T,C or G
ctgaggctgactgtgctgcctgaggaccggctacagatgaagtggagagagtcggaggggagcggcctcggctacctggtgcaggtgcagcccatggcaggnnnnnnnnnnnnnnnnnnnnnnnnnnnnnnnnnnnnnnnnnnnnnnnnnnnnnnnnnnnnnnnnnnnnnnnnnnnnnnnnnnnnnnnnnnnnnnnnnnnnnnnnnnnnnnnnnnnnnnnnnnnnnnnnnnnnnnnnnnnnnnnnnnnnnnnnnnnnnnnnnnnnnnnnnnnnnnnnnnnnnnnnnnnnnnnnnnnnnnnnnnnnnnnnnnnnnnnnnnnnnnnnnnnnnnnnnnnnnnnnnnnnnnnnnnnnnnnnnnnnnnnnnnnnnnnnnnnnnnnnnnnnnnnnnnnnnnnnnnnnnnnnnnnnnnnnnnnnnnnnnnnnnnnnnnnnnnnnnnnnnnnnnnnnnnnnnnnnnnnnnnnnnnnnnnnnnnnnnnnnnnnnnnnnnnnnnnnnnnnnnnnnnnnnnnnnnnnnnnnnnnnnnnnnnnnnnnnnnnnnnnnnnnnnnnnnnnnnnnnnnnnnnnnnnnnnnnnnnnnnnnnnnnnnnnnnnnnnnnnnnnnnnnnnnnnnnnnnnnnnnnnnnnnnnnnnnnnnnnnnnnnnnnnaggtgctggcagctgtgcaccgcctccgctacaannnnnnnnnnnnnnnnnnnnnnnnnnnnnnnnnnnnnnnnnnnnnnnnnnnnnnnnnnnnnnnnnnnnnnnnnnnnnnnnnnnnnnnnnnnnnnnnnnnnnnnnnnnnnnnnnnnnnnnnnnnnnnnnnnnnnnnnnnnnnnnnnnnnnnnnnnnnnnnnnnnnnnnnnnnnnnnnnnnnnnnnnnnnnnnnnnnnnnnnnnnnnnnnnnnnnnnnnnnnnnnnnnnnnnnnnnnnnnnnnnnnnnnnnnnnnnnnnnnnnnnnnnnnnnnnnnnnnnnnnnnnnnnnnnnnnnnnnnnnnnnnnnnnnnnnnnnnnnnnnnnnnnnnnnnnnnnnnnnnnnnnnnnnnnnnnnnnnnnnnnnnnnnnnnnnnnnnnnnnnnnnnnnnngcctggtcctgagccaggtgacctcctccagcatccacgtgtcctggactccagccccccggctccccctcaagtatctgattgtttggcgagcctccagaggtggcacccccagggaggtgnaggtggtggtggaggggcctgccgcctccgcagagctgcacaacctgacctcccgcacggagtacctggtctccgtgttccccatctacgagggcggggttggcgagggcctgcggggcctggtgaccacagnnnnnnnnnnnnnnnnnnnnnnnnnnnnnnnnnnnnnnnnnnnnnnnnnnnnnnnnnnnnnnnnnnnnnnnnnnnnnnnnnnnnnnnnnnnnnnnnnnnnnnnnnnnnnnnnnnnnnnnnnnnnnnnnnnnnnnnnnnnnnnnnnnnnnnnnnnnnnnnnnnnnnnnnnnnnnnnnnnnnnnnnnnnnnnnnnnnnnnnnnnnnnnnnnnnnnnnnnnnnnnnnnnnnnnnnnnnnnnnnnnnnnnnnnnnnnnnnnnnnnnnnnnnnnnnnnnnnnnnnnnnnnnnnnnnnnnnnnnnnnnnnnnnnnnnnnnnnnnnnnnnnnnnnnnnnnnnnnnnnnnnnnnnnnnnnnnnnnnnnnnnnnnnnnnnnnnnnnnnnnnnnnnnnnnnnnnnnnnnnnnnnnnnnnnnnnnnnnnnnnnnnnnnnnnnnnnnnnnnnnnnnnnnnnnnnnnnnnnnnnnnnnnnnnnnnnnnnnnnnnnnnnnnnnnnnnnnnnnnnnnnnnnnnnnnnnnnnnnnnnnnnnnnnnnnnnnnnnnnnnnnnnnnnnnnnnnnnnnnnnnnnnnnnnnnnnnnnnnnnnnnnnnnnnnnnnnnnnnnnnnnnnnnnnnnnnnnnnnnnnnnnnnnnnnnnnnnnnnnnnnnnnnnnnnnnnnnnnnnnnnnnnnnnnnnnnnnnnnnnnnnnnnnnnnnnnnnnnnnnnnnnnnnnnnnnnnnnnnnnnnnnnnnnnnnnnnnnnnnnnnnnnnnnnnnnnnnnnnnnnnnnnnnnnnnnnnnnnnnnnnnnnnnnnnnnnnnnnnnnnnnnnnnnnnnnnnnnnnnnnnnnnnnnnnnnnnnnnnnnnnnnnnnnnnnnnnnnnnnnnnnnnnnnnnnnnnnnnnnnnnnnnnnnnnnnnnnnnnnnnnnnnnnnnnnnnnnnnnnnnnnnnnnnnnnnnnnnnnnnnnnnnnnnnnnnnnnnnnnnnnnnnnnnnnnnnnnnnnnnnnnnnnnnnnnnnnnnnnnnnnnnnnnnnnnnnnnnnnnnnnnnnnnnnnnnnnnnnnnnnnnnnnnnnnnnnnnnnnnnnnnnnnnnnnnnnnnnnnnnnnnnnnnnnnnnnnnnnnnnnnnnnnnnnnnnnnnnnnnnnnnnnnnnnnnnnnnnnnnnnnnnnnnnnnnnnnnnnnnnnnnnnnnnnnnnnnnnnnnnnnnnnnnnnnnnnnnnnnnnnnnnnnnnnnnnnnnnnnnnnnnnnnnnnnnnnnnnnnnnnnnnnnnnnnnnnnnnnnnnnnnnnnnnnnnnnnnnnnnnnnnnnnnnnnnnnnnnnnnnnnnnnnnnnnnnnnnnnnnnnnnnnnnnnnnnnnnnnnnnnnnnnnnnnnnnnnnnnnnnnnnnnnnnnnnnnnnnnnnnnnnnnnnnnnnnnnnnnnnnnnnnnnnnnnnnnnnnnnnnnnnnnnnnnnnnnnnnnnnnnnnnnnnnnnnnnnnnnnnnnnnnnnnnnnnnnnnnnnnnnnnnnnnnnnnnnnnnnnnnnnnnnnnnnnnnnnnnnnnnnggtgcacgtggctgtgggccgctccaaggtcgggctctatgtggactgccgaaaggtggctgagcggcccctcggggaggtgggcagcgcgccctctgccggcttcatcacactggggaggctggccaaggccaggggcccccggagcagnnnnnnnnnnnnnnnnnnnnnnnnnnnnnnnnnnnnnnnnnnnnnnnnnnnnnnnnnnnnnnnnnnnnnnnnnnnnnnnnnnnnnnnnnnnnnnnnnnnnnnnnnnnnnnnnnnnnnnnnnnnnnnnnnnnnnnnnnnnnnnnnnnnnnnnnnnnnnnnnnnnnnnnnnnnnnnnnnnnnnnnnnnnnnnnnnnnnnnnnnnnnnnnnnnnnnnnnnnnnnnnnnnnngggagagcccgggccacccggacagatgggaccagaaggtcctggaggccagcaggggtcaccggggacccaaggccgcgcagtcccggggcctgtggnnnnnnnnnnnnnnnnnnnnnnnnnnnnnnnnnnnnnnnnnnnnnnnnnnnnnnnnnnnnnnnnnnnnnnnnnnnnnnnnnnnnnnnnnnnnnnnnnnnnnnnnnnnnnnnnnnnnnnnnnnnnnnnnnnnnnnnnnnnnnnnnnnnnnnnnnnnnnnnnnnnnnnnnnnnnnnnnnnnnnnnnnnnnnnnnnnnnnnnnnnnnnnnnnnnnnnnnnnnnnnnnnnnnnnnnnnnnnnnnnnnnnnnnnnnnnnnnnnnnnnnnnnnnnnnnnnnnnnnnnnnnnnnnnnnnnnnnnnnnnnnnnnnnnnnnnnnnnnnnnnnnnnnnnnnnnnnnnnnnnnnnnnnnnnnnnnnnnnnnnnnnnnnnnnnnnnnnnnnnnnnnnnnnnnnnnnnnnnnnnnnnnnnnnnnnnnnnnnnnnnnnnnnnnnnnnnnnnnnnnnnnnnnnnnnnnnnnnnnnnnnnnnnnnnnnnnnnnnnnnnnnnnnnnnnnnnnnnnnnnnnnnnnnnnnnnnnnnnnnnnnnnnnnnggggagcctggagctgttggtcagacgggcagccctgggcagcaggggggctagcacccagggcctctgggagnnnaggacattttctgcactgtcccgaggaaccctgcgccttcctccatggtttgtctggacaccaagagcgaccacatctggaaaagccaggagaaaagctcaagaagcacctgcaggtggaaggagagggaaggagcaaccttggccaaggcccacccca

SEQ ID NO: 43197 - DNA, 732 bp, Macaca Mulatta
  misc_feature (1)...(732): n = A,T,C or G
gggatcctccgccctctgcagggtttattgttgctgtttgttgtggattgtcgtttctcatttgtttagttactttcctgacctttttaaataaagactgtattccatcagtggtgcttgtttctgttctgttaggttagtggttagcttgtgctttgaaagagatttctttaaatgtctattggcaaaaggataaagagacnnnnnnnnnnnnnnnnnnnnnnnnnngctaggactttgggaagtggaggcgggtnnnnnnnnnnnnnnnnnnnnnnnaagaccagcctagccaatnnnnnnnnnnnnnnnnnnnnnnnnnnnnngaaaaattaatcggacatggtggcatccacctatagtcccagctactgggaagannnnnnnnnnnnnnnnnnnnnnnnnnnnnnnnnnnnnnnnnnnnnnnnnnnnnnngnnnnnnnnnnnnnnnnnnnnnnnnnnnnnnnnnnnnnnnnnnnnnnnnnnnnnnnnnnnnnnnnnnnngatacagagcatcttccatcctttccaggttgcctctgtacaggggcgagtccttcagtgcccgccaggctgttcacggctcttcctcaccctttacttctggctcacatggagcctaaaggtgagccagaagtgaaagctggggggcccgcctgaagtgtttctgagcaccgtgtcgccccccgctgtggtgcatgggcgtttctggaattttcccaagcatggaac

SEQ ID NO: 43198 - DNA, 659 bp, Macaca Mulatta
atttgaggttctttcactgaagttgctaatctgctcaatataagtagatggcaagattttgaaaaggagcagcgcaagtaattatacccacagtgcataactaattttacagttctgtcatagaggcttatactttgtactactcattaagtggaatatagaaccttgagatctgaaggaatgtccaggcattcaaatatttagggatgtgtggtttggaaaacactttgtgggcttaattttgtaaatccaccaaactctaacctatgatgtagcataacaagtgtgaaatatcatcaataatcagtatagtagtttcttagaacttgactgacagaaaactttctttgatagtatcagtgggtgctcattcattagataactaaaagatgtgtattcacgtgctaatgaattaaaactgattgctatttgttcatatgtcctcacaaatttagcaagacaggcatggaggtgaaaaaagatagtaacaaccagatgagggaaagattgtatacactgaagaaaagttgagaggagaataataaagggaaatatggtttcctttccctccttttaagttacttctatatatagttacatataatccttcctgtgccatgactttcaccaaagatggagtgactaaggctgactaatat

SEQ ID NO: 43199 - DNA, 767 bp, Macaca Mulatta
  misc_feature (1)...(767): n = A,T,C or G
gggtgaaattagattgagaataatggaatgagattgctctccattttttgctgttctagcatagccaaaaatataaagatatagatgtacatataaatatgtattcgattaaacattttaaatatttaaatggccacatcaaattttaaatggtagacaatatcaacaattgcagtgcactcaaaatgttataaaatctttgtagcacaaatcctaaagtgtatgaaaactgaagagcatatttatataaaatacctacataacatgtctaggttgagatatttaatccctgatagagctatatttgactaaaatgtgacagctaaaaattgtttccctccctataagtacgaatatgatttttaaagcatctttgtaacttgtcaagaagctatttattattaattaaggatttaactctctacccatctgctcttacaaaaggagaaaaagatttatctatgagaataaggaagtatagcactgttttatgttttttctctttagtattctatcaccatttaaaacttcaatatatgccttccactcaggttcctgacacagcctacgttctcttttctgcttgtagtcacaatatggtagaacgataaacaacgtcaaaaggtgttaaccatttgaactgcaatcccagcctatttatctactttactataaccaatggaagtaagtgcgnaactttctttttgaagggtgggacctaattttttaaaccctttttaaaaaaaatcctacccttataaataatt

SEQ ID NO: 43200 - DNA, 751 bp, Macaca Mulatta
  misc_feature (1)...(751): n = A,T,C or G
aaggaatcccattttcaaaatttaannnnnnnnnnnnnnnnnnntggtccaatttttttttggggtaacaattttcaacataaaattaacttaaaaaggtagggtttaagtggggtaaagttttttttcctaaaaaataaaagctttttcagggttaggtgggtcaatagttctgtttttaacttcccttaaatttcttgggatttttattttaattctctaaccacacaggttctcttgtaatggtaggtaaaatttttcatttaggcaaagtggggcttttagatagtttgaggaggccagatgccatggctcatgcctgttatcccagaacttgctgagactggtggaacacttaagcccaggtnnnnnnnnnnnnnnnnnnnnnnnnnnnnnnnnnnnnnnnnnnnnnnnnnnnnnnnnncatagccaggcgtggtggtgaacgcctgtagttgnnnnnnnnnnnnnnnnnnnnnnnnnagaataacttaagcctggaaggtgaaggctgtggtgagctgtgattgcacaaccctgtctccagaataaatgcttgaagaaataatagttaatgtcaataataaaatatctaacacatcaaaaatacatggtatttctaaatacgnnnnnnnnnnnnnnnnnnnnnnnnnnnnnnnnnnnnnnnnnnnnttctgctcnnnnnnnnnnnnnnnnnnnacaatggcacaatcttcgctcactgcaacctccgcctccccgcgccctcccc

SEQ ID NO: 43201 - DNA, 980 bp, Macaca Mulatta
ggggcggccgccatgttctctgtgtgtctttgtctttgtgtgtgttctttcattctccaccacccccggtgcggcccccaacaagtggcgcagcgagcagggtcagcgtgggaactccagcttgtggaagagcaacttcaaaaggctcatttacatttggagacaattgcaagactctgctgtcgtaacccatctttcctcagctccctcggtgatagtccctgctgacagtttaaaggtttgttgtcctaatgaagaaggtaagtatgttcaagggcaagttctaaaacagggatggggctatgctcttgtccttacagggagtggacctgagtggtttcctacaagatgattgaaaccctgttgaaaagaaaactggattcagcatgcatttcttcctttgttggatgtgcctcggcgggggacttatttctcttagtgaggctttgtatgaatattggacttatattcccttttcgcccttgtatcagggagtcgcctggggggaggcggaaatttaaggttttcaccaatgacattactttggatgccgtcccccctatatgggacaaggacaatatagaacggggaaatgggaattataattcagcacatatcaaatttggaagtggaaaggagttcccaatatgtatggggaaaatagttccctcattggtcttccgaaaattcgcattgaagacctttgggcctgtttgcctttaataaatccataagtccatggtggggcctggccataataaactgttattattgtaactagaagtttttaatataatcatactgtatatagtaatgaaactattcctagttctttactttttttgtcctattctagaagtttctcctaatattgaggtgctggagtgacaacaatgtcgggggaactaaaccccgggattttattagaattgcatggaaatgtaaataactggattgggaatgtggcaccgttgatttta

SEQ ID NO: 43202 - DNA, 759 bp, Macaca Mulatta
gggagagttggctgtattcttgcagaatatacaggaaaaaaaatcagtagcaaagaattcggcttccctcaaaagaaagttattggtggttccttcactccactaaatatgaaccagtagcatggatccacacaatttctgcaaagagagtataatggtagctcttggcacagtcatattcatatttttaaatctttgaccaaaactattgcactgttttcgttcgattttgactgcattactgtattagggctgaatgactttgacactcccatggatatttttatgatcacatcaaatttaaataatgtccaaaatgtgactttaatgttatattttgtttcaaaccctctggtctaggttattgagaaagatgttctttcctcctccctcaaatatgttatctcttcatatatattttaaaaaatgggttattccctgcttttcaggaactgtaaaaattatttcaaagagacacttgaaaaagtttattgtggacacagatgcttcgatttatttcaaaagaagaagaaaacaaaatggaatcttaatttaaaaaaagatatgtagtagtatctgctatgagatattcagtgtctaaaaaaaaaggggacacagcttcttttgaaagccgtgttttcagtcctttattcaacttcgtgggaactttctgaaacattcattccaattttggaacctttatttaaagaaccagttgttgggtaactggctggtcccctggaaatggtccaggggaat

SEQ ID NO: 43203 - DNA, 401 bp, Macaca Mulatta
  misc_feature (1)...(401): n = A,T,C or G
gaatagaacctgtcttagaagcatcctccaatagcaacattctctgtataaatggaacatgtccactgcaaaatcacggaatcacacttctagcacccacgactattgcatgtacgcgtgagatgacttcctattctctgagaccattctcctctgcatatttctacctccccaaactacaaaatgatgctacagcaataggggttaatcgaatgaccactcacagaaattttgttggaatcttttacagctgcagaacgacaccccacctatagacactttcccagtctccagcctctcaccgaaacaccctctgtcctgatacccgtcaccagaacgttgtgttctccaaagaaccnnananagggcttgaanggcnatctcnnnnngtgncggccggt

SEQ ID NO: 43204 - DNA, 537 bp, Macaca Mulatta
  misc_feature (1)...(537): n = A,T,C or G
tgtaagagaatagatacatgtttgaatgtaagtgaaagtctggtttattaacaaattggatgatataaaatctaaatttggactacttgcaaatgataagctgttcaagtagcctttaatttaaatccaacagaaatctagaagtcacaagcaaatatcttataggtaaaatccatctgggcacttaaagtatgtctttaaaaagcagcagcaatgtaccttgccatttttagcatattttcttccnnnnnnnnnnnnnnnnnnnnnnnnnnnnnnnnnnnnaatggagtctcactctgtcacacaggctagagtgcagtgatgccnnnnnnnnnnnnnnnnnnatccacctcccaggttcaagtgattcttgtgcctcagcctcgnnnnnnnnnnnnnnnnnnnnnncccataaccacacttggctaatttggtatagtagagacgaagtttcaannnnnnnnnnnnnnnnnnnnnnnnnnnnnnactgcaagtgatccannnnnnnnnnnnnnnnnnnnnnnnnnnnnnnnnnnn

SEQ ID NO: 43205 - DNA, 299 bp, Macaca Mulatta
  misc_feature (1)...(299): n = A,T,C or G
gggcatgtgctgtggtgtgattatttctggaccttcataaaattttatagttaactgagttctcttttctgttttagggcctctgttgctatttaatgtccattgaaaacatggctttcttttgggcattctgttactttcaggtgtactttctaatgagaatgggttgccctttttagtaatctttgattgaactggtacatttcagattacttaaatgtcatcaggccacacagcataccaggtaacagaaagccatannnnnnnnnnnnnnnnnnnnnnnnnnnnnnnnncatgtc

SEQ ID NO: 43206 - DNA, 522 bp, Macaca Mulatta
aaagcctagggaaacctgtgatgtgggtaagttcatttcgccatcccatctcctccacctaagtaatttcctggggcaagcatggtttcacacgctcccctcagctgcccagccattccctctccagcatcccataccaccaagccgcctttccccatcagtccaaatgtccctgccctctgtcccatctctcagggtcctactatctgataggtgacagttcagtcagtgggtgctaaagagtcgagtgttacccttcccaggtgacatttatgttttaataggggctacagataatgccttaatcagaaagagtggctgtaatggtgggaatttcaggcacagaagtgggccagtaagggagattcttttatatcaggagggcattttagagcccccaagtcatacctgtctgtaagtgcagcccttcgtaagtgcatgagcacaagcaagcacactatttacgttataccctccataattttgagataccttccttgcattggccctatctttaaaaat

SEQ ID NO: 43207 - DNA, 627 bp, Macaca Mulatta
actatccccaaataggcacagcgagagcacatgaacagatgtgctgatacagttcagacatctgtcccttccaaatctcatgttgaaatgccatctccagtgttggaggtgaggcctggtgggaggtattggatcatggaggcgaacgcctcatgaatagctttgcactatctccttgataatgagtgacttctcactcagttcatgcaagatctggttgtttaggccaggcgcagtggctcacacctgtaatcacaacattttgggaggcctagatgggcggattactggacgtctggagttcaagaccagcctggccaacacggtgaaaccctgtctctgctaaaaatacaaaaattagggccaggcacagtggctcacgcctgtaatcccagcactttgagaggccaaggcaggcggatcacctgaggtcaggagttcaagatcggcctgcccaacatggcaataccctacctctactaactaaacatacaaaaaattagccaggcgtggtgaggtgtgcctgtaatcccaggtacttgggaggctaaagcaagagaatcgcttgaacccgggaggtggagcttgcagtgagccaagatctcgccactgcactccagcctgggc

SEQ ID NO: 43208 - DNA, 285 bp, Macaca Mulatta
  misc_feature (1)...(285): n = A,T,C or G
gagtgttattagaagatcagggacagagcttatcatctggctgtcactgcccctttccaagccacagtgagcctccacagaggggccctgggggatagccagctgccctgtgcccattctggagtgaactttcctctgatgttccctgtnttctggatttagccagnnnnnnnnnnnnnnnnnnnnngctccctgtgtgaggttccaactaaaagataccacccttcgccagctctgatcagatactcctgaagtttggaaggcaacagctatgcaatatctctc

SEQ ID NO: 43209 - DNA, 816 bp, Macaca Mulatta
  misc_feature (1)...(816): n = A,T,C or G
gggggaaaatgggggagcaaggtgttttgtgtagatggaacaaaaggcaaaggatatactgtaaggaaggccagataaagcttggagtagcatgagaacttgaggaatagtatgatatggggtgtgcagcaggcagagagaatcaccttagctgaaacatgggtgttaggagcagaccatgaggtgccagacccatcatctatagtaaatcaggtactatgctataactattgataaggaaacagctgactgacactggaagaataagcagtttaaggggactagctccgatgggagacaaaggtcagaaatcgtagtatctgatgaagatattttgatgagcaggtgagaagaaagataaacatggccacatggccaaggcctgggataaatagccgtttcacattgaattagaactctgtggctggaataagatcggggagagcagcaggaagatacagtattctgtaatagcttgttgtattagagattaattaggattctagtgttgaatcttagtacaaaaaaatctaatatttattaggaattaacggaaagaggtttttctgttatgttgcctaaagcagacaggaagcctataaaaaaaccagtcttgaagcagtgccctcaggatcctgagatgaatttaggaaattgtgctgtaattgnnnnnnnnnnnnnnnnnnnnnnctttatctatatattttttaggcccttaatggtatacaatggaaagagcctgtggggaaaaaccactgggttggggtggtcaaaagaaaatttctgggttcccaaagttcttttggggtaaaatta

SEQ ID NO: 43210 - DNA, 799 bp, Macaca Mulatta
  misc_feature (1)...(799): n = A,T,C or G
ggggcatctgattctctacatcaaaaattttaacattttcttgtgggcttataatacatagaggcctcacaaagctatgacaattctggcagagaaagaaatggatcaatatggttgcacattttctatattttatgtgaattaaaacagtattaattctaaatgtattatgaaaattaagatggtattttgtaaattctagaccaaccactaaaaaatgtatacaaagaggtgtgaaaagaacttcagcaggtaatatgctacagagaaaatacagtaaccattagaaggcaagatccattagaaaannnnnnnnnnnnnnnnnngctttactcttacaatagtgcctggtataaagttgatgctcaaaaatctatttttacataaataaatgaatgaatgtattatgctcctgaaaatgctactttttacaactttatcgaggcataattgacaaaattaaaattatatatatattgaagatatgcaacttaattttttaatatacatatccattatgaaatagtcacccaatcaagctggttaacatatccaacacattacacagttaccattttctttacttttcttttgaaaatggtattaatgtacccttaacttagagtttttttcttctttatctctttttacaggagataaataaaagcttgggaagaaatacaacataatactatttggttaatttcctgaaaatgttggtgggttgggtaagatggggtgataaagggtccaatatagtaatagtaatccaggaggtaccgaacctggaaatccagat

SEQ ID NO: 43211 - DNA, 808 bp, Macaca Mulatta
  misc_feature (1)...(808): n = A,T,C or G
gggtcctacttcattctacggccgagaccggaggatgttccctgctcaggaggaggccgacaggaccgtgtttgtggggaatttagaggcccgagttcgggaagagattctgtacgagctgttccttcaggcggggccactaaccaaagtgactatatgcaaagacagagaaggaaagccgaagtcttttggatttgtctgctttaaacacccagaatcggtgtcttatgccatagctttgctgaatggaattcgtttatatggaagaccaattaatgtgcagtatcgatttgggagttctcactcttctgaaccagctaaccaaagttttgagagctgtgttaagataaattcatacagctacaggaatgaagaaatggtggtgggcagatcttcctttcccatgcagtgtttaccaattcataatacttctttacctcaagaatattttccctttcagaagatgcagtggcatgcgtataatccagtgctgcagcttccttactatgagatgacagctccacttcctaatagtgcatccgtgtcttcctcactgaatcatgttccagatcttgaggctggacccagctcatataaatggactcaccaacaaccaggtgactctgacctttatcagatgacagctccacttcctagtagtgcatccgtgtcttcctcactgaatcatgttcccgatcttgaggctggacccacctcatataaatggacaccccacaaacaagtgacttctgacttttatcgnatgaataaacgaaagaagcaaaagcaaaacagcgatagtgaatgt

SEQ ID NO: 43212 - DNA, 776 bp, Macaca Mulatta
  misc_feature (1)...(776): n = A,T,C or G
aaccttttttcaagcgcacccacaagaaagagttntgaaaagaaagagttaccanttnaatacatgttttacctttttgccaacaactcttttccttcccttccttccnnnnnnnnnnnnnnnnnnnccctccttcccttccctccctccnnnnnnnnnnnnnnnnnnnnnnnnnnnnnnnnnnnnnnnnnntttttattttgttgataaaagttcactcattgctttggttctgtctatagtcttgttgactttatataatattttgaagcatgctgtgtctagagcagcatttctccaacttcacaatgcacatgactcatcttggagtctggttaaagtactggggactttcccccctccaaatagggattttccttcccaaagtttattttggcgattttgaaacctaaagaaaagttggaagaatggtacagtgaacatcatatacccttaccctatgttgaccagttattaaaatttacagcatttatgtctctgaaacttcacatactttttttaaaaaactgtatgttttgcagacatacagacacggcagctcctagcatgtgtatcctaagagtaagacatttttctttataagcacaataccattatcgcatctaagaaaactaacattaatgtaataccaaatatatattcagatttaccccgtccccaaatgtgtctttattgtaggtttccctttctaggatctaattatgattatgtctctagtctctcttcatctggatagtatactcaacattattccc

SEQ ID NO: 43213 - DNA, 268 bp, Macaca Mulatta
  misc_feature (1)...(268): n = A,T,C or G
tgtcttctctctcagatatcactgaccagaacactgaaagaataagccattagtgtagggaacgctgagaactgtaacaggctgtataggatctttcgtacattccgggttatgacttccattgcatcaccaccatttaccggnaaaccagcacacacagcaatcagtactcgaaatggtcctcttttgcagaaaaagcctgcttttctcccagctttggtgagatagatatgtaatcttcataaggacctataaggaattcctctgt

SEQ ID NO: 43214 - DNA, 796 bp, Macaca Mulatta
  misc_feature (1)...(796): n = A,T,C or G
ggtaatcttgtcctcatgctttatttcattaagttgatcttcaatctttgatatcctttcttctgcttgattgatttggctgttgttccttgtgtatgcttcatgaagttcttgtgctgtgtttttcagctccatcgggtcatttatgttcttctctaaactgggtatcctagttagcaattcttctaaccttttttcaaggttcttagcatccttgaattgggttagaatatgctcctttagctcagaggactttgttattacccaccttctgaagcctacttctgtcaattcatcaaactcattccctgtccagttttgttcccttgctggcgaggagttgtgatcctttggaggggaagacacattctggttttcggaattttcaacctttttgcactggtttttcctcatcttcgtggatttatctacctttcatctttgatgttggtgaactttcagatggggtttctgtatagaagtacactaggacattttaacttatgaaggtacatgatctttcattcaccaaaggaaaagtaataccaaagattcctttttcttcactttgaattttactgggaagaaaattgaatgtacaccaccccccacacaccacaacacaggaacacaaattaacttcctcccaaacccactttaaaaaaattataatttaggccattaactttttttattttaaagggccaaatgggggggttnnnnnnnnnnnnnnnnnnnnaccattggtttttttgccccaaaccccttttaccgaaaaatatttaccttttaaaaa

SEQ ID NO: 43215 - DNA, 501 bp, Macaca Mulatta
agtggatattactctgcatcatgatgaagccaacagtcatatctttcaatatggagatttgagaattatttgtattggatgtgaccatcaaaatgcaccccataccactgcaacacctacaagttttcttgcatggggtactcagactttcacctccggcaaatactactgggaggtctacgtgggggactcttggaactgggcttttggtgtctgtaataagttttggaaagagaataatcagaatgacaatatatgtggagaggagggactctttagtcttgcatgtgttaagaatgacattcagttcagtctctttaccacctccccacttacactgcaatacgtcccaagacctaccagtcacgtaggattattcctggattgtgaagctggaactgtgagctttgttgatgttaatcaaagctcccttatatacaccatccctaattgctccttctcacctcctctcaggcctatcttttgctgtattcacctctg

SEQ ID NO: 43216 - DNA, 761 bp, Macaca Mulatta
  misc_feature (1)...(761): n = A,T,C or G
ggggtggcggtgaggaacaggaagccctttaagggtcaaaaggaatacaaaagcaaaggctnnnnnnnnnnnnnnnnnnnnnnnncattcgttccttcctgtttctttctttcttcctctcnnnnnnnnnnnnnnnnnnnnngagcgagcgactccgagtccagctcagacagcgaaggcaccatcaatgccaccggaaagattgtctcctccatcttccgaaccaacactttcctcgaggccccctagtttctctgtccttacctgctggagcagcggttcggagagagagggagcctcacggtggtaacatggccccagcatcagagctttgcagaggggagaggcagaaaaaccctgagggacagccattcacctgtgctttatactgcaagctggtcttccattactattttagtaatagtcatgcacatcattgcttgtgttggtttctttcattccagggaaactgagagcctgctatgtatgtgccagggggtttggggcatttgtgcgttaattttgttggaatgaagtgcccttccttcgggggaaaaaaaagtccggtggaaacaccccctcccccatattttaccgggaaattcgaaacttcccaaggggcccccaaaggcctggctctgaaagttgccttaacctaagtgtaaccaaaccccgaaatttttccattttgaacacttttaaacgcccaagatttttcctttggggtttccaaagtgaaacacttcctaaaaacaaagtga

SEQ ID NO: 43217 - DNA, 866 bp, Macaca Mulatta
ggggtgggctgccgggctggcccagcttagggttttgaggaaatttggaagctgcagcggtagttggagtctaaggactcctgacaatcttcgggtgccctccgagagaaaaggggaggatgccactggagtcatcctcttcaatgccgctatccttcccatctctcttaccctcagtaccacacaatactaacccttcccctcctccgatgtcttacatcacctcccaggagatgaagtgtattcttcactggtttgccagttggtcaggtccccagcgtgaacgtttcctagaggacctggtagctaaggcagtgccagaaaaattacagccattgctggatagtctggagcagcttagtgtgtctggggcagaccgaccaccttctatctttgagtgtcagctacatctttgggatcagtggtttcgaggctgggctgagcatgagcgcaatgaatttgtcagacagctggagttcagtgagccagacttcgtggcaaagtttttaccaagcattggcttgcttcagctgggtaaggactgataaggcatttcagaccaaagaagaataaccataagcttgattggagcccaaaggccaatgaattcttcttacaatggaataatttcaatgatggtgtcaatcctaaaagctccttgggaaactgggttttttcaaaaccaagcttgaaactggaaccttccacctggaacacaggcatataggggcaatggtgtttatatttccaaacagcgttatttaaaacaatgggccaaaactgggggaccttaccctaatttgttgtataaaattatttatattcttaattctctttaagcccaacataccaccccccttttatat

SEQ ID NO: 43218 - DNA, 2427 bp, Macaca Mulatta
  misc_feature (1)...(2427): n = A,T,C or G
cagcagcagcgaggagagcctaaagaaggacacagagccggggagcagcccctcttcccctgaactgcagggcagcagcaggcgtgcatctcccccagagttctgtgtgctgggccacgggctgcaaccagagcctcgcgccggccacatccaggacaaatcccagccagaggcgcagccccagcaagaggaggtgtcctgacaggctgacgagggggccacactcatgcagtcaccccaggctgccaagtgtgacagccaagtgtcccgcctgacccagagatggtgggcaaaccaaactcctaccgaggtgtcctggaaaggcctggaaggtgcactgcccagcgggtctgctgaattttaaacaaacgccgttttcagtcccagatcctgctctgccttggggttcaaaagttaaccagaactttagacccccacaatgacagtatttaatccttcaagtgctggccttaattttggggtggggtggggnnnnnnnnnnnnnnnnnnnnnnnnnnnnnnnnnnnnnnnnnnnnnnnnnnnnnnnnnnnnnnnnnnnnnnnnnnnnnnnnnnnnnnnnnnnnnnnnnnnnnnnnnnnnnnnnnnnnnnnnnnnnnnnnnnnnnnnnnnnnnnnnnnnnnnnnnnnnnnnnnnnnnnnnnnnnnnnnnnnnnnnnnnnnnnnnnnnnnnnnnnnnnnnnnnnnnnnnnnnnnnnnnnnnnnnnnnnnnnnnnnnnnnnnnnnnnnnnnnnnnnnnnnnnnnnnnnnnnnnnnnnnnnnnnnnnnnnnnnnnnnnnnnnnnnnnnnnnnnnnnnnnnnnnnnnnnnnnnnnnnnnnnnnnnnnnnnnnnnnnnnnnnnnnnnnnnnnnnnnnnnnnnnnnnnnnnnnnnnnnnnnnnnnnnnnnnnnnnnnnnnnnnnnnnnnnnnnnnnnnnnnnnnnnnnnnnnnnnnnnnnnnnnnnnnnnnnnnnnnnnnnnnnnnnnnnnnnnnnnnnnnnnnnnnnnnnnnnnnnnnnnnnnnnnnnnnnnnnnnnnnnnnnnnnnnnnnnnnnnnnnnnnnnnnnnnnnnnnnnnnnnnnnnnnnnnnnnnnnnnnnnnnnnnnnnnnnnnnnnnnnnnnnnnnnnnnnnnnnnnnnnnnnnnnnnnnnnnnnnnnnnnnnnnnnnnnnnnnnnnnnnnnnnnnnnnnnnnnnnnnnnnnnnnnnnnnnnnnnnnnnnnnnnnnnnnnnnnnnnnnnnnnnnnnnnnnnnnnnnnnnnnnnnnnnnnnnnnnnnnnnnnnnnnnnnnnnnnnnnnnnnnnnnnnnnnnnnnnnnnnnnnnnnnnnnnnnnnnnnnnnnnnnnnnnnnnnnnnnnnnnnnnnnnnnnnnnnnnnnnnnnnnnnnnnnnnnnnnnnnnnnnnnnnnnnnnnnnnnnnnnnnnnnnnnnnnnnnnnnnnnnnnnnnnnnnnnnnnnnnnnnnnnnnnnnnnnnnnnnnnnntgctgcaaagctgatttttaaagtttggggaaattacagacctcaaacccattcttggtgagattgtgcgctcaaaaacttgtgaaactgtgtccctagggactccagctacctcctccagagagagggtatgactatgtgtaaatgaatcccacctcgacttgtccagttattattcaaaggcacccaaagaacagctgattaaactaccaagaggggccacaacccgcccctctgctggaaatgcacatgcagctctgctcatgtttgctcctgttgtcgccctcatctcagaagtgctcaggcagtgcccaggccagcgattctagagctaagcctcacccactgctgggtggacacttaggagctgcctgggctgcaggcaatgagggaagcccagccacccaggcagggcaggggctgaggtaaacacacgagaatggaccaggctcaggaaacttgcccgacagatatctgggcattctccctaaatggttgggcagaccactgggtgaccatggggtgagccttaggaaagctgggcactgagctgagtgaggagacatacagtgtgagcagcctttgaggttagcgcacaggtaagtggcttcaggtgggactgctcagaaagtgggccctgcctgagctaggatttaggggcaggattcctggaggtctgaggaaacaaagctgttccccagctgcagggaggctggaatgggacacagtgggtgaaactggaataccatgagggggtgtaaccacaggaattagaaacattttagttactggaaccaggatatgaagtggagccagatcagcagtgaggggaagcaaggctgagtctccagcccaggcctccttccgtaaagggcctcatcttacaggtccagggcggggtagaaagtggaaagggtggccaggtgccccctgcagtggccgtgcaagctag

SEQ ID NO: 43219 - DNA, 897 bp, Macaca Mulatta
  misc_feature (1)...(897): n = A,T,C or G
ggcacagtnnnnnnnnnnnnnnnnnnnnnnnntgtgcccagccatagttctttattcatagaattaagtatgtatatgttaatttagaagcgtttttacatttaaaattaaattagatggttttttagatatgcctgcttgcagaaaggtacattctgccttactcttacaatggggaaaatttgtggggagtgggtttttatctttgtttatgtctggggcccatagcttttccagtgacttgggagtaagcaagccaattttaggggataaaatgccaaacacaggctctacacccagtgctacctttttcaggaagcttttcaacaaataaagttgtatttgtggctaaaaaaagaaagggagagaaagtgaacaaggtgaagaattatgctgtcattcaaagtgaagaattttccattttcatttaaatttatcaatgtatttaattttaatgttgtttttatttattttgatattggtaaaaaaaaactttatactccttttctggggcacatgtgggttattgacaaaacttttgaagaagaaaatacctggactcttaaccaggttatgccctaccaaaaaaaaattcctttcttttggcctatttataaaaatgaggtcaataacttttttcctcccattaccatatttaagcccaaaaaaaagggggttttccctatttaaaaaaaacctcccccgtaacactgaaaattggaattccgtaaaccaacaataaaatttccccttttaatttatactttttccccgggggagaaaaaaatctccctttanatttctcccctttggattccccggaagaatannnnnnnnnnnnnnnnnnncggcgggggcaatttttggggggctgtgtgggcgattctgggccaccca

SEQ ID NO: 43220 - DNA, 763 bp, Macaca Mulatta
gggggaaggtcaattccatctctgaggttatagctctaaattagggaaaaaataataaaccctagaaataagtggggtctgtacacaaagaaccagtaaaaggttcgtttctgtcattgttgatacagtggccctaggaagagtaaaattactgacatatttctcaggccatttctgggactggtctcctgtgaaaggagtagtgcaggcttattgtattttgtttcttggcaacagtttataggaaaagggagaatttctgaagatcatgctgtgatgcctctgggatacgttcagttggagaaaatctaatctcatgcattattgtattgtgcagagtgccagttattgacagtgaccataaaaaacaaagacctgttacaaagcctgttaggtgaacagactattcacagagttgtctttggttttgccaaattggatcaagagtttcacctgggttttattaagatgattgtactttagctttttaacataaatgtctgttaatgtttaaaatatgcatgtccttgtagacttgttagatcaggaaacattgattcagcatggattctctgccaggcattggaaatatcttagttttctttcagtgagcagtgggaagacttgggagaactcttcacaatagaatcctaagagaagagtccttttagactcactgcaagctttgttactagagaaacttgcttttttcactctcagttcatgaaagtaggagatgaattaataccgttaattcttattt

SEQ ID NO: 43221 - DNA, 496 bp, Macaca Mulatta
ctcccatatccttcacctttgaccttctgctcctcattctaccccattccttaggaaactggctgactgtgctcagctgctggacgtggatgacatggtgcggttggctgtgcctgactccaagtgcgtctacacctacatccaggaactgtaccgcagcctcgtgcagaaaggactggtgaagaccaagaagaaatgaggaggtgactggctctgtgggcagagatgggcagggtgcccagctcaccagctgtggcctgggggctcccttctgctcgatggaggcaccagagccaggggctcaggcaagggcatgtggcgttggttttaaccgcattaaaagtacttttgtaaaatcctctctggcccctcagtgcccgctccatacttggcccaggaacgtctgcactctgggatgataaactctggacacaggggtttcctcaccggctgaggtatcaataactatgcaaggtgtctgggaaaggacaatggc

SEQ ID NO: 43222 - DNA, 1065 bp, Macaca Mulatta
  misc_feature (1)...(1065): n = A,T,C or G
ggggtcttgggaggggaatgtgctcacctaaggtcccactgtattagtgggtgggcaggactggaactcggttctccagtagcccagagctcactcttttacacccagaggaggagcagatggctcttggggtggttatgcacttcacaagccaattcccttcagccaggagctcctgggtgcatttccgtgtcagaaacagcaccaagtcccagcccctctggaggcacagctgttgcgtcaggcaaggctacctgcgtttatttattgagcagcaccgctgtatcatgcccagggaccgagccccgctccctgttcccccatggtgtctccgaggccctctgggagggccccacgtctggagcggcaccctcagagtggacgcgaaattatttgctgtcccacaagctcaccccgaagcccgaaccttgtgacggcgggcccactgggtttccccgctgtataccccccggtcttttttggtcccgtttggacgttgggaacccccactcctccgtcctgcccggtggggggaccttcctcgcgttcgcgggacacttgccctcctgtctctccccaccattacatcaccggtgccctcctcaccttgccggcccctcaagtgtgccagtatctggagatgctaggtccggtgttagtgcgtatgcgctcacgacaggattatgcgagctacaatgcatctctgttgcctgtgcgcttgtatccgcgtccactatattgtgtgatagaacgcaccgccgtcacttgtgctctcactttctttcgcacgatctctgtaccgcgctgcgctgatccccctatgtcttaccctgctcccccctctccgccacgtctttatccctgtgctgtgtgcgcgcagagcctgtcgtctctcaccgccggggatcgtatccgccgctgtgactgtccgtcgccacgctgtagtgtcttcactttctactcgcccacccttctcttccactatgacccgtgacacctccgctcctgtccaccctttcctctgactcttntaacgcttcacggctccccactatccaccttatc

SEQ ID NO: 43223 - DNA, 1859 bp, Macaca Mulatta
  misc_feature (1)...(1859): n = A,T,C or G
tacccagggctgccaggcagggccctgcagggaacagacccaagggctgacatggggatgtctgctgaagggcgtatttaccacaataagggcagggctgggagactgggcagccagtttcaccctcgcacagggtacctggcaagaccagcggccggaggtgacgtcctcagtaaagaacagtggccactggaaactgcgcggctggaaggggaaacgctcgggcctctggtgggcaccggcctggggtggggttggccagggtcagctgcctttcctccatgctgggacggagatgttgtgtgcgtgtgacaaagcatttgatagcacgccaaaagtttcctccattatgtgtgtgtgaagtgtttgaccaggtcagaagtcttgttccatgcgcgtgtgctcacacagaagcagaggggccccgtcgctctgccctcacgccactgaaccgcagagttctcccactcatcaggcttgcgactcagccgctaagtgtgtcaggtgtgcctcttgggctctccttcgtgctctgtcctatggtggcacaggcaggggggttagacaggtaccggtcagattacatacagtggcacaggcaggggggttaggcaggtaccggtcagattatggtggcacaggcggtgtggggttagnnnnnnnnnnnnnnnnnnnnnnnnnnnnnnnnnnnnnnnnnnnnnnnnnnnnnnnnnnnnnnnnnnnnnnnnnnnnnnnnnnnnnnnnnnnnnnnnnnnnnnnnnnnnnnnnnnnnnnnnnnnnnnnnnnnnnnnnnnnnnnnnnnnnnnnnnnnnnnnnnnnnnnnnnnnnnnnnnnnnnnnnnnnnnnnnnnnnnnnnnnnnnnnnnnnnnnnnnnnnnnnnnnnnnnnnnnnnnnnnnnnnnnnnnnnnnnnnnnnnnnnnnnnnnnnnnnnnnnnnnnnnnnnnnnnnnnnnnnnnnnnnnnnnnnnnnnnnnnnnnnnnnnnnnnnnnnnnnnnnnnnnnnnnnnnnnnnnnnnnnnnnnnnnnnnnnnnnnnnnnnnnnnnnnnnnnnnnnnnnnnnnnnnnnnnnnnnnnnnnnnnnnnnnnnnnnnnnnnnnnnnnnnnnnnnnnnnnnnnnnnnnnnnnnnnnnnnnnnnnnnnnnnnnnnnnnnnnnnnnnnnnnnnnnnnnnnnnnnnnnnnnnnnnnnnnnnnnnnnnnnnnnnnnnnnnnnnnnnnnnnnnnnnnnnnnnnnnnnnnnnnnnnnnnnnnnnnnnnnnnnnnnnnnnnnnnnnnnnnnnnnnnnnnnnnnnnnnnnnnnnnnnnnnnnnnnnnnnnnctgcaggaagctgccacctctggggtcagaacctgcccaggctgcaggggctccactgcggggtcttcgagagccagacagcctgccttgtgctgcacacctggctttgctctgtgcagaacccagcacacgtgattttgtgtgacatgccaacagcctggctccccggacaggaggcctgccctgggggagtggctgcaggaggagggtagggcgggcacccctgagtctggccagccttgtcacagatgcgtcgcccgccctgcagtcctgatttcagctcacttcagagtaaatcagaataaaccgcacctggactttcacaaatgcatgtcgacgctttcagttcaccccttcctttgctaactttcttcctattttcttctaatgcaagagcttattaattcaatatttatcattttgaataacgttttccctttttcgtaataaaatgtactccactattagtaaaatgtatttactattttagtaacaaaaatagacttgcctaaacatgtttaaaatacagtgatgtgaacaattc

SEQ ID NO: 43224 - DNA, 658 bp, Macaca Mulatta
  misc_feature (1)...(658): n = A,T,C or G
tccagttttataaaaagctgctacatgacagacaggtaatcccagtgagttttgagaaacaaagcaaacgaagtaaacaacaaacataaaaaccaaatagcaaatgaataaacagcttgttcttgnnnnnnnnnnnnnnnnnnnnnnnnnnnnnnnnnnnnnnnnnnnnnnnnnnnnnnnnnnnnnnnnnnnnnnnnnnnnnnnnnnnnnnnnnnnnnnncgattttacaacgannnnnnnnnnnnnnnnnnnnnnnnnnnnnnnnnnnnnnnnnnnnnnnnnnnnnnnnnnnnnnnnnnnnnnnnnnnnnnnnnnnnnnnnnnnnnnnnnnnnnnnnnnnnnnnnnnnnnnnnnnnnnnnnnnnnnnnnnnnnnnnnnnnnnnnnnnnnnnnnnnnnnnnnnnnnnnnnnnnnnnnnnnnnnnnnnnnnnnnnnnnnnnnnnnnnnnnnnnnnnnnnnnnnnnnnnnnnnnnnnnnnnnnnnnnnnnnnnnnnnnnnnnnnnnnnnnnnnnnnnnnnnnnnnnnnnnnnnnnnnnnnnnnnnnnnnnnnnnnnnnnnnnnnnnnnnnnnnnnnnnnnnnnnnnnnnnnnnnnnnnnnnnnnnnnnnnnnnnnnnnnnnnnnnnnnnnnnnnnnnnnnnnnnnnnnnnnnnnnnnnnn

SEQ ID NO: 43225 - DNA, 581 bp, Macaca Mulatta
  misc_feature (1)...(581): n = A,T,C or G
tttttgtacatgacttaaagagtatattcccagaagctgctggtcagacacatttagggatgacagatgaagaggattttttaaagctgcatgtgaatatctcctctgtgtcatttgtctgatgtagaaaagttttcccctcatttttatgagtaaaaacactaagtgggtggcgaggggtgggggtttttatgggagtgtcatagcgaggcatgttacctgactggaggctagaggctgtttccattataagccttcggaaacccaaccacgtctttcctgggtctagctttttttaaatactcattggttacttttatttttgcccccaatttcttgggcaaaaagcttcttcattttgtctgaagaaattgtttgccagaggtatttggagcctctctgaaggggagatagagtgggggtgggctgtggggaaggtggagttattggggttnnttggggttctgtttccatacaacattgtttatttctgattcctcagaagatccttcattatgaataacttcagtgtaatgttaatttcccaccctgtgccaaaattgtcatctttggcctttttt

SEQ ID NO: 43226 - DNA, 25 bp, Homo Sapiens
gggcactgaaaatacggctcatgtt

SEQ ID NO: 43227 - DNA, 25 bp, Homo Sapiens
tgagttacattatcagccagcccag

SEQ ID NO: 43228 - DNA, 25 bp, Homo Sapiens
cagccttgcccaccatttaagaaat

SEQ ID NO: 43229 - DNA, 25 bp, Homo Sapiens
tcacagagccactagatctcatatg

SEQ ID NO: 43230 - DNA, 25 bp, Homo Sapiens
tctcatatgatcttcttcaagccat

SEQ ID NO: 43231 - DNA, 25 bp, Homo Sapiens
ttcaagccattattttaactcaaga

SEQ ID NO: 43232 - DNA, 25 bp, Homo Sapiens
gaatgtgtcaagaccatccagaaat

SEQ ID NO: 43233 - DNA, 25 bp, Homo Sapiens
aaatggttgacatcatccagcgaaa

SEQ ID NO: 43234 - DNA, 25 bp, Homo Sapiens
aaatgttgttttaactgcgctatga

SEQ ID NO: 43235 - DNA, 25 bp, Homo Sapiens
actgcgctatgattaaaaccattca

SEQ ID NO: 43236 - DNA, 25 bp, Homo Sapiens
agtctttacaactactattctgtta

SEQ ID NO: 43237 - DNA, 25 bp, Homo Sapiens
aaattcttcaactccttttggcaag

SEQ ID NO: 43238 - DNA, 25 bp, Homo Sapiens
aggttgctaacctagttcaaaatga

SEQ ID NO: 43239 - DNA, 25 bp, Homo Sapiens
aacatggtgctctaccaggaaggat

SEQ ID NO: 43240 - DNA, 25 bp, Homo Sapiens
ttcgaggtagataggctcaggccac

SEQ ID NO: 43241 - DNA, 25 bp, Homo Sapiens
aaacgggtattctagtcatcttggg

SEQ ID NO: 43242 - DNA, 25 bp, Homo Sapiens
ggtaatgaacattcctatccccaac

SEQ ID NO: 43243 - DNA, 25 bp, Homo Sapiens
cctatccccaacacatcaattgtat

SEQ ID NO: 43244 - DNA, 25 bp, Homo Sapiens
ctcagattttcctcagtatttgtgt

SEQ ID NO: 43245 - DNA, 25 bp, Homo Sapiens
aagggcattgcaaagttgttcaaca

SEQ ID NO: 43246 - DNA, 25 bp, Homo Sapiens
ttgttcaacaacagttacctcattg

SEQ ID NO: 43247 - DNA, 25 bp, Homo Sapiens
acctcattgagtgtgtccagtagtg

SEQ ID NO: 43248 - DNA, 25 bp, Homo Sapiens
gaaaccgagtaaatgtgctccagca

SEQ ID NO: 43249 - DNA, 25 bp, Homo Sapiens
tgtgctccagcaagatagactttgt

SEQ ID NO: 43250 - DNA, 25 bp, Homo Sapiens
tatcttttattctgctaagcccaaa

SEQ ID NO: 43251 - DNA, 25 bp, Homo Sapiens
gtgagccaagccatgtaaaagatct

SEQ ID NO: 43252 - DNA, 25 bp, Homo Sapiens
gaagaaccggattgccattcatgaa

SEQ ID NO: 43253 - DNA, 25 bp, Homo Sapiens
aagaatgtgcccaaccttcacgtca

SEQ ID NO: 43254 - DNA, 25 bp, Homo Sapiens
agtcccggggctgcgtgaaggaaca

SEQ ID NO: 43255 - DNA, 25 bp, Homo Sapiens
gattgttcctgccaccctacatctg

SEQ ID NO: 43256 - DNA, 25 bp, Homo Sapiens
attgttcctgccaccctacatctgc

SEQ ID NO: 43257 - DNA, 25 bp, Homo Sapiens
ttgttcctgccaccctacatctgcc

SEQ ID NO: 43258 - DNA, 25 bp, Homo Sapiens
tgccaccctacatctgcccccggag

SEQ ID NO: 43259 - DNA, 25 bp, Homo Sapiens
gagggtaagcgacctgcaagactca

SEQ ID NO: 43260 - DNA, 25 bp, Homo Sapiens
gcaagactcacaagacgggaagctg

SEQ ID NO: 43261 - DNA, 25 bp, Homo Sapiens
aagactcacaagacgggaagctgac

SEQ ID NO: 43262 - DNA, 25 bp, Homo Sapiens
gacgggaagctgacagagataccta

SEQ ID NO: 43263 - DNA, 25 bp, Homo Sapiens
tacctacagacggtgttctgtgccc

SEQ ID NO: 43264 - DNA, 25 bp, Homo Sapiens
agacggtgttctgtgccccctggtg

SEQ ID NO: 43265 - DNA, 25 bp, Homo Sapiens
gaaaagagctttggcggctcgcacg

SEQ ID NO: 43266 - DNA, 25 bp, Homo Sapiens
ggctcgcacgtcatgcaggtcatct

SEQ ID NO: 43267 - DNA, 25 bp, Homo Sapiens
atgcaggtcatctacacggacgacg

SEQ ID NO: 43268 - DNA, 25 bp, Homo Sapiens
acctgcagtgcaagtgtgtgaatga

SEQ ID NO: 43269 - DNA, 25 bp, Homo Sapiens
gagcttaaccagtggctgtctgcgc

SEQ ID NO: 43270 - DNA, 25 bp, Homo Sapiens
tctgcgctgcggaaggtgagcatca

SEQ ID NO: 43271 - DNA, 25 bp, Homo Sapiens
gtgagcatcaacaacaccggactgc

SEQ ID NO: 43272 - DNA, 25 bp, Homo Sapiens
ggagctgctgccaccaaaaagagaa

SEQ ID NO: 43273 - DNA, 25 bp, Homo Sapiens
tcagggctgcgataagacccggtca

SEQ ID NO: 43274 - DNA, 25 bp, Homo Sapiens
tgaccctgcaggagtggaatgaccc

SEQ ID NO: 43275 - DNA, 25 bp, Homo Sapiens
agtggaatgaccctcttgaccatga

SEQ ID NO: 43276 - DNA, 25 bp, Homo Sapiens
ttgaccatgaccttgaggcccagct

SEQ ID NO: 43277 - DNA, 25 bp, Homo Sapiens
gagccctggcaaagtccccgaggac

SEQ ID NO: 43278 - DNA, 25 bp, Homo Sapiens
tgctccgggtgctgcaggacctccg

SEQ ID NO: 43279 - DNA, 25 bp, Homo Sapiens
gaggcccatagctccagcccggccg

SEQ ID NO: 43280 - DNA, 25 bp, Homo Sapiens
aggcccatagctccagcccggccgg

SEQ ID NO: 43281 - DNA, 25 bp, Homo Sapiens
ggcccatagctccagcccggccggc

SEQ ID NO: 43282 - DNA, 25 bp, Homo Sapiens
gcccatagctccagcccggccggct

SEQ ID NO: 43283 - DNA, 25 bp, Homo Sapiens
cccatagctccagcccggccggctc

SEQ ID NO: 43284 - DNA, 25 bp, Homo Sapiens
ccatagctccagcccggccggctcc

SEQ ID NO: 43285 - DNA, 25 bp, Homo Sapiens
catagctccagcccggccggctccc

SEQ ID NO: 43286 - DNA, 25 bp, Homo Sapiens
gatgaatttgactgcccttcagaac

SEQ ID NO: 43287 - DNA, 25 bp, Homo Sapiens
agaacttcagcacgcacaggaactc

SEQ ID NO: 43288 - DNA, 25 bp, Homo Sapiens
atagctgctgttatggcatctctga

SEQ ID NO: 43289 - DNA, 25 bp, Homo Sapiens
atggcatctctgacttttctttaca

SEQ ID NO: 43290 - DNA, 25 bp, Homo Sapiens
acttttctttacactcttctgaggg

SEQ ID NO: 43291 - DNA, 25 bp, Homo Sapiens
ggaagtaattcaccctttagcaact

SEQ ID NO: 43292 - DNA, 25 bp, Homo Sapiens
ctttagcaacttcccatcaacaata

SEQ ID NO: 43293 - DNA, 25 bp, Homo Sapiens
ttccaatcctggtcatcaacaaagt

SEQ ID NO: 43294 - DNA, 25 bp, Homo Sapiens
acaaagtcttgccaatggtttccat

SEQ ID NO: 43295 - DNA, 25 bp, Homo Sapiens
gggcatatcaacaggtccaacaaaa

SEQ ID NO: 43296 - DNA, 25 bp, Homo Sapiens
ttgtgggactggcaatactggctct

SEQ ID NO: 43297 - DNA, 25 bp, Homo Sapiens
aatactggctctgttggctgtgaca

SEQ ID NO: 43298 - DNA, 25 bp, Homo Sapiens
ggctgtgacatctattccatctgtg

SEQ ID NO: 43299 - DNA, 25 bp, Homo Sapiens
aatggtttccatcactctcttggca

SEQ ID NO: 43300 - DNA, 25 bp, Homo Sapiens
catcactctcttggcattggtttac

SEQ ID NO: 43301 - DNA, 25 bp, Homo Sapiens
tcactctcttggcattggtttacct

SEQ ID NO: 43302 - DNA, 25 bp, Homo Sapiens
aggtgtgatagcagcaattgtccaa

SEQ ID NO: 43303 - DNA, 25 bp, Homo Sapiens
gaaccaagtataagaagtttccaca

SEQ ID NO: 43304 - DNA, 25 bp, Homo Sapiens
gaagtttccacattggttggataag

SEQ ID NO: 43305 - DNA, 25 bp, Homo Sapiens
gtggatgttaacaagaaagcagttt

SEQ ID NO: 43306 - DNA, 25 bp, Homo Sapiens
agaaagcagtttgggcttctcagtt

SEQ ID NO: 43307 - DNA, 25 bp, Homo Sapiens
ttttttgctgtactgcatgcaattt

SEQ ID NO: 43308 - DNA, 25 bp, Homo Sapiens
caatgaggcgatcctacagatacaa

SEQ ID NO: 43309 - DNA, 25 bp, Homo Sapiens
tgaggcgatcctacagatacaagtt

SEQ ID NO: 43310 - DNA, 25 bp, Homo Sapiens
gatacaagttgctaaactgggcata

SEQ ID NO: 43311 - DNA, 25 bp, Homo Sapiens
agttgctaaactgggcatatcaaca

SEQ ID NO: 43312 - DNA, 25 bp, Homo Sapiens
ttcctacttcatggatgtgaaatgc

SEQ ID NO: 43313 - DNA, 25 bp, Homo Sapiens
tcctacttcatggatgtgaaatgcc

SEQ ID NO: 43314 - DNA, 25 bp, Homo Sapiens
cctacttcatggatgtgaaatgccc

SEQ ID NO: 43315 - DNA, 25 bp, Homo Sapiens
ctacttcatggatgtgaaatgccca

SEQ ID NO: 43316 - DNA, 25 bp, Homo Sapiens
tttgtgtgttggctgctccactgtc

SEQ ID NO: 43317 - DNA, 25 bp, Homo Sapiens
ttgtgtgttggctgctccactgtcc

SEQ ID NO: 43318 - DNA, 25 bp, Homo Sapiens
tgtgtgttggctgctccactgtcct

SEQ ID NO: 43319 - DNA, 25 bp, Homo Sapiens
gtgtgttggctgctccactgtcctc

SEQ ID NO: 43320 - DNA, 25 bp, Homo Sapiens
tgtgttggctgctccactgtcctct

SEQ ID NO: 43321 - DNA, 25 bp, Homo Sapiens
gtgttggctgctccactgtcctctg

SEQ ID NO: 43322 - DNA, 25 bp, Homo Sapiens
tgttggctgctccactgtcctctgc

SEQ ID NO: 43323 - DNA, 25 bp, Homo Sapiens
ttggctgctccactgtcctctgcca

SEQ ID NO: 43324 - DNA, 25 bp, Homo Sapiens
tggctgctccactgtcctctgccag

SEQ ID NO: 43325 - DNA, 25 bp, Homo Sapiens
atgcctctcacaaaggatctccttc

SEQ ID NO: 43326 - DNA, 25 bp, Homo Sapiens
ttcatccctctccagaagagaagag

SEQ ID NO: 43327 - DNA, 25 bp, Homo Sapiens
tcatccctctccagaagagaagagg

SEQ ID NO: 43328 - DNA, 25 bp, Homo Sapiens
catccctctccagaagagaagagga

SEQ ID NO: 43329 - DNA, 25 bp, Homo Sapiens
atccctctccagaagagaagaggaa

SEQ ID NO: 43330 - DNA, 25 bp, Homo Sapiens
tccctctccagaagagaagaggaaa

SEQ ID NO: 43331 - DNA, 25 bp, Homo Sapiens
ccctctccagaagagaagaggaaac

SEQ ID NO: 43332 - DNA, 25 bp, Homo Sapiens
tacttcatggatgtgaaatgcccaa

SEQ ID NO: 43333 - DNA, 25 bp, Homo Sapiens
caagatgctataaaatcaccacggt

SEQ ID NO: 43334 - DNA, 25 bp, Homo Sapiens
aagatgctataaaatcaccacggtc

SEQ ID NO: 43335 - DNA, 25 bp, Homo Sapiens
agatgctataaaatcaccacggtct

SEQ ID NO: 43336 - DNA, 25 bp, Homo Sapiens
aaaatcaccacggtctttagccatg

SEQ ID NO: 43337 - DNA, 25 bp, Homo Sapiens
aaatcaccacggtctttagccatgc

SEQ ID NO: 43338 - DNA, 25 bp, Homo Sapiens
tcgcgtgacacccgctgtgaaaagg

SEQ ID NO: 43339 - DNA, 25 bp, Homo Sapiens
ggatgccggcgctcgagaacaacag

SEQ ID NO: 43340 - DNA, 25 bp, Homo Sapiens
atgccggcgctcgagaacaacagga

SEQ ID NO: 43341 - DNA, 25 bp, Homo Sapiens
gccggcgctcgagaacaacaggatg

SEQ ID NO: 43342 - DNA, 25 bp, Homo Sapiens
gcgctcgagaacaacaggatgcttt

SEQ ID NO: 43343 - DNA, 25 bp, Homo Sapiens
gagaacaacaggatgctttggtcct

SEQ ID NO: 43344 - DNA, 25 bp, Homo Sapiens
aggatgctttggtcctgtatcagca

SEQ ID NO: 43345 - DNA, 25 bp, Homo Sapiens
gatgctttggtcctgtatcagcagg

SEQ ID NO: 43346 - DNA, 25 bp, Homo Sapiens
tgtatcagcaggacgcttttcgggt

SEQ ID NO: 43347 - DNA, 25 bp, Homo Sapiens
atcagcaggacgcttttcgggtaga

SEQ ID NO: 43348 - DNA, 25 bp, Homo Sapiens
cagcaggacgcttttcgggtagatc

SEQ ID NO: 43349 - DNA, 25 bp, Homo Sapiens
gcaggacgcttttcgggtagatcct

SEQ ID NO: 43350 - DNA, 25 bp, Homo Sapiens
ggacgcttttcgggtagatcctact

SEQ ID NO: 43351 - DNA, 25 bp, Homo Sapiens
ctcaaacacagtgagtgaggacgga

SEQ ID NO: 43352 - DNA, 25 bp, Homo Sapiens
tcaaacacagtgagtgaggacggac

SEQ ID NO: 43353 - DNA, 25 bp, Homo Sapiens
caaacacagtgagtgaggacggacc

SEQ ID NO: 43354 - DNA, 25 bp, Homo Sapiens
aaacacagtgagtgaggacggacct

SEQ ID NO: 43355 - DNA, 25 bp, Homo Sapiens
aacacagtgagtgaggacggacctc

SEQ ID NO: 43356 - DNA, 25 bp, Homo Sapiens
acacagtgagtgaggacggacctca

SEQ ID NO: 43357 - DNA, 25 bp, Homo Sapiens
cacagtgagtgaggacggacctcag

SEQ ID NO: 43358 - DNA, 25 bp, Homo Sapiens
ctctaggccccgcatcaacagtgca

SEQ ID NO: 43359 - DNA, 25 bp, Homo Sapiens
aggctgtctcttcgcgtgacacccg

SEQ ID NO: 43360 - DNA, 25 bp, Homo Sapiens
cttcgcgtgacacccgctgtgaaaa

SEQ ID NO: 43361 - DNA, 25 bp, Homo Sapiens
ggatgccggcgctcgagaacaacag

SEQ ID NO: 43362 - DNA, 25 bp, Homo Sapiens
atgccggcgctcgagaacaacagga

SEQ ID NO: 43363 - DNA, 25 bp, Homo Sapiens
gccggcgctcgagaacaacaggatg

SEQ ID NO: 43364 - DNA, 25 bp, Homo Sapiens
gcgctcgagaacaacaggatgcttt

SEQ ID NO: 43365 - DNA, 25 bp, Homo Sapiens
gagaacaacaggatgctttggtcct

SEQ ID NO: 43366 - DNA, 25 bp, Homo Sapiens
aggatgctttggtcctgtatcagca

SEQ ID NO: 43367 - DNA, 25 bp, Homo Sapiens
gatgctttggtcctgtatcagcagg

SEQ ID NO: 43368 - DNA, 25 bp, Homo Sapiens
gtatcagcaggacgcttttcgggta

SEQ ID NO: 43369 - DNA, 25 bp, Homo Sapiens
cagcaggacgcttttcgggtagatc

SEQ ID NO: 43370 - DNA, 25 bp, Homo Sapiens
gcaggacgcttttcgggtagatcct

SEQ ID NO: 43371 - DNA, 25 bp, Homo Sapiens
ttttcgggtagatcctactgccacc

SEQ ID NO: 43372 - DNA, 25 bp, Homo Sapiens
gggacatcgtccagccagtcctcaa

SEQ ID NO: 43373 - DNA, 25 bp, Homo Sapiens
agtcctcaacccagagccgaacact

SEQ ID NO: 43374 - DNA, 25 bp, Homo Sapiens
ctttgtgcacggaggtgtgaccatg

SEQ ID NO: 43375 - DNA, 25 bp, Homo Sapiens
acggaggtgtgaccatgaagctcat

SEQ ID NO: 43376 - DNA, 25 bp, Homo Sapiens
atgaagctcatggatgaggtcgccg

SEQ ID NO: 43377 - DNA, 25 bp, Homo Sapiens
gaggtcgccgggatcgtggctgcac

SEQ ID NO: 43378 - DNA, 25 bp, Homo Sapiens
tggctgcacgccactgcaagaccaa

SEQ ID NO: 43379 - DNA, 25 bp, Homo Sapiens
tgcaagaccaacatcgtcacagctt

SEQ ID NO: 43380 - DNA, 25 bp, Homo Sapiens
aacatcgtcacagcttccgtggacg

SEQ ID NO: 43381 - DNA, 25 bp, Homo Sapiens
cacagcttccgtggacgccattaat

SEQ ID NO: 43382 - DNA, 25 bp, Homo Sapiens
aaggcaggtcgctgcctgtgcccca

SEQ ID NO: 43383 - DNA, 25 bp, Homo Sapiens
ggtcgctgcctgtgccccagctggt

SEQ ID NO: 43384 - DNA, 25 bp, Homo Sapiens
cgaagcagggccacgcggagcctca

SEQ ID NO: 43385 - DNA, 25 bp, Homo Sapiens
cagagccgaacactgtcagctacag

SEQ ID NO: 43386 - DNA, 25 bp, Homo Sapiens
agagccgaacactgtcagctacagc

SEQ ID NO: 43387 - DNA, 25 bp, Homo Sapiens
agccgaacactgtcagctacagcca

SEQ ID NO: 43388 - DNA, 25 bp, Homo Sapiens
gaacactgtcagctacagccagtcc

SEQ ID NO: 43389 - DNA, 25 bp, Homo Sapiens
acactgtcagctacagccagtccag

SEQ ID NO: 43390 - DNA, 25 bp, Homo Sapiens
actgtcagctacagccagtccagct

SEQ ID NO: 43391 - DNA, 25 bp, Homo Sapiens
gctacagccagtccagcttgatcca

SEQ ID NO: 43392 - DNA, 25 bp, Homo Sapiens
agccagtccagcttgatccacctgg

SEQ ID NO: 43393 - DNA, 25 bp, Homo Sapiens
agtccagcttgatccacctggtggg

SEQ ID NO: 43394 - DNA, 25 bp, Homo Sapiens
acctggtggggccttcagactgcac

SEQ ID NO: 43395 - DNA, 25 bp, Homo Sapiens
cagactgcaccctgcacggctttgt

SEQ ID NO: 43396 - DNA, 25 bp, Homo Sapiens
gaggaaggcaaagggcggtacctgc

SEQ ID NO: 43397 - DNA, 25 bp, Homo Sapiens
cggtacctgcagatgaaggcgaagc

SEQ ID NO: 43398 - DNA, 25 bp, Homo Sapiens
gggacatcgtccagccagtcctcaa

SEQ ID NO: 43399 - DNA, 25 bp, Homo Sapiens
agtcctcaacccagagccgaacact

SEQ ID NO: 43400 - DNA, 25 bp, Homo Sapiens
ctttgtgcacggaggtgtgaccatg

SEQ ID NO: 43401 - DNA, 25 bp, Homo Sapiens
acggaggtgtgaccatgaagctcat

SEQ ID NO: 43402 - DNA, 25 bp, Homo Sapiens
atgaagctcatggatgaggtcgccg

SEQ ID NO: 43403 - DNA, 25 bp, Homo Sapiens
gaggtcgccgggatcgtggctgcac

SEQ ID NO: 43404 - DNA, 25 bp, Homo Sapiens
tggctgcacgccactgcaagaccaa

SEQ ID NO: 43405 - DNA, 25 bp, Homo Sapiens
tgcaagaccaacatcgtcacagctt

SEQ ID NO: 43406 - DNA, 25 bp, Homo Sapiens
aacatcgtcacagcttccgtggacg

SEQ ID NO: 43407 - DNA, 25 bp, Homo Sapiens
cacagcttccgtggacgccattaat

SEQ ID NO: 43408 - DNA, 25 bp, Homo Sapiens
acctacgtgtcgctgagccaggaag

SEQ ID NO: 43409 - DNA, 25 bp, Homo Sapiens
aaggcaggtcgctgcctgtgcccca

SEQ ID NO: 43410 - DNA, 25 bp, Homo Sapiens
cgaagcagggccacgcggagcctca

SEQ ID NO: 43411 - DNA, 25 bp, Homo Sapiens
ccaccactctgcttaaaagttgagt

SEQ ID NO: 43412 - DNA, 25 bp, Homo Sapiens
ctctgcttaaaagttgagtgggccg

SEQ ID NO: 43413 - DNA, 25 bp, Homo Sapiens
tctgcttaaaagttgagtgggccgg

SEQ ID NO: 43414 - DNA, 25 bp, Homo Sapiens
gcttaaaagttgagtgggccgggcg

SEQ ID NO: 43415 - DNA, 25 bp, Homo Sapiens
ctaggtttttatgttgattgtactc

SEQ ID NO: 43416 - DNA, 25 bp, Homo Sapiens
taggtttttatgttgattgtactca

SEQ ID NO: 43417 - DNA, 25 bp, Homo Sapiens
ggtttttatgttgattgtactcatg

SEQ ID NO: 43418 - DNA, 25 bp, Homo Sapiens
gtttttatgttgattgtactcatgc

SEQ ID NO: 43419 - DNA, 25 bp, Homo Sapiens
tcatgctgttccactccttttaatt

SEQ ID NO: 43420 - DNA, 25 bp, Homo Sapiens
catgctgttccactccttttaatta

SEQ ID NO: 43421 - DNA, 25 bp, Homo Sapiens
atgctgttccactccttttaattat

SEQ ID NO: 43422 - DNA, 25 bp, Homo Sapiens
tgctgttccactccttttaattatt

SEQ ID NO: 43423 - DNA, 25 bp, Homo Sapiens
gctgttccactccttttaattatta

SEQ ID NO: 43424 - DNA, 25 bp, Homo Sapiens
aaaaccaaaacactctggttcagtg

SEQ ID NO: 43425 - DNA, 25 bp, Homo Sapiens
aaaccaaaacactctggttcagtgt

SEQ ID NO: 43426 - DNA, 25 bp, Homo Sapiens
aaccaaaacactctggttcagtgtt

SEQ ID NO: 43427 - DNA, 25 bp, Homo Sapiens
accaaaacactctggttcagtgttt

SEQ ID NO: 43428 - DNA, 25 bp, Homo Sapiens
aaaacactctggttcagtgttttga

SEQ ID NO: 43429 - DNA, 25 bp, Homo Sapiens
aaacactctggttcagtgttttgaa

SEQ ID NO: 43430 - DNA, 25 bp, Homo Sapiens
aacactctggttcagtgttttgaaa

SEQ ID NO: 43431 - DNA, 25 bp, Homo Sapiens
acactctggttcagtgttttgaaaa

SEQ ID NO: 43432 - DNA, 25 bp, Homo Sapiens
cactctggttcagtgttttgaaaat

SEQ ID NO: 43433 - DNA, 25 bp, Homo Sapiens
actctggttcagtgttttgaaaata

SEQ ID NO: 43434 - DNA, 25 bp, Homo Sapiens
ctctggttcagtgttttgaaaatat

SEQ ID NO: 43435 - DNA, 25 bp, Homo Sapiens
tctggttcagtgttttgaaaatatt

SEQ ID NO: 43436 - DNA, 25 bp, Homo Sapiens
actaacataatattgctgagaaaat

SEQ ID NO: 43437 - DNA, 25 bp, Homo Sapiens
gcaagagacatttttaagaccccaa

SEQ ID NO: 43438 - DNA, 25 bp, Homo Sapiens
aaaccaaaacactctggttcagtgt

SEQ ID NO: 43439 - DNA, 25 bp, Homo Sapiens
aatcatttttattacccaccactct

SEQ ID NO: 43440 - DNA, 25 bp, Homo Sapiens
ccaccactctgcttaaaagttgagt

SEQ ID NO: 43441 - DNA, 25 bp, Homo Sapiens
tctgcttaaaagttgagtgggccgg

SEQ ID NO: 43442 - DNA, 25 bp, Homo Sapiens
gcttaaaagttgagtgggccgggcg

SEQ ID NO: 43443 - DNA, 25 bp, Homo Sapiens
ctaggtttttatgttgattgtactc

SEQ ID NO: 43444 - DNA, 25 bp, Homo Sapiens
gtttttatgttgattgtactcatgc

SEQ ID NO: 43445 - DNA, 25 bp, Homo Sapiens
tcatgctgttccactccttttaatt

SEQ ID NO: 43446 - DNA, 25 bp, Homo Sapiens
catgctgttccactccttttaatta

SEQ ID NO: 43447 - DNA, 25 bp, Homo Sapiens
atgctgttccactccttttaattat

SEQ ID NO: 43448 - DNA, 25 bp, Homo Sapiens
tgctgttccactccttttaattatt

SEQ ID NO: 43449 - DNA, 25 bp, Homo Sapiens
gctgttccactccttttaattatta

SEQ ID NO: 43450 - DNA, 491 bp, Homo Sapiens
cagggaccattgcaatttagagatgtggccatagaattctctctggaggagtggcattgcctggacactgcacagcggaatttatataggaatgtgatgttagagaactacagtaacctggtcttccttggtattactgtttctaagccagacctgatcacctgtctggagcaaggaagaaaacctttgaccatgaagagaaatgagatgatagccaaaccctcagtgagcttccttcaagttcacagtgagagccaaagtcctcttcatgacatataagagactgcacagtgtggctgcttttccataatttttgggacgcacaaatgtctgcatgattttgagaaactaaaattactctcaaagttctctttgcatcagatctgaaatgtctgagagtaatagtttctgttgaatttttttttgttcatttttctgcacagtccattctgtttttattactatctaggcttgaaatatatagtttgaaa

SEQ ID NO: 43451 - DNA, 2342 bp, Homo Sapiens
cagtgacagtcatgggctcggcctcccttgatgagctgctgcgagttgacatcggcactctggacctggccagcagccgcctggactcagccatggctgtgtgctttggccctgcagctctgggccacctgctggtgtccacctcgtccaacagagtcgtggtgctggatgctgtgtcgggccgcatcatccgggagctgcccggtgtccaccctgagccctgcccctccttgacgctcagtgaggacgcccgcttcctgctgattgccgccggccggaccatcaaggtgtgggactacgccacacaggccagcccaggcccccaggtgtacatcggccactcggaacccgtgcaggctgtggccttctctcctgaccagcagcaggtcctcagcgcaggggacgccgtcttcctctgggatgtcctggcccctactgagagcgaccaaagcttccccggggcccccccagcctgcaagacaggcccgggcgcaggaccgctggaggacgcagcgtccagggccagcgagctcccccggcagcaggtccccaagccatgtcaggcatctccaccacggctgggcgtctgtgccaggcctcccgaaggtggcgatggcgccagggacaccaggaattcgggggccccacgcaccacctacctggcttcctgcaaggccttcacgcctgccagggtcagctgcagcccccactctgccaagggcacttgcccgcctcccgccagcggtgggtggctgcgtctgaaggctgtcgtcggttacagcgggaatgggcgggccaacatggtctggaggccggacacaggcttctttgcctacacgtgcggccgcctggtggtggtggaggacctgcactctggcgcccagcagcactggtccggccactctgcggagatctccacgctggccctcagccacagtgcccaggtcctggcctctgcctcgggccgaagcagcacgaccgcccattgtcagatccgcgtctgggacgtgtctggcggcctctgccagcatctcattttcccccatagcaccaccgtgctggccctggccttctcaccagatgacaggcttcttgtcacactgggggaccacgatggccgcaccctcgccctgtggggcacggccacctatgacctcgtgtcctccacccgcctcccggagccggtgcatggtgtggccttcaacccctgggacgccggcgagctcacctgtgtgggccagggcactgtcaccttctggctccttcagcagcgtggggcagacatcagccttcaggtgcgtcgagagccagtcccagaggcagtgggggctggagagctgacctcgctctgctacggggcacctcccctgctctattgtggcaccagctctggccaggtctgtgtctgggacacgcgtgccggccgctgcttcttgtcctgggaggcggatgacggtggcattgggctgttgctgttctcgggttctcgattggtcagcggcagcagcacggggcggctgcgcctgtgggccgtgggggctgtgtcggagctgaggtgcaagggctcaggcgccaggtccagttctgtgttcatggaacacgagctggtgctggacggggctgtggtgagtgccagcttcgatgacagcgtggacatgggcgtcgtgggcaccacggcgggcacgctgtggtttgtcagctgggccgagggcaccagcacacgtctcatcagtggccacaggagcaaggtgagggacttccagcctgggcagaggcggggcagccgaacctggtgccctccctgcctgccggctccatctccaccagcccagatgattccaagtcctgccgtcactggctcgcagcggccgccttggggttcccagcggggaagtcttgggtgtgcacgtcccctcaaagccgtcccggttgtgtctgcacaagcgagccgcctggcaggccttgcaggtcttctcaaactgtcctttccctgctattgctttgcgtttttttgtttgtttgttttttgttttttgtaattgtcaaagaaatcacatcagtccgggcgtggtggttcatgcctgtgatcccagcactctgggaggccaaggcaggtggatcacctgaggtcaggagttcgagaccagcctggtcaacatggcgaaatcccatctctactgaaaatacaaaaattagccgggcctcttgatgtatacctgtaatcccagctactctggaggctgagacaagagaatcgcttgaacccaggaggcagaggttgcagtgaaccaagattgcaccactgcactccagcctgggcgacagagactccatctcaaagg

SEQ ID NO: 43452 - DNA, 747 bp, Homo Sapiens
atggcttatggtcccaagaagcatctgaagtggagcagctcaaagcaatggatgctggagacactgactggtgtgtctgctcctcatccatccaccagtccccacaagctgagagtatgtctcctcctcatcatttttagaaacagaattaagtatgccctgatcagagatgaactaaagatttggatgctgcggctcattaagattgacgacaaggtccaaactgatagaacctaccctgctggattcaaagatgtcatcatcattgacaagaccagagagaatgtccgtctgacctgtaaccagggtcactttgccattcaccgtattacagctgaggaggccaagtacaaattgtgcaaagtgagaaaaatcttggctacaaaaggaatccctcatctggtaaccaatgatgctggcaccatccgctaccctggtcccctcatcaaggtgaatgacatcattcagattgatttggatactggcaagagtaccgatgtcatcaagtttgatactggtaacctgtggatggtgactggaggtgcgaacctgggaagaattggtgtgattaccaacagagagaggcaccctggatcttttgatgtggttcatgtgaaagatgccaacagcaacagctttgccacctggctttccagcatttttgttattggcaagggcaacaaaacccaaggaaagggtatccacctcaccactgctgaagagacagacaagagactggcagcctaa

SEQ ID NO: 43453 - DNA, 924 bp, Homo Sapiens
atgctacgtgtagtggaaggcatcttcatttttgttgtagttagtgagtcagtgtttggggttttggggaatggatttattggacttgtaaactgcattgactgtgccaagaataagttatctacgattggctttattctcaccggcttagctatttcaagaatttttctgatatggataataattacagatggatttatacagatattctctccaaatatatatgcctccggtaacctaattgaatatattagttacttttgggtaattggtaatcaatcaagtatgtggtttgccaccagcctcagcatcttctatttcctgaagatagcaaatttttccaactacatatttctctggttgaagagcagaacaaatatggttcttcccttcatgatagtattcttacttatttcatcgttacttaattttgcatacattgcgaagattcttaatgattataaaacgaagaatgacacagtctgggatctcaacatgtataaaagtgaatactttattaaacagattttgctaaatctgggagtcattttcttctttacactatccctaattacatgtatttttttaatcatttccctttggagacacaacaggcagatgcaatcgaatgtgacaggattgagagactccaacacagaagctcatgtgaaggcaatgaaagttttgatatctttcatcatcctctttatcttgtattttataggcatggccatagaaatatcatgttttactgtgcgagaaaacaaactgctgcttatgtttggaatgacaaccacagccatctatccctggggtcactcatttatcttaattctaggaaacagcaagctaaagcaagcctctttgagggtactgcagcaattgaagtgctgtgagaaaaggaaaaatctcagagtcacatag

SEQ ID NO: 43454 - DNA, 1542 bp, Homo Sapiens
tccacctccttggtgactccaagtactcacacagtcatcacccctacccacgcacagatggccacatctgcctccaaccactcagcgccaacaggtaccattcctccaccaacaacgctcaaggccacagggtccacccacacagccccaccaataacgccgaccaccagtgggaccagccaagcccacagctcattcagcacaaacaaaacacctacctcgctacattcacacacttcctccacacaccatcctgaagtcaccccaacttctactaccacgattactcccaaccccactagtacacgcaccagaacccctgtggcccacaccaactcagccaccagcagcaggccaccaccacccttcaccacacactccccacctacagggagcagtcccttctcttccacaggtcccatgacggcaacatccttcaagaccaccactacctatccaaccccatcactccctcagaccactcttctcactcacgttccacctttctcaacctctttggtgactccaattactcacacagtcatcacccctacccacccacagatgtccacttctgcctatatccactcaacgccaacaggcacgattgctccaccaacaacagttaaggccacaaggtccacctacacagccccactaatgacggcaaccccagtaggatcagccacaccactgaccaccagtgggaccagccaatcccgaagctcatttagcacggccaaaacctctacatccctacattcacacacttcctccacacaccatcctgaagtcacctcaacttctaccaccagcatcacccccaaccacaccagtacaggcaccagaacccctgtggcccacaccacgtcggccaccagcagcaggctacccacacccttcaccacacactccccacctacagggaccactcccatctcttccacaggtcctgtcactgcaacatccttccagaccaccactacctatccaaccccatcacaccctcacaccacacttcccactcacgttccatctttctccacctccttggtgactccaagtactcacacggtcatcatccctacccacacacagatggccacttctgcctccatccactcaatgccaacaggcaccattcctccaccgaccacgatcaaggccacagggtccacccacacagccccaccaatgacaccgaccaccagtgggaccagccaatccccaagctcatttagcacggccaaaacttctacatccctaccttaccacacttcctcaacacaccatcctgaagtcaccccaacttctaccaccaacatcacccccaaacacaccagtacaggcaccagaacccctgtggcccacaccacctcggccagcagcagcaggctacccacacccttcaccacacactccccacctacagggagcagtcccttctcttccacaggtcctatgactgcaacatccttccagaccaccactacctatccaaccccatcacaccctcagaccacacttcccactcacgttcca

SEQ ID NO: 43455 - DNA, 1203 bp, Homo Sapiens
atggtggcggagcggtccccggcccgcagccccgggagctggctgttccccgggctgtggctgttggtgctcagcggtcccggggggctgctgcgcgcccaggagcagccctcctgcagaagagcctttgatctctacttcgtcctggacaagtctgggagtgtggcaaataactggattgaaatttataatttcgtacagcaacttgcggagagatttgtgagccctgaaatgagattatctttcattgtgttttcttctcaagcaactattattttgccattaactggagacagaggcaaaatcagtaaaggcttggaggatttaaaacgtgttagtccagtaggagagacatatatccatgaaggactaaagctagcgaatgaacaaattcagaaagcaggaggcttgaaaacctccagtatcataattgctctgacagatggcaagttggacggtctggtgccatcatatgcagagaaagaggcaaagatatccaggtcacttggggctagtgtttattgtgttggtgtccttgattttgaacaagcacagcttgaaagaattgctgattccaaggagcaagttttccctgtcaaaggtggatttcaggctcttaaaggaataattaattcttctaacgggatcgcagccatcattgttattttggtgttactgctactcctggggatcggtttgatgtggtggttttggcccctttgctgcaaagtggttattaaggatcctccaccaccacccgcccctgcaccaaaagaggaggaagaagaacctttgcctactaaaaagtggccaactgtggatgcttcctattatggtggtcgaggggttggaggaattaaaagaatggaggttcgttggggtgataaaggatctactgaggaaggtgcaaggctagagaaagccaaaaatgctgtggtgaagattcctgaagaaacagaggaacccatcaggcctagaccacctcgacccaaacccacacaccagcctcctcagacaaaatggtacaccccaattaagggtcgtcttgatgctctctgggctttgttgaggcggcagtatgaccgggtttctttgatgcgacctcaggaaggagatgaggtttgtatatgggaatgtattgagaaagagctaactgcttgagtcagtataatggaggcagggaaatagtaataaaaaatgatt

SEQ ID NO: 43456 - DNA, 1326 bp, Homo Sapiens
aaggaggatgccttatttgggtaccagtttcttaatggtgccaaccccatggggctgaggctctccattcaccttcctacccacctcgtgttccctccagggatggaggaactgcaggcccagctggagaaggagctggaggggagcacactgtttgaagctgacttctccttgctagatgggatcaaggccaacatcattctgtgtagccagcagcatctggctgcccctctagtcatgctgaagctgcagtctgttgggaaactcttgcccatggtcatccaggtgagaggacttgagatttctgctcccagatcccagccacttccccttttcttgcccatggatcctgcaatggtctggcttctggccaaatgctgggtccatagctctgacttccagctccgtgagctgcagcctcatcctctgaggggacacttgatggctgaggtcacttttgtggccaccatgaggtgctttatacatcctgtcttcaagcttataattccccacctgcaatacaccatggaaattaacatctgggccagaactgggctggtctccaacaggaagttttcaaccaggtgtggtgagcactggtggggaagccatgtggagctgctcaagcgagctggagcctttctaacctatagctccttctgttcccctgatgacttggctgtccagggcctcctgggagtcaagaggtctgtgtctggttgtgggcctggggccctgacatggccatgtgaacaggggcagagctggcttcaacaccctggccctgccccattggctggccagtatgtggaaggaatcgtgagtctccactgtaagacagacgtggctgtgaacagtgacccagagctgcagacctggtgtcgagagatcattgaaccggctgcccaggaccgagggtttcctgtctctttacagtctcaggaccagatttgccactttgtcaccacatgtatctttgcctgcactggccgacactccttcgtccacctggaccagctggattggtacatttgggtccctaatgcaccctgcacgatgtggctgccaaccaccaaggatgcaacgctggagacagtgatggcaacactgcccaactttccagatgtcctccagatgtccatcagttggcagctgagcagacaccagcccattatggtgacagcaaaccagcataagaaggagtatttttcgggccctcggcctaaggctgtgctgaagaagttcagggaggagctggctgccctggatgaggaactgagatctaatgctacacgggacatgccctatgaatacctgcggcccagc

SEQ ID NO: 43457 - DNA, 1600 bp, Homo Sapiens
tgcttctatcacactccagtgcttttaagcaggttttccccccatattttacctaaagtttatagctgttacctgtggaaaggttggttcagtgggggctattctgccattaccaaaagttgggtcctgttctctactttttaattgggccggaaaagaggcataaactcggagaacccaagaccccggcctggcgtgcagccccagcagccggaccagccttgggcaacagcgtgcgacgttcagctgtctgtgtctccagtgctcccattccatcgcacctgaatgagggatttgggaggggctgagcgtgcgttcgagcttctcctgcatcatgaccaggatgctctgggacaccttgtccacgtctgtgtccaccagtcctgctcagaatctccccaggggcttttccacgatgcccatccaggcgtcaccctcactctaggccaggaggagaaggcatgccctgaggattcagcctcttcttcttcatccctcccagcacccagtgtgttgggtgcacacattatggttccaaaccagagtttccctaggaaataaacacggaggggctgaaaggacctggggccatcgggggtggatggccatatcctggggccttgatgccagtgccgactgttccctgcacgcttccacgtccacgccaacattgcaaggctatgtcacggactggaacagctacagtgatgacacacctgaggtgaacacaactccagcagcatcctggcctctcatggggcaagtgcatgtggaatctagaaacttcacagctgagcctgcaaaggtgctcatggcatgcagaagtgtttctggatccagtggtaggaagtcatttcaagcagcttgtgaacattcacagaagcagctcaggatcatcctgctgcttctgagagcaggtgtcgggccccaggctggaggccacgtgccaggctggcaggatttgtccactgtgaagctcgacgcccccgcaggccctgtgctgcccgcccggatccccctgcctcaggatgccctccacaccctccgaattcccagccgctgctctggggcctgcacagagggcttgggcccagcacctggaaactccaaagaggcaaacgggttcatgtccaggttttgtcagatcgcttccgaggctgccctcttcgccgtggctgctgagtgcagagctgggcatctgagtggacagagtggtgctccgcttccttgcatctcctgggccatgcgtggtgacctgtgcccactgcatcgctcctgtgtgccctgtgcatgtgaccgtgtctttcccgtgtattcagtgctgcttcatgtcttccagttccgctttgtggtttgtgagtgaccagtgcatcccgttcctgctgcagcagctgcaatgtgcactgtcctgcaggaagccctcggggtagggcctgggggctgtgggaagctcagcaacaaggtaagggaatgggcagctttgttttatttatttatttatttttactatttaattatctcaccttattacactttaattaaaatatcgatctttacacaatacacttgaactgtggaataaagcaggaccagatgtgga

SEQ ID NO: 43458 - DNA, 1782 bp, Homo Sapiens
catgctgagcctcctcgtctggatcctcactctctccgatactttctcccaagggacccagacccgcttcagccaggagccagctgaccagacggtggtggctggacagcgggccgtgctcccctgtgtgctgctcaactactctggaattgtgcaatggaccaaggacgggctggccctgggcatgggccagggcctcaaagcctggccacggtaccgggttgtgggctccgcagacgctgggcagtacaacctggagatcacagatgctgagctctctgacgacgcctcttacgagtgccaggccacggaggccgccctgcgctctcggcgggccaaactcaccgtgctcatccccccagaggacaccaggattgacggaggccctgtgattctactgcaggcaggcaccccccacaacctcacatgccgggccttcaatgcgaagcctgctgccaccatcatctggttccgggacgggacgcagcaggagggcgctgtggccagcacggaattgctgaaggatgggaagagggagaccaccgtgagccaactgcttattaaccccacggacctggacatagggcgtgtcttcacttgccgaagcatgaacgaagccatccctagtggcaaggagacttccatcgagctggatgtgcaccaccctcctacagtgaccctgtccattgagccacagacggtgcaggagggtgagcgtgttgtctttacctgccaggccacagccaaccccgagatcttgggctacaggtgggccaaagggggtttcttgattgaagacgcccacgagagtcgctatgagacaaatgtggattattcctttttcacggagcctgtgtcttgtgaggttcacaacaaagtgggaagcaccaatgtcagcactttagtaaatgtccactttgctccccggattgtagttgaccccaaacccacaaccacagacattggctctgatgtgacccttacctgtgtctgggttgggaatccccccctcactctcacctggaccaaaaaggactcaaatatggtcctgagtaacagcaaccagctgctgctgaagtcggtgactcaggcagacgctggcacctacacctgccgggccatcgtgcctcgaatcggagtggctgagcgggaggtgccgctctatgtgaacgggccccccatcatctccagtgaggcagtgcagtatgctgtgaggggtgacggtggcaaggtggagtgtttcattgggagcacaccacccccagaccgcatagcatgggcctggaaggagaacttcttggaggtggggaccctggaacgctatacagtggagaggaccaactcaggcagtggggtgctatccacgctcaccatcaacaatgtcatggaggccgactttcagactcactacaactgcaccgcctggaacagcttcgggccaggcacagccatcatccagctggaagagcgagaggtgttacctgtgggcatcatagctggggccaccatcggcgcgagcatcctgctcatcttcttcttcatcgccttggtattcttcctctaccggcgccgcaaaggcagtcgcaaagacgtgaccctgaggaagctggatatcaaggtggagacagtgaaccgagagccacttacgatgcattctgaccgggaggatgacaccgccagcgtctccacagcaacccgggtcatgaaggccatctactcgtcgtttaaggatgatgtggatctgaagcaggacctgcgctgcgacaccatcgacacccggga

SEQ ID NO: 43459 - DNA, 1662 bp, Homo Sapiens
atgaagctgggatcgagcagggcagggcctgggagaggaagcgcgggactcctgcctggcgtccacgagctgcccatgggcatccctgccccctgggggaccagtcctctctccttccacaggaagtgctctctctgggcccctgggaggcccttcctcactctggtcctgctggtttccatcaagcaagttacaggatccctccttgaggaaacgactcggaagtgggctcagtacaaacaggcatgtctgagagacttactcaaggaaccttctggcatattttgtaacgggacatttgatcagtacgtgtgttggcctcattcttctcctggaaatgtctctgtaccctgcccttcatacttaccttggtggagtgaagagagctcaggaagggcctacagacactgcttggctcaggggacttggcagacgatagagaacgccacggatatttggcaggatgactccgaatgctccgagaaccacagcttcaagcaaaacgtggatcgttatgccttgctgtcaaccttgcagctgatgtacaccgtgggatactccttctctcttatctccctcttcctggctctcaccctcctcttgtttcttcgaaaactccactgcacgcgcaactacatccacatgaacttgtttgcttctttcatcctgagaaccctggctgtactggtgaaggacgtcgtcttctacaactcttactccaagaggcctgacaatgagaatgggtggatgtcctacctgtcagagatgtccacctcctgccgctcagtccaggttctcttgcattactttgtgggtgccaattacttatggctgctggttgaaggcctctacctccacacgctgctggagcccacagtgcttcctgagaggcggctgtggcccagatacctgctgttgggttgggccttccctgtgctatttgttgtaccctggggtttcgcccgtgcacacctggagaacacagggtgctggacaacaaatgggaataagaaaatctggtggatcatccgaggacccatgatgctctgtgtaacagtcaatttcttcatcttcctgaaaattctcaagcttctcatttctaagctcaaagctcatcaaatgtgcttcagagattataaatacagattggcaaaatcaacactggtcctcattcctttattgggcgttcatgagatcctcttctctttcatcactgatgatcaagttgaaggatttgcaaaacttatacgacttttcattcagttgacactgagctcctttcatgggttcctggtggccttgcagtatggttttgccaatggagaggtgaaggctgagctgcggaaatactgggtccgcttcttgctagcccgccactcaggctgcagagcctgtgtcctggggaaggacttccggttcctaggaaaatgtcccaagaagctctcggaaggagatggcgctgagaagcttcggaagctgcagccctcacttaacagtgggcggctcctacatctagccatgcgaggtcttggggagctgggcgcccagccccaacaggaccatgcacgctggccccggggcagcagcctgtccgagtgcagtgagggggatgtcaccatggccaacaccatggaggagattctggaagagagtgagatctag

SEQ ID NO: 43460 - DNA, 543 bp, Homo Sapiens
atgccgtcatcagtcccgaagacctccatagagtcccttgggtctccatcatccctgagctcctcccaggcatcagagcctctgtgtcccctgaagcacccttcacaccggccacctgcgagcaccctatcaccaaacctgaccagctccacagaatccttggggtatctgtcatccctcagctcctctcagccaccagagcctttgcgtcccctggaatgtccttcacacaagccatgtgggcgttcccttccccgacgacggaatcctggctgggtgtcctggtccgactccatgcaggctgattccgaaactgacgccataatatgcccaatgtgcaaggcccctgagcgctcctgtccacacacctggtgggtgccttctagccctcgagtgatccgaggcgttggtcgctgcagtgatcccaacctgggcctctcctggaggcaggaggctgctagagcctggtgccactgcacctcctcacagtacccattcaagcaccctaatcttcccacccacctaccaaaggcttctttctag

SEQ ID NO: 43461 - DNA, 678 bp, Homo Sapiens
gggaggcgccgaggccagcgatgggcgtgcagccccccaacttctcctgggtgcttccgggccggctggcgggactggcgctgccgcggctccccgcccactaccagttcctgttggacctgggcgtgcggcacctggtgtccctgacggagcgcgggccccctcacagcgacagctgccccggcctcaccctgcaccgcctgcgcatccccgacttctgcccgccggcccccgaccagatcgaccgcttcgtgcagatcgtggacgaggccaacgcacggggagaggctgtgggagtgcactgtgctctgggctttggccgcactggcaccatgctggcctgttacctggtgaaggagcggggcttggctgcaggagatgccattgctgaaatccgacgactacgacccggctccatcgagacctatgagcaggagaaagcagtcttccagttctaccagcgaacgaaataaggggccttagtacccttctaccaggccctcactccccttccccatgttgtcgatggggccagagatgaagggaagtggactaaagtattaaaccctctagctcccattggctgaagacactgaagtagcccacccctgcaggcaggtcctgattgaaggggaggcttgtactgctttgttgaataaatgagttttacgaaccagg

SEQ ID NO: 43462 - DNA, 4753 bp, Homo Sapiens
caccccaggaaccaacataaagagaaatgcagacgatataaccagtaatgaccatggtgaagataaagatattcatgaacagaacagtaagaagcctgttatggtctatatccatgggggatcttacatggagggaaccggtaacatgattgatggcagcattttggccagctatgggaacgtcatcgttatcaccattaactaccgtctgggaatactagggtttttaagtaccggtgaccaggcagcaaaaggcaactatgggctcctggatcagattcaagcactgaggtggattgaggagaatgtcggagcctttggcggggaccccaagagagtgactatctttggctcgggggctggggcctcctgtgtcagcctgttgaccctgtcccactactcagaaggtctcttccagaaggccatcattcagagcggcactgccctgtccagctgggcagtgaactaccagccggccaagtacactcggatattggcagacaaggtcggctgcaacatgctggacaccacggacatggtagaatgtctgaagaacaagaactacaaggagctcatccagcagaccatcaccccggccacctaccacatagcctttgggccggtgatcgacggcgacgtcatcccagacgacccccagatcctgatggagcaaggcgagttcctcaactacgacatcatgctgggcgtcaaccaaggggaaggcctgaagttcgtggacggcatcgtggataacgaggacggtgtgacgcccaacgactttgacttctccgtgtccaacttcgtggacaacctttacggctaccctgaagggaaagacactttgcgggagactatcaagttcatgtacacagactgggccgataaggaaaacccggagacgcggcggaaaaccctggtggctctctttactgaccatcagtgggtggcccccgccgtggccaccgccgacctgcacgcgcagtacggctcccccacctacttctatgccttctatcatcactgccaaagcgaaatgaagcccagctgggcagattcggcccatggcgatgaagtcccctatgtcttcggcatccccatgatcggtcccacagagctcttcagttgtaatttctccaagaacgacgtcatgctcagtgccgtggtgatgacctactggacgaacttcgccaaaactggtgatccaaaccaaccagttcctcaggataccaagttcattcatacaaaacccaatcgctttgaagaagtggcctggtccaagtataatcccaaagaccagctctatctgcatattggcttgaaacccagagtgagagatcactaccgggcaacgaaagtggctttctggttggaattggttcctcatttgcacaacttgaacgagatattccagtatgtttcaacaaccacaaaggttcctccaccagacatgacatcatttccctatggcacccggcgatctcccgccaagatatggccaaccaccaaacgcccagcaatcactcctgccaacaatcccaaacactctaaggaccctcacaaaacagggcccgaggacacaactgtcctcattgaaaccaaacgagattattccaccgaattaagtgtcaccattgccgtcggggcgtcgctcctcttcctcaacatcttagcctttgcggcgctgtactacaaaaaggacaagaggcgccatgagactcacaggcaccccagtccccagagaaacaccacaaatgatatcactcacatccagaacgaagagatcatgtctctgcagatgaagcagctggaacacgatcacgagtgtgagtcgctgcaggcacacgacacgctgaggctcacctgccctccagactacaccctcacgctgcgccggtcgccggatgacatcccatttatgacgccaaacaccatcaccatgattccaaacacattgatggggatgcagcctttacacacttttaaaaccttcagtggaggacaaaacagtacaaatttaccccacggacattccaccactagagtatagcttttccctatttcccctcctatccctctgcccctactgctcagcaatgtaaaagagacaaataaggagaaagaaaatctccaaaccaggaatgtttttgtgccactgactttagataaaaatgcaaaagggcagtcatcctgtcccagcagacccttctcattggcattttccagtattgtgagatcaatttctgaccatatgaaatgtgaaaagtatatgtttctgttacaatactgctttaagatctaaaccatgccaacagatgtttcgtgtgactaggacatcaccatttcaaggaactgtgtgtttccaacatcatggtagcagcacacacttccaaagctcagccagggacacttaatattttttaattacaatggaaatttaaacatttttatgtgggctacacaatggatggctcttcttaagtgaagaaagactctataggcttttacacagcacatgaagcagtaatccagaaagaaggaaatgcagaattttattatcaaagtaagcgaattgactgtgcagaaaaattgtagggttctgtggaaggaggtattctgccagcctgaactatatttaagaaactttgtaaaaaataaaaatgtatatagctgtgagctcaaacaaaaactgcagacaaacaaaaaagagaaaagcttttatttgtgttttcagtttgaaagaacttttagcaaggttgtgctttcaaacacatattagtcctaccaccttagttcctctacagcaaaagaggcttttcttcttaattacatgtaaacaaagacatgggattttctgacgtaagattttcatttgtaggaatatgtgatgtcaaatggaagactcagaagttttgtgtggcctatttctccctgtcaggttgcacagatgcatgtagagcattcttaggagaccattgttttagaaaactttgatttgtacatgttagttttcatgaaattgcaacacagagataggtcctaaaagtggaatgtatttaaaacttgttgaattagacacacacacacagacacacacaaagaatcagcagagaaaacaaaatacaagtcctgttctgtagttcttgccctttgaatatatttgggaagagttgcttcctatttcaggaccctgccaaaaaagaagaaagcttgcctttggtggggctatgccccttggagtaaatacagctctgtgttccctagcagctgccggaggatttggctgatgaagtacctgctcagcttagctaatcagattaaaggaagacatgtatgtcttttgtttaagcacctagtcccttatgtatcagtaaacaggtttttaaaaatcttttatgtcatttataggataaaacatatgcttgtctgaaaatatcaccttttgtggatttatctgatcaccaaataataaatattaagaagaatgggggaaaaaggatagaatattaaaactgctttgcataggtttttggggaaattaggatatcttcactgacaagacactgaatggaatttattcacccattttaaattggttacttggggatcagagatttgtctctccaacagcttgtggttttcttattactcattttcaggaaagtttgtagtattacaaggcagaaggaaacacagtagcaatggttgctctatattttgtctttcaaagattactgcattaccaagaaacagtagccaaagatgtttgaagatcatgtcccttagctgcattgtgggttattctagaaatccaatgttaaatgcctctactaaagtggggattccccataaaaattgtccagctacctgactcttttgcaataacaactttgattactgaatccatacactcaaactatagtgatatatcagtgtttgggagtgacctctagaaaaaagaaaactgtttttagaaatacataaaatcacttccaaatcctgttgcttatgttgggttaaatttgaaagcaattctctatatataaatatgtgaaatattatgatctgaacttagcacacatgaagcaacatttctttgctacacagaggtgtcttggaaagatttcattcccaattcatttttcatagatctataatcaggcaatttctgcaagcaatgtatgaccccacctgagcaaccacaaataggctctccatgaaactgcaaaggaactgatgtgtggcatccatgctggttttgtctgtctataatatgaattcaagtatctgttcatatttccaattgtctcctgctagcaatatgtgccacaacatgacagtcttgtgacatcttaaggaaaagaagagttcctgttaaatgaatagctttagcttttacaggggattatgattaaaagtgatttagtacatcttacatgatatctcatttctacgtgaaaagaagttatagaatcttcatagagttccatgagaaaaatatacttgctatttatagaaaacgagaaaaaagaaaaaaatgagaaacaagtaagaaaaaatcctttcctaggcttttccttgatcttcagaggcacacagggtttaatggttccttaggttattattttgaggttttgttctttcttttgccttaagtaatgacagaagatatatatggccagacacatatgtataaacttttcagcagcattttaataataaaatatcacactattttctaatgctttgtacaaac

SEQ ID NO: 43463 - DNA, 2123 bp, Homo Sapiens
ggtaagggccctgggcgaggaaagcgcggccctttccgagtttggtgttttgcagcgaaaggaaatctcgctcttccgaaagtcctccagggcgagagaggaaagggcctagaatacctcctctgaaaaatggcagaagcagttttccatgccccaaagaggaaaagaagagtgtatgagacttacgagtctccattgccaatcccttttggtcaggaccatggtcctctgaaagaattcaagatattccgtgctgaaatgattaacaacaatgtgattgtgaggaatgcggaggacattgagcagctctatgggaaaggttattttggaaaaggtattctttcaagaagccgtccaagcttcacaatttcagatcctaaactggttgctaaatggaaagatatgaagacaaacatgcctatcatcacatcaaagaggtatcagcatagtgttgagtgggcagcagagctgatgcgtagacaggggcaggatgagagtacagtgcgcagaatcctcaaggattacacgaaaccgcttgagcatcctcctgtgaaaaggaatgaagaggctcaagtgcatgacaagcttaactctggaatggtttccaacatggaaggcacagcagggggagagagaccttctgtggtaaacggggactctggaaagtcaggtggtgtgggtgatccccgtgagccattaggctgcctgcaggagggctctggctgccacccaacaacagagagctttgagaaaagcgtgcgagaggatgcctcacctctgccccatgtctgttgctgcaaacaagatgctctcatcctccagcgtggccttcatcatgaagacggcagccagcacatcggcctcctgcatcctggggacagagggcctgaccatgagtacgtgctggtcgaggaagcggagtgtgccatgagcgagagggaggctgccccaaatgaggaattggtgcaaagaaacaggttaatatgcagaagaaatccatataggatctttgagtatttgcaactcagcctagaagaggcctttttcttggtctatgctctgggatgtttaagtatttactatgagaaggagcctttaacgatagtgaagctctggaaagctttcactgtagttcagcccacgttcagaaccacctacatggcctaccattactttcgaagcaagggctgggtgcccaaagtgggactcaagtacgggacagatttactgctatatcggaaaggccctccattttaccatgcaagttattctgtcattatcgagctagttgatgaccattttgaaggctctctccgcaggcctctcagttggaagtccctggctgccttgagcagagtttccgttaatgtctctaaggaacttatgctgtgctatttgattaaaccctctactatgactgacaaggaaatggagtcaccagaatgtatgaaaaggattaaagttcaggaggtgattctgagtcgatgggtttcttcacgagagaggagtgaccaagacgatctttaacaattcaacctcaaatttctaatttcaccaacaactatttattgagggctaggtaaaaagttctttttgttgtaatcgtccattaattcataagttttaaagggcatggtgctcccagcaccagaaaactatcagtgtttttaaagataaattacacaagggaggagaaagatccctgtgctaggactgcagattctatacttgcgttggcctctaactctccaatccagagcctcctgcctctggcgtcagtcttttccctcatccactcactggggagattggactagaggagtcctgagaggacacttccaacaagagacatttattctctgattttacctgaaaatggtagtagtttacatttatacagtacagtttatgaagcactttcatacgcaggcatctcttgttacctacatctaagctgttcccgaaagagtgttacagaacacaacagtattgtacaatattcgataagcatatcttcactgcacttgttataaaaatgagtggtgaaataatgtttggagacataatgaaagcgattaacatttggcaaaatataataaagcctttttgtaattggtgagaaa

SEQ ID NO: 43464 - DNA, 534 bp, Homo Sapiens
atgccagtaggcttttggtcccaactatggaaaggagctgaactccggtattcattgatagagaaacagctagcagctgtatatgctggccttcgggctcatgagagcatgacaggacaggctgcagtcatcatatggacaacttacccaataacaggatggatgcgtctatgtgtaatgaccacctggagtgggatagcacagatgtccactttggcaaaatggggcaactccttgcagcagtggagtaagctgagtacaagtcccatagcagcagagttgcaagaggtcttgggacgtgtagtcctaatgcaagataaggccatgcggcctgaggcacccctagatcctgagtcttcaccatttaaggaagggcatcccaggattcctgagggggcatggtacacagtagatgaggtgctactgctgcctggaccactgttgcagtccaacctagtactgacaccatatggtttgaaactgggtgcggacaaagtagccaatgggctgaactcagagcagtgtggatggtga

SEQ ID NO: 43465 - DNA, 2481 bp, Homo Sapiens
gaatcaactgatgagtctgaagttgacaaaactcactgtctgaataacagtgtttcctcaggcacttactcagactactcgccttcccaggcttcctcaggatcctctaatacccgggttaaagtggggtccttgcagacaacagctaaagatgcagtacataattctttgtggggtaacaggattgcaccatctttcccacagcctcttgattcaaagccattactcagccagcgggaggctgttcccccaggcaatataccacagcgtcctgaccggctgcccatgagtgatactttcactgacaactggactgatggctcgcattatgacaacacagggtttgttgctgaggaaaccacagccgagaatgccaacagtaatcctctcttaagttcgaaatctagaagcacatcttcgcatggacgcaggcctttgatcaggcaagacaggattgttggtgttcccctggaactcgagcagtctacacacagacacacaccagaaacagaagtgcctccttccaatccttggcagaattggaccagaacccctagtccgtttgaagacaggaccgcttttccttccaaattagagacaacccccactaccagcccattgcctgaaaggaaagaacatataaaggaatctactgaaatacctagtcctttttctccaggcgtaccatgggagtatcatgattccaatcccaacaggagtcttagtaatgtcttttctcaaatccactgccgcccggaatcttctaaaggtgttatttcaattagcaaaagcacagagaggctttcccccctaatgaaagatatcaagtctaataaattcaaaaagtcacagagtatcgatgagattgacattggtacatataaggtgtataacataccattagaaaactatgcttctgggagtgatcacttaggaagccacgaacgaccggataagatgctgggaccagagcatggtatgtccagtatgtctcgaagccagtcagtcccaatgctggatgatgagatgctcacctacggaagtagtaaggggccacaacaacaaaaagcttctatgacaaaaaaagtctatcagtttgaccaaagcttcaatcctcaaggatcagtggaagtgaaagccgaaaagaggataccacccccttttcaacacaatcccgagtacgtgcaacaggccagcaaaaacatcgccaaggatttgattagtcctagagcttacagaggatacccaccgatggagcaaatgttttcattttctcagccatctgtgaatgaggatgctgtggtgaatgcccagttcgcaagccaaggggccagggcgggcttcctgagaagggccgactccctggtgagcgccacagaaatggccatgtttagaagggtcaatgagcctcatgagctgcccccaactgataggtacggcagacccccatataggggagggctggatcgccaaagcagcgttacagtgactgagtcccagttcctgaaaaggaatggcaggtatgaagatgaacacccttcatatcaagaagtgaaagctcaggcgggaagttttccggttaaaaaccttacccaaaggaggccattgtctgcgagaagctacagtacagagagttacggtgcctcccaaaccaggccagtttcagctaggcctactatggcagctcttttggaaaaaataccatctgactataacttgggtaactatggtgacaagccatcagataacagtgatttaaagacgaggcctactcctgtgaagggagaggagagctgtggtaaaatgcctgcagactggagacaacagctgcttagacatatagaagctagacggttagacaggaccccgtcccagcaaagcaacattttagacaatggacaagaagatgtatctcctagtggccaatggaatccttatccacttgggaggcgggatgtacctccggacaccattactaagaaggcaggcagccacatccagacgttgatggggtcccaaagccttcagcatcgcagccgggagcagcagccgtatgaaggaaatataaacaaagtgaccatccagcaatttcagtcaccattgcctattcagatcccctcttcacaggccacccggggacctcagcctggacggtgcttaattcaaactaaagggcaaaggagtatggatggatatccagagcagttttgtgtgagaatagaaaagaatcctggccttggatttagtatcagtggtggaattagtggacaaggaaatccattcaaaccttctgacaagggtatctttgttactagggttcagcctgatgggccagcatcaaacctactgcagcctggtgataagatccttcaggcaaatggacacagttttgtacatatggaacatgaaaaagctgtattactactgaagagtttccagaacacagtagacctagttattcaacgtgagcttactgtctaa

SEQ ID NO: 43466 - DNA, 1743 bp, Homo Sapiens
ggtgatggctgtggacacctagtgacttatcaggatagtggcacaatgacatctaagaattatcccgggacctaccccaatcacactgtttgcgaaaagacaattacagtaccaaaggggaaaagactgattctgaggttgggagatttggatatcgaatcccagacctgtgcttctgactatcttctcttcaccagctcttcagatcaatatggtccatactgtggaagtatgactgttcccaaagaactcttgttgaacacaagtgaagtaaccgtccgctttgagagtggatcccacatttctggccggggttttttgctgacctatgcgagcagcgaccatccagatttaataacatgtttggaacgagctagccattatttgaagacagaatacagcaaattctgcccagctggttgtagagacgtagcaggagacatttctgggaatatggtagatggatatagagatacctctttattgtgcaaagctgccatccatgcaggaataattgctgatgaactaggtggccagatcagtgtgcttcagcgcaaagggatcagtcgatatgaagggattctggccaatggtgttctttcgagggatggttccctgtcagacaagcgatttctgtttacctccaatggttgcagcagatccttgagttttgaacctgacgggcaaatcagagcttcttcctcatggcagtcggtcaatgagagtggagaccaagttcactggtctcctggccaagcccgacttcaggaccaaggcccatcatgggcttcgggcgacagtagcaacaaccacaaaccacgagagtggctggagatcgatttgggggagaaaaagaaaataacaggaattaggaccacaggatctacacagtcgaacttcaacttttatgttaagagttttgtgatgaacttcaaaaacaataattctaagtggaagacctataaaggaattgtgaataatgaagaaaaggtgtttcagggtaactctaactttcgggacccagtgcaaaacaatttcatccctcccatcgtggccagatatgtgcgggttgtcccccagacatggcaccagaggatagccttgaaggtggagctcattggttgccagattacacaaggtaatgattcattggtgtggcgcaagacaagtcaaagcaccagtgtttcaactaagaaagaagatgagacaatcacaaggcccatcccctcggaagaaacatccacaggaataaacattacaacggtggctattccattggtgctccttgttgtcctggtgtttgctggaatggggatctttgcagcctttagaaagaagaagaagaaaggaagtccgtatggatcagcagaggctcagaaaacagactgttggaagcagattaaatatccctttgccagacatcagtcagctgagtttaccatcagctatgataatgagaaggagatgacacaaaagttagatctcatcacaagtgatatggcaggttaactccgttgactgccaaaatagcatccccaacgtgcagccctccgcatctatcagcaggttgccccggatggatctcagagatgaggattggaacaccatgttctttcccaccctaacaacaacaaagggcagtaaattaaagtactctttgtaaggtacagttaccgattaatctagagataaaatattttcttaaaaatatatttcattaaacacctatgctgtctctataaa

SEQ ID NO: 43467 - DNA, 417 bp, Homo Sapiens
atgggcgctaccgccgtcttggagatggctgcggccactccacctgccaggaagtccttggcgaaggacacagcggcatctgtcatgttgaaagaggaggcagactgctgcaggacgggactgggccgggaaccggctttgactccggcgctgcggggcggagcgaagcaaatggccgatttatatagggggagccggagctggagcggcaggcgtcggaggcggggccggggcggggtctgggccccggcgcgctgggcggcagagccgctgagtggcccagctcgcaggaggaggagtcgtggagggcgggccgggactgctctccgcgccgcccgtgctcgccctcggcacctgacccggcgagaggaaggggcgggtccagagaacacccgggacttgaacgctggaccctga

SEQ ID NO: 43468 - DNA, 707 bp, Homo Sapiens
cagagactcctcccctgtcgcccagatcccacccgcaggaccccaaaacccaatgatcctgcagcagcccttgcagcgaggcccccagggaggggcccagcgcctcccgcgggccgccttgggggtgacttggggcctggacgccagctcccctctccgaggagctgtgcccatgagcaccaagcggcgcctggaggaggagcaggagcctctgcgcaagcagtttctgtctgaggagaacatggccacccacttctctcaactcagcctgcacaatgaccacccctactgcagcccccccatgaccttctccccagccctgcccccactcaggagcccttgctctgagctgcttctctggcgctatcctggcagcctcatccctgaggccctccgtctgctgaggctgggggacacccccagtcccccctaccctgcaaccccagctggggacataatggagctctgagtgctggtggacagtgcccctcccaccttccttcttccccacaacagaagagaccagcgactcccgcaaagggacaaggttcctccctctcctgcagagtaggcatctgggcaccaagaccttccctcaacagaggacactgagcccaacggagttctgggatgggaggggtgggagcatgggaagggaggcatcccacccccaagaagaactgaataaagattgctgagcaaaggaa

SEQ ID NO: 43469 - DNA, 1379 bp, Homo Sapiens
cagggtgtttcccgaccagtccctgggcgccaactagagtatggactgaccaggtacctggatggagacctgagctggagaaggagatgcgcttgggaggaaattgcagaggccgtcaacatggaaaagcagccccagaacagcaggagaggcctcgccccccgagaggtgccgccagctgttgggctgctgctgatcatggccctgatgaatactctgctctacctctgcctcgaccacttcttcatcgctcctcgacaatccactgtggaccccacacactgtccctatggtcacttcaggataggacagatgaaaaactgctcaccttggctgtcctgcgaggagctgagaacagaagtgagacagctgaagcgtgttggggaaggagctgtaaagagagtctttctgtctgagtggaaggagcacaaagttgcactctcacagctcaccagcctggagatgaaagatgatttcctccatggactgcagatgctgaaatctctccaaggcacacatgttgtcacgctgcttggctattgtgaggatgacaacactatgcttactgaatatcaccctctaggttccttgagtaacctggaagaaacactaaacctttcaaagtaccaaaatgtgaacacgtggcagcacaggctggagctggccatggactatgtcagcatcattaattacctgcaccacagccctgtgggcacacgggtcatgtgcgactccaacgacctgccgaagacactgtcccagtatctgctaacaagcaacttcagcattttggcaaatgacttggacgccttacccctggtgaaccacagctccgggatgctggtgaagtgcggccacagggagctgcatggggatttcgtggctccagagcaactgtggccctatggagaggacgtgcctttccacgatgatctcatgccctcatatgatgagaagattgacatttggaagatcccagacatctccagtttccttctggggcacattgaagggagtgatatggtccgattccatttgtttgatattcacaaagcatgcaagagccagactccctcagaaagacccactgcccaggacgttctggagacctaccagaaggtcttggatacacttagagatgccatgatgtctcaggcaagagagatgctgtgaaaaccagtccagccaatgaaggtgggattgaagggctgaatggaagttacagcattctactctgatggtggagttttttgcctgagtttcgtgttttattgttttttttatggcttagccatgtggttcgttgtccacatccacatgtacgtttgtatgtagtccacattggttgttagatttttttttttttctttgagatgcgg

SEQ ID NO: 43470 - DNA, 1514 bp, Homo Sapiens
gggggagctgcggcggtggcggtgcaggaggccgggccggggcgcggagggaccgacggatgcacgggcgggcggtcgggagccatggagcgcggccctggggcccgggggcgcgggccggggtggccttcccacggcacgacatggagacctgtggttgcgaggctccctggggcggcttggaccgcgatggggctgggccctggcctcctaatggggctgccgtctggggctctcacccctgcccgcgactcggagcacccccacccctcccctgcccggccaggccgggcggcgttgttggcgggggccccggtggaggcccggcccgggaggcgcctgccatgaacgggctgtcgctgagtgagctctgctgccttttctgctacccgccctgccccggccgcatcgctgccaagctcgccttcctgccgccggaggccacctactccctggtgcctgagcccgggcctggtggggccggggcctggtggggccggggccgcccccttggggaccctgcgggcctcctcgggcgctggaagctgcacctgacggagctcgccgacttccagtacagccagcgcgagctggacaccatcgaggtcttccccactaagagcgcccacggcaaccgcgtctcctgcatgtatgttcgctgcgtgcctggtgccaggtacacggtcttcttctcgcacggcaacgcggtggacctgggccagatgagcagcttctatactgggctgaactcccgcctccactgcaacatcatctacgactactccggctacggtgccagcgcgggcaggccttccgagtggaacctctatgccgacatcgacgccgcctggcaggccctgcgcaccaggtacggcatcagcccggacagcatcatcctgtacgggcagagcatcggcacggtgcccaccgtggacctggcctcgcgctacgagtgtgccgcggtggtgctgcactcgccgctcacctcgggcatgcgcgtcgccttccccgacaccaagacctactgcttcgacgccttccctaacatcgagaaggtgtccaagatcacgtcgcccgtgctcatcatccacggcatggaggacgaggtgatcgacttctcacacgggctggcgctctacgagcgctgccccaaggcggtggagccgctgtgggtggagggcgccgggcacaacgacatcgagctctacagccagtacctggagcgcctgcgtcgcttcatctcccaggagctgcccagccagcgcgcctagcggcgggccccaaccggccggacctcagcaataaggcggcccccggacctcaccccgcgccggccccccaggggctgcatgtggacccccgggcggcctaggggaccctgccccgacccaggggctgtggacgatgtacacagtcaacagagctacgcactcctttccttttggaagcaaaaagaaaatatgtgaaaacagaaattaaagatttaaaatttaaaaaaaaaaaagaaaaaaaaa

SEQ ID NO: 43471 - DNA, 534 bp, Homo Sapiens
atgaattggtttggaagtaacttcttcaggtgtcctgaggatctttccttactcaacatatactcacctctgttgtcacacatgtcatctgaagatgaacattttatttccaacttgagaggccatgtaccagccagcgctgtggtgaagcagcctgttcggggagccagtggcaggacgacaatcacagcaattgtccagactggcgggggctggagcaccggtctcttcagtgtctgcagagataggagaatttgtttctgtggtctattctgtcctatgtgtcttgagtgtgacatcgccaggcattatggagagtgtctttgttggccgttgttacctgggtccacctttgcactgagaattggcaccagggagagacataaaatacagggcacactgtgtgaagactggctggcggtgcactgctgttgggctttttccatctgccaggtggcccgggaactcaagatgaggacctcccaagtctatgaaatctgtgcagtcccaatgactaaggacaccctggtttga

SEQ ID NO: 43472 - DNA, 390 bp, Homo Sapiens
atgcctaattttgcaaaatcacttttcattcacccaataaatttttttcttcttttttccacagagttttgctctgtctcccaggcaggagtgcagtggcgggatcttggctcgctgcaacctctgccttccaggttcaatagagtctcctgcctcagcctcccaaataccaattattgctgggtgtggtggctcatgcctgtaatcccagcactttgggaggccaaggctggcggatcacctgaggtcaggggttcgagattagcctggtcaaaatggcaaaaccctgtctccactaaaaatacaaaaaaaccccaaaactgtccaggcatggtggcacacgcctgtagtcccaactactcgggaggtggaggcaggagaatcacttga

SEQ ID NO: 43473 - DNA, 972 bp, Homo Sapiens
atggcaacggtgaacacagatgccacagataaagacatatccaagttcaaggtcaccttcactttggtggtctccggaatagagtgcatcactggcatccttgggagtggcttcatcacggccatctatggggctgagtgggccaggggcaaaacactccccactggtgaccgcattatgttgatgctgagcttttccaggctcttgctacagatttggatgatgctggagaacattttcagtctgctattccgaattgtttataaccaaaactcagtgtatatcctcttcaaagtcatcactgtctttctgaaccattccaatctctggtttgctgcctggctcaaagtcttctattgtcttagaattgcaaacttcaatcatcctttgttcttcctgatgaagaggaaaatcatagtgctgatgccttggcttctcaggctgtcagtgttggtttccttaagcttcagctttcctctctcgagagatgtcttcaatgtgtatgtgaatagctccattcctatcccctcctccaactccacggagaagaagtacttctctgagaccaatatggtcaacctggtatttttctataacatggggatcttcgttcctctgatcatgttcatcctggcagccaccctgctgatcctctctctcaagagacacaccctacacatgggaagcaatgccacagggtccagggaccccagcatgaaggctcacataggggccatcaaagccaccagctactttctcatcctctacattttcaatgcaattgctctatttctttccacgtccaacatctttgacacttacagttcctggaatattttgtgcaagatcatcatggctgcctaccctgccggccactcagtacaactgatcttgggcaaccctgggctgagaagagcctggaagcggtttcagcaccaagttcctctttacctaaaagggcagactctgtga

SEQ ID NO: 43474 - DNA, 3294 bp, Homo Sapiens
gactcaccctcgcggcccgcccgggaactctgcgggagtcgcggcagctccgctcccagagacccaggagttgggcccagcgtccctcccggaacggcagcatgatcccagtggccgagttcaagcagttcacggaacagcagcctgcgttcaaggtgctcaaaccctggtgggacgtgctggccgagtacctcaccgtggccatgctcatgattggggtctttggctgcaccctccaggtgacacaggacaagatcatctgtctacccaatcatgagctccaggagaacttatcagaggccccgtgccagcaattgctgcctcgggggatccctgagcagattggggccctgcaggaggttaaaggccttaagaacaatttggacctgcagcaatacagctttattaaccagctgtgttatgagacggccctgcactggtatgccaagtacttcccttacctcgtggtcattcacacactcatcttcatggtctgcaccagtttctggttcaagttccctggcaccagctccaagattgaacacttcatctccatcctgggcaagtgtttcgactctccatggaccaccagggccctatccgaggtatccggggagaaccagaagggcccagcagccaccgaacgggctgcggccaccatagtggccatggcagggaccgggccggggaaggcaggggagggtgagaaggagaaagtgctggcggaaccggagaaggtggtgaccgagcctccagttgtcaccctgttggacaagaaggagggtgagcaagccaaagccctgtttgagaaggtgaagaagttccgcatgcacgtggaagagggcgacatcctgtacaccatgtacatccgacagacggtgctgaaagtgtgtaagttcctggccatcctggtctacaacctggtctatgtggagaagatcagtttcctggtggcctgtagggtggagacgtcagaggtcacgggctacgccagcttctgctgcaaccacaccaaggcccacctcttctccaagctggccttctgttacatctcctttgtgtgcatctacggacttacctgcatctacacgctctactggctcttccaccggcccctcaaggagtactccttccgttccgtgcgggaggagactggcatgggggacattcctgacgtcaagaatgacttcgccttcatgctgcacctcatcgatcagtacgactccctctactccaagcgcttcgccgtcttcctgtccgaggtcagcgaaagccgtctaaagcagctcaatctcaaccacgagtggacgcccgagaagcttcgacagaagctgcagcgcaatgccgcgggccggctggagctggccctctgcatgctgccgggtctgcccgacaccgtctttgagctcagtgaggtggagtcactcaggctggaggccatctgcgatatcaccttccccccggggctgtcacagctggtgcacttgcaggagctcagcttgctccactcgcccgccaggctacccttctccttgcaggtcttcctgcgggaccacctgaaggtgatgcgcgtcaaatgcgaggagctccgcgaggtgccgctttgggtgtttgggctgcggggcttggaggagctgcacctggaggggcttttcccccaggagctagctcgggcagccaccctggagagcctccgggagctgaagcagctcaaggtgttgtccctccggagcaacgccgggaaggtgccagccagtgtgaccgacgttgctggccacctgcagaggctcagcctgcacaacgatggggcccgtctggttgccctgaacagcctcaagaagctggcggcattgcgggagctggagctggtggcctgcgggctggagcgcatcccccatgcagtgttcagcctgggtgcgctgcaggaacttgacctcaaggacaaccacctgcgctccatcgaggaaatcctcagcttccagcactgccggaagctggtcacgctcaggctgtggcacaaccagatcgcctacgtccctgagcacgtgcggaagctcaggagcctggagcagctctacctcagctacaacaagctggagaccctgccctcccagctcggcctgtgctcaggcctccgtctgctggatgtgtcccacaatgggctacactccctgccacccgaggtgggcctcctgcagaacctacagcacctggccctctcctacaatgccctggaggccctgcccgaagagctcttcttctgccgcaagctgcggacgttgcttctgggcgacaaccagctgagccagctctcgccccacgtgggtgccctcagagccctcagccgcctggagctcaaaggcaaccgcttagaggcgctgccagaagaacttggcaactgtggggggctcaagaaggcggggctcctggtggaagacacgctttaccagggtctgccggcagaagtgcgggacaagatggaggaggaatgaagctggggtggggccgttttaggtagagccttaaaaatgcttctgccctggaatctcaaccattgtcttccaagataggaagccaagtgggtccaggccaggagatggggggggcgggggcagctgtgtcatctttctggggcccaggaggatctgggctggtttgtctggggagacagacaggatgttgtggagctggggtggaacctggtatggagggattaactcagtcatggcattctccgaccaaaaccacacctgtgtctctggcaggctggctggccttgctcccatccctagaactgctgcctctccctggatattccagctcaattagtgccacatatgggggaaacgacacatcccagtgggatttccaacactccccctccccatgcaacaaagcaacttacttctggagttctctcccaaggagaggacacagacacagttgtttgctgtgttatatgttagctccgaacaatggttctcatttggctaagcatcaaaatcacctagggagtcggtgcaaaacaaaatatcccagtcccctcccctgaaacactgactcaggaggtttggttgggggccaggagtctgttcctaaatattccaggtagttctggtgcaggtaagtggccctgagacagtatgttgggaaatgctgacgtaaaggtatcagggccgggcgctgtggctcatgactataatcccagctgtttgagaggccaatgcaggaggatggttgagctcaggagttcgagatcagcctgggtaacatagcgagaccccacctctgcca

SEQ ID NO: 43475 - DNA, 336 bp, Homo Sapiens
tttgaaggtaaaaactgtgaaattgatgtgaaagactgcctcttcctttcctgccaggattatggtgactgtgaagatatggtcaacaatttcagacctgggttttctggatctctgtgtgaaattgaaattaatgaatgttcctctgaaccttgcaaaaataatggaacatgtgtggatctgacaaacagatttttttgtaattgtgaacctgagtaccatgggcccttctgtgaacttgatgtaaataaatgtaaaatctcaccttgtctagatgaagaaaattgtgtctacaggactgatggatacaactgcctctgtgcccctggttataca

SEQ ID NO: 43476 - DNA, 636 bp, Homo Sapiens
atggcggcctccgtgtgcagcgggttgctggggccacgggtgctgtcctggagccgagagctgccttgcgcttggcctgcacacctccccggtctgcgccaagaaccgggcggcccgagtacgcgtaagggggacaagccggtgacctacgaggaggcacacgcgccgcactacatcgcccaccgtaaaggctggctgtcgctgcacacaggtaacctggatggagaggaccatgccgcagagcgaacggtggaggatgttttccttcgcaagttcatgtggggtaccttcccaggctgcctggctgaccagctggttttaaagcgccggggtaaccagttggagatctgtgccgtggtcctgaggcagttgtctccacacaagtactacttcctcgtgggctacagtgaaactttgctgtcctacttttacaaatgtcctgtgcgactccacctccaaactgtgccctcaaaggttgtgtataagtacctctagaacaatccccttttttccatcaagctgtagcctgcagagaatggaaacgtgggaaaggaatggtatgtgggggaaatgcatcccctcagaggactgaggcatagtctctcatctgctattgaataaagaccttctatcttg

SEQ ID NO: 43477 - DNA, 570 bp, Homo Sapiens
atggctttgccttttgctttactgatggccctggtggtgctcagctgcaagtcaagctgctctctggactgtgatctgcctcagacccacagcctgggtcacaggaggaccatgatgctcctggcacaaatgaggagaatctctcttttctcctgtctgaaggacagacatgacttcagatttccccaggaggagtttgatggcaaccagttccagaaggctgaagccatctctgtcctccatgaggtgattcagcagaccttcaacctcttcagcacaaaggactcatctgttgcttgggatgagaggcttctagacaaactctatactgaactttaccagcagctgaatgacctggaagcctgtgtgatgcaggaggtgtgggtgggagggactcccctgatgaatgaggactccatcctggctgtgagaaaatacttccaaagaatcactctctacctgacagagaaaaagtacagcccttgtgcctgggaggttgtcagagcagaaatcatgagatccttctcttcatcaagaaacttgcaagaaaggttaaggaggaaggaataa

SEQ ID NO: 43478 - DNA, 2818 bp, Homo Sapiens
agcgacggcggtggcgtcccaagatggcgtcgtggctgccggagactctctttgaaactgtaggacaaggcccgccgcctagcaaagactattaccagttactggtcacccggtctcaggcaagtatctttagatggtggaagatctctctaaggagtgagtatcgatcaacaaaacctggagaagcaaaagaaacccatgaagacttcctagagaattcacatcttcaaggtcaaactgccttaatatttggtgcaagaatattagactatgtcatcaatttgtgcaaaggtaaatttgacttccttgaacggctctcagacgatttgctcctgactatcatttcttatctggatcttgaagatattgccaggctttgtcaaacatcacacagatttgcaaagctgtgcatgtctgataaactgtgggaacagatagtccagtcgacctgcgacaccatcactcctgacgtgagggccctggcggaggacacaggctggagacagctgttcttcaccaacaagctccagctccagcggcagctccgcaagaggaaacaaaaatatggaaacctgagagaaaagcaaccttaggcacacattttcctaccagcagggagctcaggcatggctgtgtttctcttcagtgtccaaatctcttctgtctccttttcttaagaactaagaggttttgttgatgcgtggagccatttgaaactcgtaggggatttgcacacaaatgcagcagagtctggctccccagtgccttgctagagtcaccgtcattctgaggtcaaatcatggcccgaggacaagggctgtaagacagggagccccataggccatcatcatccttatcccacacccattataaaagaggtttctattgtatataaacaaacaataaatgattattagcaggtttttattagacatctattttatctaggcattagaaagggtaatggggcttttgaattttttcctggcattgtgtcgtctgcgtccagccatgaagctggtggctgagtgtccccaccaggaactgtgaagggcacgtaccacgggaggcactcagggtgggtgcagctgccttcccaactttgttctgctaagtccatattcagggccctatccttgtgagcccaggatgccagggtccatccccgcatgtagacagcttccgacctggtgctggagcatgactggagaagtgcaggcatcctgcttgcggaccttgctcaaagtacaacttcccaggactacttcacattgttaaataaacctataaacatttcttttcttttctttttttttttttttttgtattttctttttagtagaggtggagtttcgccatgtaggccaggctggtcttgaactcctgacctcaagtgatctacctgctctggcttccaaagtgctgggattacaggcatgagccactatgtctggctaaaacctataaacatttcttagagaaatgctgttccccaaaggaatgtgaacagctaccacttttaacaaggatatttaagaaaacagactatgagttaactaagtaaaaatgtaaatatggtttgcatgctgttaacatggcagaggggtaaaaagaatacagtcctggggagaaaggtcacttcactgagaaggcttacttaaaaatgtttttctccctgcactttcatgattattaagtacccctagaaaatgaactcatagcagcaaataatctaatgactccttttaggttacagagcaaagtagctttctacttccacatcacattataatatagccttataatttcttctttcctgcaaccttcactttcctacctaggaaaactcacctccggtgccagagaaacttcccaggatgcactagggccctgtgaacaatacagaagttgtggactctggctctttgtcccacctaagtccttccagaagggctctacagcatggcttagtgacattaaaaaaaaaaactgaacccatgttaatatcaaacaagattttaatcttcattcacacacccttaaaacccagtcacggggctccccggtgccagtttgagaccgtcaacctagccctctctgcttctcattgctggaggtacacacagtcaaaagttttccgtgactgtgaaatccagtgcaatctgcttcccagcagatgaggagcctgacgtggttatgtctggatttagtccaagaacagagcaaagctttaattgtcaagagacccaggcctcattctccacttaggagagtttgctagggcaggtacaggtaaaggtaaccagcaggcagctgagagcaagaaggcacgtgctctgcagagctctagctgccttggctctccctgagctcccagacttcactcatggcctaattttcaatgacagaacgtaggttttatcgtgaggatgcagacacaaccacaattacgtatgtcaacataacttcataaatatgtaactgtaacttattggtaacatcagtgcaagatgattaaagcttcatgtgtagtattttatcaacaaacagattctgaaagcttatggacatgcgcaatagttgattcagcttcaatcaataagaacataaatatggcaatttgaaaacactatgtatatacctactcacatatatattatacttacgatatatacttatatgtagtatataataatattacatataaaaatgttataaaaataaatgctaaagtaaataaaaaaagagccattaatatgttaactattgttaaataatagctaaaataatacagattattaaattattttaatactta

SEQ ID NO: 43479 - DNA, 375 bp, Homo Sapiens
gacagtcgggatgtggtgtgtggcatctgcatggacaaagtgtgggacaagccagaggcccagcgggtcttcggcatcctgcccaactgcacccatgcccactgtctgggctgcctgcgcacctggcggaagaaccggcaggacttcccgctggatgtcatcaaggcgtgtccacagtgccgtgtccattccagctacatcatcccccacaagttctgggtgagcaagggggcccagaaggagcaactcatcaggaacttcaaggctcggaccagccagatccgatgccggttcttcgtgcgagggaatggccgctgccccttcaaatctgagtgtatctacctgcaccagctcccagctaaggctgggacctcc

SEQ ID NO: 43480 - DNA, 526 bp, Homo Sapiens
gattcaacaacccctgtggctaaccctctgcttgcatttactctcatcaaacgcctgcagtctgactggaggaatgtggtacatagtctggaggccagtgagaacatccgagctctgaaggatggctatgagaaggtggagcaagaccttccagcctttgaggaccttgagggagcagcaagggccctgatgcggctgcaggacgtgtacatgctcaatgtgaaaggcctggcccgaggtgtctttcagagagtcactggctctgccatcactgacctgtacagccccaaacggctcttttctctcacaggggatgactgcttccaagttggcaaggtggcctatgacatgggggattattaccatgccattccatggctggaggaggctgtcagtctcttccgaggatcttacggagagtggaagacagaggatgaggcaagtctagaagatgccttggatcacttggcctttgcttatttccgggtaagggaggaagttattttatcatttccatatatcacat

SEQ ID NO: 43481 - DNA, 336 bp, Homo Sapiens
agacccctcgtgaagcccaagatcgtcaaaaagagaaccaaggagttcatctggcaccagtcagaccaacatgtcaaaattaagtgtaactggaggaaacccagaggtattgacaatagggtttgcagaaggttcaaggaccagataatcttgatgcccaacactggtcatgggagcaacaaaacaaagcacatgctgcccagtggcttccggaagttcctggtccccagcgtcaaggagctggaagtgctgatgtgcaacaaatctccctgtgctgagatcgctcacagtgtttcctccaagaacaaaaccatcgtggaaagggccgcccagctg

SEQ ID NO: 43482 - DNA, 1438 bp, Homo Sapiens
gcaggcctccctgtgccagccggctgtcgacccaggttaggaagcccgaggtcggggcgttaccccaagggccctcccgcttcccctccgagggcagagaggcgtccgcgcccggacgcactgcgggaacacctggagcgccggcggagctcggctgtccccgcgggagggagcccgacgcgcatccttgggacccggacccggcgcccgcgcctcgggacggatttctgcctcggctgcaggcgcagcgcgcagacctgagcctgccccgcggaaccggggctcgagtcccggcccgagcgcggcgtcggggccagcggagaggggcggaagccgcaagggaccctcggcgcctcggcctggccgcgatgaagtccccgcccctcctcagcccgtgtctctcctggaagagaatggcgggcatctttttcctgccatttatctcatcaggttttgctcctcggtttaagcaggaagagaacttcatgcttggaagagcgcatccgtcccagcctaggtttaattggtctcatctgacccctctggagctgaagaatcgatctgtgggacttggaactgaaagcacaggtcggggtaagccccacttcacactggagggccacaagttcctgatcttcgggggctccatccactatttccgggtgcccagggagtactggagggaccgcctgctgaagctgaaggcctgtggcttcaatactgtcaccacctatgttccgtggaacctgcatgagccagaaagaggcaaatttgacttctctgggaacctggacctggaggccttcgtcctgatggccgcagagatcgggctgtgggtgattctgcgtccaggccgctacatctgcagtgagatggacctcgggggcttgcccagctggctcctgcaagacccccggttactgttgaggacaaccaacaagagcttcattgaagcagttgagaagtattttgaccacctgattcccagagtgattcctctccagtaccgccaggcaggccctgtcatcgcggtgcaagtggagaatgagtatggctcattcaataaggataaaacatacatgccgtatctccacaaggccctgctgagaagagggattgtggagcttctcttgacctctgatggtgagaaacatgtgctgagtggccacaccaaaggagtgttggccgccatcaatttgcaaaaacttcaccaggatactttcaatcagcttcataaagtccagggagccagtatagatgcaggactgctctcagatgcctcacaagcagcaacttcttcctccttatagttcttatctgtgattcttccataattttgtccttctaagcttctgatgcactgaattatgtaaagtgcattcccttcaccagcttgtgcaccctattctgtaactgataataaatggttggtattgca

SEQ ID NO: 43483 - DNA, 666 bp, Homo Sapiens
atggccagcaggcctctgcccccgggacgccaggaggaggagaatgccaaagactccgggcggaaaccctcaccggtgcggccccgaggctgcctgcccagcattgatgaggcccgaccggcaggtccaggtccagccccggcctcgcgccggggctccatgctgggcctggccgcgtccttctcccgccgcaactcgctggtcgggccaggcgcgggtcctgggggtcagcggccatccctgggcccggtgccccctctgggctcaagggtcagcttctcagggttgcccctggcgcccgcccgttgggtggcgccctcctaccgcacggagccagtgcccggggagcgctgggaggctgcgcgtgcacagcgtgccctggaggcggcgctggccgcagggctgcacgacgcgtgctactccagcgacgaggccgcgcggctggtgcgggagctctgcgagcaggtgcacgttcgcctgcgcgagctcagcccgccacgctacaagctggtatgcagtgtggtgctggggccgcgcgcgggccagggcgttcacgtggtcagccgtgcgctctgggacgtggcgcgcgatgggctggcctcggtctcctacaccaacacctcgctcttcgcggtggccacggtccacgggctctactgcgagtga

SEQ ID NO: 43484 - DNA, 1434 bp, Homo Sapiens
gggttaaggcacctgggccaccgcccctgccggcccctcctcccgcggccgggaagaggaaagtcgcggcgggggcgcggcccggtctccgtccccacccgcccgccgtcccgccggcccgagccgtggcgcccagagctgcgagccgctcgcccctccgccgctccggcccgggccgccatgtcgctgtggaagaaaaccgtctaccggagtctgtgcctggccctggccctgctcgtggccgtgacggtgttccaacgcagtctcacccctggtcagtttctgcaggagcctccgccacccaccctggagccacagaaggcccagaagccaaatggacagctggtgaaccccaacaacttctggaagaacccgaaagatgtggctgcgcccacgcccatggcctctcaggggccccaggcctgggacgtgaccaccactaactgctcagccaatatcaacttgacccaccagccctggttccaggtcctggagccgcagttccggcagtttctcttctaccgccactgccgctacttccccatgctgctgaaccacccggagaagtgcaggggcgatgtctacctgctggtggttgtcaagtcggtcatcacgcagcacgaccgccgcgaggccatccgccagacctggggccgcgagcggcagtccgcgggtgggggccgaggcgccgtgcgcaccctcttcctgctgggcacggcctccaagcaggaggagcgcacgcactaccagcagctgctggcctacgaagaccgcctctacggcgacatcctgcagtggggctttctcgacaccttcttcaacctgaccctcaaggagatccacttcctcaagtggctggacatctactgcccccacgtccccttcattttcaaaggcgacgatgacgtcttcgtcaaccccaccaacctgctagaatttctggctgaccggcagccacaggaaaacctgttcgtgggcgatgtcctgcagcacgctcggcccattcgcaggaaagacaacaaatactacatcccgggggccctgtacggcaaggccagctatccgccgtatgcaggcggcggtggcttcctcatggccggcagcctggcccggcgcctgcaccatgcctgcgacaccctggagctctacccgatcgacgacgtctttctgggcatgtgcctggaggtgctgggcgtgcagcccacggcccacgagggcttcaagactttcggcatctcccggaaccgcaacagccgcatgaacaaggagccgtgctttttccgcgccatgctcgtggtgcacaagctgctgccccctgagctgctcgccatgtgggggctggtgcacagcaatctcacctgctcccgcaagctccaggtgctctgaccccagccgggctactaggacaggccagggcacttgctcctgagcccc

SEQ ID NO: 43485 - DNA, 4183 bp, Homo Sapiens
atggctcccctggccttggtgggggtcacactcctcctggcggctcccccatgctccggggcagccaccccaaccccctccctgccgcctcccccggccaatgacagcgacaccagcacagggggctgccaggggtcctaccgctgccagccgggggtgctgctgcccgtgtgggagcccgacgacccgtcgctgggtgacaaggcggcacgggcagtggtgtactttgtggccatggtctacatgtttctgggagtgtccatcatcgccgaccgtttcatggcggccatcgaggtcatcacgtcaaaagagaaggagatcaccatcaccaaggccaacggtgagaccagcgtgggcaccgttcgcatctggaatgagacggtgtccaacctcacgctcatggccctgggctcctccgcacctgagatcctgctgtcagtcatcgaagtctgcggccacaacttccaggcgggtgagctgggcccaggcaccatcgtgggcagcgctgccttcaacatgtttgtggtcatcgccgtgtgcatctacgtcatcccagccggcgagagccgcaagatcaagcacctgagagtcttctttgtcactgcctcttggagcatcttcgcctatgtctggctttatctcatccttgctgttttttcccccggtgtggtccaggtgtgggaggcgctgctgaccctggtcttcttcccggtgtgcgtggtattcgcctggatggccgacaagcggctgctcttctacaagtacgtgtacaagcgctaccgcaccgacccacgcagcggcatcatcataggcgccgagggcgaccccccgaagagcatcgagctggacggcacgttcgtgggcgccgaggccccaggtgagctgggcggcctgggcccgggccccgccgaggcgcgcgagctggacgccagccgccgcgaggtcatccagatcctcaaggacctcaagcagaagcacccggacaaggatctggagcagctggtgggcatcgccaactactacgcgctgctgcaccagcagaagagccgcgccttctaccgcatccaggccacgcggctgatgaccggcgccgggaacgtgctgcgcagacacgcggcggacgcctcgcgcagggcggcgccggccgagggcgcgggcgaggacgaagacgacggcgccagccgcatcttcttcgagcctagcctctaccactgcctggagaactgcggctccgtgctgctgtccgtcacgtgccagggcggcgagggcaacagcaccttctacgtggactaccgcactgaggacggctctgccaaggcgggctccgactacgagtacagcgagggcacgctggtgttcaaaccaggcgagacgcagaaggagctgcgcatcggcatcatcgacgacgacatcttcgaggaggacgagcatttcttcgtgcggctgctgaacctgcgcgtgggcgacgcgcagggcatgttcgagccggacggcggcgggcggcccaaggggcggctggtggcgccgctgctggccaccgtcaccatcctggacgacgaccacgcaggcatcttctccttccaggaccgcctgctgcacgtgagcgagtgcatgggcaccgtggacgtgcgcgtcgtgcgcagctcgggcgcgcgcggcaccgtgcgccttccctaccgcacggtggacggcacggcgcgcggcggcggcgtgcactacgaggacgcgtgcggagagctggagtttggcgacgacgagaccatgaaaactcttcaggtgaagatagttgatgacgaggaatatgagaaaaaggataatttcttcattgagctgggccagccccagtggcttaagcgagggatttcagctctgctactcaatcaaggggatggggacaggaagctaacagccgaggaggaggaggctcggaggatagcagagatgggcaagccagttcttggggagaactgccggctggaggtcatcatcgaggagtcatatgattttaagaacacggtggataaactcatcaagaaaacgaacttggccttggtaattgggacccattcatggagggagcagtttttagaggcaattacggtgagcgcaggggacgaggaggaggaggaggacgggtcccgggaggagcggctgccgtcgtgctttgactacgtgatgcacttcctgacggtgttctggaaggtgctcttcgcctgtgtgccccccaccgagtactgccacggctgggcctgctttggtgtctccatcctggtcatcggcctgctcaccgccctcattggggacctcgcctcccacttcggctgcaccgttggcctcaaggactctgtcaatgctgttgtcttcgttgccctgggcacctccatccctgacacgttcgccagcaaggtggcggcgctgcaggaccagtgcgccgacgcgtccatcggcaacgtgaccggctccaacgcggtgaacgtgttccttggcctgggcgtcgcctggtctgtggccgccgtgtactgggcggtgcagggccgccccttcgaggtgcgcactggcacgctggccttctccgtcacgctcttcaccgtcttcgccttcgtgggcattgccgtgctgctgtaccggcgccggccgcacatcggcggcgagctgggcggcccgcgcggacccaagctcgccaccaccgcgctcttcctgggcctctggctcctgtacatcctcttcgccagcctggaggcgtactgccacatccggggcttctagggcctcgcgcagagactcgtccccaccgcccgcccggggctagggactcggctgcacctgctcttggaccctggtctccttttccccccagactcggcctcctctcctgggactcggcctcccttctccgccccctcccctggctttgattgccctgttctgtgtccccagtagctcagccttccctcttcctctcgggagcctccccggttcctcccctgcggtgaccccaactccagcccatcctgttggtgaccgtctatatccctggggaaatttccaccccagtcccctccccagggaaccacccccagtaaccatcctggggagtttaaggtctctctccttggtcacccagcctggctttgcccccaaagtctcccttcccctagtgaccccccccccacttcaccccatgtcccagagcctcagaacccaccctccctgggggaccctcgaaggaggctgtcagaggccgtctcagctcccagcccttccccccagccctcagggagctccgctcagccccggcggggaggagcgggtgggtgtgcgcgcaaggaggccgcacaccgttccttccaatccctccactcgggttcttgggaggacactcattctccaggctcggagacgaggggagaagtttggggtttcagtcccagggcttagccggaggaagcacattttgaacctgcaacttcagacattccagctcccccactcgccctccactacctctgagagcccagccacgccttggagggaggggcttgtgtgtgtatatagtgtgtttgggggaggggggacgcgggagggtgcatgtcttgggaaaagggggtgacagacaacttttgagagggcagcagactccctcagccatgagaaccagctttggggaggaggccgggaatcaaagcgagtccagttgatctcccctgacaatctggaaggttccttttgccctcagtgccagccaatccgggcaggaccctcgaagaggagaccgagggtcccagaggaccaatgctacaagccagcaaatgctgccacatctctgcctgatggggggtggggatgggtggggggatgggactgggccaagggatctgggtgggcatttttaactttggaggccttccatctgtcggtaggccatctgcattttcttactgttgatgtttcctgcccaaaggacacatttgggcagtgccacccactccttgggcccctaggatgacccaactacccccataactttctgcttcccacaggttttcagcattctatcgtcctgttgtgctcagccccaacatcccagacccgttacccactacccttctctcccccagctcatcatcagtcgctgtctcttttctgtgatttctgtaaaagttgccataaaactttgaaattc

SEQ ID NO: 43486 - DNA, 411 bp, Homo Sapiens
atggttattttctatttctctagtttgactagtttcattctttgcaggacattttcatttttagatgttcttagctattttgcctgtggtgatcagaaggcagatgaaccatggggttctatttctctgactctagatccttttaaaaagctggtgacctttttgtctttcttttcttgttttatctttttttttttttttttgaaaagtggaaaaatattctcagggtatattgaattgattgagcctcccttggatttctttgacttatttgacttactctatatcttgcttctttactcctctaatttaacattttcctctaaaccatcatcagaatgtttttgcactatcattattcatttttttcagttacagaatgtgggaaaaaggagagaagggggctgttga

SEQ ID NO: 43487 - DNA, 690 bp, Homo Sapiens
atgttttgttgcttaggatatgaatggctgagcggaggctgtaaaacctggcactctgcttgggttatcaatactctggctgaccatcatcattgtgggactggctttcgtggaagtccttggttacatttcattattgcgtttccgagaagttataaagttttcattatcctctggacagtttacctttggatgtctctcctgaagactatcttgtggtctcgaaatggacatgatggatccacggatgtacagcagagagcctggaggtccaaccgctgtagacagaaaggaaataaaattggcctgaaagacgtcattactctatggagacatgtggaaacaaaagttagagctaaaatccgtaagaggaaggtgacaacgaaaatcaaccatcatgacaaaatcaatggaaagaggaagaccgccaaaaaccagaaactaagcatgaaagaatgtgagcatgcagaaaaggagaggcaggtatcagaggcagaggaaaatgggaaattggatatgaaagaaatacacacctacaagaaaatgtttcaacgtgtgcaagagttgtggcggcgggcagaggactaccacaaacgcaaaatccccccttctgcaagaaagcctctttgcaactggtgcacttacaatttggtattacctgggagtgaaaagaaatattacagccatgcc

SEQ ID NO: 43488 - DNA, 243 bp, Homo Sapiens
tcagcagatgaggatgaaggccaattatcccgactaatcaggaaatctagagactccccctttgtccctataggtatagcaggctttgtgactgtggtgtcctgtggtctttacaagctaaagtacagaagagatcagaaaatgtcaattcatcttattcacatgagagttgctgcccaaggatttgttgttggagctgtgactctaggtgttctctattctatgtataaggattacattaga

SEQ ID NO: 43489 - DNA, 2199 bp, Homo Sapiens
cacagggtgcagctcaagtatgcagccaagcgcctgaggcaggaagaagaagaaacagagaatctcctccgcctcagcagggagatgctagagacaggcccggaggccgagcggctggagcagctggagtctggggaggaggagctggtcctcgccgaatacgagagtgatgaggagaaaaaggtggcgagcggagtggatgaggatgaggatgacctggaggaagaacacataactaagatttatcactgtagtcggacacactcccagctggcccagtttgtgcatgaggtgaagaagagcccctttggcaaggatgttcggctggtctccctcggctcccggcagaacctttgtgtaaatgaagacgtgagaagcctaggttctgtgcagcttatcaacgaccgctgcgtggacatgcagagaagcaggcacgagaagaagaaaggagctgaggaggagaagccaaagaggaggaggcaggagaagcaggcagcctgccccttctacaaccacgagcagatgggccttctccgggatgaggccctggcagaggtgaaggacatggagcagctgctggcccttgggaaggaggcccgggcctgtccctattacaggagccgccttgccatccctgcagccaagctggtggtgctgccctatcagatgctgctgcatgcggccactcggcaggccgccggcatccggctgcaggaccaggtggtgatcatcgacgaggcgcacaacctgatcgacaccatcacgggcatgcacagcgtggaggtcagcggctcccagctctgccaggcccattcccagctgctgcagtacatggagcgatacgggaagcgtttgaaggccaagaacctgatgtacctgaagcagatcctgtatttgctggagaaattcgtggctgtgctaggggggaacattaagcaaaatcccaatacacagagtctgtcacagacagggacggagctgaagaccatcaacgactttctcttccagagccagatcgacaacatcaacctgttcaaggtgcagcgatactgtgagaagagcatgatcagcagaaagctctttggcttcactgaacggtacggagcagtgttctcatcccgggagcagcccaaactggctgggtttcagcaattcctgcagagcctgcagcccaggacgactgaagctcttgcagcccctgcagacgagagtcaggccagcgtcccgcaaccagcttccccactaatgcacatcgaaggcttcctggcagctctcactacggccaaccaggacggcagggtcatcctgagccgccaaggcagcctcagtgagagcaccctgaagtttttgctcctgaatccagctgtgcactttgcccaagtggtgaaggaatgccgggcagtggtcattgcgggggggaccatgcagccggtgtctgacttccggcagcagctgctggcctgtgctggggtggaagctgagcgcgtggtggagttttcctgtggtcacgtgatccctccagacaacatcccccttgtcatctgcagcgggatctccaaccagccgctggaattcaccttccagaaaagagacctgcctcagatgatggacgaggtgggtcgcatcctctgtaacctgtgcggtgtggtttctggaggggtggtctgtttcttctcctcctacgagtacctgcgccaggtccatgcccactgggagaagggtggcctgctgggccgtctggctgccaggaagaagatattccaggaacctaagagcgcacaccaggtggagcaggtgctgctggcgtattccaggtgcatccaggcctgtggccaggagagaggccaggtgacagaggccctgctcctctctgtggttggaggaaagatgagtgaagggatcaacttctctgacaacctaggccggtgtgtggtgatggtgggcatgcccttccccaacatcaggtctgcagagctgcaggagaagatggcctacttggatcaaaccctccccagagcccccggccaggcacccccagggaaggctctggtggagaacctgtgcatgaaggccgtcaaccagtccataggcagggccatcaggcaccagaaggattttgccagcatagtgctcctggaccagcgatacgcccggccccctgtcctggccaagctgccggcctggatccgagccagtgtg

SEQ ID NO: 43490 - DNA, 1461 bp, Homo Sapiens
gtggtggagacggtgttcttcctgacgtcgcgcaccagggcgctgctgcggcgcttccctcgcatgctgctggtggaccggctgccggggctgcagggcgcgctggatctgctggccgtgctgtgcgtggacggctcgggccgtgcgcgccaggctgcctgctgcgtggcgcgcccgggcacaccgagcctgctgcgcttcgcgctcgcgtcgctgctgcagagcgcgccagacgtcaagggccgcgtgcgctgcctcaccgccgggcccgaggtggcggcgcagttgcctgcagtgcgccagctgctgccctgcgcgcgcgtgcagatctgccgcgcgcagggcctggagacgctcttcagcaaggcgcaggagctgggcggcgccggccgcgaggacccgggcctgtggtcgcgcctgtgccgcctggctggcgcgtcgtcgcccgcagcctacgacgaggcgctggccgagctccacgcccacggcccagccgccttcgtggactacttcgagcgcaactgggagccccgccgcgacatgtgggtccgcttccgcgccttcgaggcggccagagacctggacgcgtgtgccctggtgcgaggccaccgccggcgactgctgcgtcgtctcagcccctcgcgtggcgtggcgcagtgccttcgcgacctggtggccatgcagtgggccgacgcggccggggaggcggtgcccgaggggcccgatggcggggggccttggctggaggatgagccagggaggggagcccagggggagaacgagagggtgaggggcctggagacaggcgactggggaggggctccgaaagaaggaagtgagaaggggagggcactgcagatcagagattggagagggggtcggttggagaatcagaagccgaggggactggaagggggtgtcttgagagggtcgaagttagagaaagggcacctgagagggccagagattagagactggagggggccccagttggaggatcgcaggagtaccaccgacctgagggggacccagtttgactatgagagggtcaggagtcttgaaggaagcccctggaggggggcgcagctgcacgatgaaagggcagggggactgagaactgcagaatggaaggggccacagtcagaagtagagaaggggagggggctggaggtcagaaacttgagggggatccccttggagaagtccctggagttggcccctgagaacggagaccaaaggggaccccagtgggaagatgagaggaggagagggccagagattgcagaggagaggggagcgagggtgggggtcaaaagaagaaggggcctggaggatatagttctggtccagctgggagacacgagggtcacaggcatggagaatggagatggagggggagcccggtccgtgggccccaagagccgagccggacgagggatggagtggggagacgcaggaggg

SEQ ID NO: 43491 - DNA, 748 bp, Homo Sapiens
aggatgatcaagctgttctcgctgaagcagcagaagaaggaggagtagtcggcgggaggcaccaagcgcagcagcaagaaggcgtcggcggcgcagctgcggatccagaaggacataaacgagctgaacctgcccaagacgtgtgatatcagcttctcagatccagacgacctcctcaacttcaagttggtcatctgtcctgatgagggcttctacaagagtgggaagtttgtgttcagttttaaggtgggccagggttacccgcatgatccccccaaggtgaagtgtgagacaatggtctatcaccccaacattgaaatcgagggcaacgtctgcctcaacatcctcagagagaactggaagccagtccttacgataaactccataatttatggcctgcagtatctctacttggagcccaaccccgaggacccactgaacaagaaggccgcagaggtcctgcagaacaaccggcagctgttggagcagaacgtgcagccatccatgcgggatggctacataggctccacctacttcgagcgctgcctgaaatagggttggcgcatacccacccccgccacggccgcaagccctggcatcccctgcaaatatttattgggggccatcggtaggggtttggggggcggccggtgggggaatcccctgccttggccttgcctccccttcctgccacgtgcccctagttattttttattaacaccatgctattaaaggggaatgttactgc

SEQ ID NO: 43492 - DNA, 297 bp, Homo Sapiens
atggctctgcgcgaccctgtggccgtgggccccaaggtgaccaaggacgtgagcaagcccaggcacagctgccgccccggacgtctgaccaaacacaccaggtttgtgcgggacatgatccgggaggtgtgtagcttcgtctcgtacaagcggctcgccatggagttgctgaaggtccccaaggacaaacggtccctcaagttcatcaagaaaaggatggggacgcacatccgcaccaagaggaagcggaaggagctgagcaaggtgctggccaccatgaggaaagctgctgcctag

SEQ ID NO: 43493 - DNA, 1206 bp, Homo Sapiens
caggtaatggaggcatgtagacaaatacaactggagagagatacatttgctgagattcttaaaggagagagagccacatggcagcagaggatgaatcagatgtcggagcagatgcacacactgagggaggagaaggagtgtattatgaatcggttacaggagctggagacaagcttggtggaattgagaaaacagatgaccctggcacccccagcaaggccctccgaggtggagcagcagctacaagaggaggctgagcacctgagggaggagctggagagtctggcaggacagctccaagcccaggtacaggacaatgagggcttgagttgcctgaaccgggagcaggaggagaggctgctggagctggagcgggcagctgagctctggcggaagcaagtggaggcacagagacaaatccttgcagatggggagcaggctcggctccgtgggcagctgaaggagcaaaggctgcgctgccggtgcctggctcacctgctggcctgggcccagaagcagccagaggcagcagccccagccccagggactgggatggattctgtctgctttatgcagctgatgcaggaaaaggtggacctgaaagagcgggtggaggagctggaacatcgctgcatccagctctctggagagacagacaccatcggagtctacactgccctctctcagccagggggcagcgctgaaggagcagcaccgagaggaggaggagcacatccacaggctagcccaggacaaggaggagatgaaggcagggcgtggagcttctctgcccggcggggggctgcggggagggtgcagcttcaggcatggcagctgaacaccctctcctccaggactgagggccatggcagattcctggcagctgcccagagccctgctcatgagccagctccaggggccccagccccccagagctcagggctgccgacaagcagggtgatgagtagtgccctcaggcggtttgggcaggcaagagcaagggaggctggcagtgtgctcagagccctcctccctctctccaaagatctttgccaggtgaccctcaccagcagcgtggagcctgcacaaggagaggccggggagggttctcccctcgacaaccccagtgcacagcagatcatgcagctgtttggtgagatgcagaaccctcaggagcgcccaggcttgggcagcatcccctgcatt

SEQ ID NO: 43494 - DNA, 222 bp, Homo Sapiens
atgaggattgctgtcctcctcttcgccattttcttctttatgagccaagttctaccagccaggggcaaattcaaggagatctgtgaacgtccaaatggctcctgtcgggacttttgccttgaaacagaaatccatgttgggagatgtttaaatagccaaccctgctgcctgcctctggggcatcaaccaagaattgagagcactacacccaaaaaggactga

SEQ ID NO: 43495 - DNA, 357 bp, Homo Sapiens
gagtgcatggatggcgccctgcttgtcaacaccatgttcttcaagccacactggaatgagaaattccaccacaagatggtggaaaaccgtggcttcatggtgactcggttctataccgtgggtgtcatggtgatgcaccagacaggcctctacaactactatgacaatgagaaggaaaagctgcaaatcgtggagatgcccctggcccacaagctctccagcctcatcatcctcatgccccaccacgtggagcccctcgagcttaaaaagctggtaaccaaagagcagctgaagatctggatggggaagaagcagaagcctgtcgccatctccttgcccaagcgggtggtggaagtt

SEQ ID NO: 43496 - DNA, 3019 bp, Homo Sapiens
ccgcgcgcctcgggccggattctcggcaccctgcgggggtggaggagggcgggcggggccttcaggcccaggagcgccagagacctatggggttcgcctgaagcccccggaatgtgtgagacacttcttactagtaaatgggcttcagtatcccccatccctgcactcctgcaggaaggtgagaatcgggacagtcgcaggctgggagacgctctgcttttcctgcgtcctgctgggagctgcgcgctccaggtatcctggcctgccgccctagccggcccaaggtgaagtggaggttctggatccgaacgaccctttaggaccccttgatgggcaggacggcccgattccaactctgaaaggttactttctgaattttctggagccagtaaacaatatcaccattgtccaaggccagacggcaattctgcactgcaaggtggcaggaaacccaccccctaacgtgcggtggctaaagaatgatgccccggtggtgcaggagccgcggcggatcatcatccggaagacagaatatggttcacgactgcgaatccaggacctggacacgacagacactggctactaccagtgcgtggccaccaacgggatgaagaccattaccgccactggcgtcctgtttgtgcggctgggtccaacgcacagcccaaatcataactttcaggatgattaccacgaggatgggttctgccagccttaccggggaattgcctgtgcacgcttcattggcaaccggaccatttatgtggactcgcttcagatgcagggggagattgaaaaccgaatcacagcggccttcaccatgatcggcacgtctacgcacctgtcggaccagtgctcacagttcgccatcccatccttctgccacttcgtgtttcctctgtgcgacgcgcgctcccggacacccaagccgcgtgagctgtgccgcgacgagtgcgaggtgctggagagcgacctgtgccgccaggagtacaccatcgcccgctccaacccgctcatcctcatgcggcttcagctgcccaagtgtgaggcgctgcccatgcctgagagccccgacgctgccaactgcatgcgcattggcatcccagccgagaggctgggccgctaccatcagtgctataacggctcaggcatggattacagaggaacggcaagcaccaccaagtcaggccaccagtgccagccgtgggccctgcagcacccccacagccaccacctgtccagcacagacttccctgagcttggaggggggcacgcctactgccggaaccccggaggccagatggagggcccctggtgctttacgcagaataaaaacgtacgcatggaactgtgtgacgtaccctcgtgtagtccccgagacagcagcaagatggggattctgtacatcttggtccccagcatcgcaattccactggtcatcgcttgccttttcttcttggtttgcatgtgccggaataagcagaaggcatctgcgtccacaccgcagcggcgacagctgatggcctcgcccagccaagacatggaaatgcccctcattaaccagcacaaacaggccaaactcaaagagatcagcctgtctgcggtgaggttcatggaggagctgggagaggaccggtttgggaaagtctacaaaggtcacctgttcggccctgccccgggggagcagacccaggctgtggccatcaaaacgctgaaggacaaagcggaggggcccctgcgggaggagttccggcatgaggctatgctgcgagcacggctgcaacaccccaacgtcgtctgcctgctgggcgtggtgaccaaggaccagcccctgagcatgatcttcagctactgttcgcacggcgacctccacgaattcctggtcatgcgctcgccgcactcggacgtgggcagcaccgatgatgaccgcacggtgaagtccgccctggagccccccgacttcgtgcaccttgtggcacagatcgcggcggggatggagtacctatccagccaccacgtggttcacaaggacctggccacccgcaatgtgctagtgtacgacaagctgaacgtgaagatctcagacttgggcctcttccgagaggtgtatgccgccgattactacaagctgctggggaactcgctgctgcctatccgctggatggccccagaggccatcatgtacggcaagttctccatcgactcagacatctggtcctacggtgtggtcctgtgggaggtcttcagctacggcctgcagccctactgcgggtactccaaccaggatgtggtggagatgatccggaaccggcaggtgctgccttgccccgatgactgtcccgcctgggtgtatgccctcatgatcgagtgctggaacgagttccccagccggcggccccgcttcaaggacatccacagccggctccgagcctggggcaacctttccaactacaacagctcggcgcagacctcgggggccagcaacaccacgcagaccagctccctgagcaccagcccagtgagcaatgtgagcaacgcccgctacgtggggcccaagcagaaggccccgcccttcccacagccccagttcatccccatgaagggccagatcagacccatggtgcccccgccgcagctctacgtccccgtcaacggctaccagccggtgccggcctatggggcctacctgcccaacttctacccggtgcagatcccaatgcagatggccccgcagcaggtgcctcctcagatggtccccaagcccagctcacaccacagtggcagtggctccaccagcacaggctacgtcaccacggccccctccaacacatccatggcagacagggcagccctgctctcagagggcgctgatgacacacagaacgccccagaagatggggcccagagcaccgtgcaggaagcagaggaggaggaggaaggctctgtcccagagactgagctgctgggggactgtgacactctgcaggtggacgaggcccaagtccagctggaagcttga

SEQ ID NO: 43497 - DNA, 1758 bp, Homo Sapiens
atggtttgcggtgacactcagaggggatctttgggagatttatagagccggttcttagcgctttgtgggttcagaggctggctgcagtgtttatgaagaggggcagtgggctggggacactgctggggttatggctgtagtgaggtccatgtgtacttgttccttggcatgtgtctgactctgtgttgctgctgcagtacagtgggcaggggcacggttgcttggactgggctgcccgatgtctggcatggctggtggtcctgttgtcctttatttgatcgatagcagggaactgaccgccgaggttggcacaggttggcagggggatgaggatgcattgtggttgtctcctcctcctctccttcttcctcttccccttcctcctctcctttctgttcttgttctccctcatcttcctcttccttcttctccctcttcttcctcttcactctgctctcttctcttcttttcccctttcctctcctctccctttcctcaggtcacagcggagtgaatcagctcggtggtgtctttgtcaacgggcggccactgccggactccacccggcagaagattgtagagctagctcacagcggggcccggccgtgcgacatttcccgaattctgcaggtgtccaacggatgtgtgagtaaaattctgggcaggtattacgagactggctccatcagacccagggcaatcggtggtagtaaaccgagagtagcgactccagaagttgtaagcaaaatagcccagtataagcgggagtgcccgtccatctttgcttgggaaatccgagacagattactgtccgagggggtctgtaccaacgataacataccaagcgtgtcatcaataaacagagttcttcgcaacctggctagcgaaaagcaacagatgggcgcagacggcatgtatgataaactaaggatgttgaacgggcagaccggaagctggggcacccgccctggttggtatccggggacttcggtgccagggcaacctacgcaagatggctgccagcaacaggaaggagggggagagaataccaactccatcagttccaacggagaagattcagatgaggctcaaatgcgacttcagctgaagcggaagctgcaaagaaatagaacatcctttacccaagagcaaattgaggccctggagaaagagtttgagagaacccattatccagatgtgtttgcccgagaaagactagcagccaaaatagatctacctgaagcaagaatacaggtatggttttctaatcgaagggccaaatggagaagagaagaaaaactgaggaatcagagaagacaggccagcaacacacctagtcatattcctatcagcagtagtttcagcaccagtgtctaccaaccaattccacaacccaccacaccggtttcctccttcacatctggctccatgttgggccgaacagacacagccctcacaaacacctacagcgctctgccgcctatgcccagcttcaccatggcaaataacctgcctatgcaacccccagtccccagccagacctcctcatactcctgcatgctgcccaccagcccttcggtgaatgggcggagttatgatacctacacccccccacatatgcagacacacatgaacagtcagccaatgggcacctcgggcaccacttcaacaggactcatttcccctggtgtgtcagttccagttcaagttcccggaagtgaacctgatatgtctcaatactggccaagattacagtaa

SEQ ID NO: 43498 - DNA, 3048 bp, Homo Sapiens
acatgtggcttgccaattatcccagcactatttgttgtatagggtgtacttttcttactttgtttttgtttactttgtcaaagatcagttggctgttaagcatttggctttatttctaggttctctactctgtcccattggtcatgtgcctatttttataccagcactatgctgttttggtgactatagctttgtaatatagtttgaagttgggtaatgtgatgcctctagattggttctttttgcttagttttgctttggctttgcagactcttttttagttccaaatgaattttggcattttttttttctagttctataaagaatgatgatggtacattgataggaactcattgaatttggagactgcttttggcagtatggtcattttcacaatattgagtctacccatccatgagcatggaatgtgtttccatttgtttgtgtcatctatgatttctttcaacattgttttgtagttttccttgtaggggtctttcacctccttggttaggtatattcctaagtattttatttttacagctattataaaagggtttgatttgattctcagcctggtagatgttggtgtatagcactgctactgatatgtgtacatagattttgtatcctgataaatagatttattgtgtatttctaaatagcaataagatttgaaatattcccaacacaaagaaatgatcaacgtttgaggtgattaatatcctaaagaccctgacttgatcattacacattacatgcatgtaccagaatctcacatggaccccataaatgtgtacaattattctctatcaaaaacatttttttttaagaaacatgcaggaatacactctacctcttccttgctgtgtctggatattgtcacatgaggacttgacatgcggattgtggcagcctctgtgaccaagagcggaagacaacagcagcatagaaacctcaaatgaaaaatctaacatctcaagctactaatttagccaaccttggcatcagctatctctggtcttagtatatgaggcgataagcccccactgttcaagttgggtgtctatcaattgctgcagaatagaagttaatgaggcttcctcctcctggatcccctactagaccctgacatgcccattcagtcacaggcagaaagggaagcacagggtaaggagacctggctgactgtgccagacgcagatcttacctgtcctgcttagaacactcaaagctcaattggttaaacaaaaaaaggaaaaatacaataaggagtatagcactccccagatgcaacttaatctaacactctatactttagattttctagacatacatagaaatcagaccactacttctgcagaacattttactagtaaaaataataggccacgtgagggaaaactgatttggtggaaagacaacaaaaacaaaatatgggaaataggtaaggtgataatatgggggagaggttgtgcttgtgtttcacccggagaaaatcagcttcctgtttggatacccactagacatttgaagttctacaatgaacctatcaagatgcaaatgaaagtgcctctgcagagacagaaaacccgcagtcgagcatcatcgactcgcagggtgaacaaaatggtgatatcagaagaacagatgaagttacaatccaccaaggaaacggcacatgttgggagccagggagaggaagagaaagaaaaagagacagagatcagagagagacacagaaagtgagactggggagagagacagtgtaaaagagagagagagagagagaccgtaaaagaagggagacaaagagataaaaggtgcgagtgagcaggtgaggagaaagactgaaaactatgagaaacagcaactaagacacaaaggaggtgggagactgccttggtgccgcagcacccacaccgtcctcttgccccgtcacttgggttcaaaccaccggaaattccactattgcaaattttttattaatccttgtatgtctgtcctttctatttttagtctacaggtgtatccagcagctccagagagacagcgaccagcgagaaggggccatgatgatggaggtggttttgtcaaaacgaaaatggggatatgtagggaaaagaaagagagatcagactgttactgtgtctacatagaaagggaagacataagagactccattttgaaaaagacctgtactttaaacaattgctttgctgagatgttgttaatctgtagctttgccccagccactttgccccaaccactttgacccaatctggagctcataaaaacatgtgttgtatgaaatcaaggtttaaggcatgtagggctgtgcaggacgtgccttgttaaccaaatgtttgcaagcagtatacttggtaaaagtcatcaccattctctcatctcaataaaccaggggcacaatgcactgtggaaagccgcagggacctctgcccttgaaagctgggtattgtccaaagttcctccccatgtgatagtctgaaatatggcctcgtgggatgagaaagacctgacggtcccccagcgcgacacccataaaagatctgtgctgaggtggattagtcaaagaggaaagacttgcagttgagatagaggaaggccactgtctcctgactgcccctgggaactgaatgtctcggtataaaacacgattgtacatttgttcagttctgagatgggagaaaaaccgccctatggtgggaggcgagacatgtttacagcaatgctgccttgttatcctttactccactgagatgtctgggtggagagaaacataaatctggcttacatgcacgtccagtcatagtaccttcccttgaacttcattatgacatggattctattgctcacgtttgttgctgaccttctccttattatcaccctgccctcctactacattcctttttgctgaaataatgaagataataatcaataaaaactgagggaattcagagacctgtgccagtgcaggtccttagcatgctaagcgccggtcccctgggcccgctgttgtttctctat

SEQ ID NO: 43499 - DNA, 378 bp, Homo Sapiens
gagtggtttcttgagatggaatctactcctggtgaagatgctgtgaacattgttgaaatggcaacaaaggatttagaatattatataaacaggatttgtttatataaagcagcagaagggtttgagagaattgacttcaattttaaaagaagttctactatgggcaaaatgctatcaaacagcatagtatgctacagaggagtttttcatgaaaagcagagtcaatctgtggagcaagcatttttgttttcttatttaaagaagtttgcacagccaccccaatattcagcaacaatcaccctgattagttggcagccatcaacgtcaaggcaagacccaccactagcaaaagatcatctctctgaaggttcagatgat

SEQ ID NO: 43500 - DNA, 2103 bp, Homo Sapiens
ctcaccgacaacttcatcgccgccgtgcgccgccgagacttcgccaacatgaccagcctggtgcacctcactctctcccggaacaccatcggccaggtggcagctggcgccttcgccgacctgcgtgccctccgggccctgcacctggacagcaaccgcctggcggaggtgcgcggcgaccagctccgcggcctgggcaacctccgccacctgatccttggaaacaaccagatccgccgggtggagtcggcggcctttgacgccttcctgtccaccgtggaggacctggatctgtcctacaacaacctggaggccctgccgtgggaggcggtgggccagatggtgaacctaaacaccctcacgctggaccacaacctcatcgaccacatcgcggaggggaccttcgtgcagcttcacaagctggtccgtctggacatgacctccaaccgcctgcataaactcccgcccgacgggctcttcctgaggtcgcagggcaccgggcccaagccgcccaccccgctgaccgtcagcttcggcggcaaccccctgcactgcaactgcgagctgctctggctgcggcggctgacccgcgaggacgacttagagacctgcgccacgcccgaacacctcaccgaccgctacttctggtccatccccgaggaggagttcctgtgtgagcccccgctgatcacacggcaggcggggggccgggccctggtggtggaaggccaggcggtgagcctgcgctgccgagcggtgggtgaccccgagccggtggtgcactgggtggcacctgatgggcggctgctggggaactccagccggacccgggtccggggggacgggacgctggatgtgaccatcaccaccttgagggacagtggcaccttcacttgtatcgcctccaatgctgctggggaagcgacggcgcccgtggaggtgtgcgtggtacctctgcctctgatggcacccccgccggctgccccgccgcctctcaccgagcccggctcctctgacatcgccacgccgggcagaccaggtgccaacgattctgcggctgagcgtcggctcgtggcagccgagctcacctcgaactccgtgctcatccgctggccagcccagaggcctgtgcccggaatacgcatgtaccaggttcagtacaacagttccgttgatgactccctcgtctacaggatgatcccgtccaccagtcagaccttcctggtgaatgacctggcggcgggccgtgcctacgacttgtgcgtgctggcggtctacgacgacggggccacagcgctgccggcaacgcgagtggtgggctgtgtacagttcaccaccgctggggatccggcgccctgccgcccgctgagggcccatttcttgggcggcaccatgatcatcgccatcgggggcgtcatcgtcgcctcggtcctcgtcttcatcgttctgctcatgatccgctataaggtgtatggcgacggggacagccgccgcgtcaagggctccaggtcgctcccgcgggtcagccacgtgtgctcgcagaccaacggcgcaggcacaggcgcggcacaggccccggccctgccggcccaggaccactacgaggcgctgcgcgaggtggagtcccaggctgcccccgccgtcgccgtcgaggccaaggccatggaggccgagacggcatccgcggagccggaggtggtccttggacgttctctgggcggctcggccacctcgctgtgcctgctgccatccgaggaaacttccggggaggagtctcgggccgcggtgggccctcgaaggagccgatccggcgccctggagccaccaacctcggcgccccctactctagctctagttcctgggggagccgcggcccggccgaggccgcagcagcgctattcgttcgacggggactacggggcactattccagagccacagttacccgcgccgcgcccggcggacaaagcgccaccggtccacgccgcacctggacggggctggagggggcgcggccggggaggatggagacctggggctgggctccgccagggcgtgcctggctttcaccagcaccgagtggatgctggagagtaccgtgtga

SEQ ID NO: 43501 - DNA, 1749 bp, Homo Sapiens
taatctgggaaaccggctccattctgggtctgagttaggagcttggggctgtagtggggagctaggagtcccattggaaggggcctgcagcgacaggctgtggatgcgcacaggctggcccatgcggcccgtgcagcaggcgccacataagccagatgtcagcggccgagagcccgtgcactacaaccagctcacggtaaaagcaggggtcgaaggtgctcaaatgcggcgcggctgaaggctgggggatgccaaaggtgcggaaggcagggtgaggctcgggcgtgagccgcaggcgctgcagacacatgcccagaaagacgtcgtcgatggggaagagctcgacctgcgcacaggcgccagccaggcggtgcagcgtggccccggaaagcacaaagccaccgccgcccgcgtaggccggataggcgggcaggccgtacacggcctcggggatgtagtacttgctagcccgcgtgcggatgggccgcgcatgcacaattacgtcaccagcaagcaggtcttgcgccgggtcccgcggcgccaggaactccaggagatttcccacgttcacgaacacatctgcgtcgcccttaaaaacgaagcgcacgtcggggcagaaagctgaggcccaggctagaaagtggatctccttgagcgttaggttaaaaaaggtgtcgtcgaaggcccagagcaggatgtccgcatacgcaaggctctcggcccgcagcagggcgcgccagtgggttcgcgcgccctccccaacttcgtcggccccgcccgagcctgcgcccctgggcacgcccagcaagaacacgcggcgcaccagcgccccctgcacgcgaccctccgcgccccacgtctggcgcacggcttggcgccgctcgaagtcctctgccaccgacttgacagcaataagcaggtccgggcggccaccgggtgcgccgtcgccgcggcacttgtgcggctggttaatgagcagtggaaaccgccgctggtccttggcgcgcaaatagcgggcgaagtcaaagggtcccgtaggcgtgggcggcgccggtgtgtccccttcgtaggccggcggggctgcacccgcgtcgggtaactggaacgcgcggggtccgggggtgggcctcggtgccgccctccctcgccctcgcggcgcgctcgccgtcggggccgcgccgtcgcgctgcgcatagagtaagaggcccagggaggcgccaaggagcagcgtgagcaatgcgtccctgcgtaggcgcagcctcctcctcatctccgcgcggcctgcgccctccctcccctgtaagggtcgcagtcggcagcagggggcagcgagccccgccctccccagctgagggggcgggaggccacgccccggggggggctccagcgaccgacggttgagccccttgcgttgttctcctcctcccggccgtgtcgcaccgccgggaccggcagcctgaagggacaagaagttcacccatgtagccaactcccccgcggcctcagctccggcccaggactgcgacccagggccgggcagggagactgggagcctcggcccctcccccgcccgcctccctcgcgctgaggccgaatcccttccaccctgccatcccctcaatgtcgggccctggggtcccgacactcacgctcggccctcggaagtggcgcagccccggacgccctggcctccggggctcagcgcagggtccgaggggccgccatggaccgggcccgagccaaatgcag

SEQ ID NO: 43502 - DNA, 621 bp, Homo Sapiens
atgtggtgctgggaaaactggctagccatatgcagaaaactgaaactgcaccccttccttaaaccacatagaaaaattaactcaagatggattaaagacttaaatgtaaaacccaaaaccataaaaaccccagaagagaatctaggcaataccactcaggacataggcatgggcaaagattttatgatgaaatcgtcaaaaataattgcaacaaaaaccaaaattgacaaatgggatctaattaaactaaagagcttctgcacagcaaaagaaactatcatcagagtgaacaggcaacctatagaatggaggaaaatttttgcaatctacccacctgacaaaggtctaatttccagaatttataaggaacttaaacaaatttacaagaaaaagaccaaacaactccatcaaaaagtgggtaaaggacatgaacagacacttctcaaaagaggagatttatgtgaccaacaaacatataaaaaaagctcatcactgatcattagacaaatgcaaatcaaaaccacaatgagattccacagcataccagtcagaatggtgattattaaaaagtcaagaaacagtagatgctggcaaggctgtggagaaataggaacactttaa

SEQ ID NO: 43503 - DNA, 1302 bp, Homo Sapiens
atgccgatgtcttctcttccagcagctattttgtctcacatgacagctattaacaatgtgcctcctcctccacttcacagtataccaaacttgaaaaagtctaagcacattaattatggccagttgaatgcattatgccacattagaggacaacacagccggagtatgagcaatatcttatcagctcacgatacatttatgaagcaatatcctaaagtattcctgcaccaaaaacccagacttcctaaacttttcaaacaggaggaacaaagggaactcaatgaaggcaaagaggaaagtcaacatcaacaacctgatgattctaacaatatagctgtccatgttcagagagcacatggtggccatattttatatagaccaaaaagagccacagagaaatttgaagaattcctagctatcttaaagaaattgcccattcacaggacgccatatgaacacaaaactgtgtggaagttcctgaaaacaattccagatttaacctttcagctaaatgataagcatctgaaaacacttagtaagactgtcttttccgaaacctggttgaaaggcagcacagtggttgcaaatgatggattttatgtaatactgaaaggcctagctcgacctcaaacaaacgtgtataaaaatctgattgaaggaagtgattcaccagactcgttcatatctcagagtttccacagcttcatttggagtgaagaattcaaaaactctacacttgctgagatgtacctaccttcatatgactcaatgcttagcaaatggagtacctttgggactctggaagttatgcctcagaatgaatcggaaacacagatgttctcggtggtgacagaagacgattgtgaaattcttaaaatcccagcaaagggatatgcaaagataaaggaggaaaaaataaaacttgaaaatatgcaaaagttgaaattaatccgtatgtgtccttattatgaggaatggcctactttatccatatatgagctaattgcactccttaaatggaaaaaatttcctccaggtcatgtgatagtggaaagtggaaatataatttcttttgtgggttatattaactctggatgctgtaacatttatagaagtattataggatttgtgaaactacgatcaaataaagtgaaaagatctcaaaaacttgtttatatggggaaacttaaggagaaggagtcctttggtgagattagcgtccttcttcaagttcctttcacgtgcacaatcattaccaaaaaagaagttgagatggcaatcattgaagataaggacctattt

SEQ ID NO: 43504 - DNA, 804 bp, Homo Sapiens
aaagacaacagcctccagtcggagactgtgcagtacaagcgaggagtgtgtcagcagttctgcctgccctcccacaccgtggatccctccgagtgggccgaagaggagcttggctttgatttagaccgagaagtttaccctctagtggtacatgccgtggtggatgaaggagacgagtattttggccattgccatgtactgctgggtacttttgagaagcacacagatggaactttctgtgtcaagcccctcaaacagaaacaagtagtagacggggtcagctacctccttcaggagatctatggaattgaaaacaagtacaacacacaagattctaaggtggctgaagacgaagtgagtgataacagtgccgagtgtgtggtgtgtctctcggatgtccgggacaccttgattctgccctgtcgccacctctgcctctgtaacacctgtgcagacacgctgcgctaccaggccaacaactgccccatctgccgactgcccttccgggcactgcttcagatccgagccatgaggaaaaaattgggccccttgtccccaaccagctttaaccccatcatctcatcccagacatctgactctgaagagcatccatcctcagagaatattccaccaggctatgaagtagtatctcttctggaggccctcaacgggcccctcacccccccgtctctactaaaaatacaaaaaattagctgggcatggttgcaggcgcctgtagtcccagctacttgggaggctgaggcaggagaatggcctgaacccgggaggcggagcttgcagtga

SEQ ID NO: 43505 - DNA, 129 bp, Homo Sapiens
ttcaacatcatggatatagtggcccaaatgagagaacaacgttctggcatggttcaaacgaaggagcagtatcacttttgttacgatattgtgcttgaagttcttcggaaacttctgactttggattaa

SEQ ID NO: 43506 - DNA, 879 bp, Homo Sapiens
ggagggatcaaccatttcttgtgtggttgagagaaccagaggagctctggattatgtgcatgttttttacaccatttcacagattgaaactgatggcattaattaccttgttgatgactttgctaatgccagtggaactattacattccttccttggcagagatcagagcttttgattgaagtgtcgcttcccattattatttacaactgtaactgatacattagaatttgcttcaaacatgtctgctgtaaaacctttatcaggttctgaatatatatgttcttgatgatgatattcctgaacttaatgagtatttccgtgtgacattggtttctgcaattcctggagatgggaagctaggctcaactcctaccagtggtgcaagcatagatcctgaaaaggaaacgactgatatcaccatcaaagctagtgatcatccatatggcttgctgcagttctccacagggctgcctcctcagcctaaggacgcaatgaccctgcctgcaagcagcgttccacatatcactgtggaggaggaagatggagaaatcaggttattggtcatccgtgcacagggacttctgggaagggtgactgcggaatttagaacagtgtccttgacagcattcagtcctgaggattaccagaatgttgctggcacattagaatttcaaccaggagaaagatataaatacattttcataaacatcactgataattctattcctgaactggaaaaatcttttaaagttgagttgttaaacttggaaggaggagctctgctagatctatctacagatataacgctgtaaaatctggtccttttggatgatctataatgagttgattattaataaaagaagtcaacaataccttaa

SEQ ID NO: 43507 - DNA, 1083 bp, Homo Sapiens
atgtttgccaaaggcaaaggctccttggtgccctcggacgggcaggctggggaaaagttagctttatacgtctacgaatatttactgcaggtaggagcacagaaatctgcacagaccttcttatcggagattcgctgggaaaaaaacatcgcgttgggagaaccgcctgggtttttgcactcgtggtggtgtgtattttgggacctttactgtgcagctcctaaaaggagagatacttgtgaacattcaagtgaagcaaaagcctttcatgattatagtggagcagctgccccaagccccgtgcttggcaacattcccccagatgggatgcctggaggccgagtccccccaggtttctttcagggtcctccgggtcagccttttttgtcaccgcgatacgcaggcggccccaggccccccagaatgggaaaccagcctccgggaggagttcctgggacacagccattgctgcccaattccatggatcccgcacaacaaggccacccccacatgggaggatcaatgcagagaatgaaccctccccgaggcatggggcccatgggtcccaacccacagaattatggcagcggcatgagaccaccacgcaattccctcggcccccccatgcccgggattaacatgggcccgggagccggcagaccctggcccaatcctaacagtgctaactcaattccatactcctcatcacctggtacctatgtgggactccctggtggtggcggccctccaggaacacccactatgcccagtccctcagattcaacaaattccagcgacatctacacaacgattaatccggtgccgcctggaggcagccggtccaacttcccgatgggtcccggctcggacggtcggatgggcagcatgggcggcatggagccacaccacatgaacggattgttagggtcaggcgacatagatcttccaaaaacttatcctaacaacgtaaatagtattagcaatcctccaggcacccctccagatgagggcgagctaggagggaacttcctccactcctttcagaatgacaatgattctccaagcacgacgatgagtgtgtga

SEQ ID NO: 43508 - DNA, 417 bp, Homo Sapiens
atggcgttctggggttggcgcgccgcggcagccctccggctgtggggccgggtagttgaacgggtcgaggccgggggaggcgtggggccgtttcaggcctgcggctgtcggctggtgcttggcggcagggacgatgctgacgtgatggcagacagggttccccgctgcccggtctgcaccggcgttgtgaagcccgacattgtgttctttggggagccgctgccccagaggttcttgctgcatgtggttgatttccccatggcagatctgctgctcatccttgggacctccctggaggtttgtcagcaggcctgtgcagggaggaggctggagggcaggggaagggaggggggaagggaggggtacaggagtcatctcatgggcccttccagggctggtgccactttgggaaggtga

SEQ ID NO: 43509 - DNA, 2476 bp, Homo Sapiens
aggagccggtcagcgtggactgcggccacagcttctgcctcaggtgcatctccgagttctgcgagaagtcggacggcgcgcagggcggcgtctacgcctgtccgcagtgccggggccccttccggccctcgggctttcgccccaaccggcagctggcgggcctggtggagagcgtgcggcggctggggttgggcgcggggcccggggcgcggcgatgcgcgcggcacggcgaggacctgagccgcttctgcgaggaggacgaggcggcgctgtgctgggtgtgcgacgccggccccgagcacaggacgcaccgcacggcgccgctgcaggaggccgccggcagctaccaggtaaagctccagatggctctggaacttatgaggaaagagttggaggacgccttgactcaggaggccaacgtggggaaaaagactgtcatttggaaggagaaagtggaaatgcagaggcagcgcttcagattggagtttgagaagcatcgtggctttctggcccaggaggagcaacggcagctgaggcggctggaggcggaggagcgagcgacgctgcagagactgcgggagagcaagagccggctggtccagcagagcaaggccctgaaggagctggcggatgagctgcaggagaggtgccagcgcccggccctgggtctgctggagggtgtgagaggagtcctgagcagaagtaaggctgtcacaaggctggaagcagagaacatccccatggaactgaagacagcatgctgcatccctgggaggagggagctcttaaggaagttccaagtggatgtaaagctggatcccgccacggcgcacccgagtctgctcttgaccgccgacctgcgcagtgtgcaggatggagaaccatggagggatgtccccaacaaccctgagcgatttgacacatggccctgcatcctgggtttgcagagcttctcatcagggaggcattactgggaggttctggtgggagaaggagcagagtggggtttaggggtctgtcaagacacactgccaagaaagggggaaaccacgccatctcctgagaatggggtctgggccctgtggctgctgaaagggaatgagtacatggtccttgcctccccatcagtgcctcttctccaactggaaagtcctcgctgcattgggattttcttggactatgaagccggtgaaatttcattctacaatgtcacagatggatcttatatctacacattcaaccaactcttctctggtcttcttcggccttactttttcatctgtgatgcaactcctcttatcttgccacccacaacaatagcagggtcaggaaattgggcatccagggatcatttagatcctgcttctgatgtaagagatgatcatctctaaaattctgttcccaagatgcagtcctagcgtagcgaacgttcctggagtggggtgaaggatatcaatatactaagttttaacagataccccatttaggtcagcacttgattcgttgttgctgtgaaatatgtccatgggacaaaagagggaatatgaaatatttgcatatgggaagattatagagcataataattttgtaaatggagcaatctcaacctctatttctagatcacattttcttgatgtcttccttcaaattaatgaccttggattacataaggatttctatgcattcattataatttgttattcctttcaatatccttgtatttcaaatcttccatataagaattagacatggcaattcttaaattgattcagaatggtctgatactattccagtatcacctccttaattctgtttctcctcgttttcctgattttccttctcattctctccttccccgctctgtctctctctccctgtcactctctctctcttgttccttattttttgtttcttacctcttactgtttaacctgttgcttccttctggattaatacatttagagccattcctttatatggtcacatttcctatgactttactcaattacttttaaaatcctttctattctgagactaatttttaagaattacaaagctcattcttctgaatctaatatcactaactcctagactttttccgttttctttggatacactttaagtaggaatttatcagaattttcattcaactcgttctttaatgcagatatttactagttataagaccttaaggctgggtgcagtggctcacgcctgtaatcccagcactttgggaggctgaggcgggtggatcacaagctcaggagttcaagaccagcctggccaacatggtgaaaccctgtctctactaaaaaaaaaaaaaaaatagaaaaattagctgggcatggtggcaggagcctgtaatcccagctattctggaggtggagacaggagaattgcttgaaccctggaggcggaggttgcagtgagccaatatctcaccactgtactccagcccagtgcgagactccatctc

SEQ ID NO: 43510 - DNA, 2573 bp, Homo Sapiens
cgtctgccgcctcaccgcttggccccgcccctcgccacctgcccggccaggcgcgccggggccgtcccagtacgtcgccctgtttacgctggctctttctcccagtcttttttcgttttaagatgtgagaagagatgggattcttcaatcaaggccacaagcgggaaatcagtctgcaggaccgatgccagcaggctcacgcaccgagaacggctactccgcccagctgagaagcgcggggccctgacgcgggcgcgctcctcgcattcttccgttgggctgggaggctggagggcaggcggcggcggccgcgcatgcgccgggagcggccggagctgcgggacgcggagggccgactgcgcctgcgcgctggttgcctggttacggcgtggccgcgggcaccgagcggcgccggaagttggtcgatggctgccgccagtccctggccagcgtcctggggtttccccgacgcatcctctactgtcccttcgctctgcacagaggcccgggcagggaggggcggcccggccaccgcgcggagccgggtgtccgccgactcgcaagggggacgcgcgggctcctcgtccccaagctccgccctgcgcctttgctgcgccgggccctcccaggcccaccctggccccagccctgctgtcctcccggggaggtgcggcctactcggttcgttcccccggccgccagccccacaggggcgctggggtcccagccttggctgagtgcacgtcggtggcgagtgggcccgggcgctcgggcggccagagcgacccagcggaggggtgaggcgggtaggcgctcctgtgcctgccacggccaggccaggcagcatccacgccctcccgcggaagatcgcagggaacaggtgggcactatcctctgtgccctcatttttcggaggagccgagggaggctgagcggttgaggaagcggccagccatgccgggcccactcacctgcacacctgcctggcaagggcagggaagagccgcggccttcctctgctgctccttccagagggcaggcgccgtggtgggggtgcccgcccgatggcatcgcgggaggctgagctcccagcagcggctgaggtcctccctgggtgggagccacccttgtccccagctgggccggcggctggtgagggagggggtgatatccgtgccacgccagcagggccgcaggcggtgcagggagagcttcagtccggctgacgtggcaccagggccaatctgctcagctaacatttgcctttcaggagtcagattcctgacctgtttgaacagagttagggagcacgtggtagggcccagccccagccccgctgcccccatctgcttcttcccagtggtcgaggcgctctgcaccctccgcggaaggaggtgtcattgtttgccctttccaaagagggggatgcagaggtggatgctgcctctcaggcgtggggctcgccttttgccgctcgcgagttcaaagaacccaagagccaggagcccagggctcgaccctctagggtcctccgaaaccctgtggtcccaccggggtgggcactaagctatgggagagaccatagctgcagaaaccaaccctgccctaggcataaaatgcaaggtctctggacctcagggcagggatgttagacagcggcttctgttggctcctaggggtgtgaatcaccacatcacctgcagggggcgcggctgtctttcttccccctcttctccctaatcctgagtgcacggagacagctctcagcagtttgtagcctgatgtggagtggagggttcctgcaccctacacccgagcccatccagcctctgggccatagacccttccgttgaaggcccagcctgcccctgagacgctgtgtgccctttttcaacttccttagtctctgagcatcaggtcttcatctctaagatagagcaagatgagcacctaaacgtttcagggctgaaatggggttgccaggacaacaagcatggcaggggcgaatggggacatcaggtgactgactgcgagccagcagaggcctccacccagtgctgggaggtgtcccgccggtggtggccatcactattcctggtggggctttgctgcttttgcctgcagcatccgctggtttctccattctccaagtctctgcccctgctcacacctggaggctggacacaagtgtcaccacttccctgaacccccctaggtgggctggaatcagcatctggtgcaaagctctgtgaccactgctgtaccacattatgcagagcacacaggacaggctggtgcacctccaggctgtgccaggaaacccgctgcctttgcgtcaccacagccttggtcacagcgtgaccttggtgcctccgacgggtcagctcctcccattagccatgctgtccagcacgggggccgctggtgcttgctgtgagactgagctgggctctgagtgtaaactacatggtaggttgtgaaggatgcaaatatcgaatcaatcattttttattgcatattaaaatgacaatatcttggatgtatcagattaaacaaaatactatttaatttta

SEQ ID NO: 43511 - DNA, 1242 bp, Homo Sapiens
caggggtcactgtcattcggggacgtggctgtgggcttcacccggaaagagtggcagcagctggacctggagcagaggaccctgtaccaggatgtgatgctggagaactacagccacctgctctctgtggggtgtcaagtcagcaaaccagctgtgatctccagtttggagcaggggaaggagccatggatggaggaggaagagataaggacgtggagcttcccaggtgagcaggtggcctgcagggggccgggggatgaggctcctggaaaagaagtttggcaagttgctacccagccagatagccaacagcaacacgaagaccaacatttgagccatacgtttctagacaagaaagactggaccggaaatgagcttcatgaatgtaacgaacttggaaaaaaactccatcagaacccaaacctccttccatcaaaacagcaggtccgcacacgtgacttgtgcagaaagagtttgatgtgtaacctggacttcactcctaacgcctacctggcgaggaggagatttcagtgcgacggccacggaaacttcttctctgttcgaaacttgaaactccacggagcgaatccacgcggaggtcaccagtgtggaagtgctttaagctgtgacgagggagttcctgcagctcagggagccagtagtgagaaaccccacgaatgcacgaagtgtgggaaagccttgtgctgcagatcggacctcagggtacatcacggggtccacgcgggggagaagtcctctgcgtgcagtgaacgggggagtggtttcagggagaagctttgccctgacaaacagggaactcacacaaaggagaaacccgctagagacagcagaagtggtaaaacgatcttccggaagacacgcctgtgtgtcccgggcacagttcacgccggagcgaagccttacaagtgttgggagtgtgagaaaacctcccacaagtcgcgcctcatcgagcaccttcgctcccacacgggggagaagccctgcggctgcagggaatgcggaaaggcctttttccagaagtcacacctcatcctgcgtcagaggactcacacgggggagaagccctgcgactgcgcggagtgcgggaaagctgctcaggactcctgcctcctgacccacaggcggactgcggggaagaaaccgtacgagtgctccgactgcgggaagacctcccggaaggcgaacctcatccgccaccacgggatccacacgagggagaag

SEQ ID NO: 43512 - DNA, 1685 bp, Homo Sapiens
atggcaggcgcgcactaccctctgcactgcctgcactcggcggcggcggcggcagcggccggctcgcaccaccaccaccaccaccagcaccaccaccacggctcgccctacgcgtcgggcggagggaactcctacaaccaccgctcgctcgccgcctacccctacatgagccactcgcagcacagcccttacctccagtcctaccacaacagcagcgcagccgcccagacgcgaggggacgacacagatcaacaaaaaactacagtgattgaaaacggggaaatcaggttcaatggaaaagggaaaaagattcggaagcctcggaccatttattccagcctgcagctccaggctttaaaccatcgctttcagcagacacagtatctggcccttccagagagagccgaactggcagcttccttaggactgacacaaacacaggtgaagatatggtttcagaacaaacgctctaagtttaagaaactgctgaagcagggcagtaatcctcatgagagcgaccccctccagggctcggcggccctgtcgccacgctcgccagcgctgcctccagtctgggacgtttctgcctcggccaagggtgtcagtatgccccccaacagctacatgcctggctattctcactggtactcctctccacaccaggacacgatgcagagaccacagatgatgtgagttgcccaagggaacaccctagggaaacgtctgaacaaggaaaagaggatccgggacctgcttgtatctgcgaaaaggagccaaaggagcaggcttaggagagctcataagtgtggcaagaagccgactaggctcattctctctccctctctctctctctccctctcctttctttttacttcttcctttcctccattccttctttctttccttttcctttctacctttcttttctttttgcctttcaccttttttctcatttaccttctctcttgagcaacgtcagtaattgatcttgcatctcagagagagagaaagagcatgtgtgagagagaaactggtttctatgccagcactcctgaaaccccttactgtaaggatattttctcttaccccttgggatccaggctctgagtctcttctctttgggagtatccatcaaaatgactttttttaaaaacagattttcccccaaccagaagaatctgcacaaacttggcagcgtttttacttgtttaatgagtttaagacattacatggtgaaagagaagcattttggactcctgcatttttatttaccattcccagactgacgagaaaaagaaaattcctcacataacagcccttctctaaagaaaaaggaaaaagtggctgtaagattagaacattgctacaaagggaatgctgcatgttttatcaaaatgcaatgaccaggaatgatggttgattaaaaaaaaacaaaacaaaaaccactctttccccaccccacccccccaaaccctgaactggaatcaggaaagacggaggaaacaatcaaaatcaccattctattgctttgacacctttactaggtgaattggtggcattcacaaagctaatagggacgtttatatcaagaaacatttctgtatatattgttgaattttagttgtacatatactttgtatgtttttgtcttctttcatatatggagtaaaagccacaaaacgctg

SEQ ID NO: 43513 - DNA, 972 bp, Homo Sapiens
ttgaagtccggagtcaatggatttgttggaaccgggagcctagtcaccagggctgtttttaactctagtaaagtagatattgttgccatcaatgaccccttcattgacctcaactacatggtctacatgttccagtatgattccacccatggcaaattccatggcaccatcaaggctgagaacgggaagcttgtcatcaatggaaatcccatcaccattttcgaggtgcgagacccctccaaaatcaaatggggcaatgctggtgctgagtccatcatggagtcgaccggcatcttcaccaccaggaagaaggctggggctcgcttgcagggaggagccaaaagggttatcatctctgccccctcttctgacgctcccatgttcgtgatgggcatgaaccacgagaagtatgacaacagcttcaagatcatcagcaatgcctcctgcaccaccaactgcttagtgcccgccaaggtcacccatgacaactttggtatcgtggaaggactcatgaccacagtccacgccattactgccacccagaagactgtggatggccgggaaactgtacatggccgtcggactctccagaatatcatccgtgcctctactggcactgccaaggctgtaggcaaggtcatccttgagctgaatgggaagctcataggcatggccttccatatccccactgccaacgtgttggtcatggacctgacctgccatctgggaaaagccaaatatgatgatgtcaagaaaatgatgaagcaggcattggaggaccccctcaagggcatcctgggccacagtgagcaccaggtcgtctcctctgacttcgacagcgacacccactcttccaccttcaatgctggggctggcattgccctcaacaaccactttgtgaagctcatttcctggtatgacgatgaatttggctacagcaacagtatggtggacctcatggcccacatggcc

SEQ ID NO: 43514 - DNA, 363 bp, Homo Sapiens
tggcagatgatttgggagcaaaaatccacagtgatagccatgatgactcaagaagtagaaggagaaaaaatcaaatgccagcgctattggcccaacatcctaggcaaaacaacaatggtcagcaacagacttcgactggctcttgtgagaatgcagcagctgaagggctttgtggtgagggcaatgacccttgaagatattcagaccagagaggtgcgccatatttctcatctgaatttcactgcctggccagaccatgatacaccttctcaaccagatgatctgcttacttttatctcctacatgagacacatccacagatcaggcccaatcattacgcactgcagtgctggcattggacgt

SEQ ID NO: 43515 - DNA, 519 bp, Homo Sapiens
atgctttttgaggaagactctgtgcacctgaaactccaggtttgtctaccattgtggacttcttgggagtggagtgaaggtgccaaaagccaagaagacaccgaggcaatctttaagaaagctctcttagctgtcacaggtgccaactcagtaaccctgaaggataagtacctggattgggcttatcaacatggtggctacaaaaaagccagagctgtgtataaaagtttacagaacagccatccattttcagttgactttttcaggaaaatgattcagtttgaacagcaagaatcctgcaagatggtgaacagagaatattatgagagggctttgagagagtttggatctgtagattctgatctttgggtggattgtatcaaggaaccattgaaccacccccttggtagacctgaaaactgcagacagatctactggcgagcaatgaaaatgttgcagggagagtcagcagaggcatctgtagctaaacatgctatgtatcagactggccgtttgtga

SEQ ID NO: 43516 - DNA, 2091 bp, Homo Sapiens
atgactggagtctttgacagtctagtggctgatatgcactcgacccagatcgccgcctccagcacgtaccaccagcaccagcagcccccgagcggcggcggcgccggcccgggtggcaacagcagcagcagcagcagcctccacaagccccaggagtcgcccacccttccggtgtccaccgccaccgacagcagctactacaccaaccagcagcacccggcgggcggcggcggcggcgggggctcgccctacgcgcacatgggttcctaccagtaccaagccagcggcctcaacaacgtcccttactccgccaagagcagctatgacctgggctacaccgccgcctacacctcctacgctccctatggaaccagttcgtccccagccaacaacgagcctgagaaggaggaccttgagcctgaaattcggatagtgaacgggaagccaaagaaagtccggaaaccccgcaccatctactccagtttccagctggcggctcttcagcggcgtttccaaaagactcaatacttggccttgccggagcgagccgagctggcggcctctctgggcctcacccagactcaggtcaaaatctggttccagaaccgccggtccaagttcaagaagatgtggaaaagtggtgagatcccctcggagcagcaccctggggccagcgcttctccaccttgtgcttcgccgccagtctcagcgccggcctcctgggactttggtgtgccgcagcggatggcgggcggcggtggtccgggcagtggcggcagcggcgccggcagctcgggctccagcccgagcagcgcggcctcggcttttctgggcaactacccctggtaccaccagacctcgggatccgcctcacacctgcaggccacggcgccgctgctgcaccccactcagaccccgcagccgcatcaccaccaccaccatcacggcggcgggggcgccccggtgagcgcggggacgattttctaaccccagggagaactcgccagagactgagagcagagaccacttatcctcattgcttaccccgagccggggttccctcctcccggcccgctgccgccacccacctctcctgcaggctgcgacctgcagtggcccgtctcaggccctgctcactcccggggccaccaaacgggcccctctctcgggggaaccggacagcagcttggcaaaggcctccctaaaaggccgcatttctgacctgagccccgggtctcggctgtttcgagccccgcctcggacttgccttccctcccctccgggtgagcctgtctggcgccttcctcgccccgggctgagagctgggtcccgggagatggaagcctcccaggcgcgcgaggcttcccgggcgctctgaggcttctttctcctcgcccgctcccctgggctcagctcggacgctgcagttattgacctcccggtcccgcctgcccgccctcccccacgtggccccttgacccgggcggccccgccgcttctttccttcctgcagttcccagccctcggagcccccatcccttatcttacccccaccgcgctcccccaggagcgctccctcagctctctcctcatccatcaccagtggagtttttttatttgttatttttttaaaagtttaggtgcctttgcggatgacctcattttgacgttgaaaaaatgattttttaatatgtgaacactgcaaaaatgtgtttaaattatcttttttaaaacctattcaggattattagcctggacttggacacagagtttgtaaataaaggtgtctgtgcagattttcccactgatttatttgtataaaaatactcatcttttcagacttttttgtaaacccccagttgtgaaaactgcagtttagcagtgacctcagcaacccctcctttttattttttcctttaaaaacatttcagttaaattaagctactgatttggatttgttttatcgtatcctaaagtctttgttgttgaaatgaaaggtattttggggttatttattatgaaaacaacatgctcttaatgttgattttacaatatgaagagattatttaaataaattattgttttcattgg

SEQ ID NO: 43517 - DNA, 1395 bp, Homo Sapiens
atggagaatcttccctttcctttaaaattacttagtgcctcatcgctaaacgcccccagctccacaccatgggtgttggatatcttcctcaccttggtgtttgccctggggttcttcttcctattactcccctacttatcttacttccattgtgatgacccaccctcaccatcgcctgggaagagaaaggtaaggaaccctcaggtgtgggatggtggaggggctgtggcccgagcacccactctgccctccggccccaccggctcctggctgcagctcgtgcctcctgtctcctgcagcctcctggggccacaccttgacaaaggtgactttggtcagctctccggtccagaccccccaggtgaggtgggcgaaagagcacctgatggagcctcccagtcctctcatgagcctatggaagatgctgctcccattctctccccgttagcttccccggatcctcaagccaagcatcctcaggatctggcctccaccccatcaccaggcccaatgaccacctcagtctcctccctaagtgcctcccagccaccagaaccttcccttcccctagaacacccctcacccgagccacctgcacttttccctcacccaccacacacccctgatcctctggcctgctctccgcctcctccaaaaggcttcactgctcctcccctgcgggactccacactgataactccatctcactgtgactcagtggcacttccactgggcaccgtccctcaaagcttgtctccacatgaggatttggtggcttctgtcccagccatctcaggccttggtggctcaaacagtcatgtttctgcctcctcccggtggcaggagactgccagaacctcgtgcgcctttaactcatcagtccagcaagatcctctttcccgccacccaccagagacctgtcagatggaagctggtagcctgtttttgctcagctctgatggccagaatgtcgtggggatacaagtcacagaaacagccaaggtcaacatttgggaagaaaaagaaaatgttggatcatttacaaatcaaatgaccccagaaaagcacttaaattctttggggaatttggctaaatcattggatgctgagcaggacaccacaaacccaaaacccttctggaacatgggagagaactcgaaacagctgcccggacctcagaagtgctcagatcctaggctcttgcaggaaagtttttggaagaattatagccagcttttctggggcctcccctctctgcacagcgagtccctggtggctaacgcctgggtaactgacaggtcttatactttacagtctcctcctttcttgttcaatgaaatgtccaatgtctgcccaattcaaagggagactacaatgtccccactgcttttccag

SEQ ID NO: 43518 - DNA, 2025 bp, Homo Sapiens
cagcagaaccctgtgaaccccaggcaatgacagcaggatcctgaagcccatgcaggctctgaaccacgcggccatccagaaggggctgcaggcacctgccactaccgcagaggactgaggggccttggcccagcagggaccccagggccttgggggactgtgtgagctggaaacgtggctggccagatgggcagcaccatggagccccctgggggtgcgtacctgcacctgggcgccgtgacatcccctgtgtgcacagcccgcgtgctgcagctggcctttggctgcactaccttcagcctggtggcccaccggggtggctttgcgggcgtccagggcaccttctgcatggacgcctggggcttctgcttcgccgtctctgcgctggtggtggcctgtgagttcacacggctccacggctgcctgcggctctcctggggcaacttcaccgccgccttcgccatgctggccaccctgctatgcgcgacggctgcggtcctgtatccgctgtactttgcccggcgggagtgttcccccgagcccgccggctgtgctgccagggacttccgcctggcagccagtgtcttcgccgggctcctcttcctggcctacgctgtggaggtggccctgacgcgggcccggcccggccaggtgagcagctatatggccacggtgtcggggctcctcaagatcgtccaggccttcgtggcctgcatcatcttcggggcgctggtccatgacagccgctacgggcgctacgtggccacccagtggtgcgtggccgtctacagcctgtgcttcctggccacagtggccgtggtggccctgagtgtgatgggccacacagggggcctgggctgcccctttgaccggctggtggtggtgtacaccttcctggctgtgctcctgtacctcagcgccgccgtgatctggccagtcttctgtttcgatcccaagtacggtgagcccaaacggccccccaactgtgctcggggcagctgtccctgggaccagctggtggtggccatcttcacctacgtcaacctgctcctgtacgtcgttgacctcgcctactcccagaggattcgcttcgtgcccagcctgtagcccacagtggcagcccacccacctctgctctctggccaccagctccaggctctgcgagggaaactcaggtgaaccaaagtgtcaagtagcgagcaggagggaagccgcgggctcaggggagatgaagtacaacgggagaggtcactccccgacttccagactgggctcagagggacaagggcaggacagtagggcagaggccctgagcagacgcaggggagagcctcacctaggccaatccccaactcactctctctcaccatttcccagcgctcctggggctcagtgctggtcactggaacatcataagggaaaactttaaagcagctgctgttgtgacccattttgcagctggggacatggaggctagaagcatttgcgaggcacccagtacctccattagtgtctggagaccacagtcaggctgggtaaggcaagctgaaagaggaatgacttccagaggagacgaacccaggagagtagctgggccaggcaaggggagggaggggcgtggggagccggaaccactcctggttcagagaggcagctcccagaaccctgggaagagagccctgcctggggagtgtgccagctcacagagaaggagccagaaatctggaccagcctctcccacccacgtccgggaagcctctgggctggtagccacagtgtttggaagcaggcttcctccggagtctccgcaggctggaggtggcgcgggtggcctggaagagcctgcagagcccggcggcaccgagtgcacagtggacggggaggacctggttccgccatagccacggagccccacctggacactcaccattggctgtgacgaagcagcttcagcagtgcccggcgggcatctgtgcactgtgggcatctgtggcactgggagggagcccggctgagggcggccgc

SEQ ID NO: 43519 - DNA, 570 bp, Homo Sapiens
atggggaatggactatcagaccagacttctatcctgtccagtctgccttcatttcaatccttccacattgttatgctgggtttggactgtgctggaaagacaactgtcttatacaggctgcagttcaatgaatttgtaaataccgtacctaccaaagcatttaacactgagaaaattaaggtaaacttgagaaattctaaaacagtcacttttcacttcggggatgtaggtggtcaggagaaattaatgccactatggaagtcatataccagatgcacagatggcattttatttcttatggactctgttgatatcgaaaggatggaagaagccaaaactgaacttcacaaaataactaggttatcagaaaatcaaggagtccctgtacttacagttgctaataaacaagacttggagaactcattatctctttcaggaattgagaaattgttagcaacaggtgaactgagctcatcaactccttggcatttgcagcctacctgcgcaatcataggagatggcctaaaggaaggacttgagaaactgcatgatatgatcattaaagaaaag

SEQ ID NO: 43520 - DNA, 909 bp, Homo Sapiens
atgacgaacttgaatgcatcacaggccaaccaccgtaacttcattctgacaggtatcccaggaacgccagacaagaacccatggttggcctttcccctgggatttctctacacactcacactcctgggaaatggtaccatcctagctgtcatcaaggtggagccaagtctccatgagcccacgtattacttcctttctatcttggctctcactgacgttagtctctccatgtccaccttgccctccatgctcagcatctactggtttaatgcccctcagattgtttttgatgcatgcatcatgcagatgttcttcatccatgtatttggaatagtagaatcaggagtcctagtgtccatggcctttgacagatttgtggccatccgaaacccattacactatgtttccatcctcactcacgatgttattcgaaagactggaatagctgtcctcacccgggcagtctgtgtggtattccctgtgcccttccttataaagtgcctacccttctgccattccaatgtcttgtctcattcatactgtcttcaccaaaacatgatgcggctagcttgtgccagcacccgcatcaacagcctctacggcctcatcgtcgtcatcttcacactggggctcgatgttctcctcactctactgtcttatgtactcaccctgaagactgtgctgggcattgtctccagaggtgaaaggctgaaaaccctcagcacatgcctctctcacatgtctaccgtgctcctcttctatgttccttttatgggtgctgcctccatgatccacagattttgggagcatttatcaccagtagtgcacatggtcatggctgatatatacctactgctcccgcctgtgctaaaccccattgtctacagtgtgaagaccaagcaaatttga

SEQ ID NO: 43521 - DNA, 672 bp, Homo Sapiens
atggcggctggtgatggggacgtgaagctaggcaccctggggagtggcagcgagagcagcaacgacggcggcagcgagagtccaggcgacgcgggagcggcagcggaagggggaggctgggcggcggcggcgttggcgcttctgacggggggcggggaaatgctgctgaacgtggcgctggtggctctggtgctgctgggggcctaccggctgtgggtgcgctgggggcggcggggtctgggggccggggccggggcgggcgaggagagccccgccacctctctgcctcgcatgaagaagcgggacttcagcttggagcagctgcgccagtacgacggctcccgcaacccgcgcatcctgctcgcggtcaatgggaaagtcttcgacgtgaccaaaggcagcaagttctacggcccggcgggtccatatggaatatttgctggtagggatgcctccagaggactggccacattttgcctagataaagatgcacttagagatgaatatgatgatctctcagatttgaatgcagtacaaatggagagtgttcgagaatgggaaatgcagtttaaagaaaaatatgattatgtaggcagactcctaaaaccaggagaagaaccatcagaatatacagatgaagaagataccaaggatcacaataaacaggattga

SEQ ID NO: 43522 - DNA, 942 bp, Homo Sapiens
atgaattgggaaaatgagagctccccaaaagagtttatactacttggcttctcagatagggcttggctacaaatgcccctttttgtggtcctgttaatatcatacacaatcaccatatttggcaatgtgtccatcatgatggtgtgcattctggatcccaaacttcatactcccatgtatttctttctcactaatctctccatcttagatctctgctataccacaactacagtccctcatatgttggtaaatattggttgcaacaaaaagaccatcagctatgctggctgtgtggcccacctcatcatcttcctggccctaggtgctacagagtgtctccttctggctgttatgtcctttgacagatatgtggctgtttgcagacccctccactatgtagtcatcatgaattattggttctgcctaaggatggcagccttctcatggctcattggtttcggcaactcagtgctgcagtcttccttgactcttaacatgccacgctgtggtcaccaggaagtggaccactttttctgtgaggtgcctgcacttctcaagttgtcatgtgctgacacaaagcctattgaggctgagctcttcttctttagtgtactaattcttctaattccagtgacattgatcctcatctcctatggcttcatagctcaagcagtattaaaaatcaggtcagcagaaggacggcaaaaagcatttgggacatgtgggtcccacatgattgtggtgtccctcttttatggaacagccatttatatgtatcttcaaccaccttcatccacctctaaggactggggaaagatggtttccctcttctatggaatcatcacatccatgttgaactccctcatctacagccttagaaataaagatatgaaggaggccttcaagaggctgatgccaagaatctttttctgtaagaaataa

SEQ ID NO: 43523 - DNA, 3879 bp, Homo Sapiens
agtctgcgggcctccggggcagcggcgaggccggagcgtcgcggcggagaggacgagaccgggacaagaccagggcaggagggagccggccagccgcgagaaccccgcacgcccggcaagatgctgtcctggcggctgcagacgggccccgagaaggccgagctccaggagctcaacgcccggctctatgactacgtgtgtcgggtgcgggagctggagcgcgaaaacctactcctggaggaggagctgcgcggccggcgcgggcgagagggcctgtgggccgaggggcaggcccgctgcgccgaggaggcgcgcagcttgcggcagcagctggacgagctgagctgggccactgcgctggcggagggcgagcgggacgctctgcggcgcgagctgcgggagctgcagcgcctggatgcggaggagcgcgccgcccgcggccgcctggacgccgagctgggtgcgcagcagcgcgagctgcaggaggcgctgggcgcgcgcgccgccctcgaggcgctgctgggccggctgcaggccgagcgccgaggcctcgacgcggcccacgaacgcgacgtgagggagctgcgcgcgcgcgccgccagccttaccatgcatttccgcgcccgcgccaccggccccgccgcgccgccgccacgcctgcgggaggtgcacgacagctacgcactgctggtggccgagtcgtggcgggagacggtgcagctgtacgaggacgaggtgcgcgagctggaggaggcgctgcggcgcggccaggagagcagactccaggcggaggaagagacgcggctgtgcgcgcaggaggcagcgctgcggcgcgaggcgctcgggttggagcagctgcgcgcgcggctggaggacgcgctgctgcggatgcgcgaggagtacgggatacaggccgaggagcggcagagagtgattgactgcctggaggatgagaaggcaaccctcaccttggccatggctgactggctgcgggactatcaggacctcctgcaggtgaagaccggcctcagtctggaggtggcgacctaccgggccttattggaaggagaaagtaatccagagatagtgatctgggctgagcacgttgaaaacatgccgtcagaattcagaaacaaatcctatcactataccgactcactactacagagggaaaatgaaaggaatctattttcaaggcagaaagcacctttggcaagtttcaatcacagctcggcactgtattctaacctgtcagggcaccgtggatctcagacgggcacatctattggaggtgatgccagaagaggcttcttgggctcgggatattcttcctcggccactacccagcaggaaaactcatacggaaaagccgtcagcagtcaaaccaacgtcagaactttctctccaacctatggccttttaagaaatactgaggctcaagtgaaaacattccctgacagaccaaaagccggagatacaagggaggtccccgtttacataggtgaagattccacaattgcccgcgagtcgtaccgggatcgccgagacaaggtggcagcaggtgcttcggaaagcacacggtcaaatgagaggaccgtcattctgggaaagaaaacagaagtgaaagccacgagggagcaagaaagaaacagaccagaaaccatccgaacaaagccagaagagaaaatgttcgattctaaagagaaggcttccgaggagagaaacctaagatgggaagaattgacaaagttagataaggaagcgagacagagagaaagccagcagatgaaggagaaggctaaggagaaggactcaccgaaggagaagagcgtgcgagagagagaggtgccgattagtctagaagtatcccaggacagaagagcagaggtgtccccgaaaggtttgcagacgcctgtgaaggatgctggtggtgggaccggtagagaggcagaagcaagagagctacggttcaggttgggcaccagtgatgccactggttctctgcaaggcgattccatgacagaaaccgtagcagaaaacatcgttaccagtatcctgaagcagttcactcagtctccagagacagaagcatctgctgattcttttccagacacaaaagtcacttacgtggacaggaaagagcttcctggggaaaggaaaacaaagactgaaatagttgtggagtctaaactgactgaggatgttgatgtttccgatgaagctggcctggactaccttttaagcaaggatattaaggaagtggggctgaaaggcaagtcagccgagcagatgataggagacatcatcaacctcggcctgaaagggagggaggggagagcaaaggtcgtcaacgtggagatcgtggaggagcccgtgagttatgtcagcggggagaagccggaggagttttccgtcccattcaaagtggaggaggtcgaagatgtgtcgccaggcccctgggggttggttaaggaggaggaaggttatggagaaagcgatgtcacattctcagttaatcagcatcgaaggaccaagcagcctcaggagaacacgactcacgtggaagaagtgacagaggcaggtgattcagagggcgagcagagttattttgtgtccactccagatgaacaccccggggggcacgacagagatgacggctcggtgtacgggcagatccacatcgaggaggaatccaccatcaggtactcttggcaggatgaaatcgtgcaggggactcgaaggaggacacagaaggacggtgcagtgggcgagaaggttgtgaagcccttggatgtcccagcgccctctctggagggggacctgggttccactcactggaaagaacaagctagaagcggtgaatttcatgccgaacccacagtcattgaaaaagaaattaaaataccccacgaattccacacctccatgaagggcatctcctccaaggagccccggcagcagctggtggaggtcatcgggcagctggaggaaacccttcccgagcgcatgagggaggagctgtccgccctcaccagagaggggcagggtgggccggggagcgtttccgtggatgtcaagaaggtccagggtgctggtggcagttccgtgaccctggttgctgaagtcaacgtctcacaaactgtggatgccgatcggttagacctggaggagctgagcaaagatgaggccagtgagatggagaaggctgtggagtcggtggttcgggagagcctgagcaggcaacgcagcccagcgcctggcagcccagatgaggaaggtggagcggaggccccggctgctggcattcgctttaggcgttgggccacccgggagctgtacatcccttcaggcgagagcgaggttgctggtggggcctctcacagctcgggacagcgcactccccagggcccagtgtcggccactgtggaggtcagcagccccacaggctttgcccagtcacaggtgctggaggatgtgagccaggctgcaaggcacataaaactcggcccctctgaagtctggaggactgagcgaatgtcatatgaaggacccactgcagaagtggtggagatggatgtgagtaacgtagaggcgatccgcagccggacacaggaagcgggagctctcggtgtgtctgaccgtggttcctggagagacgcggacagtaggaatgaccaggcagttggtgtgagctttaaggcctctgctggggaaggagaccaggcccacagagaacagggcaaggagcaggccatgtttgataagaaggtgcagctccagagaatggtagaccaaaggtcggtgatttcagatgaaaagaaagttgccctcctctatctagacaatgaggaggaggagaatgatgggcattggttttaa

SEQ ID NO: 43524 - DNA, 318 bp, Homo Sapiens
atgggggtgggtgaaagcgtgggtgggagaaggcacaggggctggagaggaatgggagggaaggcgttgtggtcactgcttcctggcaggggcggggagggagcctcaactgggtctgtggggcagaggagccagcaccactccagggctcgtcccgggtgggtgtggatggaggccacagcctgcgtggctcccagggtgagggtcaggctcacagggaggacaccaggcctcttatcgtggctccattctctgtggactgcccttggtgggactaagagcaggcaggtctccatgtgtcctggacacggctcctga

SEQ ID NO: 43525 - DNA, 360 bp, Homo Sapiens
atgcctgtaatcctatcacttttggagaccaaggcggggatggatcacctgaggtcaggagttcaagaccagcctggccaacatgatgaaactccatctctactaaaaatacaaaaattagtcaggcatggtggcacacacctgcagctactcgggaggctgaggcaagagaatggcttgaacccgggcgacggaagttgcagtgaggcgagattgcaccattgcactccagcctgggcaataagagtgaaactctgtctcaaaaaaagaaaaaatgatataaagtatttatttgtgtttatattttatggatacgtgtctatgtttatagattgcctgtatggtaccaacttgacataa

SEQ ID NO: 43526 - DNA, 4193 bp, Homo Sapiens
gaattcgctgcgtttccatgaaatcctgcggagtgtcgctcgctaccgccgccgctgccgccgccgctttcggtgatgaggaaaagaaaatggcggcgggaaaagcgagcggcgagagcgaggaggcgtcccccagcctgacagccgaggagagggaggcgctcggcggactggacagccgcctctttgggttcgtgagatttcatgaagatggcgccaggacgaaggccctactgggcaaggctgttcgctgctatgaatctctaatcttaaaagctgaaggaaaagtggagtctgatttcttttgtcaattaggtcacttcaacctcttattggaagattatccaaaagcattatctgcataccagaggtactacagtttacagtctgactactggaagaatgctgcctttttatatggtcttggtttggtctacttccattataatgcatttcagtgggcaattaaagcatttcaggaggtgctttatgttgatcccagcttttgtcgagccaaggaaattcatttacgacttgggcttatgttcaaagtgaacacagactatgagtctagtttaaagcattttcagttagctttggttgactgtaatccctgcactttgtccaatgctgaaattcaatttcacattgcccacttatatgaaacccagaggaaatatcattctgcaaaagaagcttatgaacaacttttgcagacagagaatctttctgcacaagtaaaagcaactgtcttacaacagttaggttggatgcatcacactgtagatctcctgggagataaagccaccaaggaaagctatgctattcagtatctccaaaagtccttggaagcagatcctaattctggccagtcctggtatttcctcggaaggtgctattcaagtattgggaaagttcaggatgcctttatatcttacaggcagtctattgataaatcagaagcaagtgcagatacatggtgttcaataggtgtgctatatcagcagcaaaatcagcccatggatgctttacaggcctatatttgtgctgtacaattggaccatggccatgctgcagcctggatggacctaggcactctctatgaatcctgcaaccagcctcaggatgccattaaatgctacttaaatgcaactagaagcaaaagttgtagtaatacctctgcacttgcagcacgaattaagtatttacaggctcagttgtgtaaccttccacaaggtagtctacagaataaaactaaattacttcctagtattgaggaggcgtggagcctaccaattcccgcagagcttacctccaggcagggtgccatgaacacagcacagcagaatacttctgacaattggagtggtggacatgctgtgtcacatcctccagtacagcaacaagctcattcatggtgtttgacaccacagaaattacagcatttggaacagctccgcgcaaatagaaataatttaaatccagcacagaaactgatgctggaacagctggaaagtcagtttgtcttaatgcaacaacaccaaatgagaccaacaggagttgcacaggtacgatctactggaattcctaatgggccaacagctgactcatcactgcctacaaactcagtctctggccagcagccacagcttgctctgaccagagtgcctagcgtctctcagcctggagtccgtcctgcctgccctgggcagcctttggccaatggacccttttctgcaggccatgttccctgtagcacatcaagaacgctgggaagtacagacactattttgataggcaataatcatataacaggaagtggaagtaatggaaacgtgccttacctgcagcgaaacgcactcactctacctcataaccgcacaaacctgaccagcagcgcagaggagccgtggaaaaaccaactatctaactccactcaggggcttcacaaaggtcagagttcacattcggcaggtcctaatggtgaacgacctctctcttccactgggccttcccagcatctccaggcagctggctctggtattcagaatcagaacggacatcccaccctgcctagcaattcagtaacacagggggctgctctcaatcacctctcctctcacactgctacctcaggtggacaacaaggcattaccttaaccaaagagagcaagccttcaggaaacatattgacggtgcctgaaacaagcaggcacactggagagacacctaacagcactgccagtgtcgagggacttcctaatcatgtccatcagatgacggcagatgctgtttgcagtcctagccatggagattctaagtcaccaggtttactaagttcagacaatcctcagctctctgccttgttgatgggaaaagccaataacaatgtgggtactggaacctgtgacaaagtcaataacatccacccagctgttcatacaaagactgataactctgttgcctcttcaccatcttcagccatttcaacagcaacaccttctccaaaatccactgagcagacaaccacaaacagtgttaccagccttaacagccctcacagtgggctacacacaattaatggagaagggatggaagaatctcagagccccatgaaaacagatctgcttctggttaaccacaaacctagtccacagatcataccatcaatgtctgtgtccatataccccagctcagcagaagttctgaaggcatgcaggaatctaggtaaaaatggcttatctaacagtagcattttgttggataaatgtccacctccaagaccaccatcttcaccataccctcccttgccaaaggacaagttgaatccacctacacctagtatttacttggaaaataaacgtgatgctttctttcctccattacatcaattttgtacaaatccgaacaaccctgttacagtaatacgtggccttgctggagctcttaagttagacctgggacttttctctactaaaactttggtggaagctaacaatgaacatatggtagaagtgaggacacagttgttgcagccagcagatgaaaactgggatcccactggaacaaagaaaatctggcattgtgaaagtaatagatctcatactacaattgctaaatatgcacagtaccaggcctcctcattccaggaatcattgagagaagaaaatgaaaaaagaagtcatcataaagaccactcagatagtgaatctacatcgtcagataattctgggaggaggaggaaaggaccctttaaaaccataaagtttgggaccaatattgacctatctgatgacaaaaagtggaagttgcagctacatgagctgactaaacttcctgcttttgtgcgtgtcgtatcagcaggaaatcttctaagccatgttggtcataccatattgggcatgaacacagttcaactatacatgaaagttccagggagcagaacaccaggtcatcaggaaaataacaacttctgttcagttaacataaatattggcccaggtgactgtgaatggtttgttgttcctgaaggttactggggtgttctgaatgacttctgtgaaaaaaataatttgaatttcctaatgggttcttggtggcccaatcttgaagatctttatgaagcaaatgttccagtgtataggtttattcagcgacctggagatttggtctggataaatgcaggcactgttcattgggttcaggctattggctggtgcaacaacattgcttggaatgttggtccacttacagcctgccagtataaattggcagtggaacggtacgaatggaacaaattgcaaagtgtgaagtcaatagtacccatggttcatctttcctggaatatggcacgaaatatcaaggtctcagatccaaagctttttgaaatgattaagtattgtcttctaagaactctgaagcaatgtcagacattgagggaagctctcattgctgcaggaaaagagattatatggcatgggcggacaaaagaagaaccagctcattactgtagcatttgtgaagtggaggtttttgatctgctttttgtcactaatgagagtaattcacgaaagacctacatagtacattgccaagattgtgcacgaaaaacaagcggaaacttggaaaactttgtggtgctagaacagtacaaaatggaggacctgatgcaagtctatgaccaatttacatta

SEQ ID NO: 43527 - DNA, 651 bp, Homo Sapiens
atgctgaagccccgcaccaaccacgccagcgcggccctcaatggggagatctacgttatcggcggcaccaccctggacgtggtggaggtggagagctatgacccctacacggacagctggacgcccgtcagcccggccctcaaatacgtcagcaacttctcggctgccggctgccggggccggctctacctggtgggctccagcgcctgcaagtacaacgccctggccctgcagtgctacaaccctgtcacagatgcgtggagtgtgatcgcctcgcccttcctgcccaagtacctgtcctcgcctcgctgtgctgcactgcacggggagctctacctcattggggacaacaccaagaaggtctacgtgtacgaccccggggccaacctgtggcagaaggtgcagtcacagcacagcctgcatgagaatggcgcgctggtgccactgggtgatgcgctgtacgtgacgggcggccgctggcagggcatggaaggtgactaccacgtggagatggaggcctacgacacggttcgggacacctggacccgccacggcgccctgccccggctctggctctaccacggggcctccaccgtcttcctggatgtctccaagtggacccagccctccggccccacccaggagcactaa

SEQ ID NO: 43528 - DNA, 390 bp, Homo Sapiens
atgctgcatgtgctggcctcgctgcctttgctgctcctgctggtgacgtctgcctccacccacgcctggtcgagacccctctggtaccaggtggggctggacttgcagccctgggggtgtcagccaaagagtgtggagggctgtaggggtggcctgagctgtcctggctactggctgggccctggagcaagccgcatctaccccgtggctgcggtcatgatcaccaccacgatgctgatgatctgccgcaagatactgcaggggcggcggcgctcacaggccaccaagggtgagcatccgcaggtgaccactgagccctgcggaccctggaaacggcgggccccaatctcagaccacaccctgctccgtggggtcctgcacatgctggat

SEQ ID NO: 43529 - DNA, 714 bp, Homo Sapiens
gcaaagcctgagtcttgtcctctcgctctcttcaccagacagcttgagcttcaccactggctccaccttctccacaaaataccagtccctgggctctgtccaggcgcccagcgaggcgcccagccggtcagcagtgcggccagcgtctatgcaggtgccgggggctctggttcccagatctctgtgacccgctccaccagcttctggggttgcatggggtccaggggcttggccatggggatggctggggatctggcaggaatgggaggcatccagaatgagaaggagaccatgcaaagcctgaacgactgcctggccccctacctggacagagtgaggggcctggagactgagaaccagaggctggagagcaaaatcccggagcacatggagaggaagggaccccaggtcagagtctggagcaattacttcaagaccatcaaggacctgagggctcagatctttgcaaatagtgtggataatgcctgcatcattctgcagatcgacaatgaccatcttactgctgacgactttagagtcaagtatgagacagagctggccatgcgccagtctgtggagagccacatccatgggctctgcaaggtcatcgatgacaccaatgtcacttggctgcagctggagacagagatcaaggctctcaagaaggagctgctcttcatgaagaagaaccatgaagaggaagtaaaaggccta

SEQ ID NO: 43530 - DNA, 690 bp, Homo Sapiens
atgtggatatccatccccttctgcctgatatacaccatcatctttccgggaaatggcatcattcttcacatcatccgaattgactcttccttgcaccaacccatgtactattttctggccatgccggcctttgttgaacttggtgtctctgcttccaccatgcccactgtgttaagcatattcctctttggcattaacgatgtcagttttggtggttgcctgctccagatgttttctatgcactctttcactcttatggagtcaggtgtccttctggcaatgtcagtggaccgctttgtggccatctacagcccactgcgctacacaaccattctgacaattgcctgcatttctgggacgggtgccgccattgccttgcgcagtgtaatgcttatgctcccactgctctttctcctgaggcgtctgcctttctgtggccacaataccctcacacactcttattgcctccactcagatctgatcaaattgccctgtggagacacacgtcccaatagcatcctggctctatttgtcattaccttcacatttggactggacttattgttcattgtggtttcttatgtgctgattcttcatacagtactggaaatagcttctggagcagggggcaggcactcaacacatgtgtgtcgcacatatgtgctgtgcttgtgtactatgtgcccatga

SEQ ID NO: 43531 - DNA, 1443 bp, Homo Sapiens
ctgcacagcctgtttgcccagtgccacgcactggtgcccccgcagcactactacgatgcctgcgtgttcgacagctgcttcatgccgggctcgagcctggagtgcgccagtctgcaggcctacgcagccctctgtgcccagcagaacatctgcctcgactggcggaaccacacgcatggggcctgcttggtggagtgcccatctcacagggagtaccaggcctgtggccctgcagaagagcccacgtgcaaatccagctcctcccagcagaacaacacagtcctggtggaaggctgcttctgtcctgagggcaccatgaactacgctcctggctttgatgtctgcgtgaagacctgcggctgtgtgggacctgacaatgtgcccagagagtttggggagcacttcgagttcgactgcaagaactgtgtctgcctggagggtggaagtggcatcatctgccaacccaagaggtgcagccagaagcccgttacccactgcgtggaagacggcacctacctcgccacggaggtcaaccctgccgacacctgctgcaacattaccgtctgcaagtgcaacaccagcctgtgcaaagagaagccctccgtgtgcccgctgggattcgaagtgaagagcaagatggtgcctggaaggtgctgtcctttctactggtgtgagtccaagggggtgtgtgttcacgggaatgctgagtaccagcccggttctccagtttattcctccaagtgccaggactgcgtgtgcacggacaaggtggacaacaacaccctgctcaacgtcatcgcctgcacccacgtgccctgcaacacctcctgcagccctggcttcgaactcatggaggcccccggggagtgctgtaagaagtgtgaacagacgcactgtatcatcaaacggcccgacaaccagcacgtcatcctgaagcccggggacttcaagagcgacccgaagaacaactgcacattcttcagctgcgtgaagatccacaaccagctcatctcgtccgtctccaacatcacctgccccaactttgatgccagcatttgcatcccgggctccatcacattcatgcccaatggatgctgcaagacctgcacccctcgcaatgagaccagggtgccctgctccaccgtccccgtcaccacggaggtttcgtacgccggctgcaccaagaccgtcctcatgaatcattgctccgggtcctgcgggacatttgtcatgtactcggccaaggcccaggccctggaccacagctgctcctgctgcaaagaggagaaaaccagccagcgtgaggtggtcctgagctgccccaatggcggctcgctgacacacacctacacccacatcgagagctgccagtgccaggacaccgtctgcgggctccccaccggcacctcccgccgggcccggcgctcccctaggcatctgggg

SEQ ID NO: 43532 - DNA, 4728 bp, Homo Sapiens
gataaactgcaggtgctgcaggtacttgatcgcctgaaaatgaaattgcaggagaagggtgacacgtcgcagaatgagaagttatctatgttttatgagacactaaagagtcctctcttcaaccagatactcacacttcagcagtccatcaagcaactgaagggtcaactcaaccatataccctcagattgttcagccaactttgatttttctaggaaaggtttgttagtgttcacagatggttccatcactaatggaaatgtccacaggccctctaataactcgactgtatctgggttatttccgtggaccccgaagttgggaaatgaagactttaactcagtcattcaacagatggctcagggccggcaaattgaatatatagatatagaacggccttcaactggaggccttggattcagtgtggtggccctcagaagtcaaaatctcggaaaagttgatatcttcgtgaaggatgtccagccagggagtgtagcagacagggatcaaagattaaaggaaaatgatcaaatattggccattaatcacacgccattggatcagaacatttcccatcagcaagcaattgcattattacaacaaaccactggatctttgagactgattgtggccagggaaccagtccacacaaaaagcagtacttctagcagcctaaatgatacaactctgcctgaaacagtttgttggggccatgttgaagaggttgagctcattaatgatggctctggactaggttttggaatagttggaggaaaaacaagtggcgtggttgtgaggactatagttcctggaggattagcagatcgagatggaagactccagacaggggaccacatcttgaagattggtggcacaaacgtgcagggaatgaccagtgagcaagttgcacaagttctaaggaactgtgggaattcagtcaggatgctcgttgctagagatccagctggtgacatttcagtcaccccccctgcccctgcagccttacctgttgccctgcctactgtagccagcaagggccctggttctgacagttctctttttgaaacttataatgttgagcttgtgagaaaagatgggcagagtcttggaattagaattgttggctatgttggaacatctcatacaggggaagcttcagggatttatgtgaaaagtataatacctggcagtgctgcgtaccacaatggccacattcaagtgaatgacaaaatagttgctgtcgatggcgtgaacattcagggttttgccaaccatgatgttgttgaagtattacgaaatgcagggcaggtggtacacctaaccctagttcgaaggaagacatcctcatctacttctccacttgaaccaccttcagacagaggaactgttgtagaaccactgaaaccaccagctctctttctaactggagcagtggaaactgaaactaatgtggatggtgaagatgaggaaattaaagaaagaattgatactttaaaaaatgacaacatacaagccttagaaaaattggaaaaagtcccagactctccagaaaatgagctgaaatccagatgggaaaacctgttgggtcctgattatgaagtaatggttgctactttggacacacagattgcagatgatgctgagttacagaaatattcaaagctgctgcctattcacactctgaggcttggtgtggaagtggattcctttgatgggcaccattatatttcttcaattgtttctggtggtcctgttgatacattgggtctcctacagccagaagatgagctgcttgaggtcaatggcatgcagctttatggaaaatctcgccgagaagcagtctcctttcttaaagaagtgccacccccttttactttggtttgctgtcggaggttgtttgatgatgaagcttctgtagatgaaccaaggcgcactgaaacctctcttcctgagacagaggttgaccacaatatggatgtcaatactgaagaagatgatgatggggaattagcactgtggtcccctgaagtcaagattgttgaactagtaaaagattgtaaaggtttgggattcagcattttggattaccaggaccctttagatcctacaagatcagtgattgtgatccgctccctggtagcagatggtgtagcagaaagaagtgggggactattacctggagaccgcctggtctcagtcaatgaatactgtttggacaacacctcacttgctgaagctgtggaaatattgaaagctgtgccaccaggcctagtacaccttggcatctgtaagcctttggtggaagataatgaagaagaaagttgttatattttacattcaagcagtaatgaagacaagactgaattttcaggaacaattcatgatataaattcatctttaatactcgaagcacccaagggatttagagatgaaccatattttaaagaagaacttgtggatgaaccatttctagatctgggaaagtctttccattcccaacaaaaagagatagagcaaagcaaggaggcctgggagatgcatgaatttctgactcctagattgcaggaaatggatgaagaaagagaaattcttgttgatgaagaatatgagttatatcaagatccctcaccatccatggagttgtatcccttgtcgcacattcaagaggccactcctgtgccctctgtgaatgaacttcactttggtacacagtggttgcatgataatgaaccatccgagtctcaagaggcaagaaccgggaggactgtctattcccaggaggcacagccgtatggctattgccctgaaaatgtgatgaaagaaaattttgtcatggagtccctaccatctgtaccatcaactgaaggaaacagtcaacaaggcagatttgacgacctggaaaatcttaattcattagcaaaaactagtctggatttaggcatgatcccgaatgatgtccaaggtcctagcttgctcattgaccttcctgttgtggctcaaaggagggagcaagaagatttgcctttatatcaacaccaagcgacacgagttatttccaaggcctcagcatacacaggaatgttgtcttctagatatgccactgatacatgtgagttacctgagagagaagaaggcgaaggagaagaaactccaaattttagccactggggtccaccgagaattgttgagatttttagagaacccaatgtgtctcttgggatcagtattgttggtggacaaactgttataaaacgtctaaagaatggagaggagcttaaaggtatattcatcaaacaagttttagaagacagtccagcagggaagacgaacgcacttaaaactggagataaaatacttgaggtgtctggagtagatttgcagaatgcctcacacagcgaagcagttgaggccattaagaatgcaggaaaccctgtggtgttcattgttcagagtttgtcatccactccacgagtcattcctaacgtacataacaaggccaacaaaatcaccggtaaccagaaccaggacacccaagaaaagaaagaaaagaggcaaggaactgctccaccgccaatgaaacttcctcctccttataaagctctgactgatgacagtgatgaaaatgaagaagaagatgcctttaccgaccaaaaaatcagacaaagatatgcagatctgcctggagaactgcacattattgaacttgaaaaagataagaatggacttggactcagccttgctggtaataaagaccgatcacgcatgagcatatttgtggtgggaattaacccggaaggacctgctgccgcagatggacgaatgcgtattggagatgaactcttagagataaacaatcagattctgtatggaagaagtcaccaaaatgcatctgccattattaagactgccccatcaaaggtcaagctggttttcatcagaaacgaggatgcagtcaatcagatggccgttactccctttccagtgccatcaagttctccatcttctattgaggatcagagcggcaccgaacctattagtagtgaggaagatggcagcgtcgaagttggtattaaacaattgcctgaaagtgaaagcttcaaactggctgtcagccagatgaaacagcaaaaatatccaacaaaagtctccttcagttcacaagagataccattagcaccagcttcatcataccattcaacagatgcagacttcacaggctatggtggtttccaggctcctctgtcagtggaccccgcaacgtgtcccattgtccctggacaggaaatgattatagaaatatccaagggacgttcagggcttggtctcagcattgtgggaggaaaagacacacccttgttctggaggctgggaagtccaagagcatggagccagcatctggtgagggccttcatgctgcatcatcctgtgacagaagttgaagggcaaaatgctatagttatccatgaagtctatgaagaaggggcagcagccagagatggaagactttgggctggtgaccagatattagaggttaatggggttgacctgaggaactccagccacgaagaagccatcacagccctgaggcagaccccccagaaggtgcggctggtggtgtatagagatgaggcacactaccgggatgaggagaacttggagattttccctgtggatctgcagaagaaagctggccggggcctgggcctgagcatcgttgggaaacggtaa

SEQ ID NO: 43533 - DNA, 654 bp, Homo Sapiens
cagtggggcctggtcagtgacatcctggtcagcaggctcctagtcagagggagcccaatcaataaacctggtcatcgggggcctgaaattatccttgaaccagaaaaaaaaatccccaattcaacactccatttttgtgaagagctggttccgaattctgggtcactttttggaaaaaatatctgttgtggtaaacagtgctgcatctgtgatctcaagtctctactggaattggatagagatggtgaatttcagccagagcgcccaaagaactcgtgtcccgcgctcctgaacgccatcagccgccgcacctccatcttccctcctcccacgagtctcctgctccccgtgactctggcctcctcgcagtgttgctgggccacgtcaggaagtgctggaggacgtggcattgcaccaacaccaggcggccagccgtgtggctcatcccgcaaatcaggctcttcctgtgcatggagatggagtccctctggaggcagcccgtggccctgttctcgggcaggtggagcatggagacgactgggaacttcactagacacgcatccagccggttcaagggcttgtcgcgccgtgcaccagcttgcaggagaaagcccaacgcctcgccaagcacgaaggcctcccttcccgacttga

SEQ ID NO: 43534 - DNA, 484 bp, Homo Sapiens
gagggctgctggatgagatgtttaaccatgcaggcgctggacgcttccgtttcttgggcagcatcttggtcaatctctcttcctgcgtggcactgaaccgtttccaggctctgcagtctgtcgacatcctggagactaaagcacatgaactcttgcagcagaacagcttcttggccagtatcattttcagcaattccttattcgacaagaacttcagatcagagtctgtcaaactgccaccccatgtctcatacacaatccggaccaatgtgttatacagcgtgcgaacagatgtggtaaaaaacccttcttggaagttccaccctcagaatctaccagctgatgggttcaaatataactacgtctttgccccactgcaagacatgatcgaaagagccatcattttggtgcagactgggcaggaagccctggaaccagcagcacagactcaggcggccccttacccctgccataccagcgacct

SEQ ID NO: 43535 - DNA, 2032 bp, Homo Sapiens
aattacgagcgggcggcgctgcgtttccagggcagaggaaacgaggcgccgcgttggcgcttggacggcgggaaccggctccggagcgagaacgcgcatggactcaccctgtcacccaggttggactgcactggcctcaacctcctgagttcaagtgatcgtcccacctcagcctccccagtagctgggaccatagctgtgcagcatcatgcctggctaattttttaagttttttgttgagatggtggtctcgccctgttgctcaggctggcctcaaactcctgggctgaagcagtcctcccacctcagcctcccaaagtgcttggattagaggcgtgagccaccattcctggctccttggacaatattttattcctcagattaagacacgtccttgggatggggctgcattggataattcaccgaaggcaccgctgaatggagtgggccctcagtaaatacctggaggaatgtgacctggccagtgaggttattttcttttgtaggtgaaaggtgtagcagtcactcggcctacacccacagcatcgaccttgtgaacccagcgacctgactgccttggtctgggttctgcccgcacacattcctcgccaccttcttggtgtctgagaacctccagcttcacctccttttctggacccgagggcctggcggagcttccagctgggaccagacctccatggatccactccagaaacggaatccagcatcgccttccaaatcttccccgatgacagctgcagagacttcccaggaaggtccagcgccctctcagccttcgtactcagaacagccgatgatgggcctcagtaacctgagccccggtcctggccccagccaggccgtgcctctcccagaggggctgctccgccagcggtacagagaggagaagaccctggaagagcggcggtgggagaggctggagttccttcagaggaagaaagcattcctgcggcatgtgaggaggagacaccgcgatcacatggccccctatgctgttgggagggaagccagaatctccccattaggtgacagaagtcagaatcgattccgatgtgaatgtcgatactgccagagccacaggccgaatctttctgggatccctggggagagtaacagggccccacatccctcctcctgggagacgctggtgcagggcctcagtggcttgactctcagcctaggcaccaaccagcccgggcctctgcctgaagcggcactccagccacaggagacagaggagaagcgccagcgagagaggcagcaggagagcaaaataatgtttcagaggctgctcaagcagtggttagaggaaaactgagacgtgcacccccatgggatggagacccgaagggactcagacggagccgccgtgttggcagcgcctgggtgtgggcccattttggggaccaaacagcaagctgtggtcggatgagtgccaggacctgtgtaccgggacacgtgggagtcctcccagcatgatgcttgactgacccgaggaaggtcctcatgtttcgtgcctgtcattctcggatggctgtgaggcattccttggcaagggacgctgcgtaccagcggtcctcaccgcatctcacatggctcctgtgatgcatgttgtcgctttcccacccgggatctccatctctcttcccttcctgctgtcagtaagagatcacatgtctgtgtagtgtgaatgccttgtcgctgtcctgtgcttttgcaccattgagttgactgcctctgagaagcagcactaggcctgttgaaatgcaatgtgctgccctgagatccagtttcaagaatgggcaggtaaacgcagtgtgggaaaggaatgtggaatgagaacttggtggttcaccgctgtactatttgtgtaaatgtttacgtatgtgataagctacatgtatgtaaatgttgcaatacccctaacagtcgagtagtagtctcccttacaggaatttttgacggggttcctcatcatcaataccaaataaatatatgtaggaatggaaaa

SEQ ID NO: 43536 - DNA, 177 bp, Homo Sapiens
aaggcagcatggaatccctccctcaggcctctctggacggtgttggtgggggatcaagatgaacacactgcagacgaggacacgagccccacaggagctctttgtcccgccggagaccagcggacccacgtcagagaagatgcttgtatcttttcacggctcttctctgagaaatga

SEQ ID NO: 43537 - DNA, 3500 bp, Homo Sapiens
cggtgacgcgggtgtttccccagtttgtggcccctgagtgctggggggggaccgcggtgactgaacctagaaggtggagaggaatcgtcctcggtgcccagaggcggctctgcagccccgtgacggcgaccactgctcccgggccgtgcttccccaagtagtccgatggcagcggctgcgccgaggcgcccgactcagcagggcactgtgacctttgaagatgtggctgtgaacttttcccaggaggagtggtgtcttcttagtgaggctcagaggtgcttgtaccgtgatgtgatgctagagaacctggctctcatatcctcgctgggttgttggtgtggatcaaaagatgaggaggcaccttgtaagcagagaatttctgtacaaagagagtctcagagcaggactcctagggcaggtgtttctcctaagaaggctcacccctgtgaaatgtgtggcctcatcttggaggatgtttttcactttgctgaccaccaggaaactcatcacaagcagaagctgaacaggagtggagcatgtggaaaaaacttggatgacactgcataccttcatcagcaccagaagcagcatattggagagaaattctacagaaagagtgtcagagaagcatcgtttgtaaagaaacgtaagctcagggtgtcacaggagccatttgtcttccgcgagtttgggaaggacgttctgcccagttcaggattgtgccaagaagcagctgctgtagagaagacagacagtgaaactatgcatggcccaccctttcaggagggaaaaactaattacagttgtggaaaacgcacaaaagccttcagcaccaaacactcagttattccacaccagaaacttttcactagagatggatgttatgtgtgcagtgattgtggaaaatcctttagcagatatgtcagcttcagtaatcatcagcgagatcacactgcaaaaggaccttatgattgtggagagtgtgggaaatcttatagtcgaaagagcagccttattcaacatcagcgagtccacactggaaagacagcttatccctgtgaggagtgcgggaaatcttttagtcagaagggcagccttattagccatcagcgtgttcacactggagaaaggccttatgagtgtagagaatatgggaaatcttttggtcaaaagggtaacctcattcaacatcagcaaggtcacactggagagagagcttatcactgtggggaatgtgggaaatcttttcgtcagaagttctgctttattaaccatcagcgtgttcacactggagaaaggccttacaagtgtggagaatgtggaaaatcttttggtcaaaagggcaacctcgttcaacatcagcgaggtcatactggagaaaggccctatgagtgcaaggaatgtgggaaatcatttaggtacagatcccacctcactgaacaccagagacttcacactggggaaagaccttacaattgtagggaatgtgggaaattatttaacaggaagtatcatcttctcgttcatgagagagttcacactggagaaaggccatatgcgtgtgaggtatgtgggaaattatttggtaataagaactgcgtgactatacatcagaggattcacactggagaaaggccgtatgaatgcaatgaatgtgggaaatcatttctttccagctctgcgcttcatgttcataaaagagttcattctggacaaaagccttataagtgcagtgaatgtggaaaatcctttgctgaatgttccagtctcattaaacacaggagaattcacactggagaaaggccttatgaatgtaccaaatgtggaaaaacatttcagcgaagctctaccctccttcatcatcagagttcacacaggagaaaggccttatgagtgcagtgaatatgggaaatcgtttgctgaaacatcccgtctcattaaacacaggagagttcatactggagaaaggccttatgagtgctgtcaatctgggaaacatcagaatgtctgctctccttggtcttaagagacttcgcattggaacggagtctcattctgtcacccaggctggagtgcagtggtgcaatcttggctcactgcaacttgggcctcccaggttcaagtgattctcctacctcagcctcccaaggagctgagattacgagtacaccacaccatgcccggccaaatacttggttttcagtaccacaagagctatgagctggttatccacttcatgtggaatcataagtgtccccaagtgacaatacgtatagattgctgggcagtgaaacagttaagatgtcaccgtagcttgctttctattcaacatctttctaagattaccttactatttcttttgttccaagtttgtatttcctcagagttctcacatatggaaaggatacacactttgtagaaacaagaactttatgttatccaagttctgggatagccatgagctccaattacctcagagctccgagtcctctactcagtacccgttgagatttatgtgttctgaggcttttgtcttctagctacttacttcattctccatgggtaacgtcattcatccacattaactaatttcctcactccaagctcttttctggagataatctccagtccctgtgcagacactgtcattgcactttctgctgaaatggtagtttcttgccagcaaggtgagattatggaatccagaatcttttttcaggggccacatgcccatttccccacttgcatgaatgtcgacactgtagccacagttttggccgtaaatgtgaatttggcaagtaaccactgttcccaaattgggaaatgtcccagtcagaagaagattatctgggacactgatactgacagggagatgggacattctgagggacccggaggcagggagccacctcctcagcttccctgagggctgcctagaatctctcttgtttcctctcactctgaattattcttcctctcatgactgaccaaacacatggaacctcacaaagtccattttaagagctttatcttgtgaagtgaagaacatgaagatagtttgaatcaaagttattgagtggacacttaatgtctttataacattttttacatatgtgtttgtgttttttggggagcataatttgcaaatggaatatctgttattttactaagatgcttcatggatacaagagttaaaacttcctgtcccatttagtgaaacaaaaggttaagaaatgtggataaagcttgtaagttagaaatggcaagataatcagctatatgaagaatctcagctgggtgttttggctcaggcctgtaatcccagcactttgggaggctgaggtgggtggcttacaaggtcaggagttcaagaccaccctggacaatatggtgaaaccctgtctctactaaaaatacaaaaattacccaagcatagtggtgggtgcctgtagtcccagctgcttgggaggctgaggcaggagaattcgttaaacctggga

SEQ ID NO: 43538 - DNA, 2712 bp, Homo Sapiens
accaccacagcctccatcacaggctctgagaccaccatggcctccaccatggcctctactacggccttaactacaggctctaagatcaccacagactctaccacaggctctgagacaacctcagcctccaccatggcttctactgcagccttcaccacaggctctgagaccaacacggcctctaccacagactcagggactactatagcctccactgggaccttcaccacaggctctgacacaaccacaggctccactgcaggctctgaaactatcgtggcctccaccacagtctctgggaccacaacaacctttactatagcctccactacagtccctgagactaccatggcctccagcacaacctccactgcaggctctgagaaaacgatggcctcctccataatttctgagaccaccatggcctccaccacaggctctgagactgccacagtctctaccacaggctctgagaccaccaccacctccactgcaagctctgaggccactaaagtctctaccacaggctctgaaaccaccacagcatctactgcaggttctgagaccaccactacctccacctccatggcaggctctgaggccaccacaacctcaactgcagactccaaggtgatcacggcgtccagcatgagctctgagaccactgtggcccccgctgcaggctctaacaccaccacagcctctaccacaggctctgagaccactacaatcctgattaaagcctctgagaccaccacagcctctacagcaggttctgagaccaccaccccctcccccacaggctctcagaccaccatagtctctatttcaggctctgagaccaccacagtctctaccacaggctctgagaccaccacagcctccatcatgggctctgagaccagcacagattctaccacaggctctgagaccaccacagcctctactgaaggctctgagaccaccacagcttccactgaaggctctgaggccactacagtctccaccacaggctctgagaccactacagtttctatcacagactcagagaccaccaccacctgtactgaaggctctgagatgactgcagtctccaccacagtctttgagaccactacagcctctactgaaggctctgagatcacaatagcctctacttcagactctgagaccaccacagcttctactgaaggtgctgagaccaccacagactctactgaaggctctgggaccactgcagcctccactgcaggctctgagaccaccacagtctctactgcagattctgagaacaccacagcatctactgcagattctgagaccacctcagcctctactacaggctctgagaccaccacagcctctactacaagctctgagaccaccacagcctctactgaaggctctgagaccactacagtctccaccacagactctgagaccaccatggtctctaccacaggctctgagaggaccatcacctctactgaaggctctgagaccactacagtatctgccacaggctctgagaccacagtctctactgaaggctctgggaccactacagtctccatcacaggctctgagaccactaaagtttctaccacaggttcagagaccaccaccacttctactgaaggctctgagattactacagcctccatcacaggctctgagaccaccacagcctctactgaaggctccgagaccaccacagcctctactgaaggctccgagaccacctcagcctctactacaggctctgagaccaccacagcctctactacaagctctgagaccaccatggcatccatcatgggctctgagaccactatggcctctaccataggctctgagaccaccaaggtctccactgcaagctctaaaatgaccacagtcttcactgaaaactctgagaccaccatagcctctaccacagcctctgagaccaccacagtctccactgcaggctctgagaccatcccagcctctacagcaggctctgagaccaccaccaccacctctactgaaggctctgagaccactacagcctctactgaaggctctgagaccaccacagcctctactgaaagctctgagaccactacagccactaccataggctctgagaccaccacagcctctactgaaggctctgagactaccaccacctctactgaaggctctgagaccaccacagcctctactgaaggctctgagatcactacagtttctaccacaggctctgagaccaccacagcctctactgaaggctctgagaccaccacagcctctactgaaggctctgagctcactacagtttctaccacaggctctgagaccatcacagtctctgctgaaggctctgagaccactacagtcactactatgggctctgagaccaccacggcctctactgcaggctcagagaccaccacagtctctactgcaggctctgagaccaccacagcctctattgaaggctctgagaccactacagtctcctccacaggctctgagaccaccacagtctctaccacaggcactgagactaccatcacctctactgaaggttcagagaccactacagtcactactgcaggttctgagaccacagcagtctataccacaggctctgagactaccaccacctctactgaaggctctgagacaaccacagtctctaccacgggctctgagaccaccacagcc

SEQ ID NO: 43539 - DNA, 2592 bp, Homo Sapiens
aaaaagcagcagaacctggaagtccacggggagcttggatgccaaagggaggacggctgggtcctctggagaggactactcactggcatatttctgaggtatctgtagaaaaccacagcctcagatactggggactttacagtcccacagaaccgtcctcccaggaagctgaattcagcaagaacaatggaggccagcgggaagctcatttgcagacaaaggcaagtccttttttcctttctccttttgggcttatctctggcgggcgcggcggaacctagaagctattctgtggtggaggaaactgagggcagctcctttgtcaccaatttagcaaaggacctgggtctggagcagagggaattctccaggcggggggttagggttgtttccagagggaacaaactacatttgcagctcaatcaggagaccgcggatttgttgctaaatgagaaattggaccgtgaggatctgtgcggtcacacagagccctgtgtgctacgtttccaagtgttgctagagagtcccttcgagttttttcaagctgagctgcaagtaatagacataaacgaccactctccagtatttctggacaaacaaatgttggtgaaagtatcagagagcagtcctcctgggactgcgtttcctctgaagaatgctgaagacttagatataggccaaaacaatattgagaactatataatcagccccaactcctattttcgggtcctcacccgcaaacgcagtgatggcaggaaatacccagagctggtgctggacaaagcgctggaccgagaggaagaagctgagctcaggttaacactcacagcactggatggtggctctccgcccagatctggcactgctcaggtctacattgaagttgtcgatgtcaatgataatgcccctgaatttgagcagcctttctatagggtgcagatctctgaggacagtccaataagcttcctggttgtgaaggtctctgccacggatgtagacacaggagtcaacggagagatttcctattcacttttccaagcttcagatgagataagcaaaacttttaaggtcgatttcttgacaggagaaattcgactaaagaaacaacttgatttcgaaaaatttcagtcctatgaagtcaatatcgaggcgagagatgctggaggcttttctggaaaatgcaccgttctgattcaagtgatagatgtgaacgaccatgccccagaagttaccatgtctgcatttaccagcccaatacctgagaatgcgcctgaaactgtggttgcacttttcagtgtttcagaccttgattcaggagaaaatgggaaaataagttgctccattcaggaggatctacccttcctcctgaaatcttctgtggggaacttttacaccctactaacagagacaccactagacagagaaagcagagccgagtacaacgtcactatcaccgtcactgacttagggacacccaggctgacaacacatctcaatatgaccgtgctggtgtcggacgtcaatgacaacgcccccgccttcacccaaacctcctacaccctgttcgtccgcgagaacaacagccccgccctgcacatcggcagcgtcagcgccacagacagagactcgggcaccaacgcccaggtcacctactcgctgctgccgccccaggatccgcacctgcccctcgcctccctggtctccatcaacacagacaacggccacctgttcgccctcaggtcgctggactacgaggccctgcaggcgttcgagttccgggtgggcgcttcagaccgcggctccccggctttgagcagcgaggcgctggtgcgcgtgctggtgctggacgccaacgacaactcgcccttcgtgctgtacccgctgcagaatggctccgcgccctgcaccgagctggtgccccgggcggccgagccgggctacctggtgaccaaggtggtggcggtggacggcgactcgggccagaacgcctggctgtcgtaccagctgctcaaggccacggagcccgggctgttcggtgtgtgggcgcacaatggcgaggtgcgcaccgccaggctgctgagcgagcgcgacgcggccaagcagaggctggtggtgctggtcaaggacaatggcgagcctccgtgctcggccaccgccacgctgcacttgctcctggtggacggcttctcccagccctacctgccgcttccggaggctgccccagcccagggccaggccgactctctcaccgtctacctggtggtggcgttggcctcggtgtcttcgctcttcctcttctcggtgctcctgttcgtggcggtgctgctgtgtaggaggagcagggcggcctcggtgggtcgctgctcagtgcctgagggcccctttccagggcatctggtggacgtgaggggcaccgggagcctgtctcagaactatcagtacgaggtgtgcctggcaggaggctcagggacgaatgagttccagttcctgaaaccagtattacctaatattcagggccattcttttgggccagaaatggaacaaaactctaactttaggaatggctttggtttcagccttcagttaaagtaa

SEQ ID NO: 43540 - DNA, 1374 bp, Homo Sapiens
atgcgcccgccaagtccgctgcccgcccgctggctatgcgtgctggcaggcgccctcgcctgggcccttgggccggcgggcggccaggcggccaggctgcaggaggagtgtgactatgtgcagatgatcgaggtgcagcacaagcagtgcctggaggaggcccagctggagaatgagacaataggctgcagcaagatgtgggacaacctcacctgctggccagccacccctcggggccaggtagttgtcttggcctgtcccctcatcttcaagctcttctcctccattcaaggccgcaatgtaagccgcagctgcaccgacgaaggctggacgcacctggagcctggcccgtaccccattgcctgtggtttggatgacaaggcagcgagtttggatgagcagcagaccatgttctacggttctgtgaagaccggctacaccattggctacggcctgtccctcgccacccttctggtcgccacagctatcctgagcctgttcaggaagctccactgcacgcggaactacatccacatgcacctcttcatatccttcatcctgagggctgccgctgtcttcatcaaagacttggccctcttcgacagcggggagtcggaccagtgctccgagggctcggtgggctgtaaggcagccatggtctttttccaatattgtgtcatggctaacttcttctggctgctggtggagggcctctacctgtacaccctgcttgccgtctccttcttctctgagcggaagtacttctgggggtacatactcatcggctggggggtacccagcacattcaccatggtgtggaccatcgccaggatccattttgaggattatgggtgctgggacaccatcaactcctcactgtggtggatcataaagggccccatcctcacctccatcttggtaaacttcatcctgtttatttgcatcatccgaatcctgcttcagaaactgcggcccccagatatcaggaagagtgacagcagtccatactcaaggctagccaggtccacactcctgctgatccccctgtttggagtacactacatcatgttcgccttctttccggacaattttaagcctgaagtgaagatggtctttgagctcgtcgtggggtctttccagggttttgtggtggctatcctctactgcttcctcaatggtgaggtgcaggcggagctgaggcggaagtggcggcgctggcacctgcagggcgtcctgggctggaaccccaaataccggcacccgtcgggaggcagcaacggcgccacgtgcagcacgcaggtttccatgctgacccgcgtcagcccaggtgcccgccgctcctccagcttccaagccgaagtctccctggtctga

SEQ ID NO: 43541 - DNA, 960 bp, Homo Sapiens
atggccttactgggcagccagcactccggcgccccctccgcggccggcccacctggcgggacttcctccgcggccacggcggccgtgctctccttcagcaccgtggcgaccgcggcgctggggaacctgagcgacgcaagcggaggcggcacagctgccgctcccggtggcggcggccttggcgggtccggggcagcgcgggaggcgggggcggcggtgaggcggccgctaggcccggaggcggcgccgctgctgtcgcacggagctgcagtggcggcccaggcgctcgtcctcctgctcatcttcctgctgtctagccttggcaactgcgcggtgatgggggtgattgtgaagcaccggcagctccgcaccgtcaccaacgccttcatcctgtcgctgtccctatcggatctgctcacggcgctgctctgcctgcccgccgccttcctggacctcttcactccgcccgggggttcggcgcctgccgccgccgcggggccctggcgcggcttctgcgccgccagccgcttcttcagctcgtgcttcggcatcgtggctcagcgtggcgctcatctcgttggaccgttactgcgctatcggccgccgcgggagaagatcggccgccgccgcgcgctgcagctgctggcgggcgcctggctgacggccctgggcttctccttgccctgggagctgctcggggcgccccgggaactcgcggcggcgcagagcttccacggctgcctctaccggacctccccggaccccgcgcagctgggcgcggccttcagcgtggggctggtggtggcctgctacctgctgcccttcctgctcatgtgcttctgccactaccacatctgcaagacggtgcgcctgtcggacgtgcgcgtgcggccggtgaacacctacgcgcgcgtgctgcgctcagcgaggtgcgcacggccaccaccgtcctcatcatga

SEQ ID NO: 43542 - DNA, 429 bp, Homo Sapiens
gactcagagacggaaccagagacgggccagagcatccccctcctccaccatgaaactcgctgtcaccctcaccctggtcacactggctctctgctgcagctccgcttctgcagagatctgcccgagctttcagcgtgtcatcgaaaccctcctcatggacacaccctccagttatgaggctgccatggaacttttcagccctgatcaagacatgagggaggcaggggctcagctgaagaagctggtggacaccctcccccaaaagcccagagaaagcatcattaagctcatggaaaaaatagcccaaagctcactgtgtaattagcatttagaagctgaagatccccaactgctccagcctctgccgctgccatgctttgagtccacgcccaccagccttgctctcttcaataaaccacaagcatctca

SEQ ID NO: 43543 - DNA, 2215 bp, Homo Sapiens
agccgccacgccccgggagaggaccgaccgcccagaccgccggtcccggggccccctgggccacgccgatcacggggagcccctcgactgcctcccagaacaaagtgggaaagggaagcttagcccgccgctgccgcctccgagcagcccgccaggactctggctactggagatgggcgcccggctatcgcggcgacggctgccggcggacccatccctggccctggacgcgctgcccccggagctgctggtgcaggtgctgagccacgtgccgccacgctccttggtcacgcgatgccgcccagtgtgccgcgcctggcgcgacatagtggacgggcccactgtgtggctgctgcagctggcccgcgaccgcagcgccgagggccgcgcactctacgcagtggctcaacgctgcctgcccagcaacgaagacaaggaggagttcccgctgtgcgccctggcgcgctactgtctgcgcgcgcccttcggccgcaatctcatcttcaactcctgcggagagcagggcttcagaggctgggaggtggagcatggcgggaacggctgggccatagaaaagaacctaacaccggtgcctggggctccttcgcagacctgcttcgtgacctctttcgaatggtgctccaagaggcagcttgtggacctggtgatggaaggggtgtggcaggagctgctggacagcgcccagattgagatctgtgtggctgactggtggggcgctcgagagaactgcggctgcgtctaccagctccgggtccgccttctggatgtgtatgaaaaggaagtggtcaagttctcagcctcacctgacccggtccttcagtggactgagaggggctgccgacaggtctcccacgtcttcaccaactttggcaagggcatccgctacgtatcttttgagcagtacgggagagacgtgagttcctgggtggggcactatggcgcccttgtgacccactccagtgtgagggtcaggatccgtctgtcctagcgactggactactgcctgacgttgtcagtcaagaccagccttgcagccaggtgcagtggctcacacctgtggaatcccagcacttcaggaggccgaggtgggaggatcactggagctcgggagttcaagaccagcctgggcaacatagtgaaaccgtctccacaaataatttttaaaaaattagccaggcatggtggtgccgcctgtagtcccagctactcaggaggcttgggtgggaggattgcctgagaccaggaggttgaggctgcagtgagccgtgatttcaccaccactccagcctgggtgagaaagcaagaccctatatcaatgaaaaaaaaaaaaaaaaagaccagctttgcagccagaagccagaggatacccagggacagtagggctcccaggtggctggttctcagcacaccttccatgaatctgcttgctgctgcttcagtgtggtggccatcatgctgtgtgacaaaccaggctgttcacagcttcctcagccccccagaaggggagtgtcaggaagagacatttagttcatttgcctgcaaattttcttctcctgcaaggatctcggtggactcagtcacaaaacaaaggctaaaccaggatttataagagagggcttataaatccctctgccgacgcagggagcagagacttgccggcatgttttgggggtaatgatcgtgggcagggagcagaggtccgctgaggcagtctgtccttgagactaacaaagtcatctgctgtttggggaaatctctggtgttgggaacaggcccccaaatctggccataaactggccccaaaactggccataaacaaaatatctgcagcactgtgacatgtttgtgatggccatgacccccaccctgaaggttgtgggtttactggaacgagggcgaggaacacctggcccacccagggcggaaaaccgcttaaaggggttcctgaaccacaaaccatagcataagtgatctgtgccttaacgacatgttcctgctgcagataactagccagacccatccctttatttcagcccatccctttatttcctgtaagaaatgtttttagttaatctataatctatagaaataatgcttatcactggcttgctgtcaataaatatgtgggtaaatctctgttcaaggctctcagctctgaaggccgtgagacccctgatttcccactccacaccct

SEQ ID NO: 43544 - DNA, 462 bp, Homo Sapiens
gccaagtccaagaaccataccacacacaaccagtcccgaaaatggcacagaaatgctatcaagaaaccccgatcacaaagatacaaatctcttaagtggatggaccccaggttcctgaggaacatgcactttgccaagaagcacaagaagggcctcaagaagatgcaggccaacaatgccaaggccatgagtgcacgtgccgaggctatcaaggccctcgtaaagcccaaggaggttaagcccaagatcccaaagggtgtcagccacaagctcgatcgacttgcctacattgcccaccccaagcttgggaagtgtgctcgtgcccgcactgccaagggactcaggctgtgccggctaaaggccaaggccaaggatcaaatcagcgcccagactgcagctccagcttcagttccagctcaagctcccaaaggtgcccaggcccctacaaaggcttcagagtag

SEQ ID NO: 43545 - DNA, 342 bp, Homo Sapiens
atggtggcccaccgcgacagcctctatgtggtgcgcaacggaccttccgacgacttcctgcactgcgccatcgactgtctcaacctggccacgggccagtggacggcgctgcccggccagttcgtcaacagcaagggagcgctcttcacggccgtggtgcgcggtgacaccgtctatacggtcaaccgcatgttcacgctgctctacgccatcgagggcggcacctggcggctgctcagggagaaagccggcttcccgcggcccggctccttgcagacctttctcctaaggctgcctcctggcgctcctgggcctgtgacttcgacaacggcagaactgtga

SEQ ID NO: 43546 - DNA, 399 bp, Homo Sapiens
atggctgaaaagccacaccagaattcctgcaattcagtgaggcagctcttcaaaaccaagcagctggtgacgcacagggacagagggagctgtacgcacagggcccaggggctgctggctgccaggaccaccgcattgcagaggtctcccttgcagcaagagatctgggagtccacaacggcacttaacctgccctctgccctggcaccccagggactcactgccaaagacgctcactttctgggagacacagaccccatccaggaaggggcacgagaccacgctgcaggaggccccttccaagaccgccaagcatctgtagcagcgcagaccctgagctgggagagagggcaaggattctctcggcaccacgggaaccaccttctctactctcactga

SEQ ID NO: 43547 - DNA, 939 bp, Homo Sapiens
atggaagtgggaaattgcaccatcctgactgaattcatcttgttgggtttctcagcagattcccagtggcagccgattctatttggagtgtttctgatgctctatttgataaccttgtcaggaaacatgaccttggttatcttaatccgaactgattcccacttgcatacacctatgtactttttcattggcaatctgtcttttttggatttctggtatacctctgtgtatacccccaaaatcctggccagttgtgtctcagaagataagcgcatttccttggctggatgtggggctcagctgtttttttcctgtgttgtagcctacactgaatgctatctcctggcagccatggcatatgaccgccatgcagcaatttgtaacccattgctttattcaggtaccatgtccaccgccctctgtactgggcttgttgctggctcctacataggaggatttttgaatgccatagcccatactgccaatacattccgcctgcatttttgtggtaaaaatatcattgaccactttttctgtgatgcaccaccattggtaaaaatgtcctgtacaaacaccagggtctacgaaaaagtcctgcttggtgtggtgggcttcacagtactctccagcattcttgctatcctgatttcctatgtcaacatcctcctggctatcctgagaatccactcagcttcaggaagacacaaggcattctccacctgtgcttcccacctcatctcagtcatgctcttctatggatcattgttgtttatgtattcaaggcctagttccacctactccctagagagggacaaagtagctgctctgttctacaccgtgatcaacccactgctcaaccctctcatctatagcctgagaaacaaagatatcaaagaggccttcaggaaagcaacacagactatacaaccacaaacatga

SEQ ID NO: 43548 - DNA, 1942 bp, Homo Sapiens
atgaagagcgtcttgctgctgaccacgctcctcgtgcctgcacacctggtggccgcctggagcaataattatgcggtggactgccctcaacactgtgacagcagtgagtgcaaaagcagcccgcgctgcaagaggacagtgctcgacgactgtggctgctgccgagtgtgcgctgcagggcggggagaaacttgctaccgcacagtctcaggcatggatggcatgaagtgtggcccggggctgaggtgtcagccttctaatggggaggatccttttggtgaagagtttggtatctgcaaagactgtccctacggcaccttcgggatggattgcagagagacctgcaactgccagtcaggcatctgtgacagggggacgggaaaatgcctgaaattccccttcttccaatattcagtaaccaagtcttccaacagatttgtttctctcacggagcatgacatggcatctggagatggcaatattgtgagagaagaagttgtgaaagagaatgctgccgggtctcccgtaatgaggaaatggttaaatccacgctgatcccggctgtgatttctgagagaaggctctattttcgtgattgttcaacacacagccaacattttaggaactttctagattatagcataaggacatgtaatttttgaagaccaaatgtgatgcatggtggatccagaaaacaaaaagtaggatacttacaatccataacatccatatgactgaacacttgtatgtgtttgttaaatattcgaatgcatgtagatttgttaaatgtgtgtgtatagtaacactgaagaactaaaaatgcaatttaggtaatcttacgtggagacaggtcaaccaaagagggagctaggcaaagctgaagaccgcagtgagtcaaattagttctttgactttgatgtacattaatgttgggatatggaatgaagacttaagagcaggagaagatggggagggggtgggagtgggaaataaaatatttagcccttccttggtaggtagcttctctagaatttaattgtgcttttttttttttttttggctttgggaaaagtcaaaataaaacaaccagaaaacccctgaaggaagtaagatgtttgaagcttatggaaatttgagtaacaaacagctttgaactgagagcaatttcaaaaggctgctgatgtagttcccgggttacctgtatctgaaggacggttctggggcataggaaacacatacacttccataaatagctttaacgtatgccacctcagagataaatctaagaagtattttacccactggtggtttgtgtgtgtatgaaggtaaatatttatatatttttataaataaatgtgttagtgcaagtcatcttccctacccatatttatcatcctcttgaggaaagaaatctagtattatttgttgaaaatggttagaataaaactatgactctataaggttttcaaacatctgaggcatgataaatttattatccataattatatcactctggatttcaaaaatgtcaaaaaatgagcaacagagggtccttatttaaacataagtgctgtgacttaggtgaattttcaatttaaggtagaaaataagtttttaggaggtttgtaaaagaagaatcaattttcagcagaaaacatgtcaactttaaaatatatggaattaggagtatatttgaaagaatcttagcacaaacaggactgttgtactagatgttcttaggaaatatctcagaagtattttatttgaagtgaagaacttatttaagaattatttcagtatttacctgtattttattcttgaagttggccaacagagttgtgaatgtgtgtgggaaggcctttgaatgtaaagctgcataagctgttaggttttgttttaaaaggacatgtttattattgttcaataaaaaagaacaagatac

SEQ ID NO: 43549 - DNA, 1194 bp, Homo Sapiens
atgtaccagagcctggcgctggccgcgagcccccgccaggccgcctacgccgactcgggctccttcctgcacgctccgggcgccggctctccgatgtttgtgccgccggcgcgcgtcccctcgatgctgtcctacctgtccgggtgtgagccgagcccgcagccccccgagctcgctgcgcgccccggctgggcgcagacagccaccgcggattcgtcggccttcggcccgggcagtccgcaccccccagccgcgcacccgcccggggccaccgccttccctttcgcgcacagcccctcggggcccggcagcggcggcagcgcggggggccgagacggcagtgcctaccagggcgcgctgttgcctcgagaacagttcgcggccccgcttgggcggccggtggggacctcgtactccgccacctacccggcctacgtgagccccgacgtggcccagtcctggactgccgggcccttcgatggcagcgtcctgcacggcctcccaggccgcaggcccaccttcgtgtccgacttcttggaggagttcccgggtgagggtcgtgagtgtgtcaactgcggggccctgtccacaccgctgtggcgccgagacggcaccggccactacctgtgcaatgcctgcggcctctaccacaagatgaatggcgtcaaccggccgctcgttcggcctcagaagcgcctgtcctcgtcccgccgcgccggcctctgctgcaccaactgccacacgaccaacaccacgctgtggcggcggaactcggagggggagcccgtgtgcaatgcctgcggcctctacatgaagctgcacggggtgccgcggcctctggctatgaagaaggaaagcatccagacacggaagcggaagccaaagaccatcgccaaggccaggggctcctcaggatccacaaggaatgcctcggcctccccatctgctgtcgccagcactgacagctcagcagccacttcgaaagccaagcccagcctggcgtccccagtgtgccctgggcccagcatggccccccaggcctctggccaggaggatgactctcttgcccccggccacttggagttcaagttcgagcctgaggactttgccttcccctccacggccccaagcccccaggctggcctcaggggggctctgcgccaagaggcctggtgtgcgctggccttggcctag

SEQ ID NO: 43550 - DNA, 1105 bp, Homo Sapiens
ccacaccgcgctcagcgccttcactgccatccccgctgtccttgccgcccccgccatgggcctagagctgtttcttgacctggtgtcccagcccagccgcgccgtctacatcttcgccaagaagaatggcatccccttagagctgcgcaccgtggatttggtcaaagggcagcacaagagcaaggagttcttgcagatcaacagcctggggaaactgccgacgctcaaggatggtgatttcatcttgactgaaagctcggccatcctgatttacctgagctgtaagtaccagacgccggaccactggtatccatctgacctgcaggctcgtgcccgtgttcatgagtacctgggctggcatgccgactgcatccgtggcacctttggtatacccctgtgggtccaggtgttggggcccctcattggggtccaggtgcccgaggagaaggtggaacgcaacaggactgccatggaccaggccctgcaatggctggaggacaagttcctgggggacaggcccttcctcgctggccagcaggtgacactggctgatctcatggccctggaggagctgatgcagccggtggctctcggctatgaactgtttgagggacggccacgactggcagcatggcgtggacgagtggaggctttcctgggtgctgagctatgccaggaggcccacagcatcatcttgagcatcctggaacaggcggccaagaaaaccctcccaacaccctcaccagaggcctatcaggctatgctgcttcgaatcgccaggatcccctgaagggtctgggatgggggccaggagattagcaacaaggattcattctgttacttacttgcccctttttatctttccctcttgccccagtcccttctctccagcttcatgtgaagctctgcacagacaagacactcagtgtccttggcagtgctgctactcctcaggtgcagcatacataaccagtaagagactaaatctgcaatatataaagagctcctacaaatcagtaacatgaagaacactcaaaaattggcaaatgtcatcagtgttttaaacagaataaagattccaaacactttgaatagagaaccaaga

SEQ ID NO: 43551 - DNA, 384 bp, Homo Sapiens
atggccgaggaaggcattgctgctggaggggtaatggacattaatgctgctttacaagagctgttgaagacagccctcatccacgatggcctagcacatggaattcgcaaagctaccaaagccttagacaagcgccaagcccatctttgtgtgcttgcatccaacggtgatgagactgtgtatgtcaagttggtggaagccctttgtgctgagcaccaaatcaacctaattaaggttgatgacaagaaactgggggaatgggtaggtctctgtcaaattgacagagaggggaaaccccgtaaagtggttggttgcagttgtatagtagttaaggactatggcaaggagtctcaggccaagcatgtcatcagagagaacttctaa

SEQ ID NO: 43552 - DNA, 523 bp, Homo Sapiens
ccgtgtctccacacgtctgcctccatcactgccatcgcgatcctgcagctatgtcctaccctgtgaccagtcagccccagtgcgccaccaccagctgctaccagacccagctcagtgactggcacacaggtctcacggactgctgcaacgacatgcctgtctgtctgtgcggcacttttgctcctctgtgccttgcctgccgcatctccgacgactttggcgagtgctgctgcgcgccctacctgcccggaggcctgcactccatccgcaccggcatgcgggagcgctaccacatccagggctccgtcgggcacgactgggcggccctcaccttttgtctgccctgcgccctctgccagatggcgcgggaactgaagatccgagagtaaggaagttccctgtcttccccgtccttttccaccagtctcgcctctggccttctctggccactcctgggagggactgcctcaccacccctgtcccgctgccagaaatacacccacaataaaaacctgaaaaccaa

SEQ ID NO: 43553 - DNA, 1074 bp, Homo Sapiens
gtctgggctcggggcgcggcggcagtcagctctatgttcgcggtcttaacctctcctctggccgagtccttgcaagaagtgaattacccgaccctgcaaaacacttactattttggagtttaaagtatgtcatcatggcaaagtttcggagaaggacttgcatcattttggcactttttattctatttattttctctctgatgatgggtttaaaaatgctgagaccaaatacagctacttttggagctccttttggacttgaccttcttccagaacttcatcaacgaactattcatttggggaaaaattttgatttccaaaagagtgacagaatcaacagtgaaacaaataccaagaatttaaaaagtgttgaaatcactatgaaaccttccaaagcctctgaacttaacttggatgaactaccacctctgaacaattatctacatgtattttattacagttggtatggaaatccacaatttgatggtaaatatatacattggaatcatccagtgttagagcattgggaccctagaatagccaagaattatccacaagggagacacaaccctccagatgacattggctccagcttttatcctgaattgggaagttacagttctcgggatccttctgtcatagaaactcacatgagacaaatgcgctcagcttcaattggtaattattgtatatatatatgtgtgtttgtgtctgtatatatgcatataaatgattttttgtgtaactttactagttaattttctcattattattaattatattgttaagctcatacctccaaattaaactgtatgtatgatcttaaacatccaggcaaccacattttaacactgcccttagtgtatattgtttaatttttacattttggagcatttctggatatattgttgatttctaatttaattcactttctcaattttattaaattatgatttacataaaatacaatgaatttcccactttaagtttatagctcattgatgttactcaaaagtatatacctgtttgaataccaccccaatcaagaagtaaaatatttctatagcccaaaaa

SEQ ID NO: 43554 - DNA, 327 bp, Homo Sapiens
atgaaagctctctgtctcctcctcctccctgtcctggggctgttggtgtctagcaagaccctgtgctccatggaagaagccatcaatgagaggatccaggaggtcgccggctccctaatatttagggcaataagcagcattggcctggagtgccagagcgtcacctccaggggggacctggctacttgcccccgaggcttcgccgtcaccggctgcacttgtggctccgcctgtggctcgtgggatgtgcgcgccgagaccacatgtcactgccagtgcgcgggcatggactggaccggagcgcgctgctgtcgtgtgcagccctga

SEQ ID NO: 43555 - DNA, 441 bp, Homo Sapiens
atgccgaccaagggcccgctgcagtcggtgcaggtcttcggacgcaagaagacagccacagctgtggcgcactgcaaacgcggcaatggtctcatcaaggtgaacgggtggcccctggagatgattgagctgcgcatgctacaatacaagctgctggagccagttctgcttctcggcaaggagcggtttgctggtgtggacatctgtgtccgtatgaagggtggtggtcacgtggcccagatttatgctatccatcagtccatctccaaagccctggtggcctactaccagaaatatgtggatgaggcttccaagaaggagatcaaagacatcctcatccagtatgaccagaccctgctggtagctgatcctcgttgccgggagtccaaaaagtttggaggccctggtgcccatgctcgctaccagaaatcctaccgataa

SEQ ID NO: 43556 - DNA, 1254 bp, Homo Sapiens
gagtgcatctccatccatgtgggccaggccggagtgcagatgggcaatgcctgctgggagctgtactgcctggagcacgacatccagcccagtggcaccatgcccagccacaaggccctggggagcagtgataactccttcaacaccttcttcagggagacccagcctggcaggcatgtgtcctgggctgtcgtggacctggagcctgctgtcatagatggggtaagaactgacatttataggcagctgttccaccctgaacagctgatatctggcgtggaagatgctgccaacaactgtgcccgtggccactacactgcggggaaggagatcatcgatttggtgctggagctgaaaactgaccagtgcaccatgcttcagggcttcctgatcttccatagttttggggatggcactggcaagttggaatttgctatctacccagtcccccaagtgtccatgacagttgtagaaccctataactctatcttgaccacccacaccaccctggagcactcagacgccttcatggtagacgaggccatctatgatctctgctgccacaacctgcgccctacctataccaacctgaactggctcatcagccagattgtgtcctccatcactgcttccttgtgttttgatggtgccctcaacgtggacctcacagagttccagaccaatctggtgccctaccctcgcatccactttcccctggtgacctactcacccattatctcagctaagaaggcctaccatgagcagctctcagtggcagagatctccagtgtctactttgagccctccaatcagatggccaagtgtgaccctcgccacggcaagtacatggcctgctgcctgctctactgtggagaagtggtgcccaaggacgagaatgccaccattgccaccattaaaaccaagcaaatatttgttttgcggacgtgtcccacaggtttcaaggcaagtggcatcaactaccagtcccccacagtggtgcccgggggtgctgtagccaaggtgcagcgggcagtctgcgtgctaaacaataccacagccatcactgaggcctgggcccgcctcaaccaaaagtttgacctgatgtatgccaagcgggcatttatgcactgttatgtggacaggggcatggaggaaggtgagctctctgggcctgaggacctggctgccctggagaaggattatgaagtaggcacagaatctttggacagcgaggatgagcatgaggagttctag

SEQ ID NO: 43557 - DNA, 201 bp, Homo Sapiens
ataactttccaggtcctaactgggaccacctactccccttggagggtccggatggagtttcccctctgcggctgcctctcactcatcctccaccactttgccgacaaggaaggaaggacaatcgggaggagggagtcttgcttggcgaccatctggacaatatctcgcccatggcaagctggatccctgtggattactttg

SEQ ID NO: 43558 - DNA, 697 bp, Homo Sapiens
tggggttccaggcgggcagcagctgcaggctgaccttgcagcttggcggaatggactggcctcacaacctgctgtttcttcttaccatttccatcttcctggggctgggccagcccaggagccccaaaagcaagaggaaggggcaagggcggcctgggcccctggcccctggccctcaccaggtgccactggacctggtgtcacggatgaaaccgtatgcccgcatggaggagtatgagaggaacatcgaggagatggtggcccagctgaggaacagctcagagctggcccagagaaagtgtgaggtcaacttgcagctgtggatgtccaacaagaggagcctgtctccctggggctacagcatcaaccacgaccccagccgtatccccgtggacctgccggaggcacggtgcctgtgtctgggctgtgtgaaccccttcaccatgcaggaggaccgcagcatggtgagcgtgccggtgttcagccaggttcctgtgcgccgccgcctctgcccgccaccgccccgcacagggccttgccgccagcgcgcagtcatggagaccatcgctgtgggctgcacctgcatcttctgaatcacctggcccagaagccaggccagcagcccgagaccatcctccttgcacctttgtgccaagaaaggcctatgaaaagtaaacactgacttttgaaagcaaga

SEQ ID NO: 43559 - DNA, 885 bp, Homo Sapiens
ttgggattctctgaatttccaaagaaccctattttcctcttttcaatattcctagggatctacctcctgacagtgtcctggaacataaacctcatcacccttatcagggactcccatctgcatacacctatgtactttttccttagtaatctgtcgtttctggacatctgctatgtttccactatagcccccaagatgctctcagacttcttcaagaagcataaattcatctcctttatggggtgcagtatgcagtactttttcttctctagcctaggtctaactgagtgctgtcttctggcagccatggcttatgatcgatatgctgccatttgcaaccctctgctctacagggccatcatgtttcccaccctctgcgtgcagatggtggcaggatcttgtataactggattcttaggctcatttatccaactctgtgccttgcttcagctccatttctgtgggccaaatgtcatcaaccatttcttctgtgatctgccccagctgctgattctatcctgttctgacacctttttctttcaagtcatgacctctgttctcacagtgatctttggactcacgtctgtcttagttatcatgatatcttatggttatatcattgccaccattctgaagatcacctcagctgaaggcagagccaaatctttcaacacttgtgcttctcaccttacagcagtgatccttttctttggctcaggtatctttgtttatatgtatcctaatgctggtgattccctgagccaaaacaagttggcatcagtcttatacacagttacaatccccatgttaaatccagtgatctacagcctgaggaacaaggaaatcaaagatgctctaaacagatggaagaagagaatcttctcc

SEQ ID NO: 43560 - DNA, 291 bp, Homo Sapiens
ttggccttccctgattgggcctacaaagccgagtcgtccccaggctcccggcagatccagctgtggcacttcatcctggagctgctgcagaaggaagagttccgccatgtcatcgcctggcagcagggagagtacggggaatttgtcatcaaggatccagatgaggtggcccgcctctggggccgcaggaaatgcaaaccacagatgaattatgacaagctgagccgggccctcagatattactacaataagaggatcctgcataagaccaaaggcaaaaggttcacatac

SEQ ID NO: 43561 - DNA, 183 bp, Homo Sapiens
tgtctgtcagagctgtcagcctgcttaagcagagtaaaatggtacaggcagtgcagcctggtagcgagaaaaaaggctgcctgtgaaatcccactgtgggaccataagtggggacctcagggccccttcatggcatctccatggccatgtcatgctggagaaggaggcgtttcaagaatgtga

SEQ ID NO: 43562 - DNA, 1980 bp, Homo Sapiens
ctcttgctgctggggctctgggtgctcctgactccagtccggtgttctcaaggccatccctcgtggcactacgcatcctccaaggtggtgattcccaggaaggagacgcaccacggcaaagaccttcagtttctgggctggctgtcctacagcctgcattttgggggtcaaagacacatcattcacatgcggaggaaacaccttctttggcccagacatctgctggtgacaactcaggatgaccaaggagccttgcagatggatgacccctacatccctccagactgctactatctcagctacctggaggaggttcctctgtccatggtcaccgtggacatgtgctgtgggggcctcagaggcatcatgaagctggacgaccttgcctatgaaatcaaacccctccaggattcccgcaggcttgaacatgtttctcagatagtggccgagcccaacgcaatggggcccacatttagagatggtgacaatgaggagacaaaccccctgttctctgaagcaaatgacagcatgaatcccaggatatctaattggctgtatagttctcatagaggcaatataaaaggccacgttcaatgttccaattcatattgtcgtgtagatgacaatattacaacttgttccaaggaggtggtccagatgttcagtctcagtgacagcattgttcaaaatattgatctgcggtactatatttatcttttgaccatatataataattgtgacccagcccctgtgaatgactatcgagttcagagtgcaatgtttacctattttagaacaaccttttttgatacttttcgtgttcattcacccacactacttattaaagaggcaccacatgaatgtaactatgaaccacaaaggtatagcttctgtacacatttaggcctattacacattggtactctaggcagacattatttattagtagccgtcataacaacccagacactgatgagaagtactggtgagaagtacgatgataactactgcacatgtcagaaaagggccttctgcattatgcagcaatatcctgggatgacagatgcgttcagtaactgttcttatggacatgcacaaaattgttttgtacattcagcccggtgtgttttcaaaacacttgctcctgtgtataatgaaaccatgacaatggttcgctgtggaaacctcatagcggatgggagggaggaatgtgactgtggctccttcaagtattattgctgccgaagtgactgtcgcttaacaccggggagcatctgtcatataggagagtgctgtacaaactgcagctactccccaccagggactctctgcagacctatccaaaatatatgtgaccttccagagtactgtcacgggaccaccgtgacatgccccgcaaacttttatatgcaagatggaaccccgtgcactgaagaaggctactgctatcatgggaactgcactgaccgcaatgtgctctgcaaggtaatctttggtgtcagtgctgaggaggctcctgaggtctgctatgacataaatcttgaaagttaccgatttggacattgtactcgacgacaaacagctctcaacaaccaggcttgtgcaggaatagataagttttgtggaagactgcagtgtaccagtgtgacccatcttccccggctgcaggaacatgtttcattccatcactcagtgacaggaggatttcagtgttttggactggatgaccaccgtgcaacagacacaactgatgttgggtgtgtgatagatggcactccttgtgttcatggaaacttctgtaataacaccaggtgcaatgcgactatcacttcactgggctatgactgtcgccctgagaagtgcagtcatagaggggtgtgcaacaacagaaggaactgccattgccatataggctgggatcctccactgtgcctaagaagaggtgctggtgggagtgtcgacagcgggccacctccaaaa

SEQ ID NO: 43563 - DNA, 943 bp, Homo Sapiens
gaaaaaatactgttggcagcagcacaatgtttgggctaagacctggtcttgaaagcgccacaagcagcagctgctgagccatggctgaaggggaaatcaccaccttcacagccctgaccgagaagtttaatctgcctccagggaattacaagaagcccaaactcctctactgtagcaacgggggccacttcctgaggatccttccggatggcacagtggatgggacaagggacaggagcgaccagcacattcagctgcagctcagtgcggaaagcgtgggggaggtgtatataaagagtaccgagactggccagtacttggccatggacaccgacgggcttttatacggctcacagacaccaaatgaggaatgtttgttcctggaaaggctggaggagaaccattacaacacctatatatccaagaagcatgcagagaagaattggtttgttggcctcaagaagaatgggagctgcaaacgcggtcctcggactcactatggccagaaagcaatcttgtttctccccctgccagtctcttctgattaaagagatctgttctgggtgttgaccactccagagaagtttcgaggggtcctcacctggttgacccaaaaatgttcccttgaccattggctgcgctaacccccagcccacagagcctgaatttgtaagcaacttgcttctaaatgcccagttcacttctttgcagagccttttacccctgcacagtttagaacagagggaccaaattgcttctaggagtcaactggctggccagtctgggtctgggtttggatctccaattgcctcttgcaggctgagtccctccatgcaaaagtggggctaaatgaagtgtgttaaggggtcggctaagtgggacattagtaactgcacactatttccctctactgagtaaaccctatctgtgattcccccaaaca

SEQ ID NO: 43564 - DNA, 375 bp, Homo Sapiens
gaaaaagcttgtggtaaaggagggctaaaaaaaaggaagcaggttccaaagttcactcttgatcgcacccaccccgtagaagatggaatcatggatgctgccaactttgagcagtttttccaagaaaggatcaaaatgaacggaaaagctgggaactttggtggaggggtagtgaccatcgaagggagcaagagcaagaccagcgtgacatccaagctgcccttttccaacaggtatttgaaatatctcaccaaaaaatatctgaagaagaataatctacatgattggttgcgcgtagttgctaacagcaaacagagttacgaattacgttacttccaaattaaccaggacgaagaggaggaaaacgaggattaa

SEQ ID NO: 43565 - DNA, 138 bp, Homo Sapiens
aggaacagtaagaggaccttgtgcatgaataatttgtttccacactgcagacagaagaatcccagacttcttagagaacccagtgactttttgcaccttaaatctgtgaaatcctcatgctttcttctgccgtatcca

SEQ ID NO: 43566 - DNA, 567 bp, Homo Sapiens
atggaagctgatgcatctgttgacatgttttccaaagtcctggagaatcagctgcttcagactaccaaactggtggaagaacatttggattctgaaattcaaaaactggatcagatggatgaggatgaattggaacacattaaagaaaagagactcgaggcactaaggaaagctcaacagcagaaacaagaatggctttccaaaggacatggggaatacagagaaatccctagtgaaagagacttttttcaagaagtcaaggagagtaaaaaagtggtttgccatttctacagagactccacattcaggtgtaaaatactagacagatttctggcgatattgtccgagaaacacctcgagaccaaatttttgaagctgaatgtggaaaaagcacctttcctttgtgagagactgcatatcaaagtcattcccatactagcactggtaaaagatgggaaaacacaagattatgttgttgggtttactgacctaggaaatacagatgacttcaccacagaaactttagaatgggggctcagttgttctgacattcttaattacaggtaa

SEQ ID NO: 43567 - DNA, 999 bp, Homo Sapiens
atgttagagggtgttgagcatctccttctgctacttcttttgacagatgtgaacagcaaggaactgcaaagtggaaaccagacttctgtgtctcacttcattttggtgggcctgcaccacccaccacagctgggagcgccactcttcttagctttccttgtcatctatctcctcactgtttctggaaatgggctcatcatcctcactgtcttagtggacatccggctccatcgtcccatgtgcttgttcctgtgtcacctctccttcttggacatgaccatttcttgtgctattgtccccaagatgctggctggctttctcttgggtagtaggattatctcctttgggggctgtgtaatccaactattttctttccatttcctgggctgtactgagtgcttcctttacacactcatggcttatgaccgtttccttgccatttgtaagcccttacactatgctaccatcatgacccacagagtctgtaactccctggctttaggcacctggctgggagggactatccattcacttttccaaacaagttttgtattccggctgcccttctgtggccccaatcgggtcgactacatcttctgtgacattcctgccatgctgcgtctagcctgcgccgatacggccatcaacgagctggtcacctttgcagacattggcttcctggccctcacctgcttcatgctcatcctcacttcctatggctatattgtagctgccatcctgcgaattccgtcagcagatgggcgccgcaatgccttctccacttgtgctgcccacctcactgttgtcattgtttactatgtgccctgcaccttcatttacctgcggccttgttcacaggagcccctggatggggtggtagctgtcttttacactgtcatcactcccttgcttaactccatcatctacacactgtgcaacaaagaaatgaaggcagcattacagaggctagggggccacaaggaagtgcagcctcactga

SEQ ID NO: 43568 - DNA, 2392 bp, Homo Sapiens
cttctgctccggccctgtcctcaaattggggggctgatgtccccatacacctggctctgggttcccctaaccccagagtgcaggactaggacccgagtggacctcaggtctggccaggtcgccattgccatggagacagcaacagtccccagccgcgggttccctaagtgactggttactctttaacgtatccacccaccttgggtgattagaagaatcaataagataaccgggcggtggcagctggccgcactcaccgccttcctggtggacgggctcctggtggctgtgctgctgctgtgagcgggcccctgctcctccatgcccccagctctccggctgggtgggcttggccatggtcagcgtgaacgcgcccctcggggctccagtggagagttcttacggtaagtggggctgggggaagactggacagggcgggactgcggtcagctttgggaggccatgggacacctccccgtgtgtttcttacgggcccaaagctcctcctggagctcctctggaagggcaggaagccccacggaggcaatgtgaccgcttccctaagctctcaagccggggcatggcctgcttggtgcgagaagtgctgggaggggccgagaagccctggggcagaggcttggctcattttgtctgtccagaggccttcctgggaatgcatctcaggggtctttccaaaaccccacagagggtggggcttggaagcaccgtcctgtttcgatgcggggcaaattgaggtccaccaggagaggcttgctgggcctaggtcacgttgctggtgcattatcaagctgggcgtgggaccgggcagctcggtcgctccgcacctccgttggctctggataatggggaggaggtagaaagcgccgcgcagggtggagcgttggaaaatgagaatatcttgtgcggacgtgtgaaactcagatgcagggctagaaagcatgtgttactgagagtgaaaggctcaggctcactccttagggtgacccccacattggaagcaacccaatgtccctcagcagagggaagacgggtaaataaagcgtgagacgtctttacagtggaatgctatcccattgttcaaggaaacaacgcacatctgtgtgtgacagggaagaacctctcagttaaattaagtgaaaacggtacactgaagaactgtgtagttgctgatagcgaaacggatatagatgtatatatgtacacacgcgtatacgtgtacattccacgcatagaaaattcgtggaatgacacaataaaattggtgacaggtttgtttctgaggagggaaattcaagagaatgttttatcttttggggacacattttggattttttaaaagttgggtgccttttataaacctgttcaaatcacacacccgcacagaacttggtctctggaatccagcagacctcggggtctagttgtgactctgtcacacggctcaacattcacgtgcctcttgctttctttctgaagtggagacaggactaggatgtgtcttaagatcatggtggatgccgtggggaacaaggatgtaaagcccttgataccacgtgcattgcaaagacacaatcaacatttatgtcatcaattgctgaggacagagggccagggaatgacagaatcagggcctgatctcctgactctagtcaggaagaatcttctttgctttgacccccatcaaacaggaatatgtgatgcactggaaatggcagaggctgaagaaaccaacagcctgggaacccatcccacacaccagctgtgtgaccttgggcaagacatttcccctctctgaacctatttcctcatctgtaaaatgaagataacaacaggacctatctcccagagagcggggagattagaggagatagcatagaggagattaagggtgaggccacccttaatccacaattttaagacctggagtatagatgccaatggatgacttggttgaacctgtggctaggggaagacattgtctctcaaaggggccagacagcttctggggaaggacagcccaggtcataaggctaagctaggggtgaacagaaggccccacagtgtctcttaaaggatgatacaataatataacctgacagcctttcactgtctcccacgtctctgcaccttgtaggatgtcctcatgtctcttcatctctgctcctgtgtcatactcattatatagcaaacattcagcaattattagaatggttgcttctatcgacaggtaggtgggtgaatggatggatgaatgggttagtgaatgttctactattatctctcagacagctgtttcattttccaaacggctgtctgagataaataatattgtaatctccaaggacagaagaaaaaactaaggttcaagatt

SEQ ID NO: 43569 - DNA, 453 bp, Homo Sapiens
ggaaatgtgggctttgtgttcaccaaggaggacctcactgagatcagggacatgctggtagccagtaaggtgccaggagccacctgtgctggtgccattgccccatgtgatgtcactacctcctttttccaggctttaggcatcatcactaaaaccttgggcaccactgaaatcctgagtgatgtgcagctgatcaagactggagtcaaagtgggagccagcgaagccacactgctgaacatgcggaacatctctcccttctcctttgggctggtcatccagcaggtgtttgacaatggcagcatctacaatactgaagtgcttgacatcacagaggaaattctgaatcctcacttcctggagggtgtccgcaacattgccaatgtctgtctgcagattggttatccagctgttgcctccgtaccccattctaccatcagtgggtacaaatga

SEQ ID NO: 43570 - DNA, 501 bp, Homo Sapiens
gagatgaatgccctgagaggccaggtgggtggagatgtcaatgtggagatggacgatgcacctggtgtggacctgagccacattctgaacgagatgcgtgaccagtacgagaagatggcagagaagaaccacaaggacgcagaggaacggttcttcactaagacagagaagctgaaccacgaggtggccaccaacagcgagctggtgcagagcggcaagagcgagatttcggagctctggcacaccatgcagaacctggagattgagctgcagtcccagctcagcataaagcatctggagaacagcctggaggagaccaaaggccgctactgtgtgcagctggcccaaatccaggagatgattggcagtgtggaggagcagctggcccagctctgctgcgagatggagcagcagaaccaggagtacaagatcctgctggacgtgaagatgcggctggaacaggagatcgccacctaccgccgcctgctggagggcgaggat

SEQ ID NO: 43571 - DNA, 969 bp, Homo Sapiens
cccccaagagattctctgccgacaccccaccccagacccacgagggatgctctgccgacaccccaccgcggacccccgagggattctctgccgacaccccaccccggacccacgagggatgctctgccgacaccccaccccggacccacgagggatgctctgccgacaccccaccccggacccacgagggatgctctgccgacaccccaccccggacccacgagggatgctctgccgacaccccaccccggacccacgagggatgctctgccgacaccccaccccggacccacgaggggtgatctgccgacaccccaccccggacccacgaggggtgatctgccgacaccccaccccggacccacgaggggtgatctgccgacaccccaccccggacccacgaggggtgatctgccgacaccccaccccggacccacgaggggtgatctgccgacaccccaccccggacccacgaggggtgatctgccgacaccccaccccggacccacgaggggtgatctgccgacaccccaccccgggcccacgagggatgctctgccgacaccccaccccggacccacgagggatgatctgccgacaccccaccccggacccacgaggggtgatctgccgacaccccaccccggacccacgagggatgctctgccgacaccccaccccggacccacgagggatgctctgccgacaccccaccccggacccacgagggatgctctgccgacaccccaccccggacccacgagggatgatctgccgacaccccaccccggacccacgagggatgatctgccgacacctcaccccggacccacgagggatgatctgccgacacctcaccccggacccacgagggatgctctgccgacacctcaccctggaccacgagggatgctctgccgacaccccaccccagacccaccactgtctagggtggggcccacctccctg

SEQ ID NO: 43572 - DNA, 948 bp, Homo Sapiens
atggaaattgtctccacaggaaacgaaactattactgaatttgtcctccttggcttctatgacatccctgaactgcatttcttgttttttattgtattcactgctgtctatgtcttcatcatcatagggaatatgctgattattgtagcagtggttagctcccagaggctccacaaacccatgtatattttcttggcgaatctgtccttcctggatattctctacacctccgcagtgatgccaaaaatgctggagggcttcctgcaagaagcaactatctctgtggctggttgcttgctccagttctttatcttcggctctctagccacagctgaatgcttactgctggctgtcatggcatatgaccgctacctggcaatttgctacccactccactacccactcctgatggggcccagacggtacatggggctggtggtcacaacctggctctctggatttgtggtagatggactggttgtggccctggtggcccagctgaggttctgtggccccaaccacattgaccagttttactgtgactttatgcttttcgtgggcctggcttgctcggatcccagagtggctcaggtgacaactctcattctgtctgtgttctgcctcactattccttttggactgattctgacatcttatgccagaattgtggtggcagtgctgagagttcctgctggggcaagcaggagaagggctttctccacatgctcctcccacctagctgtagtgaccacattctatggaacgctcatgatcttttatgttgcaccctctgctgtccattcccagctcctctccaaggtcttctccctgctctacactgtggtcacccctctcttcaatcctgtgatctataccatgaggaacaaggaggtgcatcaggcacttcggaagattctctgtatcaaacaaactgaaacacttgattga

SEQ ID NO: 43573 - DNA, 699 bp, Homo Sapiens
agcagcgaggccgagacccagcagccgcccgccgcttgccgctcgccgccccccgccctcagcgccggtgacaccacgcccggcactacgggcagcggcacaggaaacggtggcccgggaggcttcacatcagcagcacctgccggcggggacaagaaggtcatcgcaacgaaggttttgggaacagtaaaatggttcaacttaaggaacggatatgctttcatcaacaggaatgacatcaaggaagatacatttgtaccccagactgccaaaacgaagaataaccccaggaggtaccttcgcagtgtaaatggagagactgtggagtttgatgtggttgaaggagaaaagggtgcagaggcagcacatgttataggtcctggtggtgttccagttcaaggcagtaaacatgcagcagaccgtaacccttatagatgctatccacgtcgtaggggtcctccacccaattaccagcaaaactaccagaatagcgagagaaaacaaggtagatcagtgtggcagagtatatatcagggatatagaccacgattccgcaggggccctcctcgccaaagacagcctagagaggacggcaatgaagaggataaagaaaatcaacgaggtgagacccaaggtcagcagccacctcaacgtcggtaccgccgcaacttaccgacgcagacacacagaaaaccctaa

SEQ ID NO: 43574 - DNA, 1230 bp, Homo Sapiens
ctctcacctgatggaaagagaaaaactatgctctgcttggcttgtggacaatccatgagaacagagaaaggactgaaacaattgcttccaggggttccattcctctgtatttcaggcaccaagactcagaagcccttcttacaagggcccttcaaggtcatcagtgtggctgaggttgatttgtcgtgtgacaaggctgaaaaaactctaagttactaccaagcacgtctattgtctttacggatgaagacctgcacgcaagctgcatctcacagtggcatggcagccacacaccagaaggcagtgaaaataattgcatacaaaaatggggatgggtatcgtaatgggaagttaattgtggctggaacattccccatgcttcttacagaatgcacggaacaacttgggcttgccagagcagcctccaaagtatataccaaagatggaaccccaatctttaccttgcgtgatttggttttatgggctctagatgaatcctttctccagagagactctgagaaacaaaagcaagatgcagctcctgttggaaaagaacagataattgttgaaagtatggaagaaaatccaagaatgaaagtgaaaaacagattatttgcaaaatctgtgacatccgatagtttggatggtatagacaagtctttgcttaccctcatcctcagaaatcctattgccatctgggtgtcttgtggtgaaccatttctacctccaaatgctttgcagaaagcagaaaaattagagaaacagaactggctaaaaaaggacagaattttggctgatctagataccatgagacacaaaatgagacagttaaaagggcggcgagtagcggcatgtcagccagccaccatggttcctaccaagagccctgtgcagcccgtggtggttgaaggaggctggaccgaacagactcaacaggaaattaaactcatggaacttataagacatacagaggcacacctttctgaaatccaagaaatggaatccaaaataaattttccaattgcaaccaaacgtatagcagtcaagccgagcaacctgtataagcagcccaacacaaaacgagtgtggatttatctaaatggaggcagacctgaagatggcacttatgcctggggcaaaactatttcagaggtcagcttactttatctgaagacatggatctttatttggagcaggaaagttttcttctattttttgataactgcttaa

SEQ ID NO: 43575 - DNA, 2744 bp, Homo Sapiens
gttgttggccacagcgtgggaagcagctctgggggagctcggagctcccgatcacggcttcttgggggtagctacggctgggtgtgtagaacggggccggggctggggctgggtcccctagtggagacccaagtgcgagaggcaagaactctgcagcttcctgccttctgggtcagttccttattcaagtctgcagccggctcccagggagatctcggtggaacttcagaaacgctgggcagtctgcctttcaaccatgcccctgtccctgggagccgagatgtgggggcctgaggcctggctgctgctgctgctactgctggcatcatttacaggccggtgccccgcgggtgagctggagacctcagacgtggtaactgtggtgctgggccaggacgcaaaactgccctgcttctaccgaggggactccggcgagcaagtggggcaagtggcatgggctcgggtggacgcgggcgaaggcgcccaggaactagcgctactgcactccaaatacgggcttcatgtgagcccggcttacgagggccgcgtggagcagccgccgcccccacgcaaccccctggacggctcagtgctcctgcgcaacgcagtgcaggcggatgagggcgagtacgagtgccgggtcagcaccttccccgccggcagcttccaggcgcggctgcggctccgagtgctggtgcctcccctgccctcactgaatcctggtccagcactagaagagggccagggcctgaccctggcagcctcctgcacagctgagggcagcccagcccccagcgtgacctgggacacggaggtcaaaggcacaacgtccagccgttccttcaagcactcccgctctgctgccgtcacctcagagttccacttggtgcctagccgcagcatgaatgggcagccactgacttgtgtggtgtcccatcctggcctgctccaggaccaaaggatcacccacatcctccacgtgtccttccttgctgaggcctctgtgaggggccttgaagaccaaaatctgtggcacattggcagagaaggagctatgctcaagtgcctgagtgaagggcagccccctccctcatacaactggacacggctggatgggcctctgcccagtggggtacgagtggatggggacactttgggctttcccccactgaccactgagcacagcggcatctacgtctgccatgtcagcaatgagttctcctcaagggattctcaggtcactgtggatgttcttgacccccaggaagactctgggaagcaggtggacctagtgtcagcctcggtggtggtggtgggtgtgatcgccgcactcttgttctgccttctggtggtggtggtggtgctcatgtcccgataccatcggcgcaaggcccagcagatgacccagaaatatgaggaggagctgaccctgaccagggagaactccatccggaggctgcattcccatcacacggaccccaggagccagccggaggagagtgtagggctgagagccgagggccaccctgatagtctcaaggacaacagtagctgctctgtgatgagtgaagagcccgagggccgcagttactccacgctgaccacggtgagggagatagaaacacagactgaactgctgtctccaggctctgggcgggccgaggaggaggaagatcaggatgaaggcatcaaacaggccatgaaccattttgttcaggagaatgggaccctacgggccaagcccacgggcaatggcatctacatcaatgggcggggacacctggtctgacccaggcctgcctcccttccctaggcctggctccttctgttgacatgggagattttagctcatcttgggggcctccttaaacacccccatttcttgcggaagatgctccccatcccactgactgcttgacctttacctccaacccttctgttcatcgggagggctccaccaattgagtctctcccaccatgcatgcaggtcactgtgtgtgtgcatgtgtgcctgtgtgagtgttgactgactgtgtgtgtgtggaggggtgactgtccgtggaggggtgactgtgtccgtggtgtgtattatgctgtcatatcagagtcaagtgaactgtggtgtatgtgccacgggatttgagtggttgcgtgggcaacactgtcagggtttggcgtgtgtgtcatgtggctgtgtgtgacctctgcctgaaaaagcaggtattttctcagaccccagagcagtattaatgatgcagaggttggaggagagaggtggagactgtggctcagacccaggtgtgcgggcatagctggagctggaatctgcctccggtgtgagggaacctgtctcctaccacttcggagccatgggggcaagtgtgaagcagccagtccctgggtcagccagaggcttgaactgttacagaagccctctgccctctggtggcctctgggcctgctgcatgtacatattttctgtaaatatacatgcgccgggagcttcttgcaggaatactgctccgaatcacttttaatttttttcttttttttttcttgccctttccattagttgtattttttatttatttttatttttatttttttttagagatggagtctcactatgttgctcaggctggccttgaactcctgggctcaagcaatcctcctgcctcagcctccctagtagctgggactttaagtgtacaccactgtgcctgctttgaatcctttacgaagag

SEQ ID NO: 43576 - DNA, 1005 bp, Homo Sapiens
gaatctgagacccctgggcagcttctgcatgctgattatgaagagtcactgagtggcaagaatatgttcccccagccatcttttggacccaatccattcttaggcccagttcctattgcacctcctttctttcctcatgtttggcatgggtacccttttcagggattcatagaaaatccagtaatgaggcagaatattgtcctgccctctgatgagaaaggagaattggatctgtctctggaaaatctggatctgtctaaagattgtggttcagtttccacagtagatgagtttccagcagccaggagtgaacatgtacattctctccctgaagcaagtgtgagcagtaagccagacgaaggccggacagagcaatcttcccagacacgaaaggcagatatggcattggcttccatccctcctgtagcagagggaaaggctcaccctcccactcagattctaaacagagagagagaggtgcctgttgaacttgaacctaaaaggaccattcaaagtctgaaagaaaaaacagaaaaagtaaaagatcctaagactgctgctgatgtggtcagccctggggccaactctgtggatagcagagtgcaaagaccaaaagaagagagttcagaaaatgaaaatgaagtgtcaattttgagaagtggtagatccaagcagttctataatcaaacttatgggagcaggaagtacaaaagtgattggggctattctggtaggggcggatatcaacatgtgagaagtgaggagtcctggaaaggacagccaagcagaagtcgggatgaaggttatcagtaccatcgaaatgtcagagggcgaccatttaggggagataggaggagatcagggatgggagatggccataggggacagcacgcttgacggttgttgccgaagtattttctaacagaaactcttaggtggaatgtttctgaaggctttaaaaaactacaataaagtaaaaaccccattaaaaaaaaaaaaaaaaaa

SEQ ID NO: 43577 - DNA, 650 bp, Homo Sapiens
ggaagcgcgcccgaacgaagccgcggcccgggcacagccatggcccggcgggcggggggcgctcggatgttcggcagcctcctgctcttcgccctgctcgctgccggcgtcgccccgctcagctgggatctcccggagccccgcagccgagccagcaagatccgagtgcactcgcgaggcaacctctgggccaccggtcacttcatgggcaagaagagtctggagccttccagcccatccccattggggacagctccccacacctccctgagggaccagcgactgcagctgagtcatgatctgctcggaatcctcctgctaaagaaggctctgggcgtgagcctcagccgccccgcaccccaaatccagtacaggaggctgctggtacaaatactgcagaaatgacaccaataatggggcagacacaacagcgtggcttagattgtgcccacccagggaaggtgctgaatgggaccctgttgatggccccatctggatgtaaatcctgagctcaaatctctgttactccattactgtgatttctggctgggtcaccagaaatatcgctgatgcagacacagattatgttcctgctgtatttcctgcttccctgttgaattggtgaataaaaccttgctctttacatacaa

SEQ ID NO: 43578 - DNA, 1059 bp, Homo Sapiens
gagtttgccgagctgcccagccaggctgttcccacagacgcccaccaccccactcctcaccaccagcagcctgcgtacccaggccccaaggagtatctgcttcccaaggcccccctactccactcagtgtccagggacccctccccctttgcccagagctccaactgctacaacagatccatcaagcaagagccagtagacccgctgacccaggctgagcctgtgcccagagacgctggcaagatgggcaagacacctctgtccgaggtgtctcagaatggaggacccagtcacctttggggacagtactcaggaggcccaagcatgtcccccaagaggactaacggtgtgggtggcagctggggtgtgttctcgtctggggagagtcctgccatcgtccctgacaagctcagttcctttggggccagctgcctggccccttcccacttcacagatggccagtgggggctgttccccggtgaggggcagcaggcagcttcccactctggaggacggctgcgaggcaaaccgtggagcccctgcaagtttgggaacagcacctcggccttggctgggcccagcctgactgagaagccgtgggcgctgggggcaggggatttcaactcggccctgaaaggtagtcctgggttccaagacaagctgtggaaccccatgaaaggagaggagggcaggattccagccgcaggggccagccagctggacagggcctggcagtcctttgtggtcttctaccagcacaagaacctcaaccagcccaaccacgggctggccctctgggaagccaagatgaagcagctggcggagagggcacgggcacggcaggaggaggctgcccggctgggcctgggccagcaggaggccaagctctacgggaagaagcgcaagtgggggggcactgtggttgctgagccccagcagaaagagaagaagggggtcgtccccacccggcaggcactggctgtgcccacagactcggcggtcaccgtgtcctcctatgcctacacgaaggtcactggcccctacagccgctggatctag

SEQ ID NO: 43579 - DNA, 1932 bp, Homo Sapiens
atgctgctgccctgccactgggtgttggatgccaccttcagtgatggcagtctaggccagtgggtgaaaaacacatgtgccacatatgccttatccccagtggtgctcccacctcagccccagccccggaaaaaggccacagataaggactattctgcctttcatcttgggcatctgagggaggtgaggctttttctgaggggtggaacttcagatcagcgaatggatagtcttgtcctctgccccacatacttcaagctctggaggaccctatcagggtccccaggtttacaactttctgacttgcattttgggagtcagccggaggggaagttttctctgaggagggcagtttcagttaagcagagggaggaaccccaggactggccactcaacgagaagagaactctgtggaaggacagtgaccttccaacatggaggagaggcacaggctacaccctttcccttcctgccgtcagccctggaaaaaggttgtggggggagaaagcggggagcttgccagagagcgagcccttgttcacttatacactggatgaaaaggtggacaagttggtgcagtttcttctcctcaaatatcaagcaaaagagcctctcacaagagcagagatgcagatgaatgtcatcaacacatacacgggctactttcctatgatcttcaggaaagcccgtgagttcatagagattctttttggcatttccctgacagaagtggaccccgaccatttctatgtctttgtaaacacattagacctcacctgtgaggggagtctgagtgatgagcagggcatgccccagaaccgcctcctgattcttattctgagtgtgatcttcataaagggcaactgtgcatctgaggaggtcatctgggaagtgctgaatgcaatagggccctggtcagccttggcagggttcgcggatgtgctttcccgacttgcactgtgggagtctgaaggacctgaagcattttgcgaggagtctggactcaggtcagcagagggaagcgtcttagacctggccaatcctcaaggacttgcaggccacagacaggaagatggccgccgagggctgaccgaggcgtccccacaacagaagaagggaggagaagatgaggatatgcctgctgctgggatgccacctcttccccagagtcctcctgagattcctccccagggtcctcccaagatctctccccagggtcctccgcagagtcctccccagagtcctctagactcctgctcatcccctcttttgtggacccgattggatgaggagtccagcagtgaagaggaggatacagctacttggcatgccttgccagaaagtgaatccttgcccaggtatgccctggatgaaaaggtggctgagttggtgcagtttcttctcctcaaatatcaaacaaaagagcctgtcacaaaggcagagatgctgacgactgtcatcaagaagtataaggactattttcccatgatcttcgggaaagcccatgagttcatagagctaatttttggcattgccctgactgatatggaccccgacaaccactcctatttctttgaagacacattagacctcacctatgagggaagcctgattgatgaccagggcatgcccaagaactgtctcctgattcttattctcagtatgatcttcataaagggcagctgtgtccccgaggaggtcatctgggaagtgttgagtgcaatagggcccattcagaggccagcaagagaagtcttagagtttttatccaagctatccagtatcatccctagtgcctttccatcctggtacatggatgctttgaaagatatggaagacagagcccaggccataattgacaccacagatgatgctactgccatggccagtgcaagccccagtgtcatgtccaccaacttctgtcctgagtga

SEQ ID NO: 43580 - DNA, 1146 bp, Homo Sapiens
atgcgtgactggagcactttaggcaaactccttgacaaggttcaagcctacttaactgctggagggaaggtgtggctgtcagtacttttcattttccaaatcctgctgctgaagacagtggttgagtcagcctggggagatgagcagtctgcctttcgttgtaacactcagcaacctggttgtgaaaatgtctgctatgacaagtctttcccaatctctcatgtgcgcttctgggtcctgcagatcatatttgtgtctgtacccatactcttgtacctggctcatgtgttctatgtgatgcaaaaggaagagaaactgaacaagaaagaggaggaactcaaggttgcccaaactgatggtgtcaatgtggagatgcacttgaagcagattgagataaagaagttcaagtatggtattgaagagcatggtaaggtgaaaatgcaaggggggttgctgcgaacctacatcatcagtatcctcttcaagtctatctttgaggtgaccttgctgatccagtggtacatctatggattcagcttgagtgctgttcacacttgcaaaagagatccctgcccacatcaggtggactgcttcctctcttgccccatggagaaaaccatcttcatcatcttcatgctggtggtgtccttggtgtccctggccttgaatatcattgaactcttctacgttttcttcaagggcgttaaggattgggttaagggaaagagcgacccttaccatgcgaccactggcccgctgagccccgccaaagactgtgggtctcaaaaatatgcttatttcaatggctgctcctcaccaactgctcccctctcgcctatgtctcttcctgggtacaagctggttaatggcgacagaaacaattcttcttgccgcaattacgacaagcaagcaagtgagcaaaactgggctaattacagtgcagaacaaaatcgaatggggcaggcgggaagcaccatctctaactcccacgcacagccttttgatttccccgatgataaccagaattctaaaaaactagctgctggacatgaactacagccactagccattgtggaccagcaaccttcaagcagagccagcagtcgtgccagcagcaggcctcagcctgatgacctggagatctag

SEQ ID NO: 43581 - DNA, 951 bp, Homo Sapiens
atgcctggtcagaactacagaaccatatctgaatttatcctctctggcttctcagccttcccccagcagctcctgcctgtcttgttcctgctgtacctcctgatgttcctgttcacattgcttggcaaccttcttatcatggccacagtttggattgaacgcagactccacacacccatgtacctcttcttgtgtgccctctccatctctgagattctgttcactgttgccatcacccctcgcatgctggctgatctgctcttcacccatcgttccatcacctttgtggcttgtgccattcagatgttcttctccttcatgtttggcttcactcactccttccttctcatggtcatgggctatgatcactacgtgaccatctgccacccactgcattacaacatgctaatgagtccccgtggctgtgcccatcttgtggcctggacctgggctggtggctcggtcatggggatgatggtgacaatgatggtttttcacctcactttctgtgggtctaatgtgatccaccattttctctgtcatgtgctttccctcttgaagttggcctgtgggagcaagacatcatctgtcatcatgggtgtgatgctggtgtgtgtcacagccctgataggctgtttgttcctcatcatcctctcctttgtcttcattgtggctgccatcttgaggattccttctgctgagggccggcacaagactttctccacttgtgtatcccacctcactgtggtggtcatgcactatagttttgcctcccttatctacctcaaacccaagggcctccattctatgtacagtgatgccttgatggccaccacctatactgtcttcacccccttcctcagcccaatcattttcagtctaaggaacaaggagctgaagaatgccataaataaaaacttttgcagaaggttctgccctctaagctcctaa

SEQ ID NO: 43582 - DNA, 307 bp, Homo Sapiens
aaggctgcctgagataacccactgccttacccaaaaggtctagactctagagcccttttgggcagtctccatggtcaggtccaactgaaagaggagtcattttgagactgtgaggtggtcgctgcaatctgctcctctgtctccattccaaaaagagactgtgtgtaagagtctgctctcttggggattggaataccatctggtggaggttatttggatgctgaaacattttggcatgcttcccaatccactgcagactcatgaatgattcacagaaaaataaagaacactgagcaatacagcccaa

SEQ ID NO: 43583 - DNA, 456 bp, Homo Sapiens
atgacgcccgaggagaacgcgggtaccaaactcttgctgcagggttttgagagccgcttcctagtggcgcgcacactgcgctccttcccctggcagagcttagaggcaaagttaagagactcatcagattctgagctgctgcaggatattttgcagaagactgtgaggcatcctgtgtgtgtgaagcacccgccgtcagtcaagtatgcctggtgctttctctcagaactcatcaaaaagccctcgggaggctcggtcacactctccgaaagcatggccatcatctcccacagcaccacgggtctggtcacatgggatgccgccctctacattgcagaatgggccatcgagaacccggcagccttcactcacagatgtgctgtattgcccagaagccattgtgtcactggtcagggtcctgcggaggctggctgcctgccgggagcaccagcgggc

SEQ ID NO: 43584 - DNA, 437 bp, Homo Sapiens
agatgggtggaggcactgggccacctcagagggccagtgtcttgctgaggggccggagcagtcctgtgcctgcagcctccggagccatgggaacagggctgcgaagtcagtccttgcgagagccccgaccctcctatggaaagctgcaggagccctgggggaggccccaggagggccaactccgcagggcgctaagcctcagacaggggcaagagaagtccaggtcccagggcctcgagagaggcacagaagggccagatgccactgcccaggagcgggtgccggggagcctgggggacacagagcagctgatccaagcccagcgaagaggcagccggtggtggctgaggcggtaccaacagcaggtaagaagaaggtgggagagctttgtcgccatcttccccagcgtgactctgagtcagccggcctccccgtag

SEQ ID NO: 43585 - DNA, 198 bp, Homo Sapiens
atgtgctactacagcaactactatggtggtctgcgttatggctatggagtcctgggcggtggctatggctgtggctgtggttatggccatggctatggaggcctgggctgtggctatggccgtggctatggtggctatggatatggctgctgccgcccatcttgctatggaagatactggtcctgtggcttctactga

SEQ ID NO: 43586 - DNA, 192 bp, Homo Sapiens
atgctctgcgacaacttccccggggctgtcttcccaggatgctactggggcagctatggctacccgctgggatatagcgttggctgtggctatggcagcacctactctccagtgggctatggcttcggctatggctacaacggctgtggggctttcggctacaggagatactcgccatttgctctctactga

SEQ ID NO: 43587 - DNA, 906 bp, Homo Sapiens
tttttttcccacaggtttcgttatattatcctgaagcagaagtttttagaagctttatgtgttaacaacgcgatgtcagcagaagatgagccccagcatctggaatttaccatgcaagaagctgtgcaatgtttacatgctctagaagaatactgtccttctaaagatgactatagtaagctctgtttgcttttgactttgcctcgtctgaccaatcatgccgagtttaaggactggaatcccagcaccgcacgagttcactgttttgaagaggcttgtgtcatggttgcagaattcatccctgctgataggaagctaagtgaagctggttttaaggctagtaacaatcgtttatttcagcttgtaatgaaaggcctgctttatgaatgctgtgtagaattttgtcagagtaaagcaactggagaagaaattacagaaagcgaagtgcttcttggcatcgacctcttatgtggtaatggttgtgatgatttggatctgagtttactgtcatggcttcagaatcttccatcttctgtcttctcttgtgcttttgaacagaaaatgcttaatattcatgttgacaaacttctgaaacctacaaaagctgcatatgctgatcttttgactcctcttatcagcaaactctctccctatccatcatccccaatgagaagacctcaatcagctgatgcctatatgacccgctctctgaatcctgctttagatggcctcacctgtggactaaccagtcatgataagagaatttcagaccttggaaacaaaacttctccaatgtcacactcctttgctaacttccattatccaggggtacaaaacctcagtagaagtctcatgcttgagaatacagaatgtcacagtatttacgaagaatcccctgagcggtaa

SEQ ID NO: 43588 - DNA, 435 bp, Homo Sapiens
atgaaaaagaatgaacaaagcctccaagaaatatgggactatgtaaaaagaccgaacctactattgattggagtacctgaaggagatcgagcaaatggaaatgagctggaaaacactcttcaggctgggactacacagccaaggttttatatacaggagaacttccccaacctagcaagacaggccaacatgcaaattcaggaaatacagagaacaccactaagatactcctcgagaagatcacccccaagacacataatcatcagattctccaaggtcaaaataaagaaaaaaatattaagggcagccagagagaaaggtcaggttacctacaatagtttcatcagactaacagcagatctctctgcagaaaccctacaagccagaagagagtgggggccaatattcaacatttttaaagaacataatttttaa

SEQ ID NO: 43589 - DNA, 3016 bp, Homo Sapiens
caaggaggctgctgattgtggcccacagcctcatctgaacgccaggagaccaggataccgaggcaccggatcccctctctgtgccctggggagccccagtgctgcccagtcaccccagggctgaggtctgcgtccctagtggtgcaaggcctggtaggaccacggggcagggaatgtgagcgccatctgagctcacggtgtcctgagtcgcggcttcgtgactttggcaggggcctccggaccagtgaccccagtcaaacccagagggtcttgggcggcagcgacgaaggaggtattcaggctccaggccaggtggggccggacgcccccagccatccaccatggtggtggcacaccccaccgccactgccaccaccacgcccactgccactgtcacggccaccgttgtgatgaccacggccaccatggacctgcgggactggctgttcctctgctacgggctcatcgccttcctgacggaggtcatcgacagcaccacctgcccctcggtgtgccgctgcgacaacggcttcatctactgcaacgaccggggactcacatccatccccgcagatatccctgatgatgccaccaccctctacctgcagaacaaccagatcaacaacgccggcatcccccaggacctcaagaccaaggtcaacgtgcaggtcatctacctatacgagaatgacctggatgagttccccatcaacctgccccgctccctccgggagctgcacctgcaggacaacaatgtgcgcaccattgccagggactcgctggcccgcatcccgctgctggagaagctgcacctggatgacaactccgtgtccaccgtcagcattgaggaggacgccttcgccgacagcaaacagctcaagctgctcttcctgagccggaaccacctgagcagcatcccctcggggctgccgcacacgctggaggagctgcggctggatgacaaccgcatctccaccatcccgctgcatgccttcaagggcctcaacagcctgcggcgcctggtgctggacggtaacctgctggccaaccagcgcatcgccgacgacaccttcagccgcctacagaacctcacagagctctcgctggtgcgcaattcgctggccgcgccacccctcaacctgcccagcgcccacctgcagaagctctacctgcaggacaatgccatcagccacatcccctacaacacgctggccaagatgcgtgagctggagcggctggacctgtccaacaacaacctgaccacgctgccccgcggcctgttcgacgacctggggaacctggcccagctgctgctcaggaacaacccttggttttgtggctgcaacctcatgtggctgcgggactgggtgaaggcacgggcggccgtggtcaacgtgcggggcctcatgtgccagggccctgagaaggtccggggcatggccatcaaggacattaccagcgagatggacgagtgttttgagacggggccgcagggcggcgtggccaatgcggctgccaagaccacggccagcaaccacgcctctgccaccacgccccagggttccctgtttaccctcaaggccaaaaggccagggctgcgcctccccgactccaacattgactaccccatggccacgggtgatggcgccaagaccctggccatccacgtgaaggccctgacggcagactccatccgcatcacgtggaaggccacgctccccgcctcctctttccggctcagttggctgcgcctgggccacagcccagccgtgggctccatcacggagaccttggtgcagggggacaagacagagtacctgctgacagccctggagcccaagtccacctacatcatctgcatggtcaccatggagaccagcaatgcctacgtagctgatgagacacccgtgtgtgccaaggcagagacagccgacagctatggccctaccaccacactcaaccaggagcagaacgctggccccatggcgagcctgcccctggcgggcatcatcggcggggcagtggctctggtcttcctcttcctggtcctgggggccatctgctggtacgtgcaccaggctggcgagctgctgacccgggagagggcctacaaccggggcagcaggaaaaaggatgactatatggagtcagggaccaagaaggataactccatcctggaaatccgcggccctgggctgcagatgctgcccatcaacccgtaccgcgccaaagaagagtacgtggtccacactatcttcccctccaacggcagcagcctctgcaaggccacacacaccattggctacggcaccacgcggggctaccgggacggcggcatccccgacatagactactcctacacatgatgcccgcccacccgggctgccccgcctcagccccagctgccctggcgtggccatgtggctttgcccagcctgctgcaatccaagagagcaaggaagagaaattccatgggtgactttcctccgcagaaagcaaagtttggggagggctgacgattttgtagaacacaacagtgacaattttttttaaaagaatagaaggcaggagggggaattcgacattgttgaagacataatttataccaagttatgccagttggggagggaaggactaaaaataatattgcaggcagggctgggttgggttttttttttttcccccctgaactggaaggatactacctgtacaacatctgtggacacctcatgctctgttcaaggccatcacaaaggaaccgccagggagaagcagccggctctcaaagctcccacgcagctctcccgccactggccactcgctggcgacccgatggaaggttttcaggctcctcacaaaggagagagggaagaaaagatcttttgccctggagatatggtcctgaaatctctcccctggcttattccataccatttcccttgcagatttgcagaaacatggcatctttcactgcattctttgaacaatcatgtagtcgattaaaaaaaaaaaacaa

SEQ ID NO: 43590 - DNA, 1059 bp, Homo Sapiens
atgggcaaccaactggaccgcatcacccacctcaactacagcgagttgcccacaggggacccgtcggggattgaaaaggacgaactgcgggtcggggttgcctacttcttctcggatgatgaggaagacctggacgaacgcgggcagcccgacaagtttggcgtgaaggcccccccgggttgcaccccctgcccggagagccccagccgccaccaccaccacctgctgcaccagctggtcctcaacgagactcagttttccgcctttcggggccaggaatgcatcttttccaaagtgagcggtggccctcagggcgccgacctaagcgtctacgcggtcaccgcgctgccagcgctctgcgaacccggcgacctgctggagctgctgtggctgcagcccgcgccggagccgcccgcgcccgccccgcactgggccgcgaggagatctgctggacgaactcggagagcttcgccgcctggtgccgctttggcaagcgggagttcaaggcgggaggggaggtgccggcaggcacgcagcccccgcagcagcagtactatctcaaggtgcacctgggagagaacaaggtccacaccgccaggtttcacagcctggaagacctcatccgcgagaagcgccgtatcgacgccagcggccgcctgcgagtgctccaggagctcgccgacctcgtggacgacaaggagtagccgcctaggggctgccggcccctctgcctcccccgcacctcgctcccttcccttccccgcacccggacttcgcagtcagcggttctcaacctctgccccgccccgccacgcgcgtccgccgccggtggcccgggcccgggctgcacccccgcatccccaagccagcggcaggaagtctcaggaactgccccagggccgaaagggcgccgctgcgagcgcctggctgacagccacagcggtggtgacggtgctgggagaccccgcgtgcgctttccccttgagatgtaaaccgggaacggggaaggggctgaggggagaaaggacatggccttccccgcgagtccatggccagtga

SEQ ID NO: 43591 - DNA, 1899 bp, Homo Sapiens
atgaccaacgaagaacctcttcccaagaaggttcgattgagtgaaacagacttcaaagttatggcaagagatgagttaattctaagatggaaacaatatgaagcatatgtacaagctttggagggcaagtacacagatcttaactctaatgatgtaactggcctaagagagtctgaagaaaaactaaagcaacaacagcaggagtctgcacgcagggaaaacatccttgtaatgcgactagcaaccaaggaacaagagatgcaagagtgtactactcaaatccagtacctcaagcaagtccagcagccgagcgttgcccaactgagatcaacaatggtagacccagcgatcaacttgtttttcctaaaaatgaaaggtgaactggaacagactaaagacaaactggaacaagcccaaaatgaactgagtgcctggaagtttacgcctgatagccaaacagggaaaaagttaatggcgaagtgtcgaatgcttatccaggagaatcaagagcttggaaggcagctgtcccagggacgtattgcacaacttgaagcagagttggctttacagaagaaatacagtgaggagcttaaaagcagtcaggatgaactgaatgacttcatcatccagcttgatgaagaagtagagggtatgcagagtaccattctagttctgcagcagcagctgaaggagacacgccagcagttggctcagtaccagcagcagcagtctcaggcctctgccccaagtaccagcaggactacagcttctgaacctgtagaacagtcagaggccacaagtaaagactgcagtcgtctgacaaacggaccaagtaatggtagctcctcccgccagaggacgtctgggtctggatttcacagggagggcaacacaaccgaagatgactttccttcttctccagggaatggtaataagtcctccaacagctcagaggagagaactggcagaggaggtagtggttacgtaaatcaactcagtgcggggtatgaaagtgtagactctcccacgggcagtgaaaactctctcacacaccaatcaaatgacacagactccagtcatgaccctcaagaggagaaagcagtgagtgggaaaggtaatcgaactgtgggttcccgccacgttcagaatggcttggactcaagtgtaaatgtacagggttcagttttgtaatattttttcagcaaatttttatacagtgtcatttaatttgggagaggatactgtccagaaaattaatgcatacttttgtcacaatttgcctttttgtgggtgtacgttttggtttttttttgttgttttttttctttgttttttttttcttttctttttttttttttttttttttttttgcttcaatacttctgccgctttggaaattgtaacagttaattactttgaatgttgctaaaaggacattttgtgtagggtcaagttatttttatatgagttaatgtgaaattgtaaatggaaatttttccttaaaatacaacacaatgatgtctgtataaatctgtctgtttagaatctgtgctgtgtaagggcattcgtactcatgctgttactgtacttatgcaccattcagacttgttagagtagatgtgggtttatgactgccaagtttgcccagtacagtagttttttatcactaaaagttggactcattgatggagtcctgtagtagtttcagtgttagatacagttttttccaccatacatctgtgcattttctctttaggtgactgtttaagaaatttgtgtgcatagttactcagtttttatgaactgttgtatcctgttaatgcatattgctctgtgactccagtatatcttacctgtactgaccaaacctaaataaagatttttattgtaactccttaa

SEQ ID NO: 43592 - DNA, 291 bp, Homo Sapiens
atgaacaatctttacatcgggaaccttagccctgcggtcaccgccgacgacctctggcagctctttggggacaggaagctgccccccaccggacaggtcctgctcaagtccggctatgccttcgtggactacccctacaagaactgggccatccgcgccatcgagaccctctcgggtaaagtggaattgcatgggaaaatcatggaagttgattactcagtctctaaaaagctaaggaggagaaaaattcagattcgaaacatccctcctcacctccagtgggaggtgttg

SEQ ID NO: 43593 - DNA, 546 bp, Homo Sapiens
atgcatccctcacggacagcattcacagatgcacactatcctacaccattctcagacatgcgttcttccagacagccttcagaaacacactcacagacattacttgcctgctcagatatagagcccctcatagacagcgttccagaacataccattgcacacttgcttcacacacacacacacacacatccccctctgctgttggtgctcccagtcctgggactgtcaggatggctgatcagtgaagactgtcctagtggctggccacctccacacccactccacacacccacagccctgcctctgacagtcatcagtgcaaggccccagaagccttgcctggggactagacacagttgtcacagaatggctgtgtctcagagttccagagacaagccaccatcccccataccccatgcacctgactcctgcacccctgacccatgcaattcccaactcctctgctgccctctgatcaccccactgcctgactctcatacccctaaaacccctgaccgtgcggcccctgacttctatgccctctag

SEQ ID NO: 43594 - DNA, 2550 bp, Homo Sapiens
agtgcactagccaccaccgccgccgccgccgctccgccagacctgctgccagcttgcccggtccagccctgagagagcctcgaacgccagctgcgagggtcatgagccagagagccccggggcgccgcgcggagagcaagcggagatagcgactttgcgccccccagccctcgccttcttgcatcgcgttccccgcatcctcgggtccttctgtcctttccgctgtccccaccgccgccatggccaccttgctccgcagcaagctgtccaacgtggccacgtccgtgtccaacaagtcccaggccaagatgagcggcatgttcgccaggatgggttttcaggcggccacggatgaggaggcggtgggcttcgcgcattgcgacgacctcgactttgagcaccgccagggcctgcagatggacatcctgaaagccgagggagagccctgcggggacgagggcgctgaagcgcccgtcgagggagacatccattatcagcgaggcagcggagctcctctgccgccctccggctccaaggaccaggtgggaggtggtggcgaattcgggggccacgacaagcccaaaatcacggcgtgggaggcaggctggaacgtgaccaacgccatccagggcatgttcgtgctgggcctaccctacgccatcctgcacggcggctacctggggttgtttctcatcatcttcgccgccgttgtgtgctgctacaccggcaagatcctcatcgcgtgcctgtacgaggagaatgaagacggcgaggtggtgcgcgtgcgggactcgtacgtggccatagccaacgcctgctgcgccccgcgcttcccaacgctgggcggccgagtggtgaacgtagcgcagatcatcgagctggtgatgacgtgcatcctgtacgtggtggtgagtggcaacctcatgtacaacagcttcccggggctgcccgtgtcgcagaagtcctggtccattatcgccacggccgtgctgctgccttgcgccttccttaagaacctcaaggccgtgtccaagttcagtctgctgtgcactctggcccacttcgtcatcaatatcctggtcatagcctactgtctatcgcgggcgcgcgactgggcctgggagaaggtcaagttctacatcgacgtcaagaagttccccatctccattggcatcatcgtgttcagctacacgtctcagatcttcctgccttcgctggagggcaatatgcagcagcccagcgagttccactgcatgatgaactggacgcacatcgcagcctgcgtgctcaagggcctcttcgcgctcgtcgcctacctcacctgggccgacgagaccaaggaggtcatcacggataacctgcccggctccatccgcgccgtggtcaacatctttctggtggccaaggcgctgttgtcctatcctctgccattctttgccgctgtcgaggtgctggagaagtcgctcttccaggaaggcagccgcgcctttttcccggcctgctacagcggcgacgggcgcctgaagtcctgggggctgacgctgcgctgcgcgctcgtcgtcttcacgctgctcatggccatttatgtgccgcacttcgcgctgctcatgggcctcaccggcagcctcacgggcgccggcctctgtttcttgctgcccagcctctttcacctgcgcctgctctggcgcaagctgctgtggcaccaagtcttcttcgacgtcgccatcttcgtcatcggcggcatctgcagcgtgtccggcttcgtgcactccctcgagggcctcatcgaagcctaccgaaccaacgcggaggactagggcgcaagggcgagcccccgccgcgcttctgcgctctctcccttctcccctcaccccgcccccaccagcccagtgcgccctgccgccgcgcttgggaggccaagctttaaacatctctggttcctagtttctgattattcggggatgggggggatgggaggggacagggattcacgatccatcgcgtctgcgtttctgttgtcctttcttttccacaacaccctggttttggggggaggcggggtgcatttgcgggcagggttctctgtccttccaagtggggccccgacactttggttccagtcatcgagggggttgggaagggagggagagggggcgcagctcgcaggcgtggcaacttgaccttgggggaatatttcacatccatccagagctcggaatctacagcgtccagccatttccagcaagagcgcttcccattccggagacgtttcaaccctgcagcgggaaaggctgactgggaaatccattttgggtgggcaatttccttcaacgaagccggaaggcgagaagccgcggcggggccagcttgcctgccggttttcaggaatctaaactctcatcttgtgcaatttatcaggtgtggaactgttctactgtgcgtgtggtgtgctcgtggtgaataagatgaaatgtatatcagaaaaaaatctatctctaatttagagtgcggtacataattatatccgcaaataaagaagagacaaaggct

SEQ ID NO: 43595 - DNA, 348 bp, Homo Sapiens
atgacaaagaaaagaaggaacaatggtcgtgccaaaaagggccgcggccacgtgcagcctattcgctgcactaactgtgcccgatgcgtgcccaaggacaaggccattaagacattcgtcattcgaaacatagtgaaggccgcagcagtcagggacatttctgaagcgagcgtcttcgatgcctatgtgcttcccaagctgtatgtgaagctacattactgtgtgagttgtgcaattcacagcaaagtagtcaggaatcgatctcgtgaagcccgcaaggaccgaacacccccatcccgatttagacctgcgggtgctgccccacgtcccccaccaaagcccatgtaa

SEQ ID NO: 43596 - DNA, 846 bp, Homo Sapiens
atgtccagagcccttgctgtcctgcaaatgaaggaggaggatgtccttaagttccttgcagtaggaacccacttagtggcaccaatcttgacttctatggaacagtacatctataaaaggaaaagtgatggcatctacatcataaatctgaagaggacctgggagaagcttctgctggcagctcatgccattgttgccattgaaaaccctgctgatgccagtgttatatcccctaggaatactggccagagggttgtgctgaagtttgctgctgccaccagagccactccagttgctggccacttcactcctggaaccttcactaaccagatccaggctttccgggagccacagctttttgtggttactgaccccagggctgaccaccagcctcaaacagaggcatcttatgttaacctacctaccattgctctgtgtaatacagattctcctctgcagtatgtggacattgccatcccatgcaacaacaagggagctcactcagtgggtttgatgtggtggatgctggctcaggaagttctgcacaaaggtggcaccatttcctgtgaacacctgtgggagctcatgcctgatctctacttagatcctgaagagattgaaaaagaagagcaagctgctactgaaaaggctgtgacaaaggaggaatttcagggtgaatggactgctccagctcctgagttcactgttactcagcctgaggttgcagactggtctgaagggcaggtatcctctgtgcctattcagcagttccctactgaagactggagcactcagcctgccacggaagactggtctgcagctcccactgttcagaccactgaatgg

SEQ ID NO: 43597 - DNA, 2443 bp, Homo Sapiens
attctttctctcgtggctccccagctgtatcacacaagacatttggcattagcctggaagaggtcctggtgaacgagtttacccgccgcaagcatcttgaactgacagccacgatgcaggttgaagaagccaccggtcaggctgcgggccgtcgtcggggaaacgtggtgcgaagggtgtttggccgcatccggcgctttttcagtcgcaggcggaatgagcccaccttgccccgggagttcactcgccgtgggcgtcgaggtgcagtgtctgtggatagtctggctgagctggaagacggagccctgctgctgcagaccctgcagctttcaaaaatttcctttccaattggccaacgacttctgggatccaaaaggaagatgagtctcaatccgattgcgaaacaaatcccccaggttgttgaggcttgctgccaattcattgaaaaacatggcttaagcgcagtggggatttttacccttgaatactccgtgcagcgagtgcgtcagctccgtgaagaatttgatcaaggtctggatgtagtgctggatgacaatcagaatgtgcatgatgtggctgcactcctcaaggagtttttccgtgacatgaaggattctctgctgccagatgatctgtacatgtcattcctcctgacagcaactttaaagccccaggatcagctttctgccctgcagttgctggtctacctgatgccaccctgccacagtgataccctggagcgtctgctgaaggccctgcataaaatcactgagaactgcgaggactcaattggcattgatggacagttggtcccaggcaaccgtatgacttccactaacttggccttggtgtttggatctgctctcctgaaaaaaggaaagtttggcaagagagagtccaggaaaacaaagctggggattgatcactatgttgcttctgtcaatgtggtccgtgccatgattgataactgggatgtcctcttccaggtgcctccccatattcagaggcaggttgctaagcgcgtgtggaagtccagcccggaagcacttgattttatcagacgcaggaacttgaggaagatccagagtgcacgcataaagatggaagaggatgcactactttctgatccagtggaaacctctgctgaagcccgggctgctgtccttgctcaaagcaagccttctgatgaaggttcctctgaggagccagctgtgccttccggcactgcccgttcccatgacgatgaggaaggagcgggtaaccctcccattccggagcaagaccgcccattgctccgtgtgccccgggagaaggaggccaaaactggcgtcagctacttctttccttagatgtttttccttctataaggtgccagacaggggaaaagggtgggggtacatctgggatgtcacaggaaacattaaggagagagttgaaggtaaagatctgaaggtaagaaggagttccacctgatgctcgggtcaggatgagaattccaaacacactgccagccccttcactggggatgcttggtctcttctgctggtaaaagcagagatgtttctgtgtcatgcccaagctccccggtgctaccttgcctttctcttttacccctgatcttggctttctctctctctctgcagactttcctttaattgatgtgacatttgtggtaaacacctttcccagggaacctcacaaatcttgagatgctttcccttccccagatgggattgcatgatttccctgactttcctaccctcctccagagagctcagttggaaaggccctcaagaggcatgctagaacgttaggtcagcctactgacagctgacaaacaattaatgcgaaatcatgtcacaccaacccatagccgtgtccacgcagcaactccaccaccttaggatttccccctccaaattattcagaccaatggcttgccaaatggcctctcccaaaattctgtacagttttgctcaggtcacgccaacagggaaacctcaagtgtaggtctaattagtgtttctgggatccaaagttagaggaaaatttagattttattgcctggatctgctttaaagacaattggtgtttacaccctcttgtcagcaaaacagctagttaggtaaggacatatagttccaagtaggtaaagtcacttgattacaaatgttcttaactatcgtctctgtaattcctttatacaggacagtacaaaattgtgggacatgctctggtaacacacagatatgggttgcatatgatccagaattacagctgatattatggatgacaactgctaaggtccataaaatgaagactgtattgtattgagggatagaaattgatcatttaatgggtaacaactgctgagctcaaagatttgtgattgttaaaacttctctggcatttaatcattaataaacatctgtattgtgacagc

SEQ ID NO: 43598 - DNA, 1858 bp, Homo Sapiens
caagactgctcctctctgccgactacaacagattggagccatggctttggaacagaaccagtcaacagattattattatgaggaaaatgaaatgaatggcacttatgactacagtcaatatgaactgatctgtatcaaagaagatgtcagagaatttgcaaaagttttcctccctgtattcctcacaatagttttcgtcattggacttgcaggcaattccatggtagtggcaatttatgcctattacaagaaacagagaaccaaaacagatgtgtacatcctgaatttggctgtagcagatttactccttctattcactctgcctttttgggctgttaatgcagttcatgggtgggttttagggaaaataatgtgcaaaataacttcagccttgtacacactaaactttgtctctggaatgcagtttctggcttgtatcagcatagacagatatgtggcagtaactaaagtccccagccaatcaggagtgggaaaaccatgctggatcatctgtttctgtgtctggatggctgccatcttgctgagcataccccagctggttttttatacagtaaatgacaatgctaggtgcattcccattttcccccgctacctaggaacatcaatgaaagcattgattcaaatgctagagatctgcattggatttgtagtaccctttcttattatgggggtgtgctactttatcacagcaaggacactcatgaagatgccaaacattaaaatatctcgacccctaaaagttctgctcacagtcgttatagttttcattgtcactcaactgccttataacattgtcaagttctgccgagccatagacatcatctactccctgatcaccagctgcaacatgagcaaacgcatggacatcgccatccaagtcacagaaagcatcgcactctttcacagctgcctcaacccaatcctttatgtttttatgggagcatctttcaaaaactacgttatgaaagtggccaagaaatatgggtcctggagaagacagagacaaagtgtggaggagtttccttttgattctgagggtcctacagagccaaccagtacttttagcatttaaaggtaaaactgctctgccttttgcttggatacatatgaatgatgctttcccctcaaataaaacatctgcattattctgaaactcaaatctcagacgccgtggttgcaacttataataaagaatgggttgggggaagggggagaaataaaagccaagaagaggaaacaagataataaatgtacaaaacatgaaaattaaaatgaacaatataggaaaataattgtaacaggcataagtgaataacactctgctgtaacgaagaagagctttgtggtgataattttgtatcttggttgcagtggtgcttatacaaatctacacaagtgataaaatgacacagaactatatacacacattgtaccaatttcaatttcctggttttgacattatagtataattatgtaagatggaaccattggggaaaactgggtgaagggtacccaggaccactctgtaccatctttgtaacttcctgtgaatttataataatttcaaaataaaacaagttaaaaaaaaacccactatgctataagttaggccatctaaaacagattattaaagaggttcatgttaaaaggcatttataattatttttaattatctaagttttaatacaagaacgatttccctgcataattttagtacttgaataagtatgcagcagaactccaactatcttttttcctgttttttttaaatttgtaagtaattttataaaatccacctcctccaaaaaagcaataaaaaaaaaacaaactataataa

SEQ ID NO: 43599 - DNA, 249 bp, Homo Sapiens
ctgggcatatatgtcattgtggtcaactgctctgagggcctggactacaagtccatgggccgaatgtactcaggtctggcccagactggagcttggggctgctttgatgagtttaaccgcatcaacatcgaggtgctgtcagtggtggcccaccagatcctgtgcatcctgtctgccctggctgccggcctcacccatttccattttgatggctttgaaataaatctggtgtggtcctgtgggatcttc

SEQ ID NO: 43600 - DNA, 345 bp, Homo Sapiens
atggccagtacagtggtagcagttggactgaccattgctgctgcaggatttgcaggccgttatgttttgcaagccatgaagcatatggagcctcaagtaaaacaagtttttcaaagcctaccaaaatctgccttcagtggtggctattatagaggtgggtttgaacccaaaatgacaaaacgggaagcagcattaatactaggtgtaagccctactgccaataaagggaaaataagagatgctcacattatgctttcaaatcatcctgacaaaggaggatctccttatatagcagccaaaatcaatgaagctaaagatttactagaaggtcaagctaaaaaatga

SEQ ID NO: 43601 - DNA, 528 bp, Homo Sapiens
atgaccgtggagttcgaggagtgcgtcaaggactccccgcgcttcagggcgaccattgacgaggtggagacggacgtggtggagattgaggccaaactggacaagctggtgaagctgtgcagtggcatggtggaagccggtaaggcctacgtcagcaccagcaggcttttcgtgagcggcgtccgcgacctgtcccagcagtgccagggcgacaccgtcatctcggaatgtctgcagaggttcgctgacagcctacaggaggtggtgaactaccacatgatcctgtttgaccaggcccagaggtccgtgcggcagcagctccagagctttgtcaaagaggatgtgcggaagttcaaggagacaaagaagcagtttgacaaggtgcgggaggacctggagctgtccctggtgaggaacgcccaggccccgaggcaccggccccacgaggtggaggaagccaccggggccctcaccctcaccaggaagtgcttccgccacctggcactggactatgtgctccaggtcagc

SEQ ID NO: 43602 - DNA, 570 bp, Homo Sapiens
atgacaccccctggcaccagctacccttctcagaccccagtccagcccgctcccgacgtcgactacgattccgctacctcggctggcagcgaggttggggtgagccccagctgcaggcgcgtctgggctgcgccgctgcaaacgagttgcgcaccttgggcggctccgcacctgcacccgcacccgcggggctcagccccgaaggctgcagcttcgggggaggcgcggtcgccgaggtccagctggtggggcgagagacgtcgcccctcggaggatgctctcggaacttgggagaggaaggagggaagagaagaggggaaaggggccgtcgatgtttttgatgtctgtgctttaatggaggccaccaatattgagaagacggggttggccgaggcagcccgcacgctgctgcttgcgagcgctcgagtcaaagctagggccaaccgcggcttgtccgggtgccctaagggggcggacacttggtttagcaccgggacacagaatagccaccggggtaggaagatgcgttcactttgcttacctgttggcaagagggacatacaaaaataa

SEQ ID NO: 43603 - DNA, 699 bp, Homo Sapiens
atggccacagccgagtcccgtgcgctccagtttgccgagggcgccgcgtttccagcgtaccgggccccccacgccggcggggcgctcctgccgcccccgagccctgcggcagccctgctccctgcgccgcccgcgggccccggcccagcgacctttgcgggcttcctcggccgggaccccgggccggccccgccgccccccgccagcctgggctcgcctgcgccccccaaaggcgcggccgccccgtcggcgtcgcagcgccgcaagcgcacgtctttcagcgccgaacagctgcagctgctggagctcgtcttccgccggacccggtaccccgacatccacttgcgcgagcgcctggccgcgctcaccctgctccccgagtccaggatccaggtatggttccagaacaggcgtgccaagtctcggcgtcagagtgggaaatccttccaacctttggctaggccggagattatcctcaaccactgtgctcctggaactgaaacgaaatgtctgaagccccagctgcctcttgaggtagatgtgaactgcctgcccgaaccaaacggggttggagggggcatctctgactctagctcccaaggtcagaattttgaaacctgttcccctctctctgaagacattggttcaaagctggactcatgggaggaacacatcttttctgcctttggtaacttttga

SEQ ID NO: 43604 - DNA, 441 bp, Homo Sapiens
atggttcagccttggctttcgctagctacccaggagcgccagccccagcccattttgtgtgtggttctcagcttgcaggtggccaccaaagccaaccccccccactgccccgattgtgggtccctatgtttgaggttcccggtgatgtttcggggggcttctcccttcttacaagctcggtcatgcatatatttgatctggcgttgccaggcattctgtaagggagggcttttccagttcctggaaatggaactggaaaatgtggctggaaacattaatatggctggaaatggaatttgcctgcagccactacttttgaacccatcttccgggcaatcccttctgtcttgccggtggttggaaacttgcaggtggaagtcttccccacccagttctgcagcccttggctgccgagcaggaatgcctgagatgtctggctaa

SEQ ID NO: 43605 - DNA, 1551 bp, Homo Sapiens
gtcgatacggtagcttcgcgcttgctcacgaacttgcctgcctggctggcgcacccagcccctccttccattccttcttccccctctctgcagcctctgccagcccgcactgcgcatgctttctgacgccccctttggtccagcgtgggaggaggggatggaaatgaggtcccccctctatcctccacggccccatccaagccagggatgaaatttaacggcaagaagggcgcagttgacgcggcgtcaatgaactgagactaagtcaaaagccgggccctccaaccctatccccatcagcctggtcatcaccggcgtcacccccgccccgcgccctgcccctaggttcctgtgccagcaagatgctggagcgaggcgcggagtccgcggccggggctaccgatcctagtcccactggcaaggaaccagtgaccaaagaagctccccaccagggcccaccgcagaagcccagccagtcagctccagggcccaccgcgtccgcgggctcgcctccccggcctcgccggcggcccccgccccagcgcccgcaccgctgccccgactgtgacaaggccttctcgtacccgtccaagctggccacgcaccgcttagcacacggaggcgcccgaccccacccatgcccagactgccccaaggccttctcctacccctccaagctggcagcccaccgcctcacgcacagcggcgcccgcccgcacccgtgcccacactgcccgaagtcctttggccaccgctccaagctggcggctcacctctggacccacgcacccacccgcccctacccgtgccccgactgccccaagtccttctgctacccttccaagctggcggcccaccgccacacgcaccacgccaccgacgcccgcccctatccttgcccgcattgccccaaggctttctcatttccctccaagctggccgcccatcgcctatgtcacgaccccccaaccgcgcccggcagccaggcgactgcctggcaccgatgctccagctgcggccaggcctttggccagagacgcttactgctccttcatcaacgcagccaccaccaggtggagcacaagggggagagagactgagccctcccttggctcactgtccccttctgccgccagccctagccagtaagaggtgggatttctaagaccgactgtatgagctcgcctcttccagatagctggcagagggcagggcaagggattggccatttatactgggctcgagctcagaagcccgaggaactctttgctcccctgctttggggagatctcaaaccatggacgtggagctgtggtttgacagcgctggctctgcttctccccacacacttacatggcaaaggtaaaaagtctgctactatcgtgggttgatgaggattgtgggcaaacaggctctcttgttaaaagtttaaactggtgtctccactttggccatatgacggtatctaagaaattgaaaatacatacatgcttgtctcaactcttccacttgtaggaatttattctataaactcatgaatgtgaaaaaaaa

SEQ ID NO: 43606 - DNA, 398 bp, Homo Sapiens
cccagccccgcagcgcctccaccccagagacccggaccaagttcacacaggacaatctgtgccacgcccagcgcgagcgcctggactcggccaacctgtgggtgctggtggactgcatccttcgcgacacctccgaggacctgggactccagtgtgacgccgtgaacctggccttcgggcgccgctgtgaggaactggaggacgcgcggcacaagctgcagcaccacctgcacaagatgctgcgggaaatcacagatcaggaacacaacttggtggcactgaaggaggccatcaaggacaaggaggaacctctgcacatagcccagacccggctgctctcacaccggcccaacatgcagctgtgccgcgatgcagcccagttcaggtactgcctgggc

SEQ ID NO: 43607 - DNA, 1701 bp, Homo Sapiens
ggggggacgccgctgctcatcgccgcctgctacggccacctggacgtggtggagtacctggtggaccggtgcggcgcgagcgtggaggccggtggctcggtgcacttcgatggcgagaccgtggagggtgcgccgccgctgtgggcgcggaccctggacgtggtgcggagcctgctgcgccgcggggcctcggtgaaccgcaccacgcgcaccaactccacgcccctccgcgccgcctgcttcgagggcctcctggaggtggtgccctacctggtcggcgagcaccaggccaacctggaggtggccaaccggcacggccacacgtgcctcatgatctcgtgctacaagggccaccgtgagatcgcccgctacctgctggagcagggcgcccaggtgaactggcgcagcgccaagggcaacacggccctgcacaactgtgccgagaccagcagcctggagatcctgcagctgctgctgggccaggggtgtaggcagcctcagggggctccgtgctgcatcttctcccctgaggtactgaacagggaatcttaccaaagctgctgtcccaccagccgggaagctgctgtggaagccttggaattgctgggatctacgtatgtggataagaaacgagatctgcttggggcccttaaacactggaggcgggccatggagctgcgtcaccagagggttgagtacctgcccaaactggagcccccacagctggtcctggcctatgactattccagggaggtcaacaccaccgaggagctggaggcgctgatcaccgaccccgatgagatgcgtatgcaggccttgttgatccgggagcgcatcctcagtccctcgcaccccgacagttcctattgtatccgttacaggggcgccgtgtacgccgactcgggcaatatcgagtgctacatccgcttgtggaagtacgccctggacatgcaacagagcaacctggagcctctgagccccatgaccgccagcagcttcctctccttcgctgaactcttctcctacgtgctgcaggacccggctgccaaaggcagcctgggcacccagatcggctttgcagacttcatgggggtcctcaccaaaggggtctgggaagtagaatgggccctgcagctgctcagggagcctagagactcggcccagttcaacaaggcgctggccatcatcctccacctgctctacctgctggagaaagtggagtgcacccccagccgggagcacctgaagcaccagaccatctaccgcctgctcaagtgcgcacccaggggcaagaacggcttcacccctctgcacatggctgtggacaaggacaccacaaacgtgggccgctactccgtgggcagattcccctccttgcacgtggtcaaagtgctgttcgactgcggggccgaccgggacagcagggattttgacaacaccccgctacacatagcagcccagaacaactgcccggccatcgtgaatgccctgattgaagcaggggcccacatggacgccaccaacgccttcaagaagacggcctacgagctgctggaagagaagctgctggccaggggtaccatgcagcccttcaactatgtgaccctgcagtgccttgcagcccaggccctggataagaacaagatcccttacaagggcttcatcccggaagatctgaaggcattcatcgaactgcactga

SEQ ID NO: 43608 - DNA, 231 bp, Homo Sapiens
aggtcaccaactgcggaaacaatgacatggtctgaaaatatggacacgcttttagccaaccaagctggtctagatgcttttcgaatatttctaaaatcagagtttagtgaagaaaatgttgagttctggcttgcctgtgaagactttaagaaaacgaaaaatgcagacaaaattgcttccaaagccaagatgatttattctgaattcattgaagctgatgcacctaaagag

SEQ ID NO: 43609 - DNA, 678 bp, Homo Sapiens
ctctcagccctctccttggccaaagacagcctggtgggcggcatcacaaatcctggtgaggtcttctgctccgtgcccggccggctttcactgctcagctcaacgtccaagtacaaggtgacggtgggggaggtgcagcggcgactctcgcctcccgagtgcctcaacgcctccctcctggggggtgtcctccgcagggccaagtccaaaaatgggggccggtgtttgcgggaacggttagagaagattgggctcaacctgccagctggccgtcgcaaggccgccaatgtgacgctgctgacttcgctagtggaaggagaggccgtgcacctggcccgagacttcggttacgtctgtgagacggagttcccagccaaggcagctgccgagtacctgtgccgacagcacgctgacccgggggagctgcacagccgcaagagcatgctgctggctgccaagcagatctgcaaggagtttgcagacttgatggctcaggaccgctcaccgctgggcaacagccgcccagcactcatcctggagcccggagtacagagctgcttgacacactttagcctcatcacccatggcttcggtgggcctgccatctgtgctgccctcactgccttccagaactatttgctggagtcactcaaggggctggacaagatgtttctaagc

SEQ ID NO: 43610 - DNA, 2578 bp, Homo Sapiens
gaatgatcaaacacccaatagaaatgccctgaccagcattactaatgtggagcccaaaaccgagccagcctgtgtctctcccattcagaattctgccccagtcagtgatctaaccaaaactgaacacccaaaaagctcattccggattcatcggatgagaaggatggggtcagcctctaggaaaggaagagtgttctgtaatgcatgtgggaagacattctatgacaaaggtactctcaaaattcattacaatgctgttcacctgaagatcaaacatcgatgcaccattgaaggttgcaacatggtctttagctccctccgaagtcgtaatcgccacagtgcaaaccccaatcctcgccttcacatgcctatgctaaggaataaccgagataaagatttaattcgggccacctcaggagctgccacccctgtcatagcaagtacaaaatcaaatctggcactcacaagccctggccgacccccaatgggttttaccactccccctctagaccctgtcttgcaaaatcctctccctagccagctagtattttctgggctaaagactgtacaaccagttcctccattttatagaagtttactcactccaggggaaatggtgagtcctccaacctccctcccaaccagtcccatcattccaaccagtggtaccatagagcagcaccccccgccaccctctgagccagtagtgccagcagtgatgatggccacccatgagcccagtgctgacctggcacccaagaaaaagcccaggaagtcaagcatgcctgtgaagattgagaaggaaattattgataccgccgatgagtttgatgatgaagatgatgaccccaatgatggtggagctgtggtcaatgacatgagccatgacaatcattgtcactcccaagaggagatgagcccaggcatgtctgtgaaggacttttctaagcataacaggacccggtgcatttcaaggactgaaataaggagggccgacagcatgacttctgaagaccaagaacctgagcgggactatgagaacgagtctgagtcttcggagcccaaactgggcgaggaatccatggaaggggatgagcacattcacagcgaagtgagtgaaaaagtcctgatgaatagtgagaggcctgatgagaaccacagtgagccctctcaccaggacgtcatcaaggtgaaggaagaatttacagaccccacttacgacatgttttacatgagccagtatggactgtacaatggtgggggtgccagcatggccgccttgcatgagagctttacatcgtctctgaattatggcagccctcaaaagttctccccagaaggtgacctatgttctagcccagaccccaaaatctgttatgtgtgcaagaagagtttcaaaagctcctacagtgtgaaacttcactacaggaacgttcacttgaaagagatgcacgtctgcacagtggctggttgcaatgctgcattcccctctcgccgaagccgagacagacacagtgccaacataaacctacatcgtaaactgttgaccaaagaactcgatgacatgggcctggactcgtcgcagccctcccttagcaaggacctccgcgatgaatttttggtgaagatatatggtgcccagcaccccatggggctcgatgtcagggaagacgcctcctctcccgcagggactgaagactcccacctgaacgggtatgggagaggcatggcagaggactacatggtccttgacttgagcaccacctccagcctccagtccagcagcagtatccattcctccagagaatccgacgcaggcagcgatgaggggattcttctcgatgacattgacggggcgagtgacagtggggagtcggcacacaaggccgaggcccctgccctccctggcagcctaggggctgaagtttcaggatctcttatgttcagcagcttgtctgggagcaatggtgggatcatgtgcaacatttgccacaaaatgtacagcaacaaggggaccctgagagtgcactacaaaactgtgcatttgagagaaatgcacaagtgcaaagtcccaggttgcaatatgatgttttcctctgtacgaagccgaaatcggcacagtcagaaccctaatctccacaaaaacattcccttcacttcagtagattagtctcagaatggacactacaaatgccagctctcaccagatggcctacgtgtttgaactgccatagtcagtgtgcgcttatgtacttggggtgtgtgtgtgtgtgtgtgtgtgtgtgcatttatgtatgctctgtggctacatatacacacacgtatttccttgagataaacaagataaacactaggtgcttttgaatttttttcacttccctttatagttttgggaaaggagtgggatctttgatttcagggtgaaaacagagtacccctttaaacacacacacacacacatgcacatacacacacacacacacacacacacacagtgtgcaactagccccagttttgacagaataattcttggtcttccccaaagagacaatttgttgtacccatgactgttgcctgc

SEQ ID NO: 43611 - DNA, 957 bp, Homo Sapiens
atgttcagtgtttccaaattaattgctcaagaaaccatcatggaatctttggatggcttacatcttcctgaatcgagcagagaaactactgcaatgattcttatgaatgtgtattgcaataagattttgaagcctgtagatgggtcctgttgtcaacctcggcctcctgttactctcatacagaagctagctgcttgttttttcactttatctattatcggatatttaattttttacataattcatcgtaatgctcatcggaagaataagccgtgtactgatttggaaagtggagaggaaaagaaaaatattatcaatacccctgtgtcttcattagaaatacttttacaatctttctgcaaacttggcctgattatggcatatttctatatgtgtgaccgtgcaaatctgttcatgaaggaaaacaaattttatacacattcatctttctttattccaattatctacattttggttttgggagtattttataatgaaaatactaaagagactaaagtattaaatagagaacaaacagacgaatggaaaggctggatgcaacttgtgattttgatttatcacatttctggagcaagtacatttttgcctgtatacatgcacattcgagttctggttgctgcatatttatttcagacagggtatgggcatttctcatacttttggataaaaggagattttggaatctatagagtatgtcaggttttatttcgtctcaatttcctggtagtggtgttatgtatagtaatggatcgaccttatcaattctattactttgtccccttggtcactgtatggttcatggtcatatatgttactttagcactatggccacaaataatccaaaaaaaaaaacggaaattgtttctggcattttggcttactgttgaaactaggctttttgctgttattcatatgttttttggcatattctcaggt

SEQ ID NO: 43612 - DNA, 1112 bp, Homo Sapiens
gcgggattttcaagcgtaggcccccgggaactcgagctgccatgagcctctgggtggacaagtatcggccctgctccttgggacggctggactatcacaaggagcaggcggcccagctgcggaacctggtgcagtgtggtgactttcctcatctgttagtgtacggaccatcaggtgctggaaaaaagacaagaattatgtgtattctacgtgaactttatggtgttggagtggaaaaattgagaattgaacatcagaccatcacaactccatctaaaaaaaaaattgaaattagcaccattgcaagtaactaccaccttgaagttaatcctagtgatgctggaaatagtgaccgagtagtcattcaggagatgttgaaaacagtggcacaatcacaacaacttgaaacaaactctcaaagggattttaaagtggtattattgacagaagttgacaaactcaccaaagatgctcagcatgccttgcgaagaaccatggaaaaatatatgtctacctgcagattgatcttgtgctgcaattctacatctaaagtgatcccacctattcgtagtaggtgcttggcggttcgtgtgcctgctcccagcattgaagatatttgccacgtgttatctactgtgtgtaagaaggaaggtctgaatcttccttcacaactggctcatagacttgcagagaagtcttgtagaaatctcagaaaagccctgcttatgtgtgaagcctgcagagtgcaacaatatccttttactgcagatcaagaaatccctgagacagattgggaggtgtatctgagggagactgcaaatgctattgtcagtcagcaaactccacaaaggctccttgaagttcgtggaaggctgtatgagcttctaactcattgtattcctcctgagataataatgaagggccttctctcagaactgttacataattgtgatggacaactgaaaggggaggtggcacaaatggcagcttactatgagcatcgtctacagctgggtagcaaagccatttatcacttggaagcgtttgtggccaaattcatggcactttataagaagttcatggaggatggattggaaggcatgatgttctga

SEQ ID NO: 43613 - DNA, 423 bp, Homo Sapiens
gcctcctgatccaccaagaccatatggtgtttttcataaaagagagagatcattcccttgactttggacttcgcttattgaacccctggacaggaatcaaggttgctaagagaccacctgtgctgaatacactttgttctggcaagagcagaaaactgagaagccgtgttacctaccactacctgggattaattcagggagcgggataattctggatatgactggtaaaaactggatattaatttctactactactcccaaaagtctagaagatgaaattgtgggaagacttctaaaaattttgtttgttatctttgttgacttaatttctattatatatgttgtgataacttcttagaaagctgacttcctttccatgtacatttcaaactgaattacagtgaataaaaatttgtattttaa

SEQ ID NO: 43614 - DNA, 1269 bp, Homo Sapiens
atgagatggcgacgcgccccgcgccgctccgggcgtcccggcccccgggcccagcgccccggctccgccgcccgctcgtcgccgccgctgccgctgctgccactactgctgctgctggggaccgcggccctggcgccgggggcggcggccggcaacgaggcggctcccgcgggggcctcggtgtgctactcgtccccgcccagcgtgggatcggtgcaggagctagctcagcgcgccgcggtggtgatcgagggaaaggtgcacccgcagcggcggcagcagggggcactcgacaggaaggcggcggcggcggcgggcgaggcaggggcgtggggcggcgatcgcgagccgccagccgcgggcccacgggcgctggggccgcccgccgaggagccgctgctcgccgccaacgggaccgtgccctcttggcccaccgccccggtgcccagcgccggcgagcccggggaggaggcgccctatctggtgaaggtgcaccaggtgtgggcggtgaaagccgggggcttgaagaaggactcgctgctcaccgtgcgcctggggacctggggccaccccgccttcccctcctgcgggaggctcaaggaggacagcaggtacatcttcttcatggagcccgacgccaacagcaccagccgcgcgccggccgccttccgagcctctttcccccctctggagacgggccggaacctcaagaaggaggtcagccgggtgctgtgcaagcggtgcgccttgcctccccgattgaaagagatgaaaagccaggaatcggctgcaggttccaaactagtccttcggtgtgaaaccagttctgaatactcctctctcagattcaagtggttcaagaatgggaatgaattgaatcgaaaaaacaaaccacaaaatatcaagatacaaaaaaagccagggaagtcagaacttcgcattaacaaagcatcactggctgattctggagagtatatgtgcaaagtgatcagcaaattaggaaatgacagtgcctctgccaatatcaccatcgtggaatcaaacgctacatctacatccaccactgggacaagccatcttgtaaaatgtgcggagaaggagaaaactttctgtgtgaatggaggggagtgcttcatggtgaaagacctttcaaacccctcgagatacttgtgcaagtgcccaaatgagtttactggtgatcgctgccaaaactacgtaatggccagcttctacagtacgtccactccctttctgtctctgcctgaatag

SEQ ID NO: 43615 - DNA, 303 bp, Homo Sapiens
cctgtgacggaaacaagcagtggatcactcgagtttgaccactcgtagggagcgtcacggaaagagccgaagcatctgtaggtccctccgtgggtcttccatcatgggaccgatggagaagttggccttggaaaccccatcatggtgctctccagtgaggtgcaaagtgtcgttaaacttcccttctctgtgcagaaggaagtgctgaaacctgacatctgaccaacattgcaggatgactgtctcttctgatttcaccaggggacctgggtgggccaggagggaaggttttctgtggactcc

SEQ ID NO: 43616 - DNA, 1038 bp, Homo Sapiens
atgagtcacctcttcgatccccggctgcctgccctggccgcctcgcccatgctgtatctgtacggtcccgagagacccggcctccctctggccttcgcccccgcggctgctctagctgcctcgggccgggccgagaccccgcagaagcctccctacagctacatcgcgctcatcgccatggcgatccaggacgcgcccgagcagagggtcacgctcaacggcatctaccagttcatcatggaccgcttccccttctaccacgacaaccggcagggctggcagaacagcatccgccacaacctctcgctcaacgactgcttcgtcaaggtgccccgcgagaaagggcggccgggcaagggcagctactggacgctggacccccgctgcctggacatgtttgagaacggcaactaccggcgccggaagaggaagcccaagccgggccccggggccccggaggccaagaggccccgcgccgagacgcaccagcgcagcgcggaggcgcagccggaggcggggagcggggcagggggctcgggccccgcaatctcccgcctgcaggcagcgcccgcgggcccctcgcccctcctggacggcccctctccgccggcgcccctccactggccggggaccgcgtccccgaacgaggacgctggtgacgctgcccagggcgcagcggccgtggcggtcggccaggcagcgcgcacaggggacggcccggggtcccctctgcgccccgcctcccgcagctctccgaagagctccgacaagtccaagagcttcagcatagacagcatcctggcgggaaagcagggccagaagccgccttcaggggacgaactcctagggggtgccaagcctgggcccggcggccgtctgggtgcctcgctcctggccgcctcctccagcctccgtccgcctttcaacgcttccctgatgctcgacccgcatgtccagggcggcttttaccagctcgggatccccttcctctcttatttccccctgcaggttcccgacacggtactccacttccagtaa

SEQ ID NO: 43617 - DNA, 2816 bp, Homo Sapiens
tgggggcgtcctccttcgtccccgcccggctgtcaagctgtgttctagcggccgagggaccgaggggggctaagaaagggggcgcccagccatgcagaggcaaaaaggcgctgcggaacggggtccccgtcgccagtgctgaggcaggaggtcggagccacaagtgaggggctgggaagcaggacccagcacgggcgtcttggcaggcggccgggcgcagggccaggctgctggggacgctcagggctttccacccaagccatgggcgctgtcgggcactcgggggtcccctcgtggctccggccactcggcgtgggcattacgttggcttcacatcgccatccagcctcgaagccaacaggactgaaaaatagcttcggccaaacgttctcctcccgctaaggagaggggtcgagtgcgtcagcccgaggggactggagagggatgccctagccctcgaggggcggaggacccgcggttgaaggaggcagcgggagcggagagcgccctccttgaccatcgaatgcctccttctgtgtttccattcctgtcgagtgggctgggccacgctgaccaccctggaggagggacggacgacgctcggcgggctctgaccgtgccgccttcttgtggctgctgactgggatccaggagggagtgggcatggggcgcagccgcgcctccctccctccccgcctcccgggcgccggggttggcgatgtggagacgtgaggggacccgtcggctgctccggcttctccaggactccgccaggcgcccgcgcgtccctcctcacccggaggaggagaggctccgcgcggggctccgaggcgggcggcgcgcggagccggagtcccagcctcgccatgggacataacgggagctggatctctccaaatgccagcgagccgcacaacgcgtccggcgccgaggctgcgggtgtgaaccgcagcgcgctcggggagttcggcgaggcgcagctgtaccgccagttcaccaccaccgtgcaggtcgtcatcttcataggctcgctgctcggaaacttcatggtgttatggtcaacttgccgcacaaccgtgttcaaatctgtcaccaacaggttcattaaaaacctggcctgctcggggatttgtgccagcctggtctgtgtgcccttcgacatcatcctcagcaccagtcctcactgttgctggtggatctacaccatgctcttctgcaaggtcgtcaaatttttgcacaaagtattctgctctgtgaccatcctcagcttccctgctattgctttggacaggtactactcagtcctctatccactggagaggaaaatatctgatgccaagtcccgtgaactggtgatgtacatctgggcccatgcagtggtggccagtgtccctgtgtttgcagtaaccaatgtggctgacatctatgccacgtccacctgcacggaagtctggagcaactccttgggccacctggtgtacgttctggtgtataacatcaccacggtcattgtgcctgtggtggtggtgttcctcttcttgatactgatccgacgggccctgagtgccagccagaagaagaaggtcatcatagcagcgctccggaccccacagaacaccatctctattccctatgcctcccagcgggaggccgagctgcacgccaccctgctctccatggtgatggtcttcatcttgtgtagcgtgccctatgccaccctggtcgtctaccagactgtgctcaatgtccctgacacttccgtcttcttgctgctcactgctgtttggctgcccaaagtctccctgctggcaaaccctgttctctttcttactgtgaacaaatctgtccgcaagtgcttgatagggaccctggtgcaactacaccaccggtacagtcgccgtaatgtggtcagtacagggagtggcatggctgaggccagcctggaacccagcatacgctcgggtagccagctcctggagatgttccacattgggcagcagcagatctttaagcccacagaggatgaggaagagagtgaggccaagtacattggctcagctgacttccaggccaaggagatatttagcacctgcctggagggagagcaggggccacagtttgcgccctctgccccacccctgagcacagtggactctgtatcccaggtggcaccggcagcccctgtggaacctgaaacattccctgataagtattccctgcagtttggctttgggccttttgagttgcctcctcagtggctctcagagacccgaaacagcaagaagcggctgcttccccccttgggcaacaccccagaagagctgatccagacaaaggtgcccaaggtaggcagggtggagcggaagatgagcagaaacaataaagtgagcatttttccaaaggtggattcctagcaaggattgtaaattcttggaagcaacggggagcttccatattcccaccagagtgtgggaatgctgtggccatgtgattgtatgatctccttgcaactcagtgtgagttgattcctccaatatgggccagatgcttttgaatgatagggaaatctacataaaatccagtgtcctctttattgagggagtatatgtatccatctcagtgatccatgtccttagtgaagtccacattattctctgtggggacaagagctgggcagttttgaatgggtcttgaggtgggtaccccatgtgcactttctgaggatgcctcacttccctgggctctgcagagaacacacagagagaagactttcagagctcacaggagcagggagcaggagcactctaagggaattc

SEQ ID NO: 43618 - DNA, 1887 bp, Homo Sapiens
atgccagaccccgcggcgcacctgcccttcttctacggcagcatctcgcgtgccgaggccgaggagcacctgaagctggcgggcatggcggacgggctcttcctgctgcgccagtgcctgcgctcgctgggcggctatgtgctgtcgctcgtgcacgatgtgcgcttccaccactttcccatcgagcgccagctcaacggcacctacgccattgccggcggcaaagcgcactgtggaccggcagagctctgcgagttctactcgcgcgaccccgacgggctgccctgcaacctgcgcaagccgtgcaaccggccgtcgggcctcgagccgcagccgggggtcttcgactgcctgcgagacgccatggtgcgtgactacgtgcgccagacgtggaagctggagggcgaggccctggagcaggccatcatcagccaggccccgcaggtggagaagctcattgctacgacggcccacgagcggatgccctggtaccacagcagcctgacgcgtgaggaggccgagcgcaaactttactctggggcgcagaccgacggcaagttcctgctgaggccgcggaaggagcagggcacatacgccctgtccctcatctatgggaagacggtgtaccactacctcatcagccaagacaaggcgggcaagtactgcattcccgagggcaccaagtttgacacgctctggcagctggtggagtatctgaagctgaaggcggacgggctcatctactgcctgaaggaggcctgccccaacagcagtgccagcaacgcctcaggggctgctgctcccacactcccagcccacccatccacgttgactcatcctcagagacgaatcgacaccctcaactcagatggatacacccctgagccagcacgcataacgtccccagacaaaccgcggccgatgcccatggacacgagcgtgtatgagagcccctacagcgacccagaggagctcaaggacaagaagctcttcctgaagcgcgataacctcctcatagctgacattgaacttggctgcggcaactttggctcagtgcgccagggcgtgtaccgcatgcgcaagaagcagatcgacgtggccatcaaggtgctgaagcagggcacggagaaggcagacacggaagagatgatgcgcgaggcgcagatcatgcaccagctggacaacccctacatcgtgcggctcattggcgtctgccaggccgaggccctcatgctggtcatggagatggctgggggcgggccgctgcacaagttcctggtcggcaagagggaggagatccctgtgagcaatgtggccgagctgctgcaccaggtgtccatggggatgaagtacctggaggagaagaactttgtgcaccgtgacctggcggcccgcaacgtcctgctggttaaccggcactacgccaagatcagcgactttggcctctccaaagcactgggtgccgacgacagctactacactgcccgctcagcagggaagtggccgctcaagtggtacgcacccgaatgcatcaacttccgcaagttctccagccgcagcgatgtctggagctatggggtcaccatgtgggaggccttgtcctacggccagaagccctacaaggcaggcgcgggcagaggcaggtgggcgaagatgaaagggccggaggtcatggccttcatcgagcagggcaagcggatggagtgcccaccagagtgtccacccgaactgtacgcactcatgagtgactgctggatctacaagtgggaggatcgccccgacttcctgaccgtggagcagcgcatgcgagcctgttactacagcctggccagcaaggtggaagggcccccaggcagcacacagaaggctgaggctgcctgtgcctga

SEQ ID NO: 43619 - DNA, 1622 bp, Homo Sapiens
cccctttcagttcctggtccagaactttacacagaaaaggtgctcaaaggatatttgtttaatgaatgtggtatgctgacatttaaacaggacaaaacttgtagaacttcatggaggaacacggagtgacccaaaccgaacatatggctaccatagaagcacatgcagtggcccagcaagtgcagcaggtccatgtggctacttacaccgagcatagtatgctgagtgctgatgaagactcgccttcttctcccgaggacacctcttacgatgactcagatatactcaactccacagcagctgatgaggtgacagctcatctggcagctgcaggtcctgtgggaatggccgctgctgctgctgtggcaacaggaaagaaacggaaacggcctcatgtatttgagtctaatccatctatccggaagaggcaacaaacacgtttgcttcggaaacttcgagccacgttagatgaatatactactcgtgtgggacagcaagctattgtcctctgtatctcaccctccaaacctaaccctgtctttaaagtgtttggtgcagcacctttggagaatgtggtgcgtaagtacaagagcatgatcctggaagacctggagtctgctctggcagaacacgcccctgcgccacaggaggttaactcagaactgccgcctctcaccatcgacggaattccagtctctgtggacaaaatgacccaggcccagcttcgggcatttatcccagagatgctcaagtactctacaggtcggggaaaaccaggctgggggaaagaaagctgcaagcccatctggtggcctgaagatatcccctgggcaaatgtccggagtgatgtccgcacagaagagcaaaagcagagggtttcatggacccaggcactacggaccatagttaaaaactgttataaacagcatgggcgggaagaccttttgtatgcctttgaagatcagcaaacgcaaacacaggccacagccacacatagtatagctcatcttgtaccatcacagactgtagtccagacttttagtaaccctgatggcactgtctcacttatccaggttggtacgggggcaacagtagccacattggctgatgcttcagaattgccaaccacggtcaccgttgcccaagtgaattattctgccgtggctgatggagaggtggaacaaaattgggccacgttacagggaggtgagatgaccatccagacgacgcaagcatcagaggccacccaggcggtggcatcgttggcagaggccgcagtggcagcttctcaggagatgcagcagggagctacagtcactatggcgcttaacagcgaagctgccgcccatgctgtcgccaccctggctgaggccaccttacaaggtgggggacagatcgtcttgtctggggaaaccgcagcagccgtcggagcacttactggagtccaagatgctaatggcctggtccagatccctgtgagcatgtaccagactgtggtgaccagcctcgcccagggcaacggaccagtgcaggtggccatggcccctgtgaccaccaggatatcagacagcgcagtcaccatggacggccaagctgtggaggtggtgacattggaacagtga

SEQ ID NO: 43620 - DNA, 2328 bp, Homo Sapiens
acagccacactgcagtatgtcaggaacagtcatggagctgttctcattgtttgcctctccttttcctcctttttaccttctggcccctctcttcattcagagatgctggcagagccattccctaaggttgtagcaagtttaatcatcctccatttgtctggggcaaccaagaaaggaacagaaaagcaaaccacctcagaaacacagaagtcagtgcagtgtggaacttggacaaaacatgcagagggaggtatctttacctctcccaactatcccagcaagtatccccctgaccgggaatgcatctacatcatagaagccgctccaagacagtgcattgaactttactttgatgaaaagtactctattgaaccgtcttgggagtgcaaatttgatcatattgaagttcgagatggaccttttggcttttctccaataattggacgtttctgtggacaacaaaatccacctgtcataaaatccagtggaagatttctatggattaaattttttgctgatggagagctggaatctatgggattttcagctcgatacaatttcacacctgatcctgactttaaggaccttggagctttgaaaccattaccagcgtgtgagtttgagatgggcggttccgaaggaattgtggagtctatacaaattatgaaggaaggcaaagctactgctagcgaggctgttgattgcaagtggtacatccgagcacctccacggtccaagatttacttacgattcttggactatgagatgcagaattcaaatgagtgcaagaggaattttgtggctgtgtatgatggaagcagttccgtggaggatttgaaagctaagttctgtagcactgtggctaatgatgtcatgctacgcacgggtcttggggtgatccgcatgtgggcagatgagggcagtcgaaacagccgatttcagatgctcttcacatcctttcaagaacctccttgtgaaggcaacacattcttctgccatagtaacatgtgtattaataatactttggtctgcaatggactccagaactgtgtgtatccttgggatgaaaatcactgtaaagagaagaggaaaaccagcctgctggaccagctgaccaacaccagtgggactgtcattggcgtgacttcctgcatcgtgatcatcctcattatcatctctgtcatcgtacagatcaaacagcctcgtaaaaagtatgtccaaaggaaatcagactttgaccagacagttttccaggaggtatttgaacctcctcattatgagttatgcactctcagagggacaggagctacagctgactttgcagatgtggcagatgactttgaaaattaccataaactgcggaggtcatcttccaaatgcattcatgaccatcactgtggatcacagctgtccagcactaaaggcagccgcagtaacctcagcacaagagatgcttctatcttgacagagatgcccacacagccaggaaaacccctcatcccacccatgaacagaagaaatatccttgtcatgaaacacagctactcgcaagatgctgcagatgcctgtgacatagatgaaatcgaagaggtgccgaccaccagtcacaggctgtccagacacgataaagccgtccagcggttctgcctcattgggtctctaagcaaacatgaatctgaatacaacacaactagggtctagaaagaaaattcaagagaagaactatttatacaaacatggggactgtgaaaagaaaattctatagtgaattgtgaaaagtggacatatttctaaattcattccactgcctttatccaaacttaagaattacagacatttgttattccttcggcaagacatccccgctgcacactgatatgttcatttcgtaatttggttgctggccaccaagtgctccttagtttttaaatacattttgagattaactggaaacttgaagaagaaattagttcccgattaagactatcccaactttatttttattgtcagtttcacttttgtttctatgttgttttatgtctttgttatataattgtacattgtgtgatatgtgaaaaaaaaacacgaatttggatgaaccttgtgttacatgtacattgttttcattatatagacagcttgagaatagtgcgttcctgaatgattttgaacatgctacagtgaaaagtgacagtgtggaccatggaatcaccagctagaggttatggactatacacacctattattatattctgattaaatacaggaaaaagtaacaagtaaaattactagattgcaataaaaaaattcattttttggtctttcctg

SEQ ID NO: 43621 - DNA, 2322 bp, Homo Sapiens
atggacaatcagaccgttctggctgtccagtcattattggatggccaaggagcagtccctgatccgacaggccagagtgtcaatgcgccccctgctatccagccattggatgacgaggatgtatttctctgcgggaagtgtaagaagcaattcaactcgctgccagcgtttatgacccacaagcgggaacagtgccaggggaatgcccccgccctggccacagtctcactggccaccaacagcatctacccaccttcggcagcacccacagcggtccagcaggccccaactcctgccaatcgccagatctccacatacatcacagtgcccccgtccccactgatccagaccctggtgcaggggaacatcttggtgagcgatgatgtgctcatgtctgccatgtcagccttcacatccctggaccagcccatgccccagggccccccacctgtgcaggtgccaaaccagtgtgtggagcctccagtatatcccacccccacagtgtacagccctggcaaacagggattcaaacccaaaggaccaaaccccgccgcccccatgaccagcgccaccgggggcacggtggccacctttgactctccagcaacgctgaagacccgacgagctaaaggtgccaggggactcccggaagctgcagggaagccaaaggctcagaaactcaagtgctcatactgtgacaagtcattcaccaaaaactttgacctgcagcagcacatccgaaggtacacatgcgtggagggcactgacaagcttgtcttccacagccacaccggtgagaagcccttccagtgcattgcatgtggccgtgcctttgcccagaagtctaatgttaagaaacacatgcagacccacaaggtgtggcctccaggacacagtggtggcaccgtgtctcgaaactctgtgaccgtacaggtcatggccctgaaccccagcaggcaggaggacgaggaaagcacagggttgggccagcccctgccgggtgcgccacagccccaggccttgtccacagctggtgaggaagagggggacaagccggagtccaagcaggtggtcctcatcgacagctcctacctgtgccaattctgccccagcaaattcagcacctacttccagctcaagtctcacatgacccagcataagaatgagcaggtgtacaagtgtgtggtcaaaagctgtgcccagacgttcccaaagctcgacacatttctggagcacatcaagagccaccaggaggagctgagctaccgctgccacctctgcggcaaggacttcccctcgctgtacgacctgggcgtgcaccagtactcccacagcctcctgccacagcacagccccaagaaggacaatgccgtctacaagtgtgtcaaatgtgtcaacaaatactccacccctgaggccctggagcaccacctgcagaccgccactcacaacttcccctgcccacactgccagaaggtgtttccttgtgaacgctacctgcggcgtcatctgcccacccacggcagcgggggcaggttcaagtgccaagtgtgcaagaagttcttccggcgggagcattatctcaaactgcatgctcacatccactcgggtgagaagccctacaaatgctcagtgtgcgagtctgcgttcaaccgcaaggacaaactgaagagacacatgttgatccacgagcccttcaagaaatacaaatgccctttctcgacgcacacaggctgcagtaaggagttcaaccggccggacaagctgaaggcccacatcctctcccactctggcatgaagctccacaaatgcgccctgtgcagcaagtccttcagccgccgtgcccacctcgccgagcatcagcgcgcccacacgggcaactacaagttccgctgtgctggctgcgccaagggcttttcccgccacaaatacctcaaagatcaccgctgtcgtctcggcccccaaaaggacaaggacctgcaaacccggcggcccccccagaggagggcagccccccgcagttgcggcagtggtgggcgcaaggtgctgacccccttgcctgacccgctggggctggaggagctgaaggacacaggggctgggctggtgcccgaggctgtccccggcaagccgcccttcgcagagccggacgcggtgctgtccatcgttgtgggtggtgcggtgggcgcggaaactgagctggtggtacctggacacgctgaggggctgggctccaacctggctctggcggagctgcaggctggggccgagggcccatgtgccatgctcgctgtgcccgtctacatccaggcctccgagtga

SEQ ID NO: 43622 - DNA, 361 bp, Homo Sapiens
cgccgcgccgccatcatggacaccagccgtgtgcagcctatcaagctggccagggtcaccaaggtcctgggcaggaccggttctcagggacagtgcacgcaggtgcgcgtggaattcatggacgacacgagccgatccatcatccgcaatgtaaaaggccccgtgcgcgagggcgacgtgctcacccttttggagtcagagcgagaagcccggaggttgcgctgagcttggctgctcgctgggtcttggatgtcgggttcgaccacttggccgatgggaatggtctgtcacaatctgctccttttttttgtccgccacacgtaactgagatgctcctttaaataaagcgtttgtgtttcaa

SEQ ID NO: 43623 - DNA, 645 bp, Homo Sapiens
aaagttgggagtgacaccagagccttctgcaagatgcttctgattctgctgtcagtggccctgctggccttcagctcagctcaggacttagatgaagatgtcagccaagaagacgttcccttggtaatatcagatggaggagactctgagcagttcatagatgaggagcgtcagggaccacctttgggaggacagcaatctcaaccctctgctggtgatgggaaccagaatgatggccctcagcagggaccaccccaacaaggaggccagcagcaacaaggtccaccacctcctcagggaaagccacaaggaccaccccaacagggaggccatccccctcctcctcaaggaaggccacaaggaccaccccaacagggaggccatccccgtcctcctcgaggaaggccacaaggaccaccccaacagggaggccatcagcaaggtcctcccccacctcctcctggaaagccccagggaccacctccccaagggggccgcccacaaggacctccacaggggcagtctcctcagtaatctaggattcaatgataggaagtgaataagaagatgacagtgtttcaaatgccttgaaacataatgtgatcatgctctaacttcaatataccaataaaataatcagcttgc

SEQ ID NO: 43624 - DNA, 4658 bp, Homo Sapiens
aagatggctgcccacgggggctccgcggcgtcctcggcgctgaaggggttaattcaacagttcaccaccattaccggtgcaagtgaaagtgtaggaaaacatatgcttgaagcgtgcaacaataatctggaaatggcagtcactatgtttttggatggtggaggaatcgctgaagagcccagtaccagttcagcaagtgtctctactgtcagaccacacacagaagaagaagttcgtgccccaattcctcaaaagcaggaaatactggtggaaccagaaccattatttggtgctcctaaaagacgacggcctgcacgttcaatttttgatggtttccgggattttcagactgaaactattcggcaagaacaagaattaagaaatggaggagctatcgataagaaattaactacccttgcagatctattccggccacccattgatttgatgcataaaggcagctttgaaacagccaaagagtgtggccagatgcaaaataagtggctgatgataaacattcaaaatgttcaagactttgcatgtcagtgcctcaaccgcgatgtgtggagcaacgaagctgtgaagaatattatccgggaacatttcattttctggcaggtttatcatgacagtgaggaaggtcagagatacatacagttttataagttaggggatttcccctatgtttccatattggacccacggacaggtcagaagctagtagaatggcaccagttagatgtatcttctttcttggaccaagtgacgggatttctgggtgaacatggacaactggatggactttctagcagtccccccaaaaaatgtgcccgttcagagagccttatagatgcaagtgaagacagccagctagaagctgccatcagagcctccttacaagaaacacattttgattcaacacagacaaaacaggatagccgctcagatgaagaatctgaatctgaacttttttctggcagtgaggagttcatatccgtttgtggctctgatgaagaagaagaggtagagaatcttgccaagtccagaaagtctccccacaaagatttggggcatagaaaagaggagaatagaaggccgctgactgagccaccagtcagaactgatcctggaacagccacaaaccaccaaggattgccagctgtggattcagagatactggagatgccacctgaaaaagcagatggagtagtggaggggatagatgtaaatggaccaaaagcacagctgatgttgcggtatccagatggaaaaagggaacagatcactcttccagagcaagctaaactgctagctttggtgaagcacgtgcagtctaaaggatacccaaatgaacgttttgaacttctcaccaactttcctcgaaggaaattatctcatctggactatgatattacattgcaagaggcaggcctttgtcctcaagagactgtctttgtacaggaaagaaattaacaccatggcttgacctctctcagcttaccccttttttcccttttcctgtgagatacatgtcactaagtatgcattttggctcataggaccacagagccaaagttgggcaagcaagtcaccttccttctcttatttcttgatctctcctataatcagtctctttctccccctttgtttctttctcctcttctgttttctcgctccccactccgtacccttctgcctccccctccccccacacttttctttcttacctaatctggtgaccaaactgaagtgtaaggataagacctctcctagtactagcagcaggaattgtgtgttccagtaagtggtctcttgcacggcacttttttgggatcaaatgttaacgttactccccagactcttcgggcaaaggaatggctagattcagagtaagaacaaccctcccttttttgtaagtccccgtgtttagcagggagaagaaattctctaacatgggtttggttttgttgtgttcttcatgtggaaatgtcgcttaacaaaatatccaggcttttgtttacgtggaaaaagcatcccttgtaatgattgctcatcatacttaaaaacctttttcaaaggattttcatgttcccagctataaggactatttccatgacatgtgttattggcagaatgagtgttaaatatggagcatatagcatggggtgactttcattgtcctaacctgagacagttttccttattactctgtattgatcctgctagtccaagaatggacatgaagtgaacctatcgtggtgactgggataggaaggtgcttgctatttttgccagcacagcatattagttcctttggagccctccattgtctgagtctgcagtgatctgtaggaaggcagctggtcaataatcatgtagtacaatggcttggaattgtaaccactatggttattgattgtcctgtgttgtttcaggcatacttaggtatgtccctggggaaaaagaaaaccattcagctgagagttgctaaccatgttcttttggttagaaataatggttcattttttgcccctggttggaatagtctctaaaaggctctggtgactgaattgaacatgagtccgcatgctgttttctttcaaaaggtatcaaaacggaaagcctctctaaggggaagacctttcaactccattcagaagacaacatttagtaaggaggatggcggaggttactagtaattttcagatgtcttgggctttttctgccaacaaaacccaaaatcaaattagagttggtgaaagctttcttcagtgtttttagaagaggccatcttgaatctgtagaataccatttacacatcaacttcaccctatgctcatttcgtattttgagcttaaatggagtcctctgaagggggggtagtcgtgattctggtggcaaaactagaacttttaacttgtaaaatgaaaaatattaaatggacctttttgtcagttgaggatttagattgattcttttatctgaggagcgtatgttcctcagatgttgcgtagagacctttaggttttcatctactttaagattgctctcttggcaattaggggatttgggaaaagaagaaaaaaagatgccatgtgttgctagtacacagttataggatatggtttctaatggttgaattttgaggaactctccctaaagaatgagttttatatctcctcaaggaaatcatggaaaaatctgtttattcttcagtgagtccttttgaattaatgttcttaaatttttttctaagtctgtgtaagtgcttatgtataagtatataattgtataaatatttataaatatatttatataattacggtttcatttctaccttgagtcaaagttctgtctttagattggtgactgagtaatacttacactttggtgttttttcttaggttcttgaggcttacttaactagcagcttctgatttattgagtgaaagatggttttcatgttaattcctcagttgcatctctgaacttggataacatacttgccgtttgaaaaatagagctgtatactgtcaaaggtgcactggagggtaaaacatttgttggtagtagacaagctcagaaatccaaaaattcagggagggcacagggtaagaagagaggtttgctcagctttgtgctctgatggcacccatctgtactccagcaaagtcatagctgaagcccaaatcgctcaaacgtgtgaagtcaatcatttttcctatagggctctgtttccttttctttaccttctagcttctcttgataaaacagttgggagaactgccaacgtgttcatcagtgagagggtgtggttctttccgatatgttcagcacgtgcatattcatttatgagaaaccaaagtaacttcttcaactcgggttactgtgggatgattaagtagatataaagtgatttaaaagacagcatggtactttcactcagcttaacatgcagctgggatgtctacaatacaagatgtggtgggttttattttattttattttgaggcaggagtgtaattatcttagggttgatataaaggcccatgggaagagttacggattgtacatgggaagaatccataaggagtattgccttgctcaagaatttaatccgctgacagtatgcttcttccagtttgccttacttcctctgcaagtttctttgctccttagggcagaggttttattgaatagattaaatgaggtcagtaagattagttaaaaatagtcattccttgtgggtgttggacacagcttgaaaggagtgtttaaaaaaaaaaagctagggaggaaaagaacaagaaagatagacttcgagagtgataagagaaaaatacagggagatggaatggaaactaccaggaaggccgggcgcggtggctcatgcctgtaatcccaacactttgggaggcggaggtgggcagatcacctaaggtcaggagatcgaggccagcctgagcaacatggtgaaaccccgtctctactaaaaatacaaaaattacctgggtgtggtggcgtgcacctgtaatcccagctactcagaggctgaggcaggggaatggcttgaacctgggaggcagaggttgcagtgagccaagatcgcaccattacactccagcctgggcgacaaagcgacactccatctcaaattt

SEQ ID NO: 43625 - DNA, 1353 bp, Homo Sapiens
gacgctctcagctctcagtgcctggcccagcttccttcaaaatgtatactatttacgaaatcctgtgcaagctcagcttggagggtcatcactctacaccctcaggtgcatatgggtcagtcaaagcctacaccaactttgatgctgagggggatgctttgaacattgaaaggaccatcaggacaaaaggtgtgggtaagttcaccattgtcaacattttgaccaacagcaggaatgctcggagagaggatgttgcctttgccgcagagaaggaccacaaaggaacttacatcagcactgaagtcagccttactggccacctggagacagtcattttgggcctattgaagacacctgctcagtatgatgcttctgagctaaaagcttccatgaaggggctgggaactgaggaggactccctcgttgagatcatctgctcaacaaccaaccaggagctccaggaaattaacagagtctacaaagaaatgtacaaaactgatctggagaaggacattatttcggacacatatggtgacttctgcaagctgatgtttgccctggcaaatgttagaagaccagaggatggctctgtcgttgattatgaactgattgaccaagatgcccgggatttctgtgatgctggagtgaagaggaaaagaactgatgttcccaagtggatcagcatgatgaccagagcatgtcccacctccgtatttgataggtacaagagctacagcccatcaagagagagcatcaagaaagaggttaaaggagacctggaaaatgctttcctgaacctggtccagtgcattcagaacaagcccctgtattttgctgattggctgtactactccatgaagggccgggggctcgagataaggctgatcagaatcatcgtctcccgcagtgaagtggacatgttgaaaattaggtctgaattcaagagaaagtatggcatgtccccgtactattacatccagcaagacactaagaacgactacccaaaaagcactgctgtacctgtgtggtggagatgactgaagcccaacatagcttgagcttccagaaacggtgctccccacgcttccagctaacaggtctagaaaaccagcttgtggctaacagtccctgtggccgtccctgtgaagatgacattagcattgcccccaacctcattttagttgcgtaagcatagcctggctttcctgtctagtctctcctgtaagccaaagaaatgtacattccaagcagttggaagtgaaatctatgatgtgaaacactttgcctcctgtgtactgtgtcataaacagatgaataaactgaatttgtactttagaaacaaaaaaaggaaaa

SEQ ID NO: 43626 - DNA, 191 bp, Homo Sapiens
gtccacgctgtgagatcaatgtcaatgagtgcagttccagcccttgcctgcatggatattgctatgacatggttgatggcttttcctgcttatgcaatccaggctatgttgggataagatgtgaacaggacattgatgactgcatcctgaatgcctgtgagcacaattctacctgcaaagacctgcatctc

SEQ ID NO: 43627 - DNA, 668 bp, Homo Sapiens
acaactgcaccctgagccggagctgcccagtcgccgcgggaccggggccgctggggtctggacgggggtcgccatgatccgctttatcctcatccagaaccgggcaggcaagacgcgcctggccaagtggtacatgcagtttgatgatgatgagaaacagaagctgatcgaggaggtgcatgccgtggtcaccgtccgagacgccaaacacaccaactttgtggaggtcttaaacgaatatttccacaatgtctgtgaactggacctggtgttcaacttctacaaggtttacacggtcgtggacgagatgttcctggctggcgaaatccgagagaccagccagacgaaggtgctgaaacagctgctgatgctacagtccctggagtgagggcaggcgagccccaccccggccccggcccctcctggactcgcctgctcgcttccccttcccaggcccgtggccaacccagcagtccttccctcagctgcctaggaggaagggacccagctgggtctgggccacaagggaggagactgcaccccactgcctctgggccctggctgtgggcagaggccaccgtgtgtgtcccgagtaaccgtgccgttgtcgtgtgatgccataagcgtctgtgcgtggagtccccaataaacctgtggtcctgcctggc

SEQ ID NO: 43628 - DNA, 1047 bp, Homo Sapiens
atgtctgctgcagggcttaagatcactggaagcaaagaaacaaagaggagattgctcctgatcagtatagactgggtgtactgccaagagaagcaagaggagaggagggaactgcctcggatcattacaggtccacctccagaggcagctgtagtggcctttgagtggctgaagaccagcaccctcacaggcctacacccacaactaccactctctttaccccagcccgagtgcgctctaccataccttgttcgtgcttttagcaggggtgattacatgggccgcattcaggaagtgggctgggtgactgcaggactggtgatctgggctggcacctgctactacatttacaaatttaccaagggaagagcccagagtgtgaggactcttgccagaaatggatccacagttaagatggagactgtggttggggtacagagccagaccttggccataaatgaagcagagattaagactaaaccccaagtcgagattggagcagaaactggagcaagaagtgggcctagggctgaagtagagaccaaggccactgctatagccatacacagagccaactctcaggccaaggcaatggttggggcagagccagagactcaatctgagtccaaagtggtggctggaacactggtcatgacagaggcagtgactctgactgaggtcaaggccaaagccagggaagtggccatgaaagaagcagtgacccaaactgatgctgaggctggcaaaatagttaagaaagaagcagtgacacagaccaaggctaaagcttgggcgctggttgccaagacagaggccaagagagaagcaatgacccagaccaaagctgaaactcatatattggctgaaaaagagacagagattaacagagtaatggttacacagagtgagaccttggcagtacccagggaagtggccaagatgggggccacgaacaagactggaattgtggatgaaaccaagacaagagctctggaagagactgtgttgatcccaagagcattccctagtaaaaacgcttcatgctga

SEQ ID NO: 43629 - DNA, 618 bp, Homo Sapiens
gaagtatttaaagaaagaattggttatacacatatgcttgaagtattaaaatccctgggtcagccaccactggaattacttaaagaacttatgaatatggctgtagagggtgaccacacttcagttgggattttgggcattagtaatgtccaacctctcttgcttcttatccagtggcttccagaactacaatcccatgacctgcaaatcttcatctctgattggctgaaaagaatttgttgtattaatagacagagtcgaactacttgtgtcaatgcaaacatggggattagaatcattgaaacccttgacttgcattcttccctccatcaaacttgtgctgagaacttgattgcaatccatggttccttggggagtcagtcagtgagctcagaagaaatccgtcgactactgagattgctgagagtggatgaatctgagtctgttcacccttatgtcactcccgtgactcgagcaatcctgacaatggcccgaaaactaagtctagagagtgccctccagtatttcaatttgtcacatagtatggcaggaatttctgtgcctcccatacagaaatggccagggtctgccttttctttcagtgcttggttttgctta

SEQ ID NO: 43630 - DNA, 5739 bp, Homo Sapiens
gcgcccgccccgcccggcaagatgctgcccgtgtaccaggaggtgaagcccaacccgctgcaggacgcgaacctctgctcacgcgtgttcttctggtggctcaatcccttgtttaaaattggccataaacggagattagaggaagatgatatgtattcagtgctgccagaagaccgctcacagcaccttggagaggagttgcaagggttctgggataaagaagttttaagagctgagaatgacgcacagaagccttctttaacaagagcaatcataaagtgttactggaaatcttatttagttttgggaatttttacgttaattgaggaaagtgccaaagtaatccagcccatatttttgggaaaaattattaattattttgaaaattatgatcccatggattctgtggctttgaacacagcgtacgcctatgccacggtgctgactttttgcacgctcattttggctatactgcatcacttatatttttatcacgttcagtgtgctgggatgaggttacgagtagccatgtgccatatgatttatcggaaggcacttcgtcttagtaacatggccatggggaagacaaccacaggccagatagtcaatctgctgtccaatgatgtgaacaagtttgatcaggtgacagtgttcttacacttcctgtgggcaggaccactgcaggcgattgcagtgactgccctactctggatggagataggaatatcgtgccttgctgggatggcagttctaatcattctcctgcccttgcaaagctgttttgggaagttgttctcatcactgaggagtaaaactgcaactttcacggatgccaggatcaggaccatgaatgaagttataactggtataaggataataaaaatgtacgcctgggaaaagtcattttcaaatcttattaccaatttgagaaagaaggagatttccaagattctgagaagttcctgcctcagagggatgaatttggcttcatttttcagtgcaagcaaaatcatcgtgtttgtgaccttcaccacctacgtgctcctcggcagtgtgatcacagccagccgcgtgttcgtggcagtgacgctgtatggggctgtgcggctgacggttaccctcttcttcccctcagccattgagagggtgtcagaggcaatcgtcagcatccgaagaatccagacctttttgctacttgatgagatatcacagcgcaaccgtcagctgccgtcagatggtaaaaagatggtgcatgtgcaggattttactgctttttgggataaggcatcagagaccccaactctacaaggcctttcctttactgtcagacctggcgaattgttagctgtggtcggccccgtgggagcagggaagtcatcactgttaagtgccgtgctcggggaattggccccaagtcacgggctggtcagcgtgcatggaagaattgcctatgtgtctcagcagccctgggtgttctcgggaactctgaggagtaatattttatttgggaagaaatacgaaaaggaacgatatgaaaaagtcataaaggcttgtgctctgaaaaaggatttacagctgttggaggatggtgatctgactgtgataggagatcggggaaccacgctgagtggagggcagaaagcacgggtaaaccttgcaagagcagtgtatcaagatgctgacatctatctcctggacgatcctctcagtgcagtagatgcggaagttagcagacacttgttcgaactgtgtatttgtcaaattttgcatgagaagatcacaattttagtgactcatcagttgcagtacctcaaagctgcaagtcagattctgatattgaaagatggtaaaatggtgcagaaggggacttacactgagttcctaaaatctggtatagattttggctcccttttaaagaaggataatgaggaaagtgaacaacctccagttccaggaactcccacactaaggaatcgtaccttctcagagtcttcggtttggtctcaacaatcttctagaccctccttgaaagatggtgctctggagagccaagatacagagaatgtcccagttacactatcagaggagaaccgttctgaaggaaaagttggttttcaggcctataagaattacttcagagctggtgctcactggattgtcttcattttccttattctcctaaacactgcagctcaggttgcctatgtgcttcaagattggtggctttcatactgggcaaacaaacaaagtatgctaaatgtcactgtaaatggaggaggaaatgtaaccgagaagctagatcttaactggtacttaggaatttattcaggtttaactgtagctaccgttctttttggcatagcaagatctctattggtattctacgtccttgttaactcttcacaaactttgcacaacaaaatgtttgagtcaattctgaaagctccggtattattctttgatagaaatccaataggaagaattttaaatcgtttctccaaagacattggacacttggatgatttgctgccgctgacgtttttagatttcatccagacattgctacaagtggttggtgtggtctctgtggctgtggccgtgattccttggatcgcaatacccttggttccccttggaatcattttcatttttcttcggcgatattttttggaaacgtcaagagatgtgaagcgcctggaatctacaactcggagtccagtgttttcccacttatcatcttctctccaggggctctggaccatccgggcatacaaagcagaagagaggtgtcaggaactgtttgatgcacaccaggatttacattcagaggcttggttcttgtttttgacaacgtcccgctggtttgccgtccgtctggatgccatctgtgccatgtttgtcatcatcgttgcctttgggtccctgattctggcaaaaactctggatgccgggcaggttggtttggcactgtcctatgccctcacgctcatggggatgtttcagtggtgtgttcgacaaagtgctgaagttgagaatatgatgatctcagtagaaagggtcattgaatacacagaccttgaaaaagaagcaccttgggaatatcagaaacgcccaccaccagcctggccccatgaaggagtgataatctttgacaatgtgaacttcatgtacagtccaggtgggcctctggtactgaagcatctgacagcactcattaaatcacaagaaaaggttggcattgtgggaagaaccggagctggaaaaagttccctcatctcagccctttttagattgtcagaacccgaaggtaaaatttggattgataagatcttgacaactgaaattggacttcacgatttaaggaagaagatgtcaatcatacctcaggaacctgttttgttcactggaacaatgaggaaaaacctggatccctttaatgagcacacggatgaggaactgtggaatgccttacaagaggtacaacttaaagaaaccattgaagatcttcctggtaaaatggatactgaattagcagaatcaggatccaattttagtgttggacaaagacaactggtgtgccttgccagggcaattctcaggaaaaatcagatattgattattgatgaagcgacggcaaatgtggatccaagaactgatgagttaatacaaaaaaaaatccgggagaaatttgcccactgcaccgtgctaaccattgcacacagattgaacaccattattgacagcgacaagataatggttttagattcaggaagactgaaagaatatgatgagccgtatgttttgctgcaaaataaagagagcctattttacaagatggtgcaacaactgggcaaggcagaagccgctgccctcactgaaacagcaaaacaggtatacttcaaaagaaattatccacatattggtcacactgaccacatggttacaaacacttccaatggacagccctcgaccttaactattttcgagacagcactgtgaatccaaccaaaatgtcaagtccgttccgaaggcattttccactagtttttggactatgtaaaccacattgtacttttttttactttggcaacaaatatttatacatacaagatgctagttcatttgaatatttctcccaacttatccaaggatctccagctctaacaaaatggtttatttttatttaaatgtcaatagttgttttttaaaatccaaatcagaggtgcaggccaccagttaaatgccgtctatcaggttttgtgccttaagagactacagagtcaaagctcatttttaaaggagtaggacaaagttgtcacaggtttttgttgttgtttttattgcccccaaaattacatgttaatttccatttatatcagggattctatttacttgaagactgtgaagttgccattttgtctcattgttttctttgacataactaggatccattatttcccctgaaggcttcttgttagaaaatagtacagttacaaccaataggaacaacaaaaagaaaaagtttgtgacattgtagtagggagtgtgtaccccttactccccatcaaaaaaaaaaatggatacatggttaaaggatagaagggcaatattttatcatatgttctaaaagagaaggaagagaaaatactactttctcaaaatggaagcccttaaaggtgctttgatactgaaggacacaaatgtgaccgtccatcctcctttagagttgcatgacttggacacggtaactgttgcagttttagactcagcattgtgacacttcccaagaaggccaaacctctaaccgacattcctgaaatacgtggcattattcttttttggatttctcatttatggaaggctaaccctctgttgactgtaagccttttggtttgggctgtattgaaatcctttctaaattgcatgaataggctctgctaacgtgatgagacaaactgaaaattattgcaagcattgactataattatgcagtacgttctcaggatgcatccaggggttcattttcatgagcctgtccaggttagtttactcctgaccactaatagcattgtcatttgggctttctgttgaatgaatcaacaaaccacaatacttcctgggaccttttgtactttatttgaactatgagtctttaatttttcctgatgatggtggctgtaatatgttgagttcagtttactaaaggttttactattatggtttgaagtggagtctcatgacctctcagaataaggtgtcacctccctgaaattgcatatatgtatatagacatgcacacgtgtgcatttgtttgtatacatatatttgtccttcgtatagcaagttttttgctcatcagcagagagcaacagatgttttattgagtgaagccttaaaaagcacacaccacacacagctaactgccaaaatacattgaccgtagtagctgttcaactcctagtacttagaaatacacgtatggttaatgttcagtccaacaaaccacacacagtaaatgtttattaatagtcatggttcgtattttaggtgactgaaattgcatcagtgatcataatgaggtttgttaaaacgatagctatattcaaaatgtctatatgtttatttggacttttgaggttaaagacagtcatataaacgtcctgtttctgttttaatgttatcatagaattttttaatgaaactaaattcaattgaaataaatgatagttttcatctcca

SEQ ID NO: 43631 - DNA, 738 bp, Homo Sapiens
atgtctgccacaggggaccgacacccgacccaaggggaccaggaggccccggtaagccaggagggagcacaggccgaggcggccggagctggtaaccaggagggcggcgactccggccccgacagcagcgacatggtgcctgcggccgaggtggtcggagtcgcagggcccgtggaaggcctcggggaggaggagggtgagcaggcggcaggcctggccgcagtcccccagggcgggagcgccgaggaggactcagatatcgggcccgcgacggccaacttcgacttggcggtggccacccgtcggtacccggcggcgggcattggcttcgtgttcctgtacctggtccactcccttctccgccgcctctatcacaacgaccacatccagatagcgaaccgtcacctcagccgcctgatggtggggccccacgctgctgtgcccaacctctgggacaaccctcccctgctgctgctgtcccagaggctgggtgcaggggctgcagccccagaaggcgagggcctcggcctgatccaggaggctgcgtcggtccaggaggccgcgtcggtcccagagcctgcagtgccagctgacctggccgagatggccagggagcccgcggaggaggccgcagatgagaaacccccagaggaggccgcagaggagaagctcacagaggaggccacagaggaaccggccgcagaggaaccgacctcagaggaggccgtggcccccgag

SEQ ID NO: 43632 - DNA, 564 bp, Homo Sapiens
gcgatattaaatgccaactacatggccaagcgattagaaaaacactacagaattcttttcaggggtgcaagaggttatgtgggtcatgaatttattttggacacgagacccttcaaaaagtctgcaaatattgaggcagtggatgtggccaagagactccaggattatggatttcacgcccctatcatgccctggcctgtggcagggaccctcatggttgagcccactgagtcggaggacaaggcagagctggacagattctgtgatgccatgatcagcattcggcaggaagttgctgacattgaggagggccgcatcgaccccagggtcaatccgctgaagatgtctccacactccctgacctgcgttatatcttcccactgggaccggccttatagagaggtggcagcattcccactccccttcgtgaaaccagagaacaaattctggccagtgattgcccggattgatgacatatatggagatcagcacctggtttgtacctgcccacccatggaagtttatgagttgccattttctgaacaaaagagggcctcttcttag

SEQ ID NO: 43633 - DNA, 605 bp, Homo Sapiens
catggcgctcctgctgcgcttcgtgctcctgtgcggagtcgcggatttcaccagaagtttgagtatcactactcctgagcagatgattgaaaaagccaaaggggaaactacctatctgccatgcaaatttacgcttagtcctgaagaccagggaccactggacatcgagtggctgatatcaccagctgataatcagaaggtggatcaagtgatgattttatattctggaaacaaaatttatgatgattactatccagaactgaaaggccgagtacattttaagagtaatgatctcaaatctggtgatgcatcaataaatgtaacgaatttacagctgtcagatattggcacagatcagtgcaaagtgaaaaaaagctcctggtgttgcaaataagaagattcagctggtagttcttgggaagatgtgccgcctccaaagagccgtacgtccgctgccagaagctgcataggcagtaatcattcatccctggaatccatgtctccttccaacatggagggatattccaagactcagtataaacaagtaccgagtgaagactttgaacgcactcctcagagtccaactctcccacctgctaaggtag

SEQ ID NO: 43634 - DNA, 2701 bp, Homo Sapiens
cacaaacaagctggagcagcccaggaggacaagaattttgggcagatttgaatgccatgaacgtgtatgaaacaactgaatttgaccaactacgaaggctgtccacaccaccctctagcaatgtcaactctatttaccacacagtctggaaattcttctgtagggaccactttggatggagagagtatcccgagtctgtcattcgattgattgaagaagccaactctcggggtctgaaagaggttcgatttatgatgtggaataaccactacatcctccacaattcattcttcaggagagagataaaaaggagacccctcttccgctcctgttttatactgcttccatatttacagacacttggtggggttcccacacaagctcctccacctcttgaagcaacttcatcatcacaaattatctgcccagatggggtcacttcagcaaacttttaccctgaaacttgggtttatatgcatccatctcaggacttcatccaagtccctgtttctgcagaggataaaagttatcggatcatttacaatctttttcataagactgtgcctgagtttaaatacagaattttgcagatattgagagtccaaaaccagtttctttgggagaaatataaaaggaaaaaggaatatatgaacaggaaaatgtttggccgtgacaggataataaatgagagacatttatttcatggaacatcccaggatgtggtagatggaatctgcaaacacaactttgaccctcgagtctgtggaaagcatgctacaatgtttggacaaggcagttattttgcaaagaaggcaagctactctcataacttttctaagaagtcctccaaaggagtccacttcatgtttctggccaaagtgctgacgggcagatacacaatgggcagtcatggcatgagaaggcccccgccagtcaatcctggcagtgtcaccagtgacctttatgactcttgtgtggataatttctttgagcctcagatttttgtcatttttaatgatgaccagagttacccttattttgttatccaatatgaagaagtcagtaacactgtttccatttgaaaaatcttggtactgctaaattatttgatatgaactcaatccagcatttgtagcaggttttgaatgggtgggactgggtggggaacagcattggacattaatagggcacttttcagacccattttttaaagtgctagaaaatgctttttttaaaaaaaaaatacaagttttaaaatgaccacttactctttaattatttactaattgctagtgtactcagtgtggaaaagactacagattacacactcttttcattcacacttgtacatatagacagcaatgttattaggagcattaaattaaaaaactgaacagcctaatttaaatgtggcttgggcctggtagaagtttgaccaaatggaatggaggctgtgagcaatgtgaggattctatttatttatttacgtttgataaaacttactggaactagtactaccatgcgtattccctgtccaaagcatcactgctttggtatagtataagttcatgaaattctggtgggtagaaagaaatttttatttctatcagcagtactaaaatgtatcagccaaccagagaacatcagtgactttaacttctgcagagtttgccccagaattcagagttctatttagaggaagttaaaacaacaacaaaaaacaaccatttgaaaaatttttgtcaccagcaaaacttttcactaattagtgatatgaaatgtgatttttgtgttgttaaacttcagctttggaaaactcagtctctttcattatcatccattccaatttgaaggagttgggcagctaatttggttaaaggcagtcttgagggttagaagtattacttccttttcgggttccagacctagcttgtgactgaaagttttagaaaaaggaagtacatctatagccaaattgataaggttattactgtgttttgcacaaagtatattagcaaaagtatttgctggaattattggtagatggcagtcccactcctacacctgctttgtcagatacagctgggttccctggctgactctgtaccttacttacactacttacttaatagaaacacaaacttggaaattgtgccagtggtccagctggagcacaacgtttggtgaatatgctgtttcctcagttcagagaggtagcaactaggtaaactccttataaaaagcaaatacctggatttacaaaagtgaaagtagttgttcacaaaagaattcgccatggaattctttcagttaccaagctctcctggtaatgtttgtggttatatcatttacacaaaacttttcaggaacttctgtgttgtttaagcaagatgtatctgtactgatgtctcagtgaatcagtctgtttattaagcacttatcagggcttccacacacttatttattttgccctagttaatcctgttgtttgctgccattggcatgaaatggccaactgtggctgttacagttctttcattcaattataacttgtaaaccagtgactcctaatctttttcaagttaagacaccttaccattgcttatttggttttatgagacttgttcctttttttctccctaaggaaaaagaaagctttatgacatatttatttttttaataaaactaagcaaaaataaaa

SEQ ID NO: 43635 - DNA, 2833 bp, Homo Sapiens
ccatggccgccaaccacgggccgccccccggtgcctacgaggcgggcggccccggcgccttcatgcacggcgcgggcgccgcgtcctcgccagtctacgtgcccacaccgcgggctcctccgtgctgggcctgtcctacctccagggcggaggcgcgggctctgcgtccggaggtcgggcggcagctccggtggggccgcgtctggtgcggggcccgggacccagcagggcagcccgggatggagccaggcgggagccgacggagccgcttacaccccgccgccggtgtcgccgcgcttctccttcccggggaccaccgggtccctggcggccgccgccgccgctgccgcggcccgggaagctgcggcctacagcagtggcggcggagcggcgggtgcgggcctggcgggccgcgagcagtacgggcgcgccggcttcgcgggctcctactccagcccctacccggcttacatggccgacgtgggcgcgtcctgggccgcagccgccgccgcctccgccggccccttcgacagcccggtcctgcacagcctgcccggccgggccaacccggccgcccgacaccccaatctcgtagatatgtttgacgacttctcagaaggcagagagtgtgtcaactgtggggctatgtccaccccgctctggaggcgagatgggacgggtcactatctgtgcaacgcctgcggcctctaccacaagatgaacggcatcaaccggccgctcatcaagcctcagcgccggctgtccgcctcccgccgagtgggcctctcctgtgccaactgccagaccaccaccaccacgctgtggcgccgcaatgcggagggcgagcctgtgtgcaatgcctgcggcctctacatgaagctccacggggtccccaggcctcttgcaatgcggaaagaggggatccaaaccagaaaacggaagcccaagaacctgaataaatctaagacaccagcagctccttcaggcagtgagagccttcctcccgccagcggtgcttccagcaactccagcaacgccaccaccagcagcagcgaggagatgcgtcccatcaagacggagcctggcctgtcatctcactacgggcacagcagctccgtgtcccagacgttctcagtcagtgcgatgtctggccatgggccctccatccaccctgtcctctcggccctgaagctctccccacaaggctatgcgtctcccgtcagccagtctccacagaccagctccaagcaggactcttggaacagcctggtcttggccgacagtcacggggacataatcactgcgtaatcttccctcttccctcctcaaattcctgcacggacctgggacttggaggatagcaaagaaggaggccctgggctcccaggggccggcctcctctgcctggtaatgactccagaacaacaactgggaagaaacttgaagtcgacaatctggttaggggaagcgggtgttggattttctcagatgcctttacacgctgatgggactggagggagcccacccttcagcacgagcacactgcatctctcctgtgagttggagacttctttcccaagatgtccttgtcccctgcgttccccactgtggcctagaccgtgggttttgcattgtgtttctagcaccgaggatctgagaacaagcggagggccgggccctgggacccctgctccagcccgaatgacggcatctgtttgccatgtacctggatgcgacgggcccctggggacaggcccttgccccatccatccgcttgaggcatggcaccgccctgcatccctaataccaaatctgactccaaaattgtggggtgtgacatacaagtgactgaacacttcctggggagctacaggggcacttaacccaccacagcacagcctcatcaaaatgcagctggcaacttctcccccaggtgccttccccctgctgccggcctttgctccttcacttccaacatctctcaaaataaaaatccctcttcccgctctgagcgattcagctctgcccgcagcttgtacatgtctctcccctggcaaaacaagagctgggtagtttagccaaacggcaccccctcgagttcactgcagacccttcgttcaccgtgtcacacatagaggggttctgagtaagaacaaaacgttctgctgctcaagccagtctggcaagcactcagcccagcctcgaggtccttctggggagagtgtaagtggacagagtcctggtcagggggcaggagtgtcccaagggctggcccacctgctgtctgtctgctcctcctagcccttggtcagatggcagccagagtccctcaggacctgcagcctcgccccggcagaagtcttttgtccaggaggcaaaaagccagagattctgcaacacgaattcgaagcaaacaaacacaacacaacagaattcctggaaagaagacgactgctaagacacggcaggggggcctggagggagcctccgactctgagctgctccgggatctgccgcgttctcctctgcacattgctgtttctgcccctgatgctggagctcaaggagactccttcctctttctcagcagagctgtagctgactgtggcattactacgcctccccacacgcccagacccctcactccaaaatcctactggctgtagcagagaatacctttgaaccaagattctgttttaatcatcatttacattgttttcttccaaaggccccctcgtataccctccctaacccacaaacctgttaacattgtcttaaggtgaaatggctggaaaatcagtatttaactaataaatttatctgtattcctctt

SEQ ID NO: 43636 - DNA, 1017 bp, Homo Sapiens
cagctcttccacccagagcaactcattactgggaaagaggatgctgccaacaactatgcctgtagtcactataccattggccaggggatcactgacctggggatagaccagatctgcaagtctgaccactgcacagaacctcaggacttcctggtgttccacagctttgttgggggcactggctctgacttcacctcactccgcatggagtggctttctgttgactacggcaagaaatccaagctggaattctttatctactcagcccccacagctgtctataattgtggtccagctaatttcatcctgatcactcacactaccctggagcactcagactgtgccttcatggtggacaatgaagccatctatgacatttgccgctgcaacctggacatcgagcatccaacctcagccaacctcaactgccacattaccatcatctcctctgtcacatcttctctgcactttgatgggcccctcaatgtggacctgatgaagttccagaccaacctcacaccttaccctcacatccacttcccccggccatactcactcatcatctctgtagagaaggtataccatgaacagctgtcggtggccaagatcctcaaagcctgctttgagcttaccaaccagatggagaagtgtgacccccggcatagcaagtacatgggctgctgcctgctgtaccgtggagatgtgatgttcaaggatgtttatactgccattgccaccatcaagaccaagtgtagcattcagtttgtggactggttccccatgggcttcaagcccactgtggtgcctggtggtgacctggccaaggtgcagcatgccatgtgcatgctgagcaacatgatcactatcgctgaggcctgggcctgcccgggccacaagttcaacctgatgtatgccaagagggcgtttgtgcactgggatgtgggcaaaggcatggaggagggagagttctctgaggccctggaggatatgggtgtgctggagaaggattatgagaaa

SEQ ID NO: 43637 - DNA, 6966 bp, Homo Sapiens
atggggccgggggcccgtggccgccgccgccgccgtcgcccgatgtcgccgccaccgccaccgccacccgtgcgggcgctgcccctgctgctgctgctagcggggccgggggctgcagcccccccttgcctggacggaagcccgtgtgcaaatggaggtcgttgcacccagctgccctcccgggaggctgcctgcctgtgcccgcctggctgggtgggtgagcggtgtcagctggaggacccctgtcactcaggcccctgtgctggccgtggtgtctgccagagttcagtggtggctggcaccgcccgattctcatgccggtgcccccgtggcttccgaggccctgactgctccctgccagatccctgcctcagcagcccttgtgcccacggtgcccgctgctcagtggggcccgatggacgcttcctctgctcctgcccacctggctaccagggccgcagctgccgaagcgacgtggatgagtgccgggtgggtgagccctgccgccatggtggcacctgcctcaacacacctggctccttccgctgccagtgtccagctggctacacagggccactatgtgagaaccccgcggtgccctgtgcaccctcaccatgccgtaacgggggcacctgcaggcagagtggcgacctcacttacgactgtgcctgtcttcctgggtttgagggtcagaattgtgaagtgaacgtggacgactgtccaggacaccgatgtctcaatggggggacatgcgtggatggcgtcaacacctataactgccagtgccctcctgagtggacaggccagttctgcacggaggacgtggatgagtgtcagctgcagcccaacgcctgccacaatgggggtacctgcttcaacacgctgggtggccacagctgcgtgtgtgtcaatggctggacaggcgagagctgcagtcagaatatcgatgactgtgccacagccgtgtgcttccatggggccacctgccatgaccgcgtggcttctttctactgtgcctgccccatgggcaagactggcctcctgtgtcacctggatgacgcctgtgtcagcaacccctgccacgaggatgctatctgtgacacaaatccggtgaacggccgggccatttgcacctgtcctcccggcttcacgggtggggcatgtgaccaggatgtggacgagtgctctatcggcgccaacccctgcgagcacttgggcaggtgcgtgaacacgcagggctccttcctgtgccagtgcggtcgtggctacactggacctcgctgtgagaccgatgtcaacgagtgtctgtcggggccctgccgaaaccaggccacgtgcctcgaccgcataggccagttcacctgtatctgtatggcaggcttcacaggaacctattgcgaggtggacattgacgagtgtcagagtagcccctgtgtcaacggtggggtctgcaaggaccgagtcaatggcttcagctgcacctgcccctcgggcttcagcggctccacgtgtcagctggacgtggacgaatgcgccagcacgccctgcaggaatggcgccaaatgcgtggaccagcccgatggctacgagtgccgctgtgccgagggctttgagggcacgctgtgtgatcgcaacgtggacgactgctcccctgacccatgccaccatggtcgctgcgtggatggcatcgccagcttctcatgtgcctgtgctcctggctacacgggcacacgctgcgagagccaggtggacgaatgccgcagccagccctgccgccatggcggcaaatgcctagacctggtggacaagtacctctgccgctgcccttctgggaccacaggtgtgaactgcgaagtgaacattgacgactgtgccagcaacccctgcacctttggagtctgccgtgatggcatcaaccgctacgactgtgtctgccaacctggcttcacagggcccctttgtaacgtggagatcaatgagtgtgcttccagcccatgcggcgagggaggttcctgtgtggatggggaaaatggcttccgctgcctctgcccgcctggctccttgcccccactctgcctccccccgagccatccctgtgcccatgagccctgcagtcacggcatctgctatgatgcacctggcgggttccgctgtgtgtgtgagcctggctggagtggcccccgctgcagccagagcctggcccgagacgcctgtgagtcccagccgtgcagggccggtgggacatgcagcagcgatggaatgggtttccactgcacctgcccgcctggtgtccagggacgtcagtgtgaactcctctccccctgcaccccgaacccctgtgagcatgggggccgctgcgagtctgcccctggccagctgcctgtctgctcctgcccccagggctggcaaggcccacgatgccagcaggatgtggacgagtgtgctggccccgcaccctgtggccctcatggtatctgcaccaacctggcagggagtttcagctgcacctgccatggagggtacactggcccttcctgcgatcaggacatcaatgactgtgaccccaacccatgcctgaacggtggctcgtgccaagacggcgtgggctccttttcctgctcctgcctccctggtttcgccggcccacgatgcgcccgcgatgtggatgagtgcctgagcaacccctgcggcccgggcacctgtaccgaccacgtggcctccttcacctgcacctgcccgccaggctacggaggcttccactgcgaacaggacctgcccgactgcagccccagctcctgcttcaatggcgggacctgtgtggacggcgtgaactcgttcagctgcctgtgccgtcccggctacacaggagcccactgccaacatgaggcagacccctgcctctcgcggccctgcctacacgggggcgtctgcagcgccgcccaccctggcttccgctgcacctgcctcgagagcttcacgggcccgcagtgccagacgctggtggattggtgcagccgccagccttgtcaaaacgggggtcgctgcgtccagactggggcctattgcctttgtccccctggatggagcggacgcctctgtgacatccgaagcttgccctgcagggaggccgcagcccagatcggggtgcggctggagcagctgtgtcaggcgggtgggcagtgtgtggatgaagacagctcccactactgcgtgtgcccagagggccgtactggtagccactgtgagcaggaggtggacccctgcttggcccagccctgccagcatggggggacctgccgtggctatatggggggctacatgtgtgagtgtcttcctggctacaatggtgataactgtgaggacgacgtggacgagtgtgcctcccagccctgccagcacgggggttcatgcattgacctcgtggcccgctatctctgctcctgtcccccaggaacgctgggggtgctctgcgagattaatgaggatgactgcggcccaggcccaccgctggactcagggccccggtgcctacacaatggcacctgcgtggacctggtgggtggtttccgctgcacctgtcccccaggatacactggtttgcgctgcgaggcagacatcaatgagtgtcgctcaggtgcctgccacgcggcacacacccgggactgcctgcaggacccaggcggaggtttccgttgcctttgtcatgctggcttctcaggtcctcgctgtcagactgtcctgtctccctgcgagtcccagccatgccagcatggaggccagtgccgtcctagcccgggtcctgggggtgggctgaccttcacctgtcactgtgcccagccgttctggggtccgcgttgcgagcgggtggcgcgctcctgccgggagctgcagtgcccggtgggcgtcccatgccagcagacgccccgcgggccgcgctgcgcctgccccccagggttgtcgggaccctcctgccgcagcttcccggggtcgccgccgggggccagcaacgccagctgcgcggccgccccctgtctccacgggggctcctgccgccccgcgccgctcgcgcccttcttccgctgcgcttgcgcgcagggctggaccgggccgcgctgcgaggcgcccgccgcggcacccgaggtctcggaggagccgcggtgcccgcgcgccgcctgccaggccaagcgcggggaccagcgctgcgaccgcgagtgcaacagcccaggctgcggctgggacggcggcgactgctcgctgagcgtgggcgacccctggcggcaatgcgaggcgctgcagtgctggcgcctcttcaacaacagccgctgcgaccccgcctgcagctcgcccgcctgcctctacgacaacttcgactgccacgccggtggccgcgagcgcacttgcaacccggtgtacgagaagtactgcgccgaccactttgccgacggccgctgcgaccagggctgcaacacggaggagtgcggctgggatgggctggattgtgccagcgaggtgccggccctgctggcccgcggcgtgctggtgctcacagtgctgctgccgccagaggagctactgcgttccagcgccgactttctgcagcggctcagcgccatcctgcgcacctcgctgcgcttccgcctggacgcgcacggccaggccatggtcttcccttaccaccggcctagtcctggctccgaaccccgggcccgtcgggagctggcccccgaggtgatcggctcggtagtaatgctggagattgacaaccggctctgcctgcagtcgcctgagaatgatcactgcttccccgatgcccagagcgccgctgactacctgggagcgttgtcagcggtggagcgcctggacttcccgtacccactgcgggacgtgcggggggagccgctggagcctccagaacccagcgtcccgctgctgccactgctagtggcgggcgctgtcttgctgctggtcattctcgtcctgggtgtcatggtggcccggcgcaagcgcgagcacagcaccctctggttccctgagggcttctcactgcacaaggacgtggcctctggtcacaagggccggcgggaacccgtgggccaggacgcgctgggcatgaagaacatggccaagggtgagagcctgatgggggaggtggccacagactggatggacacagagtgcccagaggccaagcggctaaaggtagaggagccaggcatgggggctgaggaggctgtggattgccgtcagtggactcaacaccatctggttgctgctgacatccgcgtggcaccagccatggcactgacaccaccacagggcgacgcagatgctgatggcatggatgtcaatgtgcgtggcccagatggcttcaccccgctaatgctggcttccttctgtgggggggctctggagccaatgccaactgaagaggatgaggcagatgacacatcagctagcatcatctccgacctgatctgccagggggctcagcttggggcacggactgaccgtactggcgagactgctttgcacctggctgcccgttatgcccgtgctgatgcagccaagcggctgctggatgctggggcagacaccaatgcccaggaccactcaggccgcactcccctgcacacagctgtcacagccgatgcccagggtgtcttccagattctcatccgaaaccgctctacagacttggatgcccgcatggcagatggctcaacggcactgatcctggcggcccgcctggcagtagagggcatggtggaagagctcatcgccagccatgctgatgtcaatgctgtggatgagcttgggaaatcagccttacactgggctgcggctgtgaacaacgtggaagccactttggccctgctcaaaaatggagccaataaggacatgcaggatagcaaggaggagacccccctattcctggccgcccgcgagggcagctatgaggctgccaagctgctgttggaccactttgccaaccgtgagatcaccgaccacctggacaggctgccgcgggacgtagcccaggagagactgcaccaggacatcgtgcgcttgctggatcaacccagtgggccccgcagcccccccggtccccacggcctggggcctctgctctgtcctccaggggccttcctccctggcctcaaagcggcacagtcggggtccaagaagagcaggaggccccccgggaaggcggggctggggccgcaggggccccgggggcggggcaagaagctgacgctggcctgcccgggccccctggctgacagctcggtcacgctgtcgcccgtggactcgctggactccccgcggcctttcggtgggccccctgcttcccctggtggcttcccccttgaggggccctatgcagctgccactgccactgcagtgtctctggcacagcttggtggcccaggccgggcgggtctagggcgccagccccctggaggatgtgtactcagcctgggcctgctgaaccctgtggctgtgcccctcgattgggcccggctgcccccacctgcccctccaggcccctcgttcctgctgccactggcgccgggaccccagctgctcaacccagggacccccgtctccccgcaggagcggcccccgccttacctggcagtcccaggacatggcgaggagtacccggcggctggggcacacagcagccccccaaaggcccgcttcctgcgggttcccagtgagcacccttacctgaccccatcccccgaatcccctgagcactgggccagcccctcacctccctccctctcagactggtccgaatccacgcctagcccagccactgccactggggccatggccaccaccactggggcactgcctgcccagccacttcccttgtctgttcccagctcccttgctcaggcccagacccagctggggccccagccggaagttacccccaagaggcaagtgttggcctga

SEQ ID NO: 43638 - DNA, 1198 bp, Homo Sapiens
agaaactgctgtgttacagaaaagcatgtgactttcagaataatcccgagtgaggatgagtccagatgtgcctctactgaatgattacaagcaggacttctttctgaagcgctttccacagactgttcttggaggccctcgattcaaattaggctattgtgcccctccttacatatatgttaatcaaattattctttttctaatgccatgggtttggggtggagtcggaacacttttataccagttaggcatcctgaaagactattatacagcagcactttcaggtggattaatgctttttactgcatttgtcatccagttcacaagtttatacgccaaaaacaaatcaacaacagtagaaagaatactaaccacggatatcttagcagaggaggatgagcatgaatttaccagttgtactggtgctgagactgtcaaatttctcattcctggcaagaaatatgtagccaatacagtttttcattctattcttgctggattagcgtgtggtcttggaacatggtatctgctcccaaatagaataaccttgctgtatggcagtacaggaggcactgctctactattcttctttggatggatgacactatgtatagcagaatattctttaattgtaaacacagctacagagactgcgactttccaaacacaggatacttatgaaattattcctcttatgagacctctttatatttttttctttgtttctgtggatctggcacacaggtaaaaacctaccaaatactttgtaactaactttgtttttaagtatacagagtaagagagctttccttttagtgttacaaaaaaatgaatccatggattaaaaatcatcaaaccattgggtgacaggttattttgataattattcttttaggattaatctctgtaaaacatactaaagcaatagttaaaacttattaaagagtttttttaaaaaaccctttttgagataaggaacttttcaattttgtgtttcactttaaataaggagctttgagtttttaagatagcctggctaaaacctgtgtaaggagatggaactttcctgtggggggaaagaagaaattaaaatttatacatataaatattatatacagattgaatgaatttaagacaaatacaaaatttatttctaattttatgatagcaacaatagtagaagtaatattgatttttt

SEQ ID NO: 43639 - DNA, 687 bp, Homo Sapiens
ctggccacgcccacctacggggacctcagccacctgacattggccaccatgagcaggatcactacctccttgtgcttcccgggccagctcaatgcggacctgcacaagctggtggtgaacatgcccttcccctgcctgcacttcttcatgccaggcatgaagcccggcagccagcattaccgggccctgaccgtgcccgagctcacccctcagatgtttgatgccaagaacatgatggctgcccgcgaccggcaccacggctgctacctggcagtggccaccgtgttccggggctgcctgtccatgaaggaggtggacgagcagatgctgtccatccagagcaagaacagcagctacttcgtggagtggatccccaacaacatgaaggtggacgtgtgtgacatcccaccccccagcctcaagatgtcttccaccctcatcagcaacagcacgggcatccaggagctgttcaagatctcagagcagttcacggacatgttccagcacaaggccttcctacactggtacatgggcaagggcatggacgagatggagatcaccgaggccaagagcaacatgaatgacctggtgtccgagtaccagcagtaccaggactccatggcccaggaggagggtgagatgttcgcagatgaggaggaggaattggaggcccagggccccaagtga

SEQ ID NO: 43640 - DNA, 1245 bp, Homo Sapiens
atgaaccccacactaggcctggccatttttctggctgttctcctcacggtgaaaggtcttctaaagccgagcttctcaccaaggaattataaagctttgagcgaggtccaaggatggaagcaaaggatggcagccaaggagcttgcaaggcagaacatggacttaggctttaagctgctcaagaagctggccttttacaaccctggcaggaacatcttcctatcccccttgagcatctctacagctttctccatgctgtgcctgggtgcccaggacagcaccctggacgagatcaagcaggggttcaacttcagaaagatgccagaaaaagatcttcatgagggcttccattacatcatccacgagctgacccagaagacccaggacctcaaactgagcattgggaacacgctgttcattgaccagaggctgcagccacagcgtaagtttttggaagatgccaagaacttttacagtgccgaaaccatccttaccaactttcagaatttggaaatggctcagaagcagatcaatgactttatcagtcaaaaaacccatgggaaaattaacaacctgatcgagaatatagaccccggcactgtgatgcttcttgcaaattatattttctttcgagccaggtggaaacatgagtttgatccaaatgtaactaaagaggaagatttctttctggagaaaaacagttcagtcaaggtgcccatgatgttccgtagtggcatataccaagttggctatgacgataagctctcttgcaccatcctggaaataccctaccagaaaaatatcacagccatcttcatccttcctgatgagggcaagctgaagcacttggagaagggattgcaggtggacactttctccagatggaaaacattactgtcacgcagggtcgtagacgtgtctgtacccagactccacatgacgggcaccttcgacctgaagaagactctctcctacataggtgtctccaaaatctttgaggaacatggtgatctcaccaagatcgcccctcatcgcagcctgaaagtgggcgaggctgtgcacaaggctgagctgaagatggatgagaggggtacggaaggggccgctggcaccggagcacagactctgcccatggagacaccactcgtcgtcaagatagacaaaccctatctgctgctgatttacagcgagaaaataccttccgtgctcttcctgggaaagattgttaaccctattggaaaataa

SEQ ID NO: 43641 - DNA, 963 bp, Homo Sapiens
atgatggaaatagccaatgtgagttctccagaagtctttgtcctcctgggcttctccacacgaccctcactagaaactgtcctcttcatagttgtcttgagtttttacatggtatcgatcttgggcaatggcatcatcattctggtctcccatacagatgtgcacctccacacacctatgtacttctttcttgccaacctccccttcctggacatgagcttcaccacgagcattgtcccacagctcctggctaacctctggggaccacagaaaaccataagctatggagggtgtgtggtccagttctatatctcccattggctgggggcaaccgagtgtgtcctgctggccaccatgtcctatgaccgctacgctgccatctgcaggccactccattacactgtcattatgcatccacagctttgccttgggctagctttggcctcctggctggggggtctgaccaccagcatggtgggctccacgctcaccatgctcctaccgctgtgtgggaacaattgcatcgaccacttcttttgcgagatgcccctcattatgcaactggcttgtgtggataccagcctcaatgagatggagatgtacctggccagctttgtctttgttgtcctgcctctggggctcatcctggtctcttacggccacattgcccgggccgtgttgaagatcaggtcagcagaagggcggagaaaggcattcaacacctgttcttcccacgtggctgtggtgtctctgttttacgggagcatcatcttcatgtatctccagccagccaagagcacctcccatgagcagggcaagttcatagctctgttctacaccgtagtcactcctgcgctgaacccacttatttacaccctgaggaacacggaggtgaagagcgccctccggcacatggtattagagaactgctgtggctctgcaggcaagctggcgcaaatttag

SEQ ID NO: 43642 - DNA, 666 bp, Homo Sapiens
atgcctggaggtcggcttcttggggacgtggctcccaactttgaggccaataccaccgccggccgcgtccgtttccaggactttctgggaaactcactgggcattctcttctcccaccctcgggactttaccccagtgtgcaccacagagcttggcagagctgcaaaactggcaccggaatttgccaagaggaatgttaagttgattgccctttaccgtgttgaggaccgtcttgcctggagcaaggatatcaatgcttacaatggtgaagaatccacagaaaagttaccttttcgcatcatccatgataagaatcgggaccttttcatcctgttgggcatgctggatccagcggagaaggatgaaaaggacatgcctgtgacagctcgtgtggtgtttgttattggtcctgataagaagccgaagctgtctatcatctacctggctaccactggcaggaactttgatgagattctcagggtagtcacctctctccagctgacagcagaaaagagggttgccaccccagttgattggaagggggatagtgtcatggtccttccagtgattcctgaagaggaggccaaaaaacttttcctgaaaggagtcttcaccaaggagctcccatctggcaagaaatacctccgccccacaccccagccttaa

SEQ ID NO: 43643 - DNA, 1275 bp, Homo Sapiens
atgcccaccctttcagtgttcatggatgtgcccctcgcccacaagctagagggcagcttgttaaagacctacaaacaagatgattacccgaacaagatattcttagcctatagagtctgcatgacaaatgaaggccatccctgggtttctctcgtggtgcagaagactcgactacagatttcacaggatccctccctgaattatgagtacttgcccaccatgggcctgaaatcattcatccaggcctctctagcactcctctttggaaagcacagccaagccattgtggagaacagggtagggggtgtacacactgttggtgacagtggtgccttccagcttggcgtccagtttctcagagcttggcataaggatgctcgtatagtttacatcatctcttctcaaaaagaactgcatggactcgtcttccaggacatgggctttacagtttatgaatactctgtctgggaccccaagaagctatgcatggaccccgacatactcctcaatgtggtggagcagatcccacatggctgtgtccttgtgatggggaacattatcgactgcaagttgacaccaagtgggtgggcaaagttgatgtccatgataaagagcaagcagatattcccattttttgatattccctgtcaaggtttatacaccagtgacttggaagaagatactagaatcttatactttgtgtctcaaggctttgagttcttctgcagccagtctctgtccaagaattttggcatttatgatgaaggagtggggatgctagtggtggtggcagtcaacaaccagcagctgctgtgtgtcctctcccagctggaaggattagcccaggccctgtggctaaacccccccaacacgggtgcacgtgtcatcacctccatcctctgcaaccctgctctgctgggagaatggaagcagagtctaaaagaagttgtagagaacatcatgctaaccaaggaaaaagtgaaggagaaactccagctcctgggaacccctgggtcctggggtcacatcaccgagcagagtgggacccacggctatcttggactcaactcccagcaggtggaatacctggtcaggaagaagcacatctatatccccaagaacggtcagattaacttcagctgtatcaatgccaacaacataaattacatcactgagggcatcaatgaggctgtcctcctcacagagagctcagagatgtgtcttccaaaggaaaaaaaaacactgattggaataaaactttagtctttgcaaaaa

SEQ ID NO: 43644 - DNA, 180 bp, Homo Sapiens
atgctcaccatggggcgcctgcaactggttgtgttgggcctcacctgctgctgggcagtggcgagtgccgcgaagaccccatgctgcactatgtgggcttcgtccctgtcattgatggagacttcatccccgctgacccgatcaacctgtacgccaacgccgccgacatcgactatatag

SEQ ID NO: 43645 - DNA, 1455 bp, Homo Sapiens
ctttgacctgcagtagagcctacgtcagaggctggcgcaaacagaagtgcagcggtggcggcggctggttgcgggccggcggcgggctggcggagatggaggatcttgttcaagatggggtggcttcaccagctacccctgggaccgggaaatctaagctggaaacattgcccaaagaagacctcatcaagtttgccaagaaacagatgatgctaatacagaaagctaaatcaaggtgtacagaattggagaaagaaattgaagaactcagatcaaaacctgttactgaaggaactggtgatattattaaggcattaactgaacgtctggatgctcttcttctggaaaaagcagagactgagcaacagtgtctttctctgaaaaaggaaaatataaaaatgaagcaagaggttgaggattctgtaacaaagatgggagatgcacataaggagttggaacaatcacatataaactatgtgaaagaaattgaaaatttgaaaaatgagttgatggcagtacgttccaaatacagtgaagacaaagctaacttacaaaagcagctggaagaagcaatgaatacgcaattagaactttcagaacaacttaaatttcagaacaactctgaagataatgttaaaaaactacaagaagagattgagaaaattaggccaggctttgaggagcaaattttatatctgcaaaagcaattagacgctaccactgatgaaaagaaggaaacagttactcaactccaaaatatcattgaggctaattctcagcattaccaaaaaaatattaatagtttgcaggaagagcttttacagttgaaagctatacaccaagaagaggtgaaagagttgatgtgccagattgaagcatcagctaaggaacatgaagcagagataaataagttgaacgagctaaaagagaacttagtaaaacaatgtgaggcaagtgaaaagaacatccagaagaaatatgaatgtgagttagaaaatttaaggaaagccacctcaaatgcaaaccaagacaatcagatatgttctattctcttgcaagaaaatacatttgtagaacaagtagtaaatgaaaaagtcaaacacttagaagataccttaaaagaacttgaatctcaacacagtatcttaaaagatgaggtaacttatatgaataatcttaagttaaaacttgaaatggatgctcaacatataaaggatgagttttttcatgaacgggaagacttagagtttaaaattaatgaattattactagctaaagaagaacagggctgtgtaattgaaaaattaaaatctgagctagcaggtttaaataaacagttttgctatactgtagaacagcataacagagaagtacagagtcttaaggaacaacatcaaaaagaaatatcagaactaaatgagacatttttgtcagattcagaaaaagaaaaattaa

SEQ ID NO: 43646 - DNA, 1531 bp, Homo Sapiens
aaacaccgtacgccacccaactcctcttgtaacgccatcgcgcgtggcattgtgttgggttctgcgtgtgtggcatcggagtcgtggaatttagggggaacaaggcttttccccccgtccccccggggtctcccttgggtgggggcgacacggccaaggcggcgcgccctgggggtgcccgggggcgcttcttccccagggcgttacgcaccggcggcccggcgcggaggagctactctcctcctggtgaggtggaaattccagcaagaatagaggtgaagacaagccaccaggactcaggagggaaacgctgaccattagaaacctctgcataagacgttgtaaggaggaaaataaaagagagaaaaacacaaagatttaaacaagaaacctacgaacccagctctggaaagagccaccttctccaaaatggatatgtttcctctcacctgggttttcttagccctctacttttcaagacaccaagtgagaggccaaccagacccaccgtgcggaggtcgtttgaattccaaagatgctggctatatcacctctcccggttacccccaggactacccctcccaccagaactgcgagtggattgtttacgcccccgaacccaaccagaagattgtcctcaacttcaaccctcactttgaaatcgagaagcacgactgcaacttgctgtctgcttggaaaatttcactcacaagccgcagctttgcctgactcagtgcaatccaaggccaccatctctggtgaacttcccttgactcctccctccagccacttgcagaaatgcaaatcctgggcacccacaggctgtttgggggcctgtatagaagctgtgggcagaaaccagaggccactgtggtactgctggactcctgcagccaaaggacaaaagggcgagactacgggccgtctgggcaaacagagagaagccactttattccctgtggagtggaggatgctaggatgttgctgctccggcagacagaggcctttcgcttgagtcatcagccaacagactgaatgttatggttttagaaacccatacacaaagttgagtggttttttccatttctaaaatttaaaatgtatgtatttttaaaacacccacctgcatgtaatacacagcttgttcaggagttctcaaacagccccagcacccaccccatcccagaggctcaaccaaataaaaccaaaaccaggaggctgggtccttttaagcactggtaatttctacctgtaattccagccctttgggaggccgaggcaggcaggtcacctgaggtcaggagttcgagaccagcctggtcaacatggtgaaaccccgtctctactaaaaatacaaaaaaaattagccaagcttggtggtgcgtgcctgtaatctcagctactctggaggctgaggcaggagaatcacttgaacctgggaggcagaggctgcagtgagctgagattgtgccactgcactccggcctgggtgaaagagtgagactctgtctcaaaaaaaaaaaaaaaagaa

SEQ ID NO: 43647 - DNA, 954 bp, Homo Sapiens
atgctaaggaatggcagcatagtgacggaatttatcctcgtgggctttcagcagagctccacttccacacgagcattgctctttgccctcttcttggccctctacagcctcaccatggccatgaatggcctcatcatctttatcacctcctggacagaccccaagctcaacagccccatgtacttcttcctcggccatctgtctctcctggatgtctgcttcatcaccactaccatcccacagatgttgatccacctcgtggtcagggaccacattgtctcctttgtatgttgcatgacccagatgtactttgtcttctgtgttggtgtggccgagtgcatcctcttggctttcatggcctatgaccgttatgttgctatctgctacccacttaactatgtcccgatcataagccagaaggtctgtgtcaggcttgtgggaactgcctggttctttgggctgatcaatggcatctttctcgagtatatttcattccgagagcccttccgcagagacaaccacatagaaagcttcttctgtgaggcccccatagtgattggcctctcttgtggggaccctcagtttagtctgtgggcaatctttgccgatgccatcgtggtaattctcagccccatggtgctcactgtcacttcctatgtgcacatcctggccaccatcctcagcaaagcctcctcctcaggtcgggggaagactttctctacttgtgcctctcacctgactgtggtcatctttctctacacttcagctatgttctcttacatgaacccccacagcacacatgggcctgacaaagacaaacctttctccctcctgtacaccatcattacccccatgtgcaaccccatcatttatagtttccgcaacaaggaaattaaggaggccatggtgagggcacttggaagaaccaggctggcccagccacagtctgtctag

SEQ ID NO: 43648 - DNA, 1445 bp, Homo Sapiens
aagacagctgggaaggcgtctcccggaagacgacctccgcagagctgatggcattgagatccattcccggaggggtcagctcctgacgggttcctgagccagtcttaacctgggcaaaggagatgaggagccgagcctgatgcattgtgatggccatctgcccagaattggcccaaacggacaaaagtgctcttgcaaacctttctgatgagactgagactttgaagaactctactgatgaggtacagacttccagctcattcagctcctctggaggacggcagtcctcgcccctgacctctgggagcaaactggagagggaaaagcagactccaagcttggaacaaggagacacacaatctgagcttttggactataaaaattatgaaaagaagttgagtaaaaaatggatcaactacctcaagctcaaagactctaactttgaacggcaccaaccagacaccaaacttccaacagaaatcactcgggtatcagatgaagaattgaatgccctgcagtcttattgcaccatgaagataaatttgattcatcgtagaggggattctaagaagaagacgagcagcagacataaaaagctgcatcttggattggatgtagaggcttcagagagagatgcctttagttgtactgtacccgatgaacttttgaacagaatctactttaaaaacatgaggacaacgccaaaacaggaggcagcagctaagcaacacatatcttatcagtgtccctattgtaacaggaaaagagcggagctggccctgtctgcctttctgaaacaaaagaagactttactggagtcatttctactccaagagagaatagatgaacatcttcataccaaagactttctcacccgtattggagaagcacatcaagactttcccaggctttcagatgaccccagaataatctggaaaagactgactgagaaaagtcatatcagatactctggttttgaaagatcagagacagagcagaagttgcagcgagatggaaatagtgcttgtcatttaccattttctctgccatttctcaagcgacttactctaatcaaaccagagctggtgattgttaatgataatgtgtaatgtggatagatgtctttgttgtgtatttgagtaattaccataatttctacaggcacttgggaaactaacttaagactttactatgcttccttcacagatttgaggactaagaactttcactttttttttcctattatagaaggcactgttgtagttggaatagttataaaaacttttacaaaattccaagagaactatgttggtagtttgggccaggatgttgatggtacagaagcaaagtagtatggggatgtaagagaaacttaaaaagtaataactgtctttggcgatcaaatggctatggggaattaataaatagtagatgtttgaaatgtt

SEQ ID NO: 43649 - DNA, 470 bp, Homo Sapiens
gttcctccatttatcgtttcttcgtcatgtcgggacgcggcaagcagggaggcaaagctcgcgccaaagccaagacccgctcttctcgtgccggtctccagttccccgtgggccgagtgcaccgactgctccgcaagggcaactatgctgagcgggtcggggccggcgcgccggtgtacctggcggcggtgctggagtacctgactgccgagatcctggagctggcgggcaacgccgcccgcgacaacaagaagacccgcattatcccgcgccacttgcagctggccatccgcaacgacgaggagctcaacaagctgctgggcaaagtaaccatcgctcagggtggtgtcctgcccaacatccaggctgtgctactgcccaagaagaccgagagtcaccacaaggccaaaggcaaataatgtctccatagaatcactttccaatacaacggctcttttcagagccaccta

SEQ ID NO: 43650 - DNA, 721 bp, Homo Sapiens
tcaacatggccctggagctctacatggacctgctgtcagcaccctgccgtgccgtctacatcttctcgaagaagcatgacatccagttcaactttcagtttgtggatctgctgaaaggtcaccaccacagcaaagaatacattgacatcaaccccctcaggaagcttcccagcctcaaagatgggaaatttatcttaagtgaaagttgctgatcccaaagataacaggggaggaagtttcagctgagaagatggagcatgcagtggaagaggtgaagaacagcctgcagctctttgaggagtattttctgcaggataagatgttcatcaccgggaaccaaatctcactggctgacctggtggccgtggtggagatgatgcagcccatggcagccaactataatgtcttcctcaacagctccaagctagctgagtggcgtatgcaggtggagctgaatattggctctggcctctttagggaggcccatgatcgactaatgcagttggccgactgggacttttcaacattggattcaatggtcaaggagaatatttctgagttgctgaagaagagcaggtgaccctaggcgcagcctgtcccgcagggcctggctggcttagcaatctgagccaccttccttaaaggaaatgttaaaaaaaaaaaaacaaaaaaacaaaaaaacaactgttctttgcctaataaagaactggaacaaccatca

SEQ ID NO: 43651 - DNA, 495 bp, Homo Sapiens
atgaacccaacgttgaggaataagctggtgggtgccattgttggcggatcaggggcaatcactattgctgcagtaatgctgggcaatgcggatggactcgaaggtcggcgttattacgcctatcaggatgtggtcggcgtctggaccgtttgcgatgggcacactggtaccgacattcgccgcggtcaccgatataccgacaaagagtgtgacaacctgcttaaggcagatctgcgaaaggtggcaagcgccatcgacccgctgatcaaggttcgcatccctgagccaacccgcgccgcgctttactccttcacctataacgttggctctggtgcttttgccagctcgacgctgctgaagaagctgaactccggtgatgttccgggtgcgtgtaaagaactgcagcgctggacttatgctggcggcaagcagtggaaggggctgatcacccggcgcgagattgagcgtgaagtctgcgagtggggccagaaatga

SEQ ID NO: 43652 - DNA, 342 bp, Homo Sapiens
caacattcagctttctgtgccaataatgctcctgcaaacattgtgagtgttcctaaaactcagtggattttctgtaagaagtgtggcaagcaccaaccccacaaagtgacacagtacaagaagggcaagaattgtctatatgcccagggaaaacagccttatgatgggaagcatagtggctatgatggacagactaagcggattttccaaaaaaaggctaaaactacaaagaagacagtgctaaggcttgagcgcgttgagcccaactgcatatctaagagaatgctggctattaagatatgcgagcattttgaactgggaggagataagaagaaaaggggg

SEQ ID NO: 43653 - DNA, 708 bp, Homo Sapiens
actcaccgcctgtccttcctgacacctcaccatgtgtacgggaaaatgtgcccgctgtgtggggctctccctcattaccctctgcctcgtctgcattgtggccaacgccctcctgctggtacctaatggggagacctcctggaccaacaccaaccatctcagcttgcaagtctggctcatgggcggcttcattggcgggggcctaatggtactgtgtccggggattgcagccgttcgggcagggggcaagggctgctgtggtgctgggtgctgtggaaaccgctgcaggatgctgcgctcggtcttctcctcggcgttcggggtgcttggtgccatctactgcctctcggtgtctggagctgggctccgaaatggacccagatgcttaatgaacggcgagtggggctaccacttcgaagacaccgcgggagcttacttgctcaaccgcactctatgggatcggtgcgaggcgccccctcgcgtggtcccctggaatgtgacgctcttctcgctgctggtggccgcctcctgcctggagatagtactgtgtgggatccagctggtgaacgcgaccattggtgtcttctgcggcgattgcaggaaaaaacaggacacacctcactgaggctccactgaccgccgggttacacctgctccttcctggacgctcactcccttgctcgctagaataaactgctttgcgctctc

SEQ ID NO: 43654 - DNA, 189 bp, Homo Sapiens
atggccctgatcaggaagacattttattttctatttgctatgttcttcattttggttcaactgccatcaggtgagtttgctgtctgtgagtcgtgcaagcttggtcggggaaaatgcaggaaggagtgcttggagaatgagaagcccgatggaaattgcaggctgaactttctctgctgcagacagagg

SEQ ID NO: 43655 - DNA, 768 bp, Homo Sapiens
atggtggttgacaagaacaagcgccttacgaaaggtggcaaaaagggagccaagaagaaagtggttgatccattttctaagaaagattggtacgatgtgaacgcacctgctatgttcaatataagaaatattggaaagacgctcgtcaccaggacccaaggaaccaaaattgcatctgatggtcgtgtgtttgaagtgagtcttgctgatttgcagaatgatgaagttgcatttagaaaattcaagctgattactgaagatgttcagggtaaaaactgcctgactaacttccatggcgtggatcttaccagtgacaaaatgtgttccatggtcaaaaaatggcagacaatgattgaagctcacgttgatgtcaagactaccgatgatacggaagacctcttatgctcagcaccagcaggtcctgagaaatccggaagacctcttatgctcagtaccagccaaatccggaagaagatgatggaaatcatgacccgagaggtgcagacaaatgacttgaaagaagtggtcaataaattgattccagacagcattggaaaagacgtagaaaaggcttgccaatctatttatcctctccatgatgtcttcgttagaaaagtaaaaatgctgaagaagcccaagtttgaattgggaaagctcatggagcttcatggtgaaggctgtagttctggaaaagccactggggacgagacaggtgttaaagttgaacgagctgatggatatgaactaccagtccaagaatctgtttaa

SEQ ID NO: 43656 - DNA, 627 bp, Homo Sapiens
gctgcggccatggcagcatcttccctgacggtcaccttagggcggctggcgtccgcgtgcagccacagcatcctgagaccttcggggcccggagcagcctccctttggtctgcttctcgaaggttcaattcacagagcacttcatatctaccaggatatgttcctaaaacatccctgagttcaccaccttggccagaagttgttctgccagacccagttgaggagaccagacaccatgcagaggtcgtgaagaaggtgaatgagatgatcgtcacggggcagtatggcaggctctttgccgtggtgcactttgccagccgccagtggaaggtgacctctgaagacctgatcttaattggaaatgaactagaccttgcgtgtggagagagaattcgactggagaaggtcctgctggttggggcagacaacttcacgctgcttggcaagccactcctcggaaaggatcttgttcgagtagaagccacagtcattgaaaagacagaatcatggccaagaatcattatgagattcaggaaaaggaaaaacttcaagaagaaaagaatcgtcacgaccccgcagactgtcctccggataaacagcattgagattgctccgtgtttgttgtga

SEQ ID NO: 43657 - DNA, 882 bp, Homo Sapiens
cagaagtcctacaaggtgtccacctccggcccccgggccttcagcagctgctcctacaagagtgagtccggtgcctgcatcagctcctcgagcttctcccgagtggtcagcagcagcttcccgggtggcctgggcagaggctatggcaggtcctgtggtatgggaagcatcaccactgtcaccgtcaaccagagcctgctgagccctcttaacctggaggtggaccccaacatccaggccatgcgcacccaggagaagaagcagatcaagaccctcaacaacaagtttgcctccttcatcaacaaggagcagcagaacaagatgctggagactaagtggagcctgcagcagaagatgcctcggagcaacatggacaacatgttcaacagctacatcaaccttcggcagcagttggagctgggccaggagaagctgaagctgaaggcagggcttggcaacatgcaggggctggtggaggacttcaagaacaagtaccaggatgagatcaataagcttacaaagatggagaatgaatttgtcctcatcgagaaggatgtggatgaagcttacacgaacaaagtggagatagagtctcacctggaacggctgactgatgagatcagcttcctcaggcagctgtctgaagaggagatctgggagctgcagtctcagatctcagacacatcggtggtgctatccattgacaacagcctccccgacatggacggcatcattgctgaagtcaaggggcagtacgaggagcttgccaactgcagccgggctgaggctgagagcatgcaccagatcaagtatgaggatctgcagatgctggcagagaagcacagggatgacctgcagcatacaaagactgagatctccaag

SEQ ID NO: 43658 - DNA, 1308 bp, Homo Sapiens
atgatttggaaacgcagcgccgttctccgcttctacagtgtctgcgggctcctgctacaaggcagccaagggcagtttccactaacacagaatgtaaccgttgttgaaggtggaactgcaattttgacctgcagggttgatcaaaatgataacacctccctccagtggtcaaatccagctcaacagactctgtactttgacgacaagaaagctttaagggacaataggatcgagctggttcgcgcttcctggcatgaattgagtattagtgtcagtgatgtgtctctctctgatgaaggacagtacacctgttctttatttacaatgcctgtcaaaacttccaaggcatatctcaccgttctgggtgttcctgaaaagcctcagattagtggattctcatcaccagttatggagggtgacttgatgcagctgacttgcaaaacatctggtagtaaacctgcagctgatataagatggttcaaaaatgacaaagagattaaagatgtaaaatatttaaaagaagaggatgcaaatcgcaagacattcactgtcagcagcacactggacttccgagtggaccggagtgatgatggagtggcggtcatctgcagagtagatcacgaatccctcaatgccacccctcaggtagccatgcaggtgctagaaatacactatacaccatcagttaagattataccatcgactccttttccacaagaaggacagcctttaattttgacttgtgaatccaaaggaaaaccactgccagaacctgttttgtggacaaaggatggcggagaattaccagatcctgaccgaatggttgtgagtggtagggagctaaacattcttttcctgaacaaaacggataatggtacatatcgatgtgaagccacaaacaccattggccaaagcagtgcggaatatgttctcattgtgcatgatgttcccaacactttgcttcccactactatcatcccctcccttaccactgcaacagtcacaaccactgtagccataacaaccagcccaaccacatctgcaacaaccagcagcatcagagatcctaatgctttggctggccagaatggccctgaccatgctctcataggaggaatagtggctgtagttgtatttgtcacgctgtgttctatctttctgcttggtcgatatctggcaaggcataaaggaacgtatttaacaaatgaagctaaaggagctgaagatgcaccagatgctgatacagccattatcaatgctgaaggcagccaagtcaatgctgaagagaaaaaagagtatttcatttaa

SEQ ID NO: 43659 - DNA, 135 bp, Homo Sapiens
aacctaacaccatgtaccagcagtggagctgatccctacgtccgtgtctacttgttgccagaaaggaagtgggcatgtcgtaagaagacttcagtgaagcggaagaccttggaacccctgtttgatgagacgtaa

SEQ ID NO: 43660 - DNA, 2529 bp, Homo Sapiens
catgtgttgtcagatagctccatagaattcagtttctgagaaccagccagaagcatgcagtgacattgcacaatctgcctctgaagctggagatactagctgcagagctcaggggagctgctccacatcaccgacatgaagggaacaggcatcatggactgtgcgcccaaggcactcctggccagggcactttatgacaactgccctgactgctctgacgagctggctttcagcagaggggacatcctgaccattctggagcaacacgtgccagaaagcgagggttggtggaagtgtttgctccatgggaggcaaggcctggcccctgccaaccgcctccaaatcctcacggaggtcgctgcagacaggccgtgccccccattcctgagaggcctggaagaagctcctgccagctcagaggagacctatcaggtgcccactctaccccgccctcccactccaggccccgtttatgagcagatgaggagttgggcggaggggccccagccccctactgcccaagtctatgaattccccgaccctcccaccagtgccagaatcatctgtgaaaagactctcagctttccaaaacaggccatcctcacgcttcccagacctgtccgggcctcactgccgactctgccttcccaggtgtatgacgtgcctacccagcaccggggccccgtggtcctgaaggagccagagaagcagcagttatatgacataccagccagccccaagaaggcaggactccatcccccagacagccaagcaagtgggcagggtgttcccctgatatcagtgactaccttaagaagaggcggttacagcacattaccaaatcctcagaaatcggaatggatttatgacactccagtgtctccaggaaaggccagcgtcagaaacacgcctctcaccagctttgcggaagaatcaaggccccacgctctccccagttccagctccactttctacaatcctccaagtggcagatccaggtccctcactccacaactgaataacaatgtgcccatgcagaaaaaactcagccttccagaaattccttcttatggctttcttgtacccagaggcacatttcctttggatgaagatgtcagctacaaggttccttcaagctttctgattccccgagtggaacagcagaacaccaagcccaatatttatgacatccctaaagcaacgtcgagtgtttctcaggctgggaaggagctggagaaagccaaggaggtgtcagagaattccgcgggccataattcctcatggttctccagacggacaacttccccatctcctgaaccggacagattatcaggttccagttctgacagcagagctagcatcgtttcctcgtgctccaccacatccaccgacgactcctccagctcttcctcggaggagtcagcaaaggagctctccttggacctggatgtggccaaggagacagtgatggctctgcagcacaaggtggtcagctctgtcgctggcctgatgctctttgtcagcaggaagtggagattccgagactatctggaggccaacattgatgcaatccacaggtccactgatcacatagaagaatctgtaagagaatttctggattttgcccgaggagtccatgggactgcctgtaacctcactgacagtaaccttcagaacagaattcgggaccagatgcagaccatctccaactcctaccgcatcctgcttgaaacaaaggaaagcttggataatcgcaattggcctctggaagttcttgtgactgacagtgtccagaacagcccagatgaccttgagaggtttgtcatggtggcacggatgcttccagaagacatcaagaggtttgcctccattgtcattgccaatggaaggctcctttttaagcggaactgtgaaaaggaagagactgtgcagttgaccccaaatgcagaatttaagtgtgaaaaatacatccagcctccccaaagagaaactgaatcacaccaaaagagtaccccttccactaagcaaagggaagatgaacactcttctgaactattaaagaaaaatagggcaaatatctgtggacagaatcctggccctcttatacctcagccttcgagtcaacagactcctgagaggaaaccccgcttatctgaacactgccggctctactttggggcgctcttcaaagccatcagcgcatttcacggcagcctcagcagcagccagcccgcggagatcatcactcagagcaagctggtcatcatggtgggacagaagctggtggacacgctgtgcatggagacccaggagagggacgtgcgcaacgagatcctccgtggcagcagtcacctctgcagcctgctcaaggacgtagcgctggccactaagaatgccgtgctcacgtaccccagccctgccgcgctggggcacctccaggcggaggctgagaagctggagcaacacacgcggcagttcagagggacactgggatgaggactgtctacctcccttcctcctctgctcacc

SEQ ID NO: 43661 - DNA, 351 bp, Homo Sapiens
atggagtttgagctcagctgggttttccttgttgctattttacaaggtgtccactgtgaggtgcagctggtagagtctgggagaggcttggcccagcctggggggtacctaaaactctccggtgcagcctctggattcaccgtcggtagctggtacatgagctggatccaccaggctccagggaagggtctggagtgggtctcatacattagtagtagtggttgtagcacaaactacgcagactctgtgaagggcagattcaccatctccacagacaactcaaagaacacgctctacctgcaaatgaacagcctgagagtggaggacacggccgtgtattactgtgcaaga

SEQ ID NO: 43662 - DNA, 465 bp, Homo Sapiens
gaggcagtgctgttcccctgcaggtaccccaagctaagagctctaaatcctgagtcaaacacagctgggctggatgtatttgccgacttttctgcctacatcaagtcaaatgcaggactcaacgatactctggacaaggggctcctgagagccctgaaggttttagacagttactcaacatcccccttcccagaagaagtggatgacagcagtgctgaagatgagggcatctctcagaagaggtttctcgatggcaacgagctctccctggttgagtgcagcctgttgtcaaagctctgcatagtccaggtggactgtgagaagtaccagggcttccccatccctgagaccttccggggatggcatcggtgcttgggcagtgcctatgcctgggaagaattcacccctacctgtccacatgatgaggagatcaaactggtctgcaagcaagtggccaggaccctc

SEQ ID NO: 43663 - DNA, 2100 bp, Homo Sapiens
tctcaggtgctgctgctaacatctgcagaagatttggactgcactcctggatttcagcagaaagtgttccatatcaatcagccagctgaattcattgaggaccagtcaattctaaacttgaccttcagtgactgtaagggaaacgacaagctacgctatgaggtctcgagcccatacttcaaggtgaacagcgatggcggcttagttgctctgagaaacataactgcagtgggcaaaactctgttcgtccatgcacggaccccccatgcggaagatatggcagaactcgtgattgtcggggggaaagacatccagggctccttgcaggatatatttaaatttgcaagaacttctcctgtcccaagacaaaagaggtccattgtggtatctcccattttaattccagagaatcagagacagcctttcccaagagatgttggcaaggtagtcgatagtgacaggccagaaaggtccaagttccggctcactggaaagggagtggatcaagagcctaaaggaattttcagaatcaatgagaacacagggagcgtctccgtgacacggaccttggacagagaagtaatcgctgtttatcaactatttgtggagaccactgatgtcaatggcaaaactctcgaggggccggtgcctctggaagtcattgtgattgatcagaatgacaaccgaccgatctttcgggaaggcccctacatcggccacgtcatggaagggtcacccacaggcaccacagtgatgcggatgacagcctttgatgcagatgacccagccaccgataatgccctcctgcggtataatatccgtcagcagacgcctgacaagccatctcccaacatgttctacatcgatcctgagaaaggagacattgtcactgttgtgtcacctgcgctgctggaccgagagactctggaaaatcccaagtatgaactgatcatcgaggctcaagatatggctggactggatgttggattaacaggcacggccacagccacgatcatgatcgatgacaaaaatgatcactcaccaaaattcaccaagaaagagtttcaagccacagtcgaggaaggagctgtgggagttattgtcaatttgacagttgaagataaggatgaccccaccacaggtgcatggagggctgcctacaccatcatcaacggaaaccccgggcagagctttgaaatccacaccaaccctcaaaccaacgaagggatgctttctgttgtcaaaccattggactatgaaatttctgccttccacaccctgctgatcaaagtggaaaatgaagacccactcgtacccgacgtctcctacggccccagctccacagccaccgtccacatcactgtcctggatgtcaacgagggcccagtcttctacccagaccccatgatggtgaccaggcaggaggacctctctgtgggcagcgtgctgctgacagtgaatgccacggaccccgactccctgcagcatcaaaccatcaggtattctgtttacaaggacccagcaggttggctgaatattaaccccatcaatgggactgttgacaccacagctgtgctggaccgtgagtccccatttgtcgacaacagcgtgtacactgctctcttcctggcaattgacagtggcaaccctcccgctacgggcactgggactttgctgataaccctggaggacgtgaatgacaatgccccgttcatttaccccacagtagctgaagtctgtgatgatgccaaaaacctcagtgtagtcattttgggagcatcagataaggatcttcacccgaatacagatcctttcaaatttgaaatccacaaacaagctgttcctgataaagtctggaagatctccaagatcaacaatacacacgccctggtaagccttcttcaaaatctgaacaaagcaaactacaacctgcccatcatggtgacagattcagggaaaccacccatgacgaatatcacagatctcagggtacaagtgtgctcctgcaggaattccaaagtggactgcaacgcggcaggggccctgcgcttcagcctgccctcagtcctgctcctcagcctcttcagcttagcttgtaag

SEQ ID NO: 43664 - DNA, 1335 bp, Homo Sapiens
agatcttagctgaagatgactgacagtgttatttattccatgttagagttgcctacggcaacccaagcccagaatgactatggaccacagcaaaaatcttcctcttccaggccttcttgttcttgccttgtggcaatagctttggggcttctgactgcagttcttctgagtgtgctgctataccagtggatcctgtgccagggctccaactactccacttgtgccagctgtcctagctgcccagaccgctggatgaaatatggtaaccattgttattatttctcagtggaggaaaaggactggaattctagtctggaattctgcctagccagagactcacacctccttgtgataacggacaatcaggaaatgagcctgctccaagttttcctcagtgaggccttttgctggattggtctgaggaacaattctggctggaggtgggaagatggatcacctctaaacttctcaaggatttcttctaatagctttgtgcagacatgcggtgccatcaacaaaaatggtcttcaagcctcaagctgtgaagttcctttacactgggtgtgtaagaagtgtccctttgcagatcaagctttattctgaagaataaacctagctggcatgctggtgtgtacctgtagtcctagctatttgggaagctgaggtgggagggtcgcttgagcccaggagtttgaggctgcagtgagctatgattgtgccactgtactccagcctgggagatagagcaagactccatctctaaaaaaaaaaaaaaatgctaatgtgagaatataaattgtgggaaatgagtgagggcaaggtggtacttcctccttctgagctcttcacacgtaatgcaaaaacccggtcttaactgattttgttttttttctgagtatgcatatatgtggttgaatgaaccaatgtgtgattgtatcttttccattatgtgactgtttgacctgcatattaatttcaagatagcagtcaattcgataaggcattttcatagaggaaagtttacagaaacagtttatgtggttggatcaccaaattatcttaggtactaaggcctcaaaaataagaaaaactttattatttctcctcagtagagtttggacatacataaggagagaaggtacagtgatgaaggagaccataattctgtagtgttgatgatcctggattataatctttttctctttatctttcatagtttttttaaaaacatggactgtatcttatctaccactatatcccaaatacctaagatagtgcttacgttcagtgactattaaataaataaatggatgaattaaaaagtaagaatgaaaa

SEQ ID NO: 43665 - DNA, 427 bp, Homo Sapiens
gactgtcactcggtcccagacaccagagcaagctcaagacccagcagtgggacagccagacagacggcacgatggcactgagctcccagatctgggccgcttgcctcctgctcctcctcctcctcgccagcctgaccagtggctctgttttcccacaacagacgggacaacttgcagagctgcaaccccaggacagagctggagccagggccagctggatgcccatgttccagaggcgaaggaggcgagacacccacttccccatctgcattttctgctgcggctgctgtcatcgatcaaagtgtgggatgtgctgcaagacgtagaacctacctgccctgcccccgtcccctcccttccttatttattcctgctgccccagaacataggtcttggaataaaatggctggttcttttgttttccaaa

SEQ ID NO: 43666 - DNA, 2025 bp, Homo Sapiens
ccctgtggtgggggcgtgccgttggtcgtgggtggctctgacgctccggctccgacccacaggcaccatgactcctgtgaggatgcagcactccctggcaggtcagacctatgccgtgcccttcatccagccagacctgcggcgagaggaggccgtccagcagatggcggatgccctgcagtacctgcagaaggtctctggagacatcttcagcaggtagagcagagccggagccaggtgcaggccattggagagaaggtctccttggcccaggccaagattgagaagatcaagggcagcaagaaggccatcaaggtgttctccagtgccaagtaccctgctccagggcgcctgcaggaatatggctccatcttcacgggcgcccaggaccctggcctgcagagacgcccccgccacaggatccagagcaagcaccgccccctggacgagcgggccctgcaggagaagctgaaggactttcctgtgtgcgtgagcaccaagccggagcccgaggacgatgcagaagagggacttgggggtcttcccagcaacatcagctctgtcagctccttgctgctcttcaacaccaccgagaacctgtatggccagagggcagggccgaggggtgtgggcgggaggcccggcctggcttagtggggacccagggcatcagacacaggtacagcacataggccaggagccagggggtgactggggtggctcggctcgggaggcctgggaccccacagtgcacactgtgcccctgatgatgtgggagaggaacatgggctcaggacagcgggtgtcagcttgcctgacccccatgtcgcctccgtaggtacaagaagtatgtcttcctggaccccctggctggtgctgtaacaaagacccatgtgatgctgggggcagagacagaggagaagctgtttgatgcccccttgtccatcagcaagagagagcagctggaacagcaggtcccagagaactacttctatgtgccagacctgggccaggtgcctgagatccatgttccatcctacctgcctgacctgcccggcattgccaacgacctcatgtacagtgccgacctgggccccggcattgccccctctgcccctggcaccattccagaactgcccaccttccacactgaggtagccgagcctctcaaggtagacctacaagatggggtactaacaccacccccaccgcccccaccaccacccccagctcctgaggtgctggccagtgcacccccactcccaccctcaaccgcggcccctgtaggccaaggcgccaggcaggacgacagcagcagcagcgcatctccttcagtccagggagctcccagggaagtggtcgacccctccggtggctgggccactctgctagagtccatccgccaagctgggggcatcggcaaggccaagctgcgcagcatgaaggagcgaaagctggagaagcagcagcagaaggagcaggagcaagtgagagccacgagccaaggtgggcacttgatgtcggatctcttcaacaagctggtcatgaggcgcaagggcatctctgggaaaggacctggggctggtgaggggcccggaggagcctttgtccgcgtgtcagactccatccctcctttgccgccaccgcagcagccacaggcagaggaggacgaggacgactgggaatcgtagggggctccatgacaccttcccccccagacccagacttgggccgttgctctgacatggacacagccaggacaagctgctcagacctgcttccctgggagggggtgacggaaccagcagtgtgtggagaccagcttcaaggagcggaaggctggcttgaggccacacagctggggcggggacttgtctgcctgtacttcatggggggacggctccacccagcctgcgccactgtgttcttaagaggcttccagagaaaacggcacaccaatcaataaagaactgagcagaaaccaacagtgtgcttttaataaaggatctctagctgtgcaggatg

SEQ ID NO: 43667 - DNA, 225 bp, Homo Sapiens
atgcctaagtattatgaggacaagccgcagggcggcgcgtgcgcgggcctgaaggaggacctgggcgcgtgtctgctgcagtcggactgtgtggtccaggaaggaaaatcacctcggcagtgtttgaaggaaggatactgcaactctttgaagtacgcattttttgagtgtaaaagatcagtgttggataacagggcaagattcagaggaagaaaaggatattga

SEQ ID NO: 43668 - DNA, 690 bp, Homo Sapiens
agtagagacgggtttcaccgtgttagccaggatggtctcgatctcctgccttctgcccctcttggcctcccaaagtgctgggattacaggcgtgagccaccgcgcccggtcttgcagcacggttctgagtctgtggaagctgccagtaacctgaaggaggtgctggctggtaggggtcatggttgggcacagctcgtacacttgccattctctgcatatgctggtagtgagcctggcactcttctttgcgctgagctaaagctacatacgatggttttgtggccacagttctaccgttcatttctggctttatggcttcttccgggaaggagaaacacgaaaccaaacccttgctgtgaccaccctccatcaagcctttgcactttgtaccaaatggagaaaactctttctggagacgttcatcatcaatactatcatcaagatttttcacgtaaacaccctggtatctgctggctgcagctactcctgctgtccacaccgttccacagtataaatatgctgcgggagttcgcaatcctcagcaacatcttaatgcacagccacaagttacaatgcaacagcctgctgttcatgtacaaggtcaggaaccttcttccatgttggcatctgcccctcaagagcaaaagcaaatgttcatatgctcgagagtccagagtcactctgttctaa

SEQ ID NO: 43669 - DNA, 1729 bp, Homo Sapiens
gtggagtccaagatgtacgctgtggccaccagcaccaacacactgtgcacctgcatcccacatgactggcgaggagaaggcatttgagaccattgagagagatgagcagtgcatccacccccaggaggcggccttatctatccagttcatctccctagtctgctgggaggctattcccaatgccaggattgagctgcagaagtgggagcttgtgaccagcacgaagacagtgtcgctgcagcaaggagaccaggtcaggcttcaaaggctacgcgtggccgccgggacctgcctcatgcaggaggaggaggaggtcatgtcctgagggcggatcttgatcatggatgtgactgaggtggtgcccgagcccagccagcccttgaccaagaacaagttcagagtcctttacgagaaggagcagaaggggcccgtgactgccctgtgcactgcaaggccacctggtgtcggccatcagccagaagattttcctgtgaagcctgcgggccagcgagctgacgggcatggccttcatggtcgacaggcagctctacatccaccagatgatcagcgtcaggaacttcatcctggcagccgacctcatgaagagcatctggctgctgttaccaggaggagagcaagacgctgagcctcgtcatggatgccaagaccctggaggtgtacagcgtggacttcatggtagacaacacccagctgggttttctggtgtctgaccacgactgcagcctcatggtgtacatgtacctgcctgaagccaaggagagttttgggggcatgtgcctgctgcgctgggcagacttccatgtgggtgcccacatgaacgcattctataggaccctgtgccagggagccactgaggggctcagcaaaaagtcagtgtgggagaataagcatatcgcgtggttcgccacccaggatggtggcatcgggctgctgctgcccatgcaggagaaaacctactggaggctgctgatgctgctgaacgtgctgccacaccacacaggcctcaacctccgcaccttccggatgctgcgtgtggacctccgcaccctccagaatgctgtgctgcaactgcacggggagctgctcaaccgctacctgtacctgagcaccatggagagcaagctggccaagaagatcagcaccatatccgacatcatcctggatgacttgctggagacagatggcgtcactgcccacttctagctccatggatgtcgctgccaccaccacaccgcactacctcccaccaccttttttgaacaaaacacaaggaatatatactttctggaagaccatctgatactatgtatcaagaatctcaaaaatattcatatactataatgcaataaggccatttctaaaaatttaccctgagaagataatccagacctgtgctacaatttccattacagagacatctgttgtaatattgtttacggaagggggaaacagaaaacagcctccatgtccacagaggaatgattaaatatgtggtacacctacaggctggagtgtaaaatggacacaaaaacaagaagaaatgctcatgagaaaacacagtgatagacgccttttctaaacagtttctgctttgtttggggtaagtgttccacctttaccatccctaaatgctctagtatagtatagtcttaatcacatgtttatttgtatgcatctattattactttataaaatctttgaaaaccaa

SEQ ID NO: 43670 - DNA, 444 bp, Homo Sapiens
atgactgaaggcctctttatttcgtgctctgctgttcgtgtaaaacccaatcgcagagcgggtctcaggcggcgctcgcctgcgtttctactctcagccaatcagaaaacccgactcttcgcattggggtcaagcccccgctgcggcccgcgtgctaacggggaggaagcttccagctgtgcctgggtgtctcgggcgccgagggcagcctgcgcccgtgctaagcccgcctcccgcgcgcccgagggcccggtgtcccggaagacgcgcgggggtgaggcggccctcgcgtccgcccgccccgccacagattgcctccgaagtggcctggccgtggagcgccggcgaaaaccgaactcccgcccggctcccggagtcgggagcctgccggggtctcgccctcaggacccccagggagcggccgggcgccgcctatcaccctga

SEQ ID NO: 43671 - DNA, 126 bp, Homo Sapiens
atcctccaaagtttaataggatatggccgaatatttcttcccttgaggtttctaacccaaaacaagttgctcccaaattagctttgtcaacagtttcttctgttcaagttgcaaaccacaagagag

SEQ ID NO: 43672 - DNA, 477 bp, Homo Sapiens
atggtgccacggagcacatcgctggcgctgattgtgttccttttccacagattgtctaaagccccaggaaaaatggtggaaaattcaccgtcgccattgccagaaagagcgatttatggctttgttcttttcttaagctcccaatttggcttcatactttacctcgtgtgggcctttattcctgaatcttggctaaactctttaggtttaacctattggcctcaaaaatattgggcagttgcattacctgtctacctccttattgctatagtaattggctacgtgctcttgtttgggattaacatgatgagtacctctccactcgactccatccatacaatcacagataactatgcaaaaaatcaacagcagaagaaataccaagaggaggccattccagccttaagagatatttctattagtgaagtaaaccaaatgttctttcttgcagccaaagaactttacaccaaaaactga

SEQ ID NO: 43673 - DNA, 843 bp, Homo Sapiens
atgaccagaaaaaattatacctcactgactgagttcatcctattgggattagcagacacgctggagctacagattatcctctttctgttatttcttgtgatttacacacttaccgtactgggaaatatcgggatgatcctcttaatcaggatcgattcccggcttcacacacccatgtatttcttcctggttaacctgtcctttgtggacatttgttactcaaccaccatcaccccaaagatgctggcagatttattatcagagaagaaaaccatctcttttgctggctgcttcctacagatgtacttctttatcgccctggcgacaaccgaatgcatcctctttgggttaatggcctatgaccggtatgtgaccatatgtcgcccgctgctttactccttgatcatgtccaggacagtctgcctaaaaatggcagccggggcttttgctgcagggttgctgaactccatggtcaacactagctatgtcagcagcttgtcattctgtggctccaatgtcatccatcacttcttctgcaacagtcccccactttttaagctttcttgttctgacacacacttgaaggaaagcatattttccacttttgctggtgtgaataaggtcggggctctgcttgtcatcctctcctcctattcctacgttctcttctccattttttctatgcattcaggggaggggaggcacagagctttctccacgtgtgcctctcacctgacagccataatcctcttctacaccacctccatctatacctacctgagacctagttccagctactccctgatcaggacaaagtggtttctgtgttctacacagtggtga

SEQ ID NO: 43674 - DNA, 1328 bp, Homo Sapiens
tgagtagggggcctgcagtgtgctgtgacgcctgggaaggggattctaagccatttcccatcagccgtttactaagtagcctggggatcttgttaaaatgcagatcctgatagattagggctggggtgctgcccaagattctacatttctaagagtccctggatgacggtggcattcacagaccacagcttctatgtgagggagagcagttgggtttctgtctgcctgccgcacctgatcagtagttagtgcctgcatgtgtggcggccagaattttacttggggagacgctcggctcctagcaccctctgtggtaggggttttccagagtgtgggcattaccccaactgtctctgcagacggcttcctgcatgtttcccacaagcgctcagatggctgaattggcaagtctgtggtgctgctctttggggccacctcgttctttgcctttccctccccttagcgatgtgtcccatccgttgcctacagtcaagtcagtccacatgtttaggctaaggtgggcatgaccgagtggccttcccccgggaagaccagtgtcgtaactggaattaagttgtggaacataagagtcaaggctcgtgtctgctgtgaactggagttgagggaatgtttggggatcccacctggtatcagtaagggaaccatggcgacggccagccttgcccatgtgaggcatttgctttgtcaggccttctcagtagtggagaagggaggaaggagaatgcagctctttcagtgctgtctagcagtgcccaagagccgtgattgggcacctcacttaacgtctaacttcagattcactcttgggcattcctgtcttcctctccaatcttgaatggatgttggcttcgataatgtcatcctgaagtttctttgtccacacagccctggctggttgttaataagctgttaatgcagccttgcactcaggaagccctgatgtttaaaggaactgtgtctttgttcttcctctcttccctctttctcttagtcccactttatctcttctttctcttcctctccctcctccttttcccctctccctcctactctccccctttctctcctccttctctaagaaacccagtcttaattccacacaatgcatgcacatgcagtagcttctctgcttgagtgagctggtgtgattaggttttctaaacatgcacattggccttgctacttgtccttttattcccttcccacagaccataaaccaagaattatttttatttgtattattttgatttttttaaagtaaaatattaacttttcctctttgaaataaattcccatttggaacatca

SEQ ID NO: 43675 - DNA, 153 bp, Homo Sapiens
tataaagccctaaaacccgaagtgaataaggtgaacattatggcagtcaaaagacaacaggaactgaaagatgttggccatcgtgatcagatggctgcagctagaggaatcctgcagaagaatgttctgatcttctatacggcatcccgggca

SEQ ID NO: 43676 - DNA, 1005 bp, Homo Sapiens
atgaccaggaaccgggcgcagatgctcgcgaaccagagcaagcagggcccgcccccctccgagaaggagtgcgcccccacccctgccccggtcaccagggccaaggcccgcggctccgaggaggacgacgcccaggcccagcatccgcgcaaacgccgctttcagcgctccacccagcagctgcagcagcagctgaacacgtccacgcagcagacgcgggaggtgatccagcagacgctggccgccatcgtggacgccatcaagctggatgccatcgagccctaccacagcgacagggccaacccctacttcgaatacctgcagatcaggaagaagatcgaggagaagcgcaagatcctgtgctgtatcacgccgcaggcgccccagtgctacgccgagtacgtcacctacacgggctcctacctcctggacggcaagccgctcagcaagctccacatccccgtggtgagtgcggggcccgggagagccactgccttctctctctgggatgcgtctggggcccctagtcacggcttcctccagcccgtcttgtcccactcatggcccttgacctctctcgaccttctgccacctgaggagacacagccccacttctgctgtggaggcaaaagccggaagctgcccagctgttctgcagacccgaggtccttcctccagctggtccgtgccaggcctcggtctcctgacctccccctcaccctgggtgcaccccggtcccactcgtgtggggctcccccttcacgccgctcactctcccctctccactccccgtccaccaggacggcctcacgagagccaccctctgtgtctcctgcccctgccccgcccccttctcccttggacccgcgtgggttccctgagcctccatacctgcacgatgagtcccttcccccacctcctcccttgggcttctgggacagcagagctgcagctcccttggggcagcttggtcctcggcccccagcctcaccttgttccacctga

SEQ ID NO: 43677 - DNA, 1340 bp, Homo Sapiens
agtgcgtcacccagaggcggtcttgtagcggggccggcttggggcttggttctatgtccctgcgggtcggtgcgagggcgaagaggaacccgtgggcctcgggggatcccggggggccggaccagtgtcccctagttgtgggagcagacgcgtgggcgcatcgcgggcgggcagggcctgaagtgcaggtgcgggcagcggaccctggcgggggctgggaggacaggcgtggggtcccggcagtgaagcgggttctagaggcgcaggagcgggtaggcgaggccggtggccctgggcccggagtctgcaggccgcgctcctgtcctgccgctgagggacccggttaccaacccgcatgacgctcagtttgcccatctctcccagtgctaacacacagttctcgggagacgttccccattcccagaggagtagtgcgaaatgcgtgcgcctctagtcttaaacttggcgtttgtattagttgggtttcctggtgtctctttagcaagtgaagtttctggttccctccttcactgtgtgacctgcctagtcctcctgggttgcatttacagaagtttatacgagacctagtttccagggaagaactcactgattccgcgagggagatggcataatggatgatggtcttcagccttaagggtacttcagtcttaactgtgtgttacaaagtttgaaagagagggttccctatgaataagaagcgcacttgaaagaacagctgtctggtctaacctctcactggtgcttcagaggaggaaaaaaggtcacagctatgtttccagtgtcctctgggtgtttccaagagcaacaggaaacgaataaatctctgacagggtctcactatattgctctggctggtctcaaactcatgggctcaaacgatcctcctgcttcagccttccaaaaccaggtgtttaactggggactaacatgaaacacttagaagactacgtggaacacagcaatgactatgtatgtactacaatgtaaacagcacctcctggattgaatagtacataactgacatgaccagcagagacaggctaaagacactgagctgaaaaccctggactctattgctaaatcaaggctcctgaatccgttccctctgagcaactgttgctgtggtgctgccttcacaagcactctgctgagcactcagattgaggggctgtgctatccatcatcggacaagctgcacccagaactgttcagctgacaaactgggagcagtccagaaatacagttctgctgcatagtgaaaaaaggccaatttagattctttttcatagagagaaaaacataaacatgtgatttaacaa

SEQ ID NO: 43678 - DNA, 2117 bp, Homo Sapiens
ttttccatcagcagatggaatcttggaacgtctcatgcttgggaaggacatggtcagatttgttgtaagaaagactgtgcagaggagtgtggcaaagggatccagaagatgcaaggtattatttagaaaagaagagaatgtttaaatttcatcaaatgaaacatatttttgaaatacttgataaaatgagatgcctgagaaaacgttctacagtgtcattcttgggagttcttgtcatttttctcctttttatgaacttgtacattgaagatagctatgttctggaaggagacaaacaacttataagggaaacatccacacatcaactgaattcagaacgctatgttcatactttcaaggatttatctaatttctcaggagccataaatgtcacctatcgctacctagctgccacacctttacaaagaaagcggtatcttacaattggactttcttcagtaaagcgaaaaaaaggaaactatttacttgagacaattaagtcaatttttgagcaatccagctatgaagagctgaaggaaatttcagtggtggttcacctagcagactttaattcttcctggcgtgatgccatggtccaggatattacacagaaatttgcgcaccatattattgcaggaagattaatggttatacatgctccagaggagtattacccaatcctagatggccttaaaagaaattacaatgatccagaagatagagtcaaatttcgttccaagcaaaatgtagattatgcttttctgcttaatttttgtgccaatacttcagactattatgtaatgcttgaagatgatgttcgatgttcaaaaaatttcttaactgccatcaagaaagtcattgcatccctagaaggaacttactgggtaactcttgaattctctaagcttggctacattggtaaactctatcattctcatgatctcccacgtttggcccattttttattaatgttttatcaagaaatgccttgtgattggctattgactcatttccgtggtctgttggctcagaaaaatgtgatccgttttaaaccatctctctttcagcacatgggctattattcatcatacaaagggacggagaataagctgaaggatgatgattttgaagaggagtcatttgacattcctgataacccccctgcaagtctgtacaccaacatgaatgtgtttgaaaattatgaagcaagcaaggcttacagtagtgttgatgagtacttttgggggaaaccaccttcaacaggagatgtttttgtgattgtatttgaaaatccaattataataaaaaaaattaaagtaaatactggaacagaagatcggcaaaatgatattttgcatcatggagccctagatgttggggaaaacgttatgcctagcaaacaaaggagacaatgttctacttacttaagactaggagaattcaaaaatggaaactttgaaatgtcaggtgtaaatcaaaaaattccatttgatatacattgtatgaggatatatgtcaccaaaacacaaaaggaatggctaattattaggagtattagcatttggacttcttagccaattaaatcagtatgttcagtttctgaagcagttcttcctgcttcgtcttttgctacctttgtcttttggagggaaagcaatggatgggatatgttaaaagaaacattaattacattggcagttttcatttatacattgttgacataattttactcttaatacacacttgtatttattttaacgtctgaagttgaatatcagtctatagctaatgctactttcatttatatttttaaatgttcttagttttaaaatttcaactgattgtcgaaagggtaatatgaaagattttaaatgaaaaaaatttgttggatgatgatttttgaaaaatagtcaccaactgtatatacttcctcaagaactgataattcattatatcatcagatagcttttattaagcatctgtgggaatatacagttgggggaatgataatctggtttattttttctgtaaacttaagtttccgttgacttctgtacatctacaatgaatacctcctcatagaagtggtgtctttacataattttttgtgtaggtga

SEQ ID NO: 43679 - DNA, 2238 bp, Homo Sapiens
tgggagtccgtgctcctgctcctcggttggctcctaagtgccccgccaggtcccctctcctttcgctctcccggctccggctcccgactcttcggcccgctggcatctgcttccctcccctgcctcgtttctcgtcgcccctgctcgctccccccggcgctcgcccgggcgctgtgctcgctcctggatcgccagccgcgcagccgggctcggccggccgcccgcgcgccactgtgcagtggagtttggtggaatctctgctgacgtcacgtcactccccacacggagtaggagcagagggaagagagagggatgagagggagggagaggagagagagtgcgagaccgagcgagaaagctggagaggagcagaaagaaactgccagtggcggctagatttcggaggccccagtgcacccgtggactccttcggaacttggcaccctcaggagccctgcagtcctctcaggcccggctttcgggcgcttgccgtgcagccggaggctcggctcgctggaaatcgccccgggaagcagtgggacgcggagacagcagctctctcccggtagccgataacggggaatggagaccaactgccgcaaactggtgtcggcgtgtgtgcaattaggcgtgcagccggcggccgttgaatgtctcttctccaaagactccgaaatcaaaaaggtcgagttcacggactctcctgagagccgaaaagaggcagccagcagcaagttcttcccgcggcagcatcctggcgccaatgagaaagataaaagccagcaggggaagaatgaggacgtgggcgccgaggacccgtctaagaagaagcggcaaaggcggcagcggactcactttaccagccagcagctccaggagctggaggccactttccagaggaaccgctacccggacatgtccacacgcgaagaaatcgctgtgtggaccaaccttacggaagcccgagtccgggtttggttcaagaatcgtcgggccaaatggagaaagagggagcgcaaccagcaggccgagctatgcaagaatggcttcgggccgcagttcaatgggctcatgcagccctacgacgacatgtacccaggctattcctacaacaactgggccgccaagggccttacatccgcctccctatccaccaagagcttccccttcttcaactctatgaacgtcaaccccctgtcatcacagagcatgttttccccacccaactctatctcgtccatgagcatgtcgtccagcatggtgccctcagcagtgacaggcgtcccgggctccagtctcaacagcctgaataacttgaacaacctgagtagcccgtcgctgaattccgcggtgccgacgcctgcctgtccttacgcgccgccgactcctccgtatgtttatagggacacgtgtaactcgagcctggccagcctgagactgaaagcaaagcagcactccagcttcggctacgccagcgtgcagaacccggcctccaacctgagtgcttgccagtatgcagtggaccggcccgtgtgagccgcacccacagcgccgggatcctaggaccttgccggatggggcaactccgcccttgaaagactgggaattatgctagaaggtcgtgggcactaaagaaagggagagaaagagaagctatatagagaaaaggaaaccactgaatcaaagagagagctcctttgatttcaaagggatgtcctcagtgtctgacatctttcactacaagtatttctaacagttgcaaggacacatacacaaacaaatgtttgactggatatgacattttaacattactataagcttgttattttttaagtttagcattgttaacatttaaatgactgaaaggatgtatatatatcgaaatgtcaaattaattttataaaagcagttgttagtaatatcacaacagtgtttttaaaggttaggctttaaaataaagcatgttatacagaagcgattaggatttttcgcttgcgagcaagggagtgtatatactaaatgccacactgtatgtttctaacatattattattattataaaaaatgtgtgaatatcagttttagaatagtttctctggtggatgcaatgatgtttctgaaactgctatgtacaacctaccctgtgtataacatttcgtacaatattattgttttacttttcagcaaatatgaaacaaatgtgttttatttcatgggagtaaaatatactgcatacaaa

SEQ ID NO: 43680 - DNA, 693 bp, Homo Sapiens
acgtacttcaatgacaatatcctcaccctgatacggaccctggtgaccggaggagccacgccggagctggaggctctgattgctgaggaaaacgcccttagaggtggctacagcaccccgcagacactggccaatagggaccgctgccgcgtggcccagttagctctgctcgatgggccatttgcggacttaggggatggtggttgttatggtgatctgttctgcaaagctctgaaaacatataatatgctttgttttggaatttaccggctgagagatgctcacctcagcacccccagtcagtgcacaaagaggtatgtcatcaccaacccgccctatgagtttgagctcgtgccgacggacctgatcttctgcttaatgcagtttgaccacaatgccggccagtcccgggccagcctgtcccattcctcccactcgtcgcagtcctccagcaagaagagctcctctgttcactccatcccatccacagcaaaccgacagaaccggcccaagtccagggagtcccgggacaaacagaaagaaaagaaatggtttacagatgaaccggataatgcctatcccagaaacattcaaatcaagcccatgagtacccacatggctaaccagatcaaccaatataaatccacaagcagcttgattccaccaatcagagaagttgaagatgaatgttga

SEQ ID NO: 43681 - DNA, 397 bp, Homo Sapiens
aacgattgagtcatactcaataatcattcaagccacagatgggggaggactttttggaaaatctacagtcataattcacgtgatagatgtaaatgacaatgctcctgaaatcactgtgtcatcaattaccagtccaatcccagaaaatacgccagagaccgtggttatggtttttagtatccaagatatagacgggacaacggaagaattgtttgttccattccggaagacctcccatgtgctaaaatcttcagttgagaattactacacgttggaaacagagagaccactggacagagagagcacagccgagtacaatatcaccatcaccgtcaccgacttggggatacccaggctgaaaaccgagcacaacacaactgtgttggtctctgacgtc

SEQ ID NO: 43682 - DNA, 1034 bp, Homo Sapiens
aagcggaagagcaggtctccaggggagcgatggcagccgggggtctgagccgctccgagcgcaaagcgcggagcgggtccggaggttgcgggaggagcagcagagggagcgcctccgccaggtactcgcgcatcctgaggaaggcggcggcggagcgcagcgccgaggagggccggctgctggccgagagcgcggacctggtaacggagctgcaggccggaccggcgcgcgagggcctgaagcggcggcaggaggaggcgagtgtgcgacgacccggaggagctgcgggggaaggtccgggagctggccagcgccgtccggaacgccaaatacttggtcgtctacacaggcgcgggaatcagcacggcagcgtctatcccagactaccggggccctaatggagtgtggacactgcttcagaaagggagaagcgttagtgctgccgacctgagcgaggccgagccaaccctcacccacatgagcatcacccgtctgcatgagcagaagctggtgcagcatgtggtgtctcagaactgtgacgggctccacctgaggagtgggctgccgcgcacggccatctccgagctccacgggaacatgtacattgaagtgagcagtcctgcagggacccagggtctccatgggcaggcgggtcccactcactgtgccctcttgcctctaggccggacctgccacaagtgtgggacccagctgcgggacaccattgtgcactttggggagagggggacgttggggcagcctttgaactgggaagcggcgaccgaggctgccagcagagcagacaccatcctgtgtctagggtccagcctgaaggtacgtgccgatgacacaatgagggccaaggctgacaggccaccgggaagggttgggctgctgttactctcactcggctttccctgtcctcagtggaccccgaaggatgactgggctgccctgaagctacatgggaagtgtgatgacgtcatgcggctcctcatggccgagctgggcttggagatccccgcctatagcag

SEQ ID NO: 43683 - DNA, 3609 bp, Homo Sapiens
atgtccaccctctacgtctcccctcacccagatgccttccccagcctccgagccctcatagccgctcgctatggggaggctggggaggggggcagccgggcggctgtccttgtccaacagtgggtcagttacgccgacacggagttaataccagctgcctgtggagcaacgctgccggccctgggactccgaagctcggcccaggacccccaggctgtgctgggggccctgggcagggccctgagccccttggaggagtggcttcggctgcacacctacttggccggggaggcccccactctggctgacctggcggctgtcacagccttgctgctgcctttccgatacgtcctagacccacctgcccgccggatctggaataatgtgactcgctggtttgtcacgtgtgtccggcagccagaattccgagccgtgctaggagaagtggttctatactcaggagccaggcctctctctcatcagccaggccccgaggctcctgccctcccaaagacagctgctcagctcaagaaagaggcaaagaaacgggagaagctagagaaattccaacagaagcagaagatccaacagcagcagccacctccaggggagaagaaaccaaaaccagagaagagggagaaacgggatcctggggtcattacctatgacctcccaaccccacccggggaaaagaaagatgtcagtggccccatgcccgactcctacagccctcggtatgtggaggctgcctggtacccttggtgggagcagcagggcttcttcaagccagagtatgggcgtcctaatgtgtcagcagcaaatccccgaggtgtcttcatgatgtgcatcccaccccccaatgtgacaggctccctgcacctgggccatgcactcaccaacgccatccaggactccctgactcgatggcaccgcatgcgtggggagaccaccctgtggaaccctggctgtgaccatgcaggtattgccacccaggtggtggtggagaagaagctatggcgtgagcagggactgagccggcaccagctgggccgcgaggcctttctacaggaagtctggaagtggaaggaggagaaaggtgaccggatttaccaccagttgaagaagcttggcagctccttggactgggatcgagcctgtttcaccatggaccctaaactctcagcagctgtgacagaggcctttgtccggcttcacgaggaaggcatcatctatcgcagtacccgccttgttaactggtcctgcaccctcaactccgccatctctgacattgaggtggataagaaggagctgacaggtcgcaccctgctctccgtgcctggctacaaggagaaggtggagttcggggtcctcgtgtcctttgcctataaggtccaaggctcagatagcgacgaggaggtggtggtggcaacaactcggatcgagacaatgctgggagatgtggctgtagctgtgcaccccaaagataccagataccagcacctgaaggggaagaacgtgatccacccattcctgtctcggagccttcccattgtcttcgatgaatttgtggacatggactttggcacaggtgctgtgaagatcacccccgcacatgaccaaaatgactatgaagttgggcagcggcacgggctggaggccatcagcatcatggactcccggggggccctcatcaatgtgcctccgcctttcctgggcctgcccaggtttgaggccaggaaagcggtgctggtggcgctgaaggagcggggactgttccgtggcattgaggacaaccccatggtggtgccactttgcaaccggtcgaaggacgtggtagagcctctgctgcggccgcagtggtacgttcgctgcggggagatggcccaggctgccagcgccgctgtgactcggggtgacctccgcatcctgcctgaggcccatcagcgcacatggcatgcctggatggacaacatccgggagtggtgcatttccaggcagctgtggtggggccatcgcatcccagcctactttgtcactgtcagtgacccagcggtgccccctggggaggaccctgatgggcggtactgggtgagtggacgcaatgaggcggaggcccgggagaaggcagccaaggagttcggagtgtcccctgacaagatcaatgaggatgtattggatacctggttctcctctggcctcttccccttatccattttgggctggcccaaccagtcagaagacctgagtgtgttctaccccgggacactgctggagaccggtcatgacatcctcttcttctgggtggcccggatggtcatgctgggcctgaagctcacgggcaggctgccctttagagaggtctacctccatgccatcgtgcgagatgctcacggccggaagatgagcaagtctctaggcaatgtcatcgatcccctggacgtcatctatggaatctccctgcagggcctccacaaccagctgctgaacagcaacctggatcccagcgaggtggagaaggccaaagaagggcagaaagctgacttcccagcggggattcctgaatgtggcaccgatgctctccggtttggattatgtgcctacatgtcccagggtcgtgacatcaacctggatgtgaaccggatactgggttaccgccacttctgcaacaagctctggaatgccaccaagtttgcccttcgtggccttgggaagggttttgtgccctcacccacctcccagcccggaggccatgagagcctggtggaccgctggatccgcagccgcctgacagaggctgtgaggctcagcaatcaaggcttccaggcctacgacttcccggccgtcaccactgcccagtacagcttctggctctatgagctctgtgatgtctacttggagtgcctgaaacctgtactgaatggggtggaccaggtggcagctgagtgtgcccgccagaccctgtacacttgcctggacgttggcctgcggctgctctcacccttcatgcccttcgtgacggaggagctgttccagaggctgccccggaggatgccgcaagctccccctagcctctgtgttaccccctacccggagccctcagagtgctcctggaaggaccccgaggcagaagccgcccttgagctggcgctaagcatcacgcgagccgtgcgctccctgcgggccgactacaacctcacccggatccggcctgactgtttcctggaagtggcggatgaggccacgggcgccctggcatcggcggtgtcgggctacgtgcaggccctggccagcgcaggtgtggtggctgttctggccctgggggctcccgccccccagggttgcgctgtggctctggcttctgatcgctgctccatccacctgcagcttcaggggctggtggaccctgcacgggagctgggcaagctgcaagccaagcgagttgaggcccagcggcaggcccagcgtctgcgggaacgccgtgctgcctcgggctatcctgtcaaggtgccgctcgaagtccaggaggcagatgaagccaagctccaacagacagaagcagagctcaggaaggtggatgaggccatcgccctattccagaagatgctgtga

SEQ ID NO: 43684 - DNA, 681 bp, Homo Sapiens
atggcggcgcccagcgaagtggccgcgatagcccctggcgaaggcgatggcggaggcggcggctttggctcctggctggacggacggttggaggcactgggagtggaccgagccgtttatggagcctacatcttgggtatcctgcaggaggaggaggaagaagagaagctggacgctctgcaggggatcctctctgctttcctggaagaagattccctccttaatatctgcaaggagattgtggaacgatggtcagaaactcagaatgttgtcaccaaagtgaaaaaagaagatgaagtacaggccattgccaccctaattgagaagcaggcacaaatcgtagtaaagccaaggatggtgtcagaagaggagaagcagagaaaagctgccctcctggcccagtatgctgatgtgacagatgaagaggaatatcctttctggaatgagaaggatgattcaggtgctaccacaatgaacattggttctgacaaacttctgttccgaaacaccaatgtggaagatgtccttaatgcccgaaaactggagcgagactcacttcgggatgaatcccaaaggaagaaggaacaggacaagctgcagagggagagagacaaactagccaagcaggagcgcaaggaaaaggaaaaaaaaaggacacagagaggggagcgaaagcgataa

SEQ ID NO: 43685 - DNA, 1083 bp, Homo Sapiens
atgaattatacagagtccagcccattgagagaatcaactgccataggttttacacctgagttagaaagtatcatacctgtgccttccaataagaccacttgtgaaaactggagagagatacatcatctggtttttcatgtagcaaatatttgttttgcagttgggttggttattccaactactcttcaccttcatatgatatttcttaggggaatgttaactctaggatgtaccctttatatcgtctgggccactctctaccgatgtgccttggatataatgatctggaactctgtgttcttgggtgtcaacattttgcatctgtcgtatcttttatacaagaagagaccggtaaagattgaaaaggaactcagtggcatgtaccggcgattgtttgaaccactccgtgtgcctccagatttgttcagaagactaactggacagttttgcatgatccaaaccttgaaaaagggccaaacttatgctgcagaggataaaacctcagttgatgaccgtctgagtattctcttgaagggaaaaatgaaggtctcctatcgaggacattttctgcataacatttacccctgtgcctttatagattctcctgaatttagatcaactcagatgcacaaaggtgaaaaattccaggtcaccattattgcagatgataactgcagatttttatgctggtcaagagaaagattaacatactttctggaatcagaacctttcttgtatgaaatctttaggtatcttattggaaaagacatcacaaataagctctactcattgaatgatcccaccttaaatgataaaaaagccaaaaagctggaacatcagctcagcctctgcacacagatctccatgttggaaatgaggaacagtatagccagctccagtgacagtgacgacggcttgcaccagtttcttcggggtacctccagcatgtcctctcttcatgtgtcatccccacaccagcgagcctctgccaagatgaaaccgatagaagaaggagcagaagatgatgatgacgtttttgaaccggcatctccaaatacattgaaagtccatcagctgccttga

SEQ ID NO: 43686 - DNA, 282 bp, Homo Sapiens
atgaacaacttccaggccatcctgactcaggtgagaatgctgctctccagccatcagcccagcctggtgcaggccctcttggacaacctgctgaaggaggacctcctctccagggaataccactgcactctgctccatgagcctgatagtgaggctctggccaggaagatctctttgaccctactagagaaaggagacctggatttggccctcctggggtgggcccggagtgggctgcagcccccagcagccgagaggggccccggccacagtgaccatggt

SEQ ID NO: 43687 - DNA, 939 bp, Homo Sapiens
atgatgggtagaaggaataacacaaatgtggctgacttcatccttatgggactgacactttctgaagagatccagatggctctgtttatgctatttctcctgatatacctaattactatgctggggaatgtggggatgatattgataatccgcctggacctccagcttcacactcccatgtattttttccttactcacctgtcatttattgacctcagttactcaactgtcgtcacacctaaaaccttagcgaacttactgacttccaactatatttcctttacgggctgctttgcccagatgttcttttttgccttcttgggtactgctgaatgttaccttctctcctcaatggcccatgatcgctatgcagcgatctgcagtcctctacactacacagttattatgtccaaaaggctctgcctcgctctcatcactgggccttatgtgattggctttatagactcctttgtcaacgtggtttccatgagcagattgcatttctacgactcaaacgtaattcatcactttttctgtgacacttccccaattttagctctgtcctgcactgatacatacaacaccgaaatcctgatattcattattgttggttccaccctgatggtgtcccttttcacaatatctgcatcctatgtgttcattctctttaccatcctgaaaattaattccacttcaggaaagcagaaagctttctctacttgcgtctctcatctcttgggagtcaccatcttttatagcactctgatttttacttatttaaaaccaagaaagtcttattccttgggaagagatcaagtggcttctgttttttatactattgtgattcccgtgctgaatccactcatttatagtcttagaaacaaagaggtgaaaaatgctgtcatcagagtcatgcagagaagacaggactccaggtaa

SEQ ID NO: 43688 - DNA, 2553 bp, Homo Sapiens
aaaaaattgctttatggaagaaagtaagtatagacagagagaaagggatctgatgaccaaagcagggaataaatgtttggagtccacggcatcctgagaacttcttgggaatagagtctaggcccccaatgctgtcactctcacccatcctcctctacacatgtgagatgtttcaggacccagtggcttttaaggatgtggctgtgaacttcacccaggaggagtgggctttgctggatatttcccagaagaatctctacagggaagtgatgctggaaactttctggaacctgacctctataggaaaaaagtggaaagaccagaacattgaatatgagtaccaaaaccccaggagaaacttcaggagtgtcacagaagagaaagtcaatgaaattaaagaagacagtcattgtggagaaacttttaccccagttccagatgacaggctgaacttccagaagaagaaagcttctcctgaagtaaaatcatgtgacagctttgtgtgtgaagttggcctaggtaactcatcttctaatatgaacatcagaggtgacactggacacaaggcatgtgaatgtcaggaatatggaccaaagccatggaagagtcaacaacctaaaaaagccttcagatatcacccctccttgagaacacaagaaagggatcacactggaaagaaaccctatgcttgtaaagaatgtggaaaaaacattatttaccattcaagcattcaaagacacatggtagtgcacagtggggatggaccttataaatgtaagttttgtgggaaagcattccattgtctcagtttatatcttatccatgaaagaactcacactggagagaaaccgtatgaatgtaaacaatgtggtaaatcttttagttattctgctacccatcgaatacatgaaagaactcacattggagaaaagccttatgaatgtcaggaatgtgggaaagcattccatagtcccagatcctgtcacagacatgaaaggagtcacatgggagagaaggcttatcaatgtaaggaatgtggaaaagcattcatgtgtccccgttatgttcgtagacatgaaaggacccactctaggaaaaaactttatgaatgtaagcagtgtgggaaagcattatcctctcttacaagttttcaaacacacataagaatgcactctggagaaagaccttatgaatgtaagacatgtgggaaaggcttttattctgccaagtcatttcaaagacatgaaaaaactcacagtggagagaaaccgtataaatgcaagcaatgtggtaaagccttcactcgttccggttcctttcgatatcatgaaaggactcacactggagagaaaccctatgagtgtaagcaatgtgggaaagccttcagatctgccccaaatcttcaattgcatggtaggactcacactggagagaaaccgtatcaatgtaaggaatgtgggaaagctttcagatctgcctcacaacttcgaatccatcgtaggattcacactggagagaaaccctatgaatgtaagaaatgtgggaaagccttcagatatgtccagaactttcgatttcatgaaaggacacaaacacataagaatgcactctggagaaagaccttataaatataagatatatgggaaacacttttattctgccaagttatttcaaacacatgaaaaaattcacactggagagaaaccctataaatgcaagcaatgtggtaaagccttaattgttccagttcctttcgatatctaaaaggactcacagtggagaaaaactctatgagtgtaagcaatgtgggaaagtcttcagatctgtcaagaacctttcaatttatgaaaggacacacactggagagaaaccctatgaatgtaagaaatgtggaaaagcgttccataatttctcttcttttcaaatacatgaaagttgcacagaggagaggcgccctaagaatgtaagcattgtgggaaagcattcatatctgccaagatcgtttgaatacatgcaaaacacacactggagagaaacctatgaatgtaaggaatgcaaacaagcattcaattatttttcttccttgcatatacatgaaaggactcatacgagagagaatccgtatgaatgtaaggattgtgggaaagcattcagcttgcttaattgctttcatagacatgtaaagacacaccagaaggaaaccctatgaatgtaagcaatgtggcaaaagctttcacttcttccagttcttttcaatatcatgaaaggactcacactggggagaaaccgtatcaatgtaagcaatgtgggaaagccgtcagatcagcctcaagacttcaaatgcatggaagcactcacacttggcagaaactctatgaatgtaagcagtatgggaaagccttcagatcggctaggattctttgaatacaaataatgaatgtaaacaattaactgtttataataactgtatactaacaaatgttattctttttaaataattaagaagctataataaaatatccattggtgtcatgtattagatcaagcttataa

SEQ ID NO: 43689 - DNA, 800 bp, Homo Sapiens
gtaccagatggagacccaggctgagcagcaggagctggaaacccttccaaccaccaagatggctcagaccaaccctacgccggggtccctggggccatggaagataaccatctatgatcaggagaactttcagggcaagaggatggagttcaccagctcctgtccaaatgtctctgagcgcagttttgataatgtccggtccctgaaggtggaaagtggcgcctggattggttatgagcataccagcttctgtgggcaacagtttatcctggagagaggagaataccctcgctgggatgcctggagtgggagtaatgcctaccacattgagcgtctcatgtccttccgccccatctgttcagctaatcataaggagtctaagatgaccatctttgagaaggaaaactttattggacgccagtgggagatctctgacgactacccctccttgcaagccatgggctggttcaacaacgaagtcggctccatgaagatacaaagtggggcctgggtttgctaccaatatcctggatatcgtgggtatcagtatatcttggaatgtgaccatcatggaggagactataaacattggagagagtggggctctcatgcccagacttcgcagatccaatcgattcgccgaatccaacagtagctgattaaaagctccaagtacgataattcctcaagcatgagaccttgctaagcactctagaataagttttatgttctgctcacagacattgctttcaaatgttagctgctgaaatccacaataaacgtcatttaaaaaaaaaaaa

SEQ ID NO: 43690 - DNA, 633 bp, Homo Sapiens
ccatcccgccgtaagtgcaaagtatgcggtgaatacttcgtgccgaaattccacgacatccggatccggtggtgcagcccggagcatggcgcaatcctcgcaatggaagaacgcaagaaggagaaggtgaaagccgcggctaagcgcatcaaggagcaaaaagaggctgaaaaggacgggcgcaaacgccgcaaggagcggctggcagagctcaggccagacggatactacaaggctcaggctcagaaagctttcaacgcctttatccgtgcgcgcgacgccgatttgccatgcatcagctgcggcgagaccaatccgcctgatctgcatggtggccagtgggattgcggccatttcaagacagtaggtgcttaccctgaactgcgctttgaagaacgcaacgcccataagcagtgcaaatcctgtaatgccggagctggcaagtacaccgccaaagaggcgaccgtggcgcagcaatacgaagctgggttggtcgctcgttacggtcagggatacgtcaactggctcaatggtccccacgaaatgaccaactaccgccgtgaagacttcatccggatccgggatgagtaccgcgacaagctcaaagcactgaaacagcgggaggcagcatga

SEQ ID NO: 43691 - DNA, 387 bp, Homo Sapiens
atgtctgggcgtggtaagcagggaggcaaagctcgcgccaaggccaagacccgctcttctcgggccgggcttcagtttcccgtaggccgagtgcatcgcctgctccgcaaaggcaactatgcggagcgggtcggtgctggagcgccggtgtacctggcggcggtgctggagtacctgaccgccgagatcctggagctggctggcaacgcggcccgcgacaacaagaagactcgcatcatcccgcgtcacctccagctggccatccgcaacgatgaggagctcaacaagcttctgggcaaagtcaccatcgcacagggtggcgtcctgcccaacatccaggccgtgctgctgccaaagaaaactgagagccaccacaagactaagtaa

SEQ ID NO: 43692 - DNA, 2399 bp, Homo Sapiens
cagccgcagcagaaagcccccaacccaactgacactggcacaactgcaaacggtgtcatccgcacaactttatctcgctcctcgggctcccctaaggcattggacccatcgccgcgtcttttattttttgcaaagttgcatcgctgtacatatttttgtccccgccacctccctctgtctctggagtgccctacagccccgcaaactcctcctggagctgcgccctagtgcccctgctgggcagtggcgttcccccccatcctcccgcgcccagcccctgctgctctgggcagacgatgctgaagatgctctcctttaagctgctgctgctggccgtggctctgggcttctttgaaggagatgctaagtttggggaaagaaacgaagggagcggagcaaggaggagaaggtgcctgaatgggaaccccccgaagcgcctgaaaaggagagacaggaggatgatgtcccagctggagctgctgagtgggggagagatgctgtgcggtggcttctaccctcggctgtcctgctgcctgcggagtgacagcccggggctagggcgcctggagaataagatattttctgttaccaacaacacagaatgtgggaagttactggaggaaatcaaatgtgcactttgctctccacattctcaaagcctgttccactcacctgagagagaagtcttggaaagagacctagtacttcctctgctctgcaaagactattgcaaagaattcttttacacttgccgaggccatattccaggtttccttcaaacaactgcggatgagttttgcttttactatgcaagaaaagatggtgggttgtgctttccagattttccaagaaaacaagtcagaggaccagcatctaactacttggaccagatggaagaatatgacaaagtggaagagatcagcagaaagcacaaacacaactgcttctgtattcaggaggttgtgagtgggctgcggcagcccgttggtgccctgcatagtggggatggctcgcaacgtctcttcattctggaaaaagaaggttatgtgaagatacttacccctgaaggagaaattttcaaggagccttatttggacattcacaaacttgttcaaagtggaataaagggaggagatgaaagaggactgctaagcctcgcattccatcccaattacaagaaaaatggaaagttgtatgtgtcctataccaccaaccaagaacggtgggctatcgggcctcatgaccacattcttagggttgtggaatacacagtatccagaaaaaatccacaccaagttgatttgagaacagccagagtctttcttgaagttgcagaactccacagaaagcatctgggaggacaactgctctttggccctgacggctttttgtacatcattcttggtgatgggatgattacactggatgatatggaagaaatggatgggttaagtgatttcacaggctcagtgctacggctggatgtggacacagacatgtgcaacgtgccttattccataccaaggagcaacccacacttcaacagcaccaaccagccccccgaagtgtttgctcatgggctccacgatccaggcagatgtgctgtggatagacatcccactgatataaacatcaatttaacgatactgtgttcagactccaatggaaaaaacagatcatcagccagaattctacagataataaaggggaaagattatgaaagtgagccatcacttttagaattcaagccattcagtaatggtcctttggttggtggatttgtataccggggctgccagtcagaaagattgtatggaagctacgtgtttggagatcgtaatgggaatttcctaactctccagcaaagtcctgtgacaaagcagtggcaagaaaaaccactctgtctcggcactagtgggtcctgtagaggctacttttccggtcacatcttgggatttggagaagatgaactaggtgaagtttacattttatcaagcagtaaaagtatgacccagactcacaatggaaaactctacaaaattgtagatcccaaaagacctttaatgcctgaggaatgcagagccacggtacaacctgcacagacactgacttcagagtgctccaggctctgtcgaaacggctactgcacccccacgggaaagtgctgctgcagtccaggctgggagggggacttctgcagaactgcaaaatgtgagccagcatgtcgtcatggaggtgtctgtgttagaccgaacaagtgcctctgtaaaaaaggatatcttggtcctcaatgtgaacaagtggacagaaacatccgcagagtgaccagggcaggtattcttgatcagatcattgacatgacatcttacttgctggatctaacaagttacattgtatag

SEQ ID NO: 43693 - DNA, 930 bp, Homo Sapiens
atgacaacttttatacccatcattttttccagtgtggtagtggttctatttgttattggaaattttgctaatggcttcatagcattggtaaattccattgagcgggtcaagagacaaaagatctcttttgctgaccagattctcactgctctggcggtctccagagttggtttgctctgggtattattattaaattggtattcaactgtgtttaatccagctttttatagtgtagaagtaagaactactgcttataatgtctgggcagtaaccggccatttcagcaactggcttgctactagcctcagcatattttatttgctcaagattgccaatttctccaaccttatttttcttcacttaaagaggagagttaagagtgtcattctggtgatgctgttggggcctttactatttttggcttgtcaactttttgtgataaacatgaaagagattgtacggacaaaagaatatgaaggaaacttgacttggaagatcaaattgaggagtgcagtgtacctttcagatgcgactgtaaccacgctaggaaacttagtgcccttcactctgaccctgctatgttttttgctgttaatctgttctctgtgtaaacatctcaagaagatgcagctccatggtaaaggatctcaagatcccagcaccaaggtccacataaaagctttgcaaactgtgatctttttcctcttgttatgtgccgtttactttctgtccataatgatatcagtttggagttttgggagtctggaaaacaaacctgtcttcatgttctgcaaagctattagattcagctatccttcaatccacccattcatcctgatttggggaaacaagaagctaaagcagacttttctttcagttttgcggcaagtgaggtactgggtgaaaggagagaagccttcatctccatag

SEQ ID NO: 43694 - DNA, 459 bp, Homo Sapiens
tggaaattccaaatcggaccctgtgaaggaatcagcatggaagatcatctctgggtgacctgtttcatcttacatcgtgtatgtgaagacttcggagtgatagcaacctttgatcctaagcccattcctgggaactggaatggtgcaggctgccataccaacattagcaccaaggccatgcgggagaatggtctgaaatacattgaggaggccatcaagaaactaagcaagcaacagcagtaccacatctcccatgaaacttctaacatcaacgacttttctgctcttatagcccatcatagtgccagcatacacattccccagactgttggccaggagaagaagggttactttgaagatcattgcctctctgccgactgtgacccattttcggtgacagaagccctcatctgcccgtgtcttctcaccggagttgagcccttccagtacaaaaactaa

SEQ ID NO: 43695 - DNA, 918 bp, Homo Sapiens
gaaaatgggagctatacctcttatttcattctcctaggactctttaaccacaccagagcccaccaagtcctcttcatgatggttctgagtatcgttttgacctccctgtttggcaattccctcatgattctcctgattcactgggaccaccggctccacacgcccatgtacttcctcctgagccaactttccctcatggacgtgatgctggtttccaccactgtgcccaaaatggcggctgactacttgaccggaagtaaggccatctcccgcgctggctgtggtgcgcagatcttcttcctccccacactgggtggtggagagtgcttcctcttagcagccatggcctatgaccgctatgcggctgtctgccacccactccgatatcccactctcatgagctggcagctgtgcctgaggatgaacctgtcgtgttggctcctgggtgcagctgacgggctcctgcaggctgttgctaccctgagcttcccatattgcggtgcacacgagatcgatcacttcttctgcgagacccccgtgctggtgcgtttggcttgtgctgacacttcagtcttcgaaaacgccatgtacatctgctgtgtgttaatgctcctggtccccttttccctcatcctgtcctcctatggtctcatcctcgctgctgttctgcacatgcgctctacagaagcccgcaagaaggcctttgccacctgctcttcacatgtggctgtggtgggactcttttatggagctgccatttttacctatatgagacccaaatcccacaggtccactaaccacgacaaggttgtgtcagccttctatactatgttcacccctttactaaaccccctcatctacagtgtgaagaacagtgaggtgaagggagccctgacaaggtgtatgggtcggtgtgtg

SEQ ID NO: 43696 - DNA, 504 bp, Homo Sapiens
atggttagtaatttcttccatgtcatacaagtattcgagaaatctgctaccttgattagtaagactgaacacattggttttgtcatttattcatggaggaagtccaccacccacttggggagcagaaggaaatttgccatctcaatttacttatcagaagtttctttgcagaaatatgattgtcccttcagtgggacatcatttgtggtcttctctctctttttgatctgtgcaatggctggagatgtagtctacgctgacatcaaaactgttcggacttccccgttagaactcgcgtttccacttcagagatctgtttctttcaacttttctactgtccataaatcatgtcctgccaaagactggaaggtgcataagggaaaatgttactggattgctgaaactaagaaatcttggaacaaaagtcaaaatgactgtgccataaacaattcatatctcatggtgattcaagacattactgctatggtgagatttaacatttag

SEQ ID NO: 43697 - DNA, 1369 bp, Homo Sapiens
agcgccaagagagaaagagcacatatttctccgtgggacactccttgtattggcaagtgggtgagaaatgggcgactggagtttcctggggaacatcttggaggaggtgaatgagcactccaccgtcatcggcagagtctggctcaccgtgcttttcatcttccggatcctcatccttggcacggccgcagagttcgtgtggggggatgagcaatccgacttcgtgtgcaacacccagcagcctggctgcgagaacgtctgctacgacgaggcctttcccatctcccacattcgcctctgggtgctgcagatcatcttcgtctccaccccgtccctgatgtacgtggggcacgcggtgcactacgtccgcatggaggagaagcgcaaaagccgcgaggcggaggagctgggccagcaggcggggactaacggcggcccggaccagggcagcgtcaagaagagcagcggcagcaaaggcactaagaagttccggctggaggggaccctgctgaggacctacatctgccacatcatcttcaagaccctctttgaagtgggcttcatcgtgggccactacttcctgtacgggttccggatcctgcctctgtaccgctgcagccggtggccctgccccaatgtggtggactgcttcgtgtcccggcccacggagaaaaccatcttcatcctgttcatgttgtctgtggcctctgtgtccctattcctcaacgtgatggagttgggccacctgggcctgaaggggatccggtctgccttgaagaggcctgtagagcagcccctgggggagattcctgagaaatccctccactccattgctgtctcctccatccagaaagccaagggctatcagctcctagaagaagagaaaatcgtttcccactatttccccttgaccgaggttgggatggtggagaccagcccactgcctgccaagcctttcaatcagttcgaggagaagatcagcacaggacccctgggggacttgtcccggggctaccaagagacactgccttcctacgctcaggtgggggcacaagaagtggagggcgaggggccgcctgcagaggagggagccgaacccgaggtgggagagaagaaggaggaagcagagaggctgaccacggaggagcaggagaaggtggccgtgccagagggggagaaagtagagacccccggagtggataaggagggtgaaaaagaagagccgcagtcggagaaggtgtcaaagcaagggctgccagctgagaagacaccttcactctgtccagagctgacaacagatgatgccagacccctgagcaggctaagcaaagccagcagccgagccaggtcagacgatctaaccgtatga

SEQ ID NO: 43698 - DNA, 3466 bp, Homo Sapiens
agagacgcgccctcgcccagggcctcagcaccacggggaccggattcggtacgttcctaatgactgtgctgctgaagtacctgtgcgcagagtacggctggaggaatgccatgttgatccaaggtgccgtttccctaaacctgtgtgtttgtggggcgctcatgaggcccctctctcctggtaaaaacccaaacgacccaggagagaaagatgtgcgtggcctgccagcgcactccacagaatctgtgaagtcaactggacagcagggaagaacagaagagaaggatggtgggctcgggaacgaggagaccctctgcgacctgcaagcccaggagtgccccgatcaggccgggcacaggaagaacatgtgtgccctccggattctgaagactgtcagctggctcaccatgagagtcaggaagggcttcgaggactggtattcgggctactttgggacagcctctctatttacaaatcgaatgtttgtagcctttattttctgggctttgtttgcatacagcagctttgtcatccccttcattcacctcccagaaatcgtcaatttgtataacttatcggagcaaaacgacgttttccctctgacgtcaattatagcaatagttcacatctttggaaaagtgatcctgggcgtcatagccgacttgccttgcattagtgtttggaatgtcttcctgttggccaacttcacccttgtcctcagtatttttattctgccgttgatgcacacgtacgctggcctggcggtcatctgtgcgctgatagggttttccagtggttatttctccctaatgcccgtagtgactgaagacttggttggcattgaacacctggccaatgcctacggcatcatcatctgtgctaatggcatctctgcattgctgggaccaccttttgcagggtggatctatgacatcacgcaaaaatatgatttttccttctacatatgtggtttgctttacatgataggaatactctttttacttattcagccgtgcattcgaattatagaacaatccagaagaaaatacatggatggtgcacatgtttagtatcatgtaatgttccgtgtaggtttcattgtaatactcatgcctacctcgcatggttgctgtgaggcacctatgacaggacgtgggaaagcattttgtacggtaactggcactgtcatttgtaaatgccattgtcacagcctcatttgtaagcagcactgcctctctgtttggggagatgtaatgctggaagatcttaaggactacatacattctagagatgacagtgttgttcaaagacagcctagtaagtaattggtagaaatgcccttataaaaaccattctcttgtcatctactgggactagggttttaaatacagcttttaaaaacaaaaacagggaataaaagcttttcaactcaaccacttctttgtaagacaaaactgaagtatctgtgtgcttccagaaagcttacagataaatgggtttcaagcacaagaatatgactagatttcagaaattaattattacagggagctattgatctactagcatcaaacaaaggcaagctctaattccacaggtaatacaatttagtgcaattaaagaaacacggcttgtatttttatgagggaattctgcagctagggattgtgactcctaaatcctcctctaaaagaaggcacttgccattaatcctaattcagtgctatccagttataaatggaatcttgagacaaaaccttaacaaagaaataacagtaatgatttccttagcagaagccgtatttgtacgcacaacattaaatcaagggctacaattcaagcacttttattcgtatcattggcctcttagatgatataagcatgaggtggggcctgtaatatttttttctgagtttcttctgcccaaaaatataatatagaactaattgctaactgacaaataaagttaatagttaaatcatctccaaggaatgttgctaatccaaagtataacactatcaatttgtgaggataataaatggaatgccattagtgtagatgtctgtgccacatctgacactggagtagtgataacaaatagcccatctctagactctcgtgttgttatatagaccattcatttgcctgagcgtggcacagttttaaaaatagttctcttgattgatttcatacagaagatgactgtgatccatgacatctaataatgccctttctttatctgagatgtctatttttctaagccaaacgtttttcagactgcagaatgttcttcccagatcatttgaaatttctggctgccttacttgtttacagatagtttaagactatttaaatttctactcacaatttgatcatcacacacacacaaatccttgaatatcattgccagtgtcttaggtcaaatttacctaaagtgaatacagcccattctcaattatccttcacaattagacgcaggaatgctactaggaattggaatcaaacaatgccaccccaagcgtaattttagccagcagtttcagttatactcaaccatgcccttctgagctgttaacaagtgattcaatggacaagttctctttttgttccatctccattatttcctgctctaatgtatagtgggagtggttgtgtaatgaaaggaccaccaaaataataaaaggcagctaatggaaaggagagacaaaagcatggttaatatatatacttaatattacctccaatgactcgggaattgcctgtaaattattatagacaatagattgcatgtcatactccatttggttcaacacaacaacctatgtgttatcattacagctttggctgctgttaaagaatccagctctctattttgataaagataatcttaaagctgaggcaatgctccctcctctatctctctctgtgtaatttaccatagaattaggatgattagattgaaacacatgttgtatgttttaaaaactacattgcttcattactttcattttccgacaacatcaaactaacaagaggcagtgttaaatattttaaatggtgctatagccaatgtatttgaatgcttgcactgctggttgtgtatcatcaatatgaactttttatccaatgactcaactctaattacatctaagttagacttgctcacgttcagtttgtacagttgtgtgttgacttactatgttttgaaagtggtgacttctaccgaatgagtggaagttcccattgtcaaaaaaaataaagacctgcttgcagtattcatgttgacaacagagtaaaagagaatactgtaaagaattactgcaaatatttcctgtttatgttatttgccgttgtttgaagatattataaagggttaattgtatatttatatcatgtgctttatcgttttcccctcatgtatccaagtaatttttatttacatacaactaaataaatgttgtcctctttg

SEQ ID NO: 43699 - DNA, 2805 bp, Homo Sapiens
atggtccgaggggggcggggctgacgtcgcgctgggaatgccctggccgagacactgaggcagggtagagagcgcttgcgggcgccgggcggagctgctgcggatcaggacccgagccgattcccgatcccgacccagatcctaacccgcgcccccgccccgccgccgccgccatgtacgacgcagagcgcggctggagcttgtccttcgcgggctgcggcttcctgggcttctaccacgtcggggcgacccgctgcctgagcgagcacgccccgcacctcctccgcgacgcgcgcatgttgttcggcgcttcggccggggcgttgcactgcgtcggcgtcctctccggtatcccgctggagcagactctgcaggtcctctcagatcttgtgcggaaggccaggagtcggaacattggcatcttccatccatccttcaacttaagcaagttcctccgacagggtctctgcaaatgcctcccggccaatgtccaccagctcatctccggcaaaataggcatctctcttaccagagtgtctgatggggaaaacgttctggtgtctgactttcggtccaaagacgaagtcgtggatgccttggtatgttcctgcttcatccccttctacagtggccttatccctccttccttcagaggcgtgcgatatgtggatggaggagtgagtgacaacgtacccttcattgatgccaaaacaaccatcaccgtgtcccccttctatggggagtacgacatctgccctaaagtcaagtccacgaactttcttcatgtggacatcaccaagctcagtctacgcctctgcacagggaacctctaccttctctcgagagcttttgtccccccggatctcaaggtgctgggagagatatgccttcgaggatatttggatgcattcaggttcttggaagagaagggcatctgcaacaggccccagccaggcctgaagtcatcctcagaagggatggatcctgaggtcgccatgcccagctgggcaaacatgagtctggattcttccccggagtcggctgccttggctgtgaggctggagggagatgagctgctagaccacctgcgtctcagcatcctgccctgggatgagagcatcctggacaccctctcgcccaggctcgctacagcactgagtgaagaaatgaaagacaaaggtggatacatgagcaagatttgcaacttgctacccattaggataatgtcttatgtaatgctgccctgtaccctgcctgtggaatctgccattgcgattgtccagagactggtgacatggcttccagatatgcccgacgatgtcctgtggttgcagtgggtgacctcacaggtgttcactcgagtgctgatgtgtctgctccccgcctccaggtcccaaatgccagtgagcagccaacaggcctccccatgcacacctgagcaggactggccctgctggactccctgctcccccaagggctgtccagcagagaccaaagcagaggccaccccgcggtccatcctcaggtccagcctgaacttcttcttgggcaataaagtacctgctggtgctgaggggctctccacctttcccagtttttcactagagaagagtctgtgagtcacttgaggaggcgagtctagcagattctttcagaggtgctaaagtttcccatctttgtgcagctacctccgcattgctgtgtagtgacccctgcctgtgacgtggaggatcccagcctctgagctgagttggttttatgaaaagctaggaagcaacctttcgcctgtgcagcggtccagcacttaactctaatacatcagcatgcgttaattcagctggttgggaaatgacaccaggaagcccagtgcagagggtcccttactgactgtttcgtggccctattaatggtcagactgttccagcatgaggttcttagaatgacaggtgtttggatgggtgggggccttgtgatggggggtaggctggcccatgtgtgatcttgtggggtggagggaagagaatagcatgatcccacttccccatgctgtgggaaggggtgcagttcgtccccaagaacgacactgcctgtcaggtggtctgcaaagatgataaccttgactactaaaaacgtctccatggcgggggtaacaagatgataatctacttaattttagaacacctttttcacctaactaaaataatgtttaaagagttttgtataaaaatgtaaggaagcgttgttacctgttgaattttgtattatgtgaatcagtgagatgttagtagaataagccttaaaaaaaaaaaaatcggttgggtgcagtggcacacggctgtaatcccagcactttgggaggccaaggttggcagatcacctgaggtcaggagttcaagaccagtctggccaacatagcaaaaccctgtctctactaaaaatacaaaaattatctgggcatggtggtgcatgcctgtaatcccagctattcggaaggctgaggcaggagaatcacttgaacccaggaggcggaggttgcggtgagctgagattgcaccatttcattccagcctgggcaacatgagtgaaagtctgactcaaaaaaaaaaaatttaaaaaacaaaataatctagtgtgcagggcattcacctcagccccccaggcaggagccaagcacagcaggagcttccgcctcctctccactggagcacacaacttgaacctggcttattttctgcagggaccagccccacatggtcagtgagtttctccccatgtgtggcgatgagagagtgtagaaataaagac

SEQ ID NO: 43700 - DNA, 2235 bp, Homo Sapiens
atggatcatgctgaagaaaatgaaatccttgcagcaacccagaggtactatgtggaaaggcctatctttagtcatccggtcctccaggaaagactacacacaaaggacaaggttcctgattccattgcggataagctgaaacaggcattcacatgtactcctaaaaaaataagaaatatcatttatatgttcctacccataactaaatggctgccagcatacaaattcaaggaatatgtgttgggtgacttggtctcaggcataagcacaggggtgcttcagcttcctcaaggcttagcctttgcaatgctggcagctgtgcctccaatatttggcctgtactcttcattttaccctgttatcatgtattgttttcttggaacctccagacacatatccataggtccttttgctgttattagcctgatgattggtggtgtagctgttcgattagtaccagatgatatagtcattccaggaggagtaaatgcaaccaatggcacagaggccagagatgccttgagagtgaaagtcgccatgtctgtgaccttactttcaggaatcattcagttttgcctaggtgtctgtaggtttggatttgtggccatatatctcacagagcctctggtccgtgggtttaccaccgcagcagctgtgcatgtcttcacctccatgttaaaatatctgtttggagttaaaacaaagcggtacagtggaatcttttccgtggtgtatagtacagttgctgtgttgcagaatgttaaaaacctcaacgtgtgttccctaggcgtcgggctgatggtttttggtttgctgttgggtggcaaggagtttaatgagagatttaaagagaaattgccggcgcctattcctttagagttctttgcggtcgtaatgggaactggcatttcagctgggtttaacttgaaagaatcatacaatgtggatgtcgttggaacacttcctctagggctgctacctccagccaatccggacaccagcctcttccaccttgtgtacgtagatgccattgccatagccatcgttggattttcagtgaccatctccatggccaagaccttagcaaataaacatggctaccaggttgacggcaatcaggagctcattgccctgggactgtgcaattccattggctcactcttccagaccttttcaatttcatgctccttgtctcgaagccttgttcaggagggaaccggtgggaagacacagcttgcaggttgtttggcctcattaatgattctgctggtcatattagcaactggattcctctttgaatcattgccccaggctgtgctgtcggccattgtgattgtcaacctgaagggaatgtttatgcagttctcagatctcccctttttctggagaaccagcaaaatagagctgaccatctggcttaccacttttgtgtcctccttgttcctgggattggactatggtttgatcactgctgtgatcattgctctgctgactgtgatttacagaacacagagtccaagctacaaagtccttggaaagcttcctgaaactgatgtgtatattgatatagacgcatatgaggaggtgaaagaaattcctggaataaaaatatttcaaataaatgcaccaatttactatgcaaatagcgacttgtatagcaatgcattaaaacgaaagactggagtgaacccagcagtcatcatgggagcaaggagaaaggccatgcggaagtacgctaaggaagtcggaaatgcaaatatggccaacgcaactgttgtcaaagcagatgcagaagtagatggagaggatgctaccaagcctgaagaagaggatggtgaagtaaaatatcccccaatagtgatcaaaagcacatttcctgaggaaatgcaaagatttatgcccccaggggataacgtccacactgtcattttggatttcactcaagtcaattttattgattctgttggagtgaaaactctggcagggattgtaaaagaatatggagacgtcggtatatatgtatacttagcaggatgcagtgcacaagttgtgaatgacctcactcggaatagattttttgaaaatcctgccctatgggagctgctgttccacagcattcatgatgcagttttaggcagccaacttagagaggcacttgctgaacaggaagcctcggctcccccttcccaggaggacttggagcccaatgccactcctgccactcctgaggcatag

SEQ ID NO: 43701 - DNA, 534 bp, Homo Sapiens
ggaccagctggaactgggaaaacggaatcagtaaaggctttaggtggacttcttggaagacaagttttagtctttaattgtgatgagggcatcgatgtgaagtcaatgggacgaatatttgttggtttggtgaagtgtggggcctggggttgttttgatgaatttaataggctggaagaatctgtactgtcagcagtttctatgcaaatccagacaattcaagatgctttgaagaatcatagaactgtatgtgaactgcttggcaaggaggtagaagtaaattctaattctggaatttttatcactatgaatcctgctggaaaaggttatggaggaagacaaaaactgcctgataatcttaaacagcttttcaggcccgtagctatgtctcatccagacaatgagcttattgcagaagttattctctattcggaaggctttaaagacgctaaagtattgagcagaaaattggtagctattttcaatctatctagggaacttttgacacctcagcaacattatgattggggtttg

SEQ ID NO: 43702 - DNA, 2487 bp, Homo Sapiens
atgaggccgaggcccgaaggtagggggctccgggcgggagtcgcgctgtcccccgcgctactgctgctgctgctgctgccgccgccgccgacgctgctggggcgcctgtgggcagcgggcacaccctcgccgtcggcgcccggagctcggcaggacggcgcgctgggagccggccgcgtcaaacgcggctgggtgtggaaccagttcttcgtggtagaggagtacacgggcacggagcccctgtatgtgggcaagatccactccgactcagacgagggtgacggggccatcaagtacaccatctcaggcgagggtgctgggaccatcttcctgatcgacgagctgacaggcgacattcatgccatggagcgcctggaccgcgagcagaaaaccttctacacgctgcgggcccaggctcgggatcgcgccaccaaccgcctactggagcccgagtcggagttcatcatcaaggtgcaggacatcaatgacagtgagccccgcttcctgcacggcccctatattggcagcgtggccgagctctcacctacaggcacgtcggtgatgcaggtgatggcctcggatgcggatgaccccacgtacggcagcagcgctcggctggtgtacagcgtgctggacggcgagcaccacttcaccgtggaccccaagaccggcgtaatccggacggctgtgcctgaccttgaccgcgagagccaggagcgctacgaggtggtgatccaggccacagacatggcgggtcagctgggtggcctctcgggctccactaccgtcaccatcgtagtcaccgacgtcaatgacaacccgccccgtttcccgcagaagatgtaccagttcagcatccaggagtcagcccccattggaacggctgtgggacgtgtgaaggctgaggactcagacgtgggagagaacacagacatgacttaccaccttaaggacgagagcagcagcggcggcgatgtgttcaaggtcaccacagacagcgacactcaggaggccatcatcgtagtgcagaagcgcctggacttcgaatcccagcccgtgcacaccgtgatcctggaggccctcaacaagttcgtggacccccgcttcgccgacctgggcacgttccgcgaccaggcgatcgtgcgcgtggccgtgaccgacgtggacgagccccccgagttccggccgccctccggcctcctggaggtgcaggaggacgcgcaggtgggctccctggtcggcgtggtgacggcgcgggaccccgacgccgccaaccggcccgtccggtacgccattgaccgcgaatcagatttggaccagatcttcgatatcgatgcggacacaggcgccatcgtgactggcaaggggctggaccgcgagacggccggctggcacaacatcacagtgctggccatggaggcggacaatcatgcacagctatcccgggcatccctaaggatccgaatcctggatgtgaacgacaatcccccagaactggccacaccctacgaggcagctgtatgcgaggatgccaagccaggccagctcatccagaccatcagcgtggtggacagagacgagccccaaggcgggcaccgcttctatttccgcctggtgcctgaagctcccagcaaccctcatttctctctgcttgacatccaagacaacaccgctgcagtgcacacgcagcacgtgggcttcaaccggcaggagcaggacgtgttcttcctgcccatcctggtggtagacagtgggccgcccacactgagcagcacaggcacgctcaccatccgcatctgtggctgcgacagctccggcaccatccagtcctgcaacaccacggcctttgtcatggccgcctccctcagccccggcgccctcatcgccctcttggtctgcgttctcatcctggttgtgctggtgctgctgatcctcaccctcaggcgccaccacaagagccacctgagctcggacgaggatgaagacatgcgggacaacgtcatcaaatacaacgacgaaggcggcggcgagcaggacaccgaagcctacgacatgtcggcgctgcggagcctctacgacttcggcgagctcaagggcggcgacgggggcggcagcgcgggcgggggagcgggcgggggctcgggcgggggcgcgggcagccccccgcaggcccacctgccctccgagcgccactcgctgccgcaggggccgccgagccccgagccagacttctcagtgttcagggacttcatcagccgcaaggtggcactggcggacggggacctgtcggtgccgccctacgacgccttccagacctacgccttcgagggcgcggactcgccggccgcctcgctcagctccctgcacagcggctcgtcgggctccgagcaggacttcgcctatctcagcagctggggtccgcgcttccggcccctggccgcgctctacgccggccaccgcggggacgacgaggcccaggcctcctag

SEQ ID NO: 43703 - DNA, 825 bp, Homo Sapiens
gtggagcagctacaagatgagaccaaccacctaaggaaggagctagagagtgtgggaagacagctccaggctgaggtggaaaacaatcagatgttgagtctcctgaacaggagacaggaggagaggctacgtgaacaggaggagaggctacgtgaacaggaggagaggctgtgtgaacaggaggagaggctgtgtgaacaggaggagaggctacgtgaacaggaggagaggctgtgtgaacaggagaagctgccagggcaggagaggctgctggaagaggtggagaagctgttaaaacaggagaggcggcaggaggagcaggagaggctgctggagagggagaggctgctggacgaggtggaggagctcctggagcaggagaggcttcggcaacaggatgagaggctgtggcagcaggagactctgcgggagctggagaggttgcgggagctggagaggatgctggagctggggtgggaagccctgtacgagcagcgggccgagccacgcagcggcttcgaggagctgaacaacgagaacaagagcacactgcagttggagcagcaagtaaaggagctggagaagtcgggtggagctgaagagccaagaggctccgagtctgcagcagcagccagaccagtacctggagccccagtcccacaaggagcttggatgtgcggacaagcagggtggactccccaggagcacccaggcttgagtggagaagctgttggtacaggagaggcggcaggaggagcaggagaggctgcatgccattcttttcgggctgccgagaacagggagctaaacatcaccatcatctaa

SEQ ID NO: 43704 - DNA, 668 bp, Homo Sapiens
ccacattcctgaatgtgggggccgagatctctatcaccctggagcctgcccagccgagcgaaggggacaacgtcacgctggtcgtccatgggctttcgggggaactgctcgcctacagctggtatgcggggcccacactcagcgtgtcatacctggtggccagctacatcgtgagcacaggcgatgagactcctggcccggcccacacggggcgggaggctgtgcgccccgatggcagcctggacatccagggcatcctgccccggcactcaggcacctacatcctgcagaccttcaacaggcagttgcagaccgaggtgggctacggacacgtgcaggtccatgctgcagcagttgccacgatgatcgtgcccgtgcccaccaagccaacggagggccaggacgtaacactgaccgtgcagggctaccccaaggacctgctggtctacgcctggtaccgcgggcctgcctccgagcccaaccggctgctcagccagctgccgtcaggaacctggattgcaggccccgcgcacacaggccgggaggtgggcttccccaactgctcgctgttggtgcagaagctgaacctcacagacactggccgctacacactcaagaccgtcacagtgcagggcaagactgagacactggaagtggagctgcaggtg

SEQ ID NO: 43705 - DNA, 183 bp, Homo Sapiens
atgcttaatattctatcaataactgaatttaagtcaattacaataaaaactttagttcctcatctcactagtcccattccaaggactcaacagccaaatgccactactactaggatggttcagcttcaggcagaactgtggccgcttacttcagcacaactcaattcaatgagcacaaactaa

SEQ ID NO: 43706 - DNA, 689 bp, Homo Sapiens
atgcagatcttcgtgaagaccctgaccggcaagaccatcaccctggaagtggagcccagtgacaccatcgaaaatgtgaaggccaagatccaagataaagaaggcatcccccccgaccagcagaggctcatctttgcaggcaagcagctggaagatggccgcagtctttctgactacaacatccagaaagagtcgaccctgcatctggtcctgcgtctgagaggtggtatgcagatcttcgtgaagaccctgaccggcaagaccatcaccctggaagtggagcccagtgacaccatcgaaaatgtgaaggccaagatccaagataaagaaggcatccccccgatcagcagaggctcatctttgcaggcaagcagctggaagatggcggtactctttctgactacaacatccagaaggagtcgaccctgcacctggtcctgcgtctgagaggtggtatgaagatcttcgtgaagaccctgactggaaagaccatcaccctggaggtggagcccagtgacaccatcgaaaatgtgaaagccaagatccaggatgaagaaggcatcccccccgatcagcagaggctcatctttgcaggcaagaagttggaagatggccgcactctttctgactacagcatccagaaagagtcgaccctgcacctggtcctgcgcctgaggggtggctgttaa

SEQ ID NO: 43707 - DNA, 6615 bp, Homo Sapiens
atgcagcccccttcactgctgctgctgctgctgctgctgctgctgctgctgctatgtgtctcagtggtcagacccagagggctgctgtgtgggagtttcccagaaccctgtgccaatggaggcacctgcctgagcctgtctctgggacaagggacctgccagtgtgcccctggcttcctgggtgagacgtgccagtttcctgacccctgccagaacgcccagctctgccaaaatggaggcagctgccaagccctgcttcccgctcccctagggctccccagctctccctctccattgacacccagcttcttgtgcacttgcctccctggcttcactggcgagagatgccaggcccagcttgaagacccttgtcctccctccttctgttccaaaaggggccgctgccacatccaggcctcgggccgcccacagtgctcctgcatgcctggatggacaggtgagcagtgccagcttcgggacttctgttcagccaacccatgtgttaatggaggggtgtgtctggccacatacccccagatccagtgccactgcccaccgggcttcgagggccatgcctgtgaacgtgatgtcaacgagtgcttccaggacccaggaccctgccccaaaggcacctcctgccataacaccctgggctccttccagtgcctctgccctgtggggcaggagggtccacgttgtgagctgcgggcaggaccctgccctcctaggggctgttcgaatgggggcacctgccagctgatgccagagaaagactccacctttcacctctgcctctgtcccccaggtttcataggcccagactgtgaggtgaatccagacaactgtgtcagccaccagtgtcagaatgggggcacttgccaggatgggctggacacctacacctgcctctgcccagaaacctggacaggctgggactgctccgaagatgtggatgagtgtgaggcccagggtccccctcactgcagaaacgggggcacctgccagaactctgctggtagctttcactgcgtgtgtgtgagtggctggggcggcacaagctgtgaggagaacctggatgactgtattgctgccacctgtgccccgggatccacctgcattgaccgggtgggctctttctcctgcctctgcccacctggacgcacaggactcctgtgccacttggaagacatgtgtctgagccagccgtgccatggggatgcccaatgcagcaccaaccccctcacaggctccacactctgcctgtgtcagcctggctattcggggcccacctgccaccaggacctggacgagtgtctgatggcccagcaaggcccaagtccctgtgaacatggcggttcctgcctcaacactcctggctccttcaactgcctctgtccacctggctacacaggctcccgttgtgaggctgatcacaatgagtgcctctcccagccctgccacccaggaagcacctgtctggacctacttgccaccttccactgcctctgcccgccaggcttagaagggcagctctgtgaggtggagaccaacgagtgtgcctcagctccctgcctgaaccacgcggattgccatgacctgctcaacggcttccagtgcatctgcctgcctggattctccggcacccgatgtgaggaggatatcgatgagtgcagaagctctccctgtgccaatggtgggcagtgccaggaccagcctggagccttccactgcaagtgtctcccaggctttgaagggccacgctgtcaaacagaggtggatgagtgcctgagtgacccatgtcccgttggagccagctgccttgatcttccaggagccttcttttgcctctgcccctctggtttcacaggccagctctgtgaggttcccctgtgtgctcccaacctgtgccagcccaagcagatatgtaaggaccagaaagacaaggccaactgcctctgtcctgatggaagccctggctgtgccccacctgaggacaactgcacctgccaccacgggcactgccagagatcctcatgtgtgtgtgacgtgggttggacggggccagagtgtgaggcagagctagggggctgcatctctgcaccctgtgcccatggggggacctgctacccccagccctctggctacaactgcacctgccctacaggctacacaggacccacctgtagtgaggagatgacagcttgtcactcagggccatgtctcaatggcggctcctgcaaccctagccctggaggctactactgcacctgccctccaagccacacagggccccagtgccaaaccagcactgactactgtgtgtctgccccgtgcttcaatgggggtacctgtgtgaacaggcctggcaccttctcctgcctctgtgccatgggcttccagggcccgcgctgtgagggaaagctccgccccagctgtgcagacagcccctgtaggaatagggcaacctgccaggacagccctcagggtccccgctgcctctgccccactggctacaccggaggcagctgccagactctgatggacttatgtgcccagaagccctgcccacgcaattcccactgcctccagactgggccctccttccactgcttgtgcctccagggatggaccgggcctctctgcaaccttccactgtcctcctgccagaaggctgcactgagccaaggcatagacgtctcttccctttgccacaatggaggcctctgtgtcgacagcggcccctcctatttctgccactgcccccctggattccaaggcagcctgtgccaggatcacgtgaacccatgtgagtccaggccttgccagaacggggccacctgcatggcccagcccagtgggtatctctgccagtgtgccccaggctacgatggacagaactgctcaaaggaactcgatgcttgtcagtcccaaccctgtcacaaccatggaacctgtactcccaaacctggaggcttccactgtgcctgccctccaggctttgtggggctacgctgtgagggagacgtggacgagtgtctggaccagccctgccaccccacaggcactgcagcctgccactctctggccaatgccttctactgccagtgtctgcctggacacacaggccagtggtgtgaggtggagatagacccctgccacagccaaccctgctttcatggagggacctgtgaggccacagcaggatcacccctgggtttcatctgccactgccccaaggcaaggtttgaaggccccacctgcagccacagggccccttcctgcggcttccatcactgccaccacggaggcctgtgtctgccctcccctaagccaggcttcccaccacgctgtgcctgcctcagtggctatgggggtcctgactgcctgaccccaccagctcctaaaggctgtggccctccctccccatgcctatacaatggcagctgctcagagaccacgggcttggggggcccaggctttcgatgctcctgccctcacagctctccagggccccggtgtcagaaacccggagccaaggggtgtgagggcagaagtggagatggggcctgcgatgctggctgcagtggcccgggaggaaactgggatggaggggactgctctctgggagtcccagacccctggaagggctgcccctcccactctcggtgctggcttctcttccgggacgggcagtgccacccacagtgtgactctgaagagtgtctgtttgatggctacgactgtgagacccctccagcctgcactccagcctatgaccagtactgccatgatcacttccacaacgggcactgtgagaaaggctgcaacactgcagagtgtggctgggatggaggtgactgcaggcctgaagatggggacccagagtgggggccctccctggccctgctggtggtactgagccccccagccctagaccagcagctgtttgccctggcccgggtgctgtccctgactctgagggtaggactctgggtaaggaaggatcgtgatggcagggacatggtgtacccctatcctggggcccgggctgaagaaaagctaggaggaactcgggaccccacctatcaggagagagcagcccctcaaacgcagcccctgggcaaggagaccgactccctcagtgctgggtttgtggtggtaatgggtgtggatttgtcccgctgtggccctgaccacccggcatcccgctgtccctgggaccctgggcttctactccgcttccttgctgcgatggctgcagtgggagccctggagcccctgctgcctggaccactgctggctgtccaccctcatgcagggaccgcaccccctgccaaccagcttccctggcctgtgctgtgctccccagtggccggggtgattctcctggccctaggggctcttctcgtcctccagctcatccggcgtcgacgccgagagcatggagctctctggctgccccctggtttcactcgacggcctcggactcagtcagctccccaccgacgccggcccccactaggcgaggacagcattggtctcaaggcactgaagccaaaggcagaagttgatgaggatggagttgtgatgtgctcaggccctgaggagggagaggaggtgggccaggctgaagaaacaggcccaccctccacgtgccagctctggtctctgagtggtggctgtggggcgctccctcaggcagccatgctaactcctccccaggaatctgagatggaagcccctgacctggacacccgtggacctgatggggtgacacccctgatgtcagcagtttgctgtggggaagtacagtccgggaccttccaaggggcatggttgggatgtcctgagccctgggaacctctgctggatggaggggcctgtccccaggctcacaccgtgggcactggggagacccccctgcacctggctgcccgattctcccggccaaccgctgcccgccgcctccttgaggctggagccaaccccaaccagccagaccgggcagggcgcacaccccttcatgctgctgtggctgctgatgctcgggaggtctgccagcttctgctccgtagcagacaaactgcagtggacgctcgcacagaggacgggaccacacccttgatgctggctgccaggctggcggtggaagacctggttgaagaactgattgcagcccaagcagacgtgggggccagagataaatgggggaaaactgcgctgcactgggctgctgccgtgaacaacgcccgagccgcccgctcgcttctccaggccggagccgataaagatgcccaggacaacagggagcagacgccgctattcctggcggcgcgggaaggagcggtggaagtagcccagctactgctggggctgggggcagcccgagagctgcgggaccaggctgggctagcgccggcggacgtcgctcaccaacgtaaccactgggatctgctgacgctgctggaaggggctgggccaccagaggcccgtcacaaagccacgccgggccgcgaggctgggcccttcccgcgcgcacggacggtgtcagtaagcgtgcccccgcatgggggcggggctctgccgcgctgccggacgctgtcagccggagcaggccctcgtgggggcggagcttgtctgcaggctcggacttggtccgtagacttggctgcgcgggggggcggggcctattctcattgccggagcctctcgggagtaggagcaggaggaggcccgacccctcgcggccgtaggttttctgcaggcatgcgcgggcctcggcccaaccctgcgataatgcgaggaagatacggagtggctgccgggcgcggaggcagggtctcaacggatgactggccctgtgattgggtggccctgggagcttgcggttctgcctccaacattccgatcccgcctccttgccttactccgtccccggagcggggatcacctcaacttgactgtggtcccccagccctccaagaaatgcccataaaccaaggaggagagggtaaaaaatagaagaatacatggtagggaggaattccaaaaatgattacccattaaaaggcaggctggaaggccttcctggttttaagatggatcccccaaaatgaagggttgtgagtttagtttctctcctaaaatgaatgtatgcccaccagagcagacatcttccacgtggagaagctgcagctctggaaagagggtttaagatgctaggatgaggcaggcccagtcctcctccagaaaataagacaggccacaggagggcagagtggagtggaaatacccctaagttggaaccaagaattgcaggcatatgggatgtaagatgttctttcctatatatggtttccaaagggtgcccctatgatccattgtccccactgcccacaaatggctgacaaatatttattgggcacctactatgtgccaggcactgtgtaggtgctgaaaagtggccaagggccacccccgctgatgactccttgcattccctcccctcacaacaaagaactccactgtggggatgaagcgcttcttctagccactgctatcgctatttaagaaccctaaatctgtcacccataataaagctgatttgaagtgtta

SEQ ID NO: 43708 - DNA, 945 bp, Homo Sapiens
atgaccagaaaaaattatacctcactgactgagttcgtcctattgggattagcagacacgctggagctacagattatcctctttttgttttttcttgtgatttatacacttacagtactgggaaatctcgggatgatcctcttaatcaggatcgattcccagcttcacacacccatgtatttcttcctggctaacctgtcctttgtggacgtttgtaactcaactaccatcaccccaaagatgctggcagatttattatcagagaagaaaaccatctcttttgctggctgcttcctacagatgtacttctttatctccctggcgacaaccgaatgcatcctctttgggttaatggcctatgacaggtatgcggccatatgtcgcccgctgctttactccttgatcatgtccaggaccgtctacctaaaaatggcagccggggcttttgctgcagggttgctgaacttcatggtcaacacaagccatgtcagcagcttgtcattctgtgactccaatgtcatccatcacttcttctgtgacagtcccccacttttcaagctctcttgttctgacacaatcctgaaagaaagcataagttctattttggctggtgtgaatattgtggggactctgcttgtcatcctctcctcctactcctacgttctcttctccattttttctatgcattcgggggaggggaggcacagagctttctccacgtgtgcctctcacctgacagccataattctgttctatgccacctgcatctatacttacctgagacctagttccagctactccctgaatcaggacaaagtggcttctgtgttctacacagtggtgattcccatgttgaatcctctgatctacagcctcaggagtaaggaagtaaagaaggctttagcgaatgtaattagcaggaaaaggacctcttcctttctgtga

SEQ ID NO: 43709 - DNA, 2601 bp, Homo Sapiens
tttttttactaatgaaacactgcagattagtatccccaaacaattcattttctgacgaaactcttaaagcccagtttcagaacataagctttaagcaacaagcaatcttgtgttaatctgagctctgttacagctctgccgtaatctcagccaaattgcttcatctgtacgtggtgataccaccatctttgtaatattgtggtgaggattagagatgtatgtaaaagtgcatgcactgcctaatacccaagaattgctcaataaatgtcagctattactactcttactgacttccaactatgtgcagattatggtggaaacatgtgatacagcagatacagtacttaaatgaaaatgtcaaaattgtacaactaatttaagagtgggaaatgacagtaatgctaaattttcctaagaatatgtatgaaaaatagcacttccttgatggaacatacatttttagaacagaaaccttatgttataatggtaaaactagagagtcaaagtctctagttctaactctggctatgaccttatctagttgcatggcttttgacaagacaactgctcccctctggagttcagttttgtcatctggctggatttgagtaatctcaaataatctctaaagtcctttgcagctttaaaattatctattgagtgtgataaagattacatcagcttgcttttcatcctgcacttcatttttggttcttgttgtttgcttaacttgcactttagagtcataagcaattcacacagacaacacaactaaagaactgataatatcagacttgcagggtaatccaaaatgaagtttcaacaaggaggataaaacaaaatagaatcacactgaactctttaatagggccaaagtaaaccccaatgtttattctccagtcatttcattaagttattatatggaaaatatgcctggtagaatcttatacattcactgaaatagtctccacagaaaataataggctcatagtgaaataaaataccactttcttttctctcatcaggttgatctttaaataaagcaaaaatttatccaaagaagggctttcatcaagaaattaaagagagaaattacaagccatagagaaactgggcatttctatactagagaaaccacctaaaacaactgtatggagtaagatgaaaggtatgaatatgcctggaagaaattttacctagtgtgacatttttgctcatctttttgtcacaaaaggctgctaaggaagagagaatacagttttctagagaataagagtgcagtgtaaaaatggaaaccacaatttcagaaattcatgtagaaaacaaggatgagaagagatcagcagaaggtagtcctggggctgaaaggcagaaggaaaaggcatccatgctttgcttcaagagaagaaagaaagcagccaaagcactgaagcccaaagctggctctgaagctgctgatgtggcaaggaagtgtccacaagaagcaggagcttctgatcagccagagcccacacggggggcctgggcctcactcaaacgtcttgtaacacgcaggaaaaggtcagagtcttcaaagcagcaaaagccattggagggtgaaatgcaacctgcaataaatgctgaggatgctgatctttctaagaaaaaggcaaaatctagacttaagattccctgcataaaattcccaagagggccaaaaaggagtaatcattccaaaattatagaagactcagactgcagcatcaaagtccaggaagaagctgaaattttggatatacaaacacagaccccattgaatgatcaggcaacaaaggctaagtcaacccaggatctaagtgaaggcatctcacggaaagatggtgatgaggtctgtgaatcaaatgtgagcaatagcacaacttctggagagaaagtgatttcagtagaacttggattagataatgggcattctgctattcaaacgggaactctaatccttgaagaaattgaaacgatcaaggaaaaacaagatgttcaaccccagcaagcaagcccacttgaaacttcagaaacagaccatcagcagccagtactttctgatgttcctcctttacctgcaattccagatcaacaaattgtggaagaagccagtaacagtaccctagaaagtgcaccaaatggaaaagactatgaaagtacagagattgtagctgaagaaactaagccaaaagatactgaattgagccaagaatcagattttaaagaaaatgggatcactgaagagaaatccaaatcagaagaaagcaaaagaatggagccaattgctattattattacagacactgaaatcagtgaatttgatgttacaaaatctaaaaatgtccctaagcaattcttaatttcagctgaaaatgagcaagtaggggtttttgctaatgataatggttttgaggatagaacttcagaacaatatgaaacactcttaattgaaacagcctcttctctagtcaagaatgctattcagttgtcaatagaacagctggttaatgaaatggcctctgatgataataaaataaacaatcttctacagtgacttactctccagagtcacggcagaaaaaa

SEQ ID NO: 43710 - DNA, 1350 bp, Homo Sapiens
ctgagattggcgggtaacctagcaacgcagggaccgcggcggtaactgtggctagggaaacctggagcggtcagagcaggatggccagagacaataaaagcacgagacccaagtagtctaccgaagtctccatctctgtggacctacagaggcacagagggctgctcacaagatggctttagacattctcgccatggcccctttgtatcaggcccctgccatcaacagaatagggccaaagacagacccatctaaaaggccagctgatccactaaaacccttggttctctctaggaccaaactcaccaccattgaggccaaaaggatcatgtccatcctggatgaggcgatctacaaggtggagctggtgaccttgctgtcgtatgtggcatccaacagagaggatatggaggggatgctgggggaggacgtcatgagggcagtgagagagcatgaggatctctgccaggtcctccttgaaaacgtcaggtgcctgaaagagaaagaaaggcaattgcaggagcagaaagaggctgaggaggaagggtggctcagagaccgcctcctttccatagagctgcagaaatccagcctctcaccacttatgcagcagatcaaagactccaccaagaacgtccttagactcttgctcagcaacccccaggctgctaggctcctgcagatgcagacacagggtagaagtgcagaagcccagaattttattgacagcctgatagagctccgtggtttcctgtttgaaaaactactcactagtcccatggaagcgagggataaggcccagttcttacaggatatcagtagacagaatagtaataaccaacaaatcattgatactcttgaaaaggaattggcggagagaatgaagaacaggaatgcagaggaggagttggaggatctggacgctgttcacagggaggagaagatctcgctggaggagctcaggcggaggcacaaagtgctggtgggagagtttgcgcagatccgggaagagcgggagatcaactccaagaaaaggatggaggcagagcaggagatggtgcgcatggtacgggcggccacgctcatccaggccctatggaagggctatctggtgcgctccctgctcagatccaagaagaagcggggcaagggcaaagcaaaggacaaggagaagggcaagcagaaaggcaaggagaagggcaagggcaagaaatgagctctccacccagcccgctcctgacccttatcttcccagagaccaggccaggaaggcccgagatggagagcactaaattcacggctttcatgtttttatttaataaattaaaaagtatttgaagccacattgaa

SEQ ID NO: 43711 - DNA, 225 bp, Homo Sapiens
atgtttgtcatcatatcattacataattgtgttgttatttcttttgttttatttttatttggtgggaacaactttatccagaacttttacttgccccagaattatatagatcagtttctcctgacttctttcccaacctttacctctgttggtgttctaatagttttagttttatgttctgcttttctcttgctgtggcaaggggaaggagtaaatctaagatag

SEQ ID NO: 43712 - DNA, 2512 bp, Homo Sapiens
cttttcacactggccttaaagaggatatattagaagttgaagtaggaagggagccagagaggccgatggcgcaaaggtacgacgatctaccccattacgggggcatggatggagtaggcatcccctccacgatgtatggggacccgcatgcagccaggtccatgcagccggtccaccacctgaaccacgggcctcctctgcactcgcatcagtacccgcacacagctcataccaacgccatggcccccagcatgggctcctctgtcaatgacgctttaaagagagataaagatgccatttatggacaccccctcttccctctcttagcactgatttttgagaaatgtgaattagctacttgtaccccccgcgagccgggggtggcgggcggggacgtctgctcgtcagagtcattcaatgaagatatagccgtgttcgccaaacagattcgcgcagaaaaacctctattttcttctaatccagaactggataacttgatgattcaagccatacaagtattaaggtttcatctattggaattagagaaggtacacgaattatgtgacaatttctgccaccggtatattagctgtttgaaagggaaaatgcctatcgatttggtgatagacgatagagaaggaggatcaaaatcagacagtgaagatataacaagatcagcaaatctaactgaccagccctcttggaacagagatcatgatgacacggcatctactcgttcaggaggaaccccaggcccttccagcggtggccacacgtcacacagtggggacaacagcagtgagcaaggtgatggcttggacaacagtgtagcttcccccagcacaggtgacgatgatgaccctgataaggacaaaaagcgtcacaaaaagcgtggcatctttcccaaagtagccacaaatatcatgagggcgtggctgttccagcatctaacacacccttacccttctgaagaacagaaaaagcagttggcacaagacacgggactcaccatccttcaagtgaacaattggtttattaatgcccggagaagaatagtgcagcccatgatagaccagtccaaccgagcaggcaatcaaggaacaccttataatcctgatggacagcccatgggaggtttcgtaatggacggtcagcaacatatgggaattagagcaccaggacctatgagtggaatgggcatgaatatgggcatggaggggcagtggcactacatgtaaccttcatctagttaaccaatcgcaaagcaagggggaagggctgcaaagtatgccaggggagtatgtagcccggggtggtccaatgggtgtgagtatgggacagccaagttatacccaaccccagatgcccccccatcctgctcagctgcgtcatgggccccccatgcatacgtacattcctggacaccctcaccacccaacagtgatgatgcatggaggaccgccccaccctggaatgccaatgtcagcatcaagccccacagttcttaatacaggagacccaacaatgagtggacaagtcatggacattcatgctcagtagcttaagggaatatgcattgtctgcaatggtgactgatttcaaatcatgttttttctgcaatgactgtggagttccattcttggcatctactctggaccaaggagcatccctaattcttcatagggacctttaaaaagcaggaaataccaactgaagtcaatttgggggacatgctaaataactatataagacattaagagaacaaagagtgaaatattgtaaatgctattatactgttatccatattacgttgtttcttatagattttttaaaaaaaatgtgaaatttttccacactatgtgtgttgtttccatagctcttcacttcctccagaagcctccttacattaaaaagccttacagttatcctgcaagggacaggaaggtctgatttgcaggatttttagagcattaaaataactatcaggcagaagaatctttcttctcgcctaggatttcagccatgcgcgcgctctctctctttctctctcttttcctctctctccctctttctagcctggggcttgaatttgcatgtctaattcatttactcaccatatttgaattggcctgaacagatgtaaatcgggaaggatgggaaaaactgcagtcatcaacaatgattaatcagctgttgcaggcagtgtcttaaggagactggtaggaggaggcatggaaaccaaaaggccgtgtgtttagaagcctaattgtcacatcaagcatcattgtccccatgcaacaaccaccaccttatacatcacttcctgttttaagcagctctaaaacatagactgaagatttatttttaatatgttgactttatttctgagcaaagcatcggtcatgtgtgtattttttcatagtcccaccttggagcatttatgtagacattgtaaataaattttgtgcaaaaaggactggaaaaatgaactgtattattgcaattttttttt

SEQ ID NO: 43713 - DNA, 2198 bp, Homo Sapiens
atttacattcaaatcagccttttataattacattttaaattataataaaatgatggtgccggcgctccagttttccgtgtcttttaactgtaagagaagctgccgtgaattgaatgggggctacccatcacccagagtccccgctgcccaccgtgtgggttctggcctgcccgggcacacgtgtcctgagcatggcagctacatgggtgttacctgtggggacctccccgcactgccaggagaagggcctgacggggattctggccccacacagtgcgatggttgcccagcctcaccgcctgcagctccatctgagaagggcctgatacgggctggggtccaggcccactgccctcatgtcctgagccccacggtggcctgcaggcctggtttggaggccattatctcctcggcggccagccgggcacagcagtggccacttctggtcgaggcagttctgtgggtgaggggcgagcatcgcctcctgcaaccgtaacccaggccctgcctcccctgccatgcccctgtgggtcccgtcgttgccatctcgtcctcagtggcttcccgatgttgcctgctggcagggcaggccccgtgccatggagcatgagggacccttcccctcccagggccaggcttttggcagccaggccaagccgctgctggaatggaattcccggcgttcctggtggggcgcatggcatcggaatcctacctgctttgtctctggcatcagctggtgagccagtcacgtggccgtgtgcgtgagaccagagcccaggactgagggctcctcccgggcgcttcctcctcgctcactcacccccaccccctttttttggctttcagcaggactggctctgagcaggcgtaaaacagtgttaaaactgaatccgggcagcagggagctcctgtccacggcggcaggctctcacagtccaccgggctctcgcggtccacccagaccaccctttacctcgagtccttatgcacagaaaggccctgatatgtcccatacactcaggagttaggcccagagctgggcagtggtcactccacgccattccctctggtgtagagctggccctgcctgcccccagacggccgtggggtgggtggcaccgcttcctggggaaccccttcccacacttctggccttgtttctcacccacacaaggacaccccagtggtcactgctgcagctcgcggtcacatagagggtgagaggggagagctggacaaacaggtgacccagcagacccagcctgatgcccgcaggagagagcaacggggtctgatattttgtctccaaatgaaagagccacagtgaaaccccaggcctgccaaccccagttgtagggccagagaacagggatgtttccctgaggcggtggcaaggtttggtttggtgaaaacgaaggatatgtgagggtctgagaggggagggtgactggcctagactccacccctggcgccctgtccaccgtggctggctggccactctcggacccctcggcgtcaagcgctgactgggtgcctgcctggggcttggggctctgtacgtgttaattctgccactccagcagccctgagtgggaggagccattatcccccttctttctgtagatggggaaactgaggcaggcttgcccatggtgaagtggccagtcggacacagggccagattgaaacctgcagcctgggctcccggctacaacagcgccagcctccacaggcattagaaggggactcactgcgagggccccagccagggcagctttcagggtggggtctctggcctcaccctggggaaacagccggggcgctggctgcctcctgctgagcctggcgtgggaacaatgtggcctctatccctggagcgagccaggccgcctggacgcccagcccttcagagcagcccggccaggcaggcgcccacagcatggcgcccgggccgcgctgtccgtccacggggtgcgggcgccttggccaggcccaggcaagccgctccccgtgtcctccctggctggccactgagtggccagacgccggcttcctcctccctctcccgcccggccagcctcctccttttttggtggtgggtttgggggcccagcccacccgccactgccacgtctgccatcctcccgcacccacgagcatctttcaaaaattcccggtgggcggggctgagctgc

SEQ ID NO: 43714 - DNA, 303 bp, Homo Sapiens
ggcaaactgactgttggatttgccatgtactactttacatacgactcatggactggcaaggtactttacctagaggacttttatgtcacacaagcttaccaagtgagacttttttctttttacagctatagaaaagttcaaaagatagccatcacaactcaatgtaactgcatgcactttcttgtcgtcatttggaaccaggcttctatcaactactatactagtcgaggggctttagacctttcctctgaggagggctggcatctcttcaggtttaacagagaagaactcctggacatggca

SEQ ID NO: 43715 - DNA, 1698 bp, Homo Sapiens
agccgtgccagaattctctgccagctgctgtgcactgctgtcagtgcaaagatgggatggacttttttttcagattttctgctgttgtgggagtatggcaagagtttgagggggcggagaaagagattgggaatgtgaaaagggaagatagcacctgcgctaagcacattcctaggattgggccgcgtctcggggatgcagagtgggctcttcggcgcgccctgcagccatgggagtggacgcctgcccaggccgaagggcaaggacttgcggggtggggtctctgtgcatgcgcggagctgaaagggagcgttttgcagatctccacgcgtgcgcaactctcgggacgtggacgcggtgaacagttacgcacaatcgtctttctgacacaaacacaccctgccaggtggaagccaggatggagggcaggcctcgccttctgtcccggatccgccaatcctccgatccctggatcctctgatgatggcatcaactgtctgggctacaggttgctctccaaagagtggctgcccctctacaccaacctcactgtggacataacttccaagcctcaggagacccagtgcaaagctgaggggtatcttatctggaagccagaaagagcccctgaggccaaggtcacagggaagccctcccactcaccccacctggtttcttttaaaagtagagtttattttatctcctttctgccatccctaattccttccttccatctgtccatccatcttctttcccctccctcccttcctcccttctccttctcctcctccccacacctgcttcttttctctttctttcaactatgtccagaaggtccttcttaacaaacactaattagtacagggaaaggtctctttaagtgaatgcatttaaaatagggagtccacctttgtggtaaatagtgtgcacgaggtgagtctggatcaggacttcacacttgataacggaattcaatttctcaaaatacctttatttcagatttaatgaaattccatgtttgttgaatcattaagaacgagcatttgtgttgtactcatggtggacagccaccattctaatgcttgactttacataattaacgcatgtaatctgcaaaggagccacaaggcgagatctattattattcccattgtgctgctggagaaattaaggcagagaggttaagttgcttgccaccaaactagcgaggggcagagctgggatgtgtagcatccaggtaggttggctccagagcccatgagcctaactactactgtgcccaacctttgtgccaatcgccacaacagtcaaaggatggatcaagtactggttttgggggtgggggcaggggactctgggcagtatgttttctgatcacatcacatgacagtaggacattcttcatttcaccatggctttcactgcccaacaataaaaaggtcatgggcactttgggaggccgagggggggggatcacgaggtcaggagatcgagaccatcctggccaacacggtgaaaccccgtctctactaaaaatacaaaaaattagccaggcatggtggtgggcgcctgtagtcccagctactcgggaggctgaggcaggagaatggcgtgaacccgggaggcggagcttgcagtgagctgagatcgtgccactgcactccagagcctgggcgacagagcgagactccatctcac

SEQ ID NO: 43716 - DNA, 2247 bp, Homo Sapiens
gtttgcatgctagcggccgctcccagtggtggtcaccgccagtgccaatcccttgcgccgccgtgcagtcccgccctctgtcgctgcagccgccgcgcccgctccagtgcccccaattcgcgctcgggagtgaggagccgccaacaccccagctccgctgctgccgccaccgcagtgctctctagtcgccattggttacctaaactttccagtacccgcgacctttccgggactccgcggcggcggggcagaggcggcccaggggcggcacgcggctgctccggtgcgccgggctcttttcggccgccgcacggccgggcctcacaggctgccctcctgagagaggctcagaacacggccaggtacgcgccgccgccacagttgcgctgctagcgacgaggtgagtgctaggtgtttggtgggccgggcgcggggtccgcaaacttttgcgtacggcgctgactccctgcggtcctgccggcggctccggccgtccagacgctccgctcgccacgaactcctggagacgcagggccccagctgttaccgcagcacttggactagggtgcggagcgctccctggactcaacaataccgggaggtttccgctcccccaaagtgcgtgcgcgccgtgtggggagtgtacggaggttggcgggagacgctcctttggggaagggggaggcggctgctaagtttaggaaagtactcggtttcttcctggtgcccctttgtttgccgctcttgggatctgctgggcccagcgccactgctggtgggcggaaggggcaggtggcgggatttttcacgccccggtggaggggagtccctttcatccacgggactcgggccggcctgccccgacctgggtggaagcgcagtcgcgcagagcggggcgaccggctggctaggcggctcgggcccgcggcgtctgctcagtttctgagtcgcaaaaccgtcaaggaattcggaagctcccctcccccgcccatctctctggccccagcgcgcagtcaagtctgggggcaaccccccccgcgcccccggtctgtttggggtctgcagagcggcgccagggtaaagcgcagacctgttgatcctaggttctggcgggtcggggtctggcagatcctgggtccggccttgcttcccagtggtaccttctctcacggagggggcggggccgtccgctttcgggagtcagtgatcgccggatatgtgacaactgtgggtcgttggagtcccgccggcgctgggctagggcctggacttcacgtacatcgactgtgcgtggtcatgccggaggcaggggctcactcattgcaccgacctcatgttgctgtagcaagctaagtgcgtcgaaaattccacaaagttagggaccgatgtgattattttcgaatcggtggtgttctggagcaaaacctagtaagaaacaaaatcccaccctctgttttatttgcaactgttttgcatggtcatgagtggcttgacctgccttctaggtgttttcctctgctggcacgccagaatccctggttcagcctggaaggcgaggggcaggactccccagacagtggcctcagtgtggtaagtggctcttgacaattttatgaaaaatttagaagtccttcctagaaaaggtgcaattaggaaaaataaaatacaggaaaatgttgagtatgatgcatttattttaaagagtaatcatgtctcacatatgctacagatttttgtggaaagccgccgagctgggtaactgacacaacaaaagttgttcatcactggatccatttattaaaaggggaccttaaggcgattgcaggcctagtagaacacacacctgtagggcaaaaatggaaatttatggtgtagttctgccaccctggctccctcactcccaggcatttggcccctttactgggctccgaggagtcctctgctagcagttttaaagaggaaactgggccgggcgtagtggctcacacctgtaatcccagaactttggcaggccaaggcgagtggatcacctgcagtcaggagttcaagaccagcatggccaacatgctgaaaccgcgtctttactgaaaatacaaaagttagcagggatgatgccaggtgcctgtaatcccagctacttgggaggctgaggcaggagaatcgcttgaacctgggaggtggaggttgcagtgagctgctttcgcactattgcactgcagcctgggagacaaagcaagactctgtctc

SEQ ID NO: 43717 - DNA, 648 bp, Homo Sapiens
cccccagtatctgagcttatcaccaaggcagtggcagcttctaaggagcgcagcggcgtttctctggccgcgcttaagaaagcgcttgcggctgctggctacgatgtagaaaaaaacaacagccgtatcaagcttggcctcaagagcttggtgagcaaaggtactctggtgcagaccaaaggtaccggtgcttctggctccttcaaactcaacaagaaagcggcttccggggaaggcaaacccaaggccaaaaaggctggcgcagccaagcctaggaagcctgctggggcagccaagaagcccaagaaggtggctggcgccgctaccccgaagaaaagcatcaaaaagactcctaagaaggtaaagaagccagcaaccgctgctgggaccaagaaagtggccaagagtgcgaaaaaggtgaaaacacctcagccaaaaaaagctgccaagagtccagctaaggccaaagcccctaagcccaaggcggccaagcctaacgctaagaaaacaccgaagaaagcgaagaagccggccgcggccactgtaaccaagaaagtggctaagagcccaaagaaggccaaggttgcgaagcccaagaaagctgccaaaagtgctgctaaggctgtgaagcccaaggccgctaagccc

SEQ ID NO: 43718 - DNA, 351 bp, Homo Sapiens
atgtgtcacccagaggcttcaaggcccttctcaccatggtacccacctcctcgaagctgcctcccaaagccctctagctgctgctgcagccacaacaagtgccaccaccaggggccttccagctgccagtgcaggctttccagagccggggactggggaacctgcagtcatcacctcagcaattctggtggcagccaggccagccagggcagcgatgatgaccgtaatgaaaagtgggatgacagctccacactggtggatgagttgagaacaccaggcagaggcatgtacctggtctttgatggttcagtggacctgcactaccattgcagtgcaaagtgcaagagttga

SEQ ID NO: 43719 - DNA, 543 bp, Homo Sapiens
gatttcagctcttctgggagtaggaagctctcctttgacactcgttccttagtgtgctttctggaagaccatgggtttgctactcagcaagcagaaatcattgtgtctgcattggtccaggtactggaggccaacgtggacatcgtctacaaagatatggccaccaagatgaagcaggagatcgctcttcagcaaataatagcagaacgtgagaaaataaaactcaaactacatcagttaaaacaagtaatggatgaagtgattaaagtccgaacagatactaaattagacttcaacctagaaaagagcagagtaaaagaattgtattcgttgaatgaaaggaagctgctggaattgagaacagaaatagtgacattgcatgcccagcaagattgggccgtcacccagagagataggaagatagaaactgaggatgctggccccaaaaccatgcttgagtcatacaagcttgataatattaaatatttagcagggtctatatttacgtgcctaacagtagctctgggattttatcacctgtgg

SEQ ID NO: 43720 - DNA, 1544 bp, Homo Sapiens
aagacctcataaaatctatgctgaggaatgagctacagttcaaggaggagaagcttgcagagcagctgaagcaagctgaggagctcaggcaatataaagtcctggttcactctcaggaacgagagctgacccagttaagggagaagttacgggaagggagagatgcctcccgctcattgaatgagcatctccaggccctcctcactccggatgagccggacaagtcccaggggcaggacctccaagaacagctggctgaggggtgtagactggcacaacaccttgtccaaaagctcagcccagaaaatgataacgatgacgatgaagatgttcaagttgaggtggctgagaaagtgcagaaatcgtcttcccccagggagatgcagaaggctgaagaaaaggaagtccctgaggactcactggaggagtgtgccatcacttgttcaaatagccatggcccttatgactccaaccagccacataggaaaaccaaaatcacatttgaggaagacaaagtcgactcaactctcattggctcatcctctcatgttgaatgggaggatgctgtacacattatcccagaaaatgaaagtgatgatgaggaagaggaagaaaaagggccagtgtctcccaggaatctgcaggagtctgaagaggaggaagtcccccaggagtcctgggatgaaggttattcgactctctcaattcctcctgaaaggttggcctcataccagtcttacagcagcacatttcactcattagaggaacagcaagtctgcatggctgttgacataggcagtgagtactccattgtgaaggtgagctccagttcatggcccaggctcagcagggagctgctggctgagaaagagcctgaagtcttgcaggactcactggatagatgttattcgactccttcaggttatcttgaactgcctgacttaggccagccctacagaagtgctgtttactcattggaggaacagtaccttggcttggctcttgacgtggacactggggctgtgtggtttctgattccccctggcttattctttactttttcctacttttccaggctcagcagggagctgctggctgagaaagagcctgaagtcttgcaggactcactggatagatggtattcgactccttcaggttatcttgaactgcctgacttaggccagccctacagaagtgctgtttactcattggaggaacagtaccttggcttggctcttgacgtggacactggggctgtgtggtttctgattccccctggcttattctttactttttcctacttttccaggctcagcagggagctgctggctgagaaagagcctgaagtcttgcaggactcactggatagatgttattcgactccttcaggttatcttgaactgcctgacttaggccagccctacagaagtgctgtttactcattggaggaacagtaccttggcttggctcttgacgtggacagtgagtaccttactatgaaggtgataagcctccacctggccttccagataggggtgatattc

SEQ ID NO: 43721 - DNA, 2245 bp, Homo Sapiens
cttggtcctaactcaggcccccctcgtctggcaggctccaggcgccctctgcggaggtgttgtgtgtccacctcccctactcctggcagctgctcctgtggtgcctgttatggctgcccaggtggttgggggcacccaggcctgtgagggaggctggtcccagggccttcctcttccaccaccaccaccaccggctgcccagctgccccccattgtgtcccaagggaatgctgggccatggccacaaggggctcatggagagagcagcctggcttcctcccaggccaaggccccgccagatgactcctgtaaccccaggagtgtctatgagaacttccgactctggcagcactacaagcccctggcccggaggcaccttccccagagtcctgacaccgaagcgctttcgtgcttcctcatcccagttctccgatcgctggcccggcggaagcccaccatgaccctggaggagggactgtggcgggccatgcgggaatggcagcacacgagcaactttgaccggatgatcttctacgagatggcggaaaagttcctggagtttgaggctgaggaggagatgcagattcagaaatcgcaatggatgaaggggccccagtgcctgcctcctccagccacaccgaggcttgaacctcgaggacccccggcccctgaggtggtcaagcagccagtgtaccttcccagcaaggccggccccaaggccccgactgcctgcctgccaccacccaggccccagaggccagtgaccaaggcccgccggccaccaccccggccccaccggcgagcagagaccaaggcccgcctgccaccacccaggccccagagaccagcagagaccaaggtccctgaggagatccccccagaagtggtgcaggagtatgtggacatcatggaggagctgctggggccttccctcggggccacgggggagcccgagaaacaacgggaagagggcaaagtgaagcagccacaggaagaggactggacgcccccagacccgggcctcctgagctacattgacaagctgtgttcccagaaagacttcgtcaccaaggtggaggccgtcattcatccccaattcctggaagaattgctttccccagatccacagatggatttcttggccctaagccaggacctggagcaggaggaaggactcacccttgcccagctagtggagaagcgcctcccacccttgaaggagaaacagcatgcgagggcagcccctagtcgtggcacagcccggttggactcaagttcttctaagtttgcagctggccaaggagcagagagagacgtccctgacccccaacaaggggttggcatggaaacctgcccaccccagatgactgcccgggactctcagggacgaggcagagcacacactggcatggccaggtccgaagactctgttgtgcttttgggatgtcaggattcccctgggctgagggctgcctggccaacctctcctccccaggaccacagacccacctgccctggcgtgggtaccaaggatgccttggatctccctggagggtctcctgtcagggagtcacatgggctggctcaggggtcaagtgaggaggaggaactccccagcctggccttcctcttgggttcccagcacaagcttctgccctggtggctaccccagagccctgtccctgcctcgggccttctcagcccagaaaagtggggaccccagggaactcatcagtccccatctgctgagagaagaggcctcaacctagcaccttctcctgccaacaaggccaagaagcgacctctctttggaagcctgtcccctgctgaaaagacaccctacccagggcctgggctcagggtctctggggagcaatccctgacttgggggctgggtggcccctcacagtctcaaaagagaaagggtgaccccttggtctccaggaaggagaagaagcagcattgtagccagtaggggcttctgagcaggctctctggggccaatccccaaggatggggctctggcatccgatgccccaaagcggtcaaaagcttcttctcccccagtgctgatcttgctgggccttagctttggagggtaggggagggaggggagggagagggtggctgaatggggagggcaggaagggagggtctggggggaaggggctggggagtgggggtgggaagcagtgcgttgggggcctcgtgtgtaagtgtgaataaatgtagttgtcttggaaaa

SEQ ID NO: 43722 - DNA, 1005 bp, Homo Sapiens
tccaggcagctcaaccttgggagcttcggggccccgagaggtggagcctgtgagtggggcatgcactccatgtggaagccagagcctcctcccctggatggagtgtacgagatccctggaccggagcccatcccctctgtgagagagatgtacttcacgcccgggctgccaccgctgatcttcctgccctgggaccctggtggctcgaagcacccaaagttctgctgctcaagctccattcacgagcagccaccatacaaagaccaggcctgctatgtctttcaccagcgttgccgccttctcaggggtgtcaagcaggccctctggcttaccgaggccaagttaataaaatgccttcctgagaaagtacttggccttgttgatgatacaaggaaccacatagagaaccaagatgagcgtcttctgaatttgatctctcatgcctgtctctggcactgtactgagtacggccccaggagagaggcctgctgtctggtcattgtggacagtctgataaagttgtgtaagtctcagattctcaggcatccttctctggccaggcagatttgtgcccaaaactccacgttatccaccacctggaatgtgtctgttcttcagggtcatggttctagtggacggctgagtgccaaggatcctctgcccatctcctccagagaagaggttgaagctactaaaaatcatgttctcgaggccttctgtcccctctccccactagatcttcaggaatgcaatgtttctgatgtgaaagatgacacaggattctgggagggctatccttacccctatctccatatcctgcacttcctggagaaagccgatttgcaaccacatagccttcaaccagatcagctgtgggccaagatgatcctgtttgcttttggcattgccctggctcaggcctcctctgtggcaatgacaccaagatctcggagcagcccgtggttgtgcagagtacatgcacagacggacgtgcattccatttcc

SEQ ID NO: 43723 - DNA, 576 bp, Homo Sapiens
atgttctcgtgttgcttccccacttcgagaggttgctgcttcaggaatggagggagtgagagccttttccgacgatgccgaagaaggctcatccctcaccccagacgcctgtcgcccgttgtaataaggcgcatccaggtaccacaggacagcctggggcaggccctagcaggccaggccacaccagagatcccattggggctgcagctgcacactgtccttgtccaggagattcaggagctcattgaggcacagacacttgctcctggtccatgtgcagaagtaagagcactgccagcaccagcggcggagccagagccagcatgggaagaggcccctccagagagagcactggagctggagggagctccagccaaggaccagaccaacgaggagctgcctgaaatcacggcacgtactgaggtgccggagagcattaaaagaaggctgggaagaagagttccagcagctacgcctgctcccagaggcaacctcctcctccaggcatggatgcgggtccacagctgggcatccaggctgtttgcccctaatgtgctgcccgggacaggcccttaa

SEQ ID NO: 43724 - DNA, 2529 bp, Homo Sapiens
atgctccccaaacggcggcgagcgcgggtcgggtcccctagcggcgatgccgcttcctccacgccgccctcgacgcgcttcccgggagtcgccatctacctggtcgagcctcgcatgggtcgcagccgccgggccttcctcacaggcctggcgcgctccaaaggcttccgcgtccttgacgcctgcagctccgaagcgacacatgttgtgatggaagagacctcagcagaggaggccgtcagctggcaggagcgcaggatggcagctgctcccccgggttgcacccccccagctctgctggacataagctggttaacagagagcctgggagctgggcagcctgtacctgtggagtgccggcaccgcctggaggtggctgggccaaggaaggggcctctgagcccagcatggatgcctgcctatgcctgccagcgccctacgcccctcacacaccacaacactggcctctccgaggctctggagatactggccgaggcagcaggctttgaaggcagtgagggccgcctcctcaccttctgcagagcagcctcggtgctcaaggcccttcccagccctgtcacaaccctgagccagctgcaggggcttccccactttggagaacactcctctagggttgtccaggagctgctggagcatggagtgtgtgaggaggtggagagagttcggcgctcagagaggtaccagaccatgaagctcttcacccagatcttcggggtcggtgtgaagactgctgaccggtggtaccgggaaggactgcgaaccttagatgacctccgagagcagccccagaaactaacccaacagcagaaagcggggctccagcaccaccaggacctgagcaccccagtcctgcggtccgatgtagatgccctgcagcaggtggtggaggaagctgtggggcaggccctgcctggggccaccgtcacgctgaccggcggcttccgcagggggaagttgcagggccatgacgtggacttcctcatcacccaccccaaggagggtcaggaggcggggctgctgcctagagtgatgtgccgcctgcaggaccagggcctcatcctgtaccaccagcaccagcacagctgctgtgagtcccctacccgcctggcccaacagagccacatggacgcttttgagagaagtttctgcattttccgcctaccacaacctccaggggctgctgtggggggatccacgaggccctgcccatcctggaaggccgtgagagtggacttggtagttgcacccgtcagccagttccctttcgccctgctcggttggactggctccaagcttttccagcgggagctgcgccgcttcagccggaaggagaagggcctgtggctgaacagccatgggctgtttgacccggagcagaagacatttttccaagcggcttcagaggaagacatcttcagacacctgggccttgagtaccttcctccagagcagagaaacgcctgagcctgcctgtgtcccccacttccactcaggaaattgggctgcccccaacctggccactgaatgtctccaggcagatatgctgccccctgacccccaccttcacccctccccgccaaggcctggctcttccggaggtcaattgtgcctgcaggatcagttgagcccctgctggtgtgctgcagggtgtgatgaggtgggagccctcagtgccagcctcatcactgtgtgaccctgggtctgctcttagcctccccatggctcacgttcctgccctggatgggatgtgagtggggcccacatcgtggagctgtggtggggcctgcagtcatgaatggcaagtggtccctgatgtgcagtgtctcattagttgcactgcagttaactgtggctcctgcagggcaccctgcccagaatgcccagaagagaaccatgcatacctgcactgcatttgagagccatgagctggaggctgtggttcgtgccagcaaggagcctactgtctggtgtgctgtaggcatctggagagggagagggcctgggtaggagctgggaggaagataattttcaactatggggcttcagtactgcagcgccccgagccaggctctgtgcttctgcctttaaggcctgttctcagcacaatgtctcaaaaataggtcatatcctgccactcccgtcgcagagccctttaatggttccaaaccctaagtccacacatagcccctggctctggcatctctccagccccactggccccgagctgcttgactcaccggcttcctatttgatgcacccaggcccccttgtggccaactccctccccttctcactgaggcagaagcactgaggtgggctggacatgggtgccctccacgtccctcatatccccaggcacactctggcctcaggttttgccctggccatgtcatctacctggagtgggccctccccttcttcaggccttgaatcaaaagccactttgttaggcgaggatttcccagaccactcatcacattaaaaaatattttgaaaacatgcagtaaa

SEQ ID NO: 43725 - DNA, 488 bp, Homo Sapiens
gaggggttttcagggtcgtaggacgccgttgggcaccacgctcggagaaggacaggacaatggcggccttagggtccccgtcgcacacttttcgaggacttctgcgggagttgcgctacctgagcgcggccaccggccgaccctatcgcgacaccgcggcctatcggtaccttgtgaaggctttccgtgcacatcgggtcaccagtgaaaagttgtgcagagcccaacatgagcttcatttccaagctcctatctctgcctcctgcgtagcatccggaaacatgtggccctacatcaggaatttcatggcaagggtgagcgctcggtggaggagtctgctggcttggtgggtctcaagttgccccatcagcctggagggaagggctgggagccatgaacatggagaatatccttggatgctgcattcataggagaattgaataatttctatcaatatgtatttatcattaaattttttttaagtttaa

SEQ ID NO: 43726 - DNA, 939 bp, Homo Sapiens
atggctgatgataattttacagttgtcactgagtttattcttttgggattgacagatcatgctgaactaaaagctgtgctttttgtggtgttcctggtgatttacgccattaccttgttgaggaatctgggcatgatcctcttaatccaaatcacctccaaactccacacacccatgtactttttactcagctgtctttcatttgtggatgcctgctattcatctgcaattgcacccaaaatgctggtgaacctcctggttgtgaaggcaacaatttctttctctgcttgcatggtacagcatttgtgtttcggagtgttcatcaccacagaaggcttcttactgtcagtgatggcctatgaccgctatgtggccattgtgagtcccttgctttacactgtagccatgtctgatagaaagtgtgtggagcttgtcacaggatcatggataggtggaatagttaacacattaatccacacaatcagcttgaggagactgtccttttgtaggctaaatgctgtcagccacttcttctgtgacattccttcactgctaaagctgtcatgttctgacacctccatgaatgagttgttgctgttaaccttctccggagtcattgccatggccaccttcttgactgtgatcatttcctacatcttcattgcttttgctagcctaaggatccactcagcatcaggcagacagcaagccttctccacctgtgcctctcacctgactgctgtgaccatattctatggtaccttaatctttagctacattcagccaagctcccagtattttgtggaacaagagaaagtggtttctatgttctatacgctagggattcccatgttaaacctgttgatacacagtttgagaaacaaggacgtaaaggaggcagtgaaaagggccatagaaatgaaacatttcctctgttaa

SEQ ID NO: 43727 - DNA, 553 bp, Homo Sapiens
ggggctccatggttcctagaggcaaggaagaagagccaccagtcaaataggtttcagcacctccaactccaacatcttcaaagcagcgactgggaagaaaaataatccttctgacaacacatattcagacacatatggtcagcctcatgaagctctggatacccatgctcatgacattcttctgtacggtgctactgtctgtgctgggagaaatgaggaagaaaagatatgacaggaaggaattgttacttgaagaatgctggggaaagccaaatgtcaaagaatgtaccaataagtgttctaaagcctttagatgtaaagacaaaaattacacatgctgctggacctattgtggaaacatctgctggataaacgtcgaaaccagtggagattactaaaaccgtagcttcccaccaggctgccacctgtgtgggctgggaaatgtttaagaggtctcatagtagtaccctgtggctacttttaggaacaccagtctatttttactgagagctggacaacagcaaacacttgacaaataaacttatttaccagt

SEQ ID NO: 43728 - DNA, 471 bp, Homo Sapiens
atgctgaatgacttcttcactttcttgctcaggccagatcatgtacagccagtgatatgttatctccccttcaccatagtgccgcctgacccctcacttttccaaacatttacaccaggtgttcctttatttgtcactggagacaaccttgtaaccccagttctctctcaggaaaagcctatgatttcctcaagacttgtggcacagacagaaactttagggaaactgacccagaccagatggcagaaagcagatccctggggacagcacagtggtgaagagcccagtgtggatggcagactgccatcaaggtcatttggccaccagccaccactaatagtcagcttttgggcacccacacagcccagagagagcagttaccctctgatggtcatcatacccttggctgccgtggtcttcgtgctgaaagtggctgcagtggccatgtgtgtctggttgttgagccagaag

SEQ ID NO: 43729 - DNA, 1083 bp, Homo Sapiens
atggcgggacacctggcttcggatgcctgccttcttgccccctccaggcggtggaggtgatgggccaggggggccggagccgggctgggttgatcctcggacctggctaagcttccaaggccctcctggagggccaggaatcgggccgggagttgggtcaggctctgaggtgtgggggattcccccatgccccccgctgtatgagttctgtggggggatggcgtactgtgggcctcaggttggagtgcggctagtgccccaaggcggcttggagacctctcagcctgagggcgaagcaggagtcagggtggagagcaactccgatggcacctccctggagccctgcaccgtcccccctggtgccgtgaaactggagaaggagaagctggagcaaaacccgcaggagtcccagaacatcaaagctctgcagaaagaactcgaacaatttgccaagctcctgaagcagaagaggatcaccctgggatatacacaggccgatgtggggctcaccctgggggttctatttgggaaggtgttcagccaaacgaccatctgccgctttgagggtctgcagcttagcttcaagaacatgtgtaagctgcggcccttgctgcagaagtgggtggaggaagctgacaacaatgaaaatcttcaggagacatgcaaagcagaaaccctcttgcaggctcgaaagagaaagcgaaccagtatcgagaaccgagtgagaggcaacctggagaatttgttcctgcagtgcccgaaacccacactgcagcagatcagccacatcgcccagcagcttgggctcgagaaggatgtggtccgagtgtggttctgtaaccggtgccagaaaggcaagcaatcaagcagcgactatgcataacgagaggattttgaggctgctgggtctcctttctcaggggtaccagtatcctttcctctggccccagggccccattttggtaccccaggctatgggagccctcacttcactgcactgtactcctcggtccctttccctgagggggaagcctttcccccgtctccgtcaccaccctgggctctcccatgcattcaaactga

SEQ ID NO: 43730 - DNA, 1410 bp, Homo Sapiens
ctccagccccacctcttcccccggccctgggtggggcccgcacctggggctctccgctcgttagcgcgcccagggcgcctcctcggcccgagagggacccgcccgcggggcctggctggctcagggctacctccttccgcctaggacccccccttcggtgactcccgattccctgtcctaggctgcggtgccccgggaggcgggtcgccagagtagcagacagagctctttaatgggtgtcttctagggcgggtgctgtttgtgcatcatttgggttcccacacacttcctatgaggtggcgaaagccattatgcctatggtgtctgctcacacagggggaaactgaggcccaggcaggacagccccttgcctggggtgggggctgggttgtccttaggcctgtgacttcacctctacagcaccctcctgtggaccctctccctgcccccgccaggccagagtcctgcagccaggcccagaccctggcctgtccgtccggggatgctggacagtactcctccctccagccctcataagtcattgtcattcggatctgcatttccccagcccctctccttctaactggggggcactgtggcccactgtgcccctttctcttcccattccttccccctacacccattccagacatcccagagttaacaaaacccaaaagaaagagaaaaaagactcagagctgcttggaggagatgacatcctcaaatgtagcgccgttgtttgaggggctggtcccaggcacctttctctgtggcctggggtgtgcgttttggtccccagcgtgatttgaaagaagatggaggttcagcgaagcagaaaggaggtcttggaatatgtgaggcctgttccagatggcaggtgcgactcggtggtggcggtggcggcggcagctacgcgctaacagttggagattgtgcacaagggtggagaagaggcagggggcagatggcctgtcggagccagagggcatctctctgaagcgggtcgctgtggtggaagatttctttgacatcatctactcgatgcatgtggagagctcagcggagccaggcaaagcccccaagcacgctgggcagaagaaaacctaccgagcgatcgcagagacctatgccttcctcccgagagaggccgtgacccggttcctgatgagctgtacggagtgtcagaagaggatgcactttaactccaatggcctggaacccaaagaaaacgagcctccatctccactggtctctgggattattgattacaacatgcccctcacctccacctacctgaagcagatgaagcttcgagtgatgaattcccaggagcagccatcctcactgtctccggcacctggcttcgtaaacactgttatcaccgtgctcatctgtgcccatgaagaatga

SEQ ID NO: 43731 - DNA, 1849 bp, Homo Sapiens
ccttgcctcaaaaaaaaaaaaaatctgaggcacaaaaaagcaacgccaaatccaggggccctgcttcaggaagcatcaggactaactagattttattggtcaatagatgcaaacaactgatttagagcaaacttcccctccagtaaatcaagctccaaatcaaacaaagctagaggtcaaagcgcctccacgctggttggtcctgctcctagggcagcacagccccccatttccccagccccccatctctccagtttccctcaagaagccagagccatgccccatatgcacctctagtgtaggattatctggagctttaggttcaaaggaaagagtgaggtctcctgctcccttcctccctcccaccctgttcctcaccaactcctggacggtccctgccatgcggttgagaactggggctatgctgggatgtgtccgtgacactgatcatggtggccagagagacaccgagggagactgctctgccactagggagctgacatgaggaaggagccccagactaaaaacataagtctcaggagatttgggaggtggccacagggataaccccaaccctctaattaacgtgcctgagccagtctcctcctacatctggaactttaggagagctgcccacagcagaatgactcggcaaggagaagggcttgtcgggtctagctgggagtggaggtgggccaggctgccagagggaggctttgggtggtgcccttaagagtctccttcatgagctgttttgcactgtgaggtaagcaagagggcaaggaaggccattgctggggaatgggccgcctggctcacacctgcaggcagctgctaagccaagagtgggtgggtgctgctgagggattgggcttctagtttgtttgtttttatttttttatttttttgagatggagtttcgtgcttgttgcccaggctggagtgcagtggtgcaatctcggctcaccgcaacctctgcctcccgggttcaagcgattctccggcctcagcctccctaatagttgggattacaggcacccgccaccacgcccagctaattttttgtatttttagtagagacggggtttcgtcctgttacccaggctggttttgaactcctggcctcaagcaatccactcatctcggcctcccaaagtgccaggattataggcctgagccactgcgtacagcttgtttttaaataaagcagtttttaaaactactgttgcaaccttttagagggaggtaaactgaatatggtggattttgaatgactatttttttgttttatgaaagaggataataatagaatagaaaatatgagaatgtttggccgggtgcggtggctcacacctgtaatcccagcagtttgggaggccgaggcaggtggatcacctgaggtcaggagttcgagaccagcctgaccaacatgacgaaaccccgtctctactaaaaatacaaaattagccgggcatgatggtgcacgcctgtaatctcagctacttgggaggctgagacaggacaatcgcttgaacctgggaggcggaggttgcagggagctgagatcacgccactgcattccagactgggcgacagagcaagactctgtctctctcaaaaaaaaaaaaagaaagaaagaaagaaagaaagaaaatatcacaatgtaatttttgaactttttattgacgtacagcatacctccagagaagtgctgaaagcttgcattcttacaggtaatacacccagcacccagatcaagaaatggaacataaccagcaccccagaaccctaccctaaaaatgtaatttaaaaaaaaagattttaataaatatcttttagcgtgcccttt

SEQ ID NO: 43732 - DNA, 1078 bp, Homo Sapiens
ggcgcggagccggaagtgttgtggccgccgccgccgcgcgtcgcggaggcacgtgtggagccccggcagcaggagcgtcgcaggtccttggcccttgccagacattagcaccatgagcttcgtggcatacgaggagctgatcaaggagggtgacacggccatcctgtcactgggccatggtgcaatggtggcggtgcgtgtgcagcgtggggcacagacccagacccggcatggtgtcctgcggcactcagttgaccttatcggccgccccttcggctccaaggtgacgtgcggccgaggtggctgggtgtatgtgctgcaccccacgcccgagctctggacgctgaacctgccgcaccgcacgcagatcctctactccacagacatcgccctcatcaccatgatgttggagcttcggcccggctctgtggtctgtgagtctggcaccggcagtggctctgtgtcccacgccatcatccgcaccattgcacccacgggtcacctgcacacggtggagttccaccagcagcgggcagagaaggcccgggaggagttccaggagcaccgtgtgggccgctgggtgactgtgcgcacccaggacgtgtgccgcagtggctttggcgtgagccacgtggccgacgccgtcttcctggacatcccatcaccctgggaggccgtgggccacgcctgggacgccctcaaggtcgaaggcgggcgcttctgctccttctcaccgtgcatcgagcaggtgcaacgcacatgccaggcgctggcagcgcgcggcttctcagagctgagcaccctggaggtgctgccacaggtctacaacgtgcgcactgtcagcctgccaccgcccgacctgggcacaggcacagatggccctgccggctccgacaccagccccttccgcagcggcacgcccatgaaggaggccgtgggccacaccggctacctgacctccttggccagaagctggggtgagctgacccagaatccctgccctgctctccccagcgctaggagaccaggccagcccaggaaccagggaggtgaccctgctctctggcctcctggctga

SEQ ID NO: 43733 - DNA, 1404 bp, Homo Sapiens
gagggcgccatgaggagcctgtgctgcgccccactcctgctcctcttgctgctgccgccgctgctgctcacgccccgcgctggggacgccgccgtgatcaccggggcttgtgacaaggactcccaatgtggtggaggcatgtgctgtgctgtcagtatctgggtcaagagcataaggatttgcacacctatgggcaaactgggagacagctgccatccactgactcgtaaagttccattttttgggcggaggatgcatcacacttgcccatgtctgccaggcttggcctgtttacggacttcatttaaccgatttatttgtttagcccaaaagtaatcgctctggagtagaaaccaaatgtgaatagccacatcttacctgtaaagtcttacttgtgattgtgccaaacaaaaaatgtgccagaaagaaatgctcttgcttcctcaactttccaagtaacatttttatctttgatttgtaaatgatttttttttttttttatcgaaagagaattttacttttggatagaaatatgaagtgtaaggcattatggaactggttcttatttccctgtttgtgttttggtttgatttggcttttttcttaaatgtcaaaaacgtacccattttcacaaaaatgaggaaaataagaatttgatattttgttagaaaaacttttttttttttttctcaccaccccaagccccatttgtgccctgccacacaaatacacctacagcttttggtcccttgcctcttccacctcaaagaatttcaaggctcttaccttactttatttttgtccatttctcttccctcctcttgcattttaaagtggagggtttgtctctttgagtttgatggcagaatcactgatgggaatccagctttttgctggcatttaaatagtgaaaagagtgtatatgtgaacttgacactccaaactcctgtcatggcacggaagctaggagtgctgctggacccttcctaaacctgtcactcaagaggacttcagctctgctgttgggctggtgtgtggacagaaggaatggaaagccaaattaatttagtccagatttctaggtttgggtttttctaaaaataaaagattacatttacttcttttactttttataaagttttttttccttagtctcctacttagagatattctagaaaatgtcacttgaagaggaagtatttattttaatctggcacaacactaattaccatttttaaagcagtattaagttgtaatttaaaccttgtttgtaactgaaaggtcgattgtaatggattgccgtttgtacctgtatcagtattgctgtgtaaaaattctgtatcagaataataacagtactgtatatcatttgatttattttaatattatatccttatttttgtc

SEQ ID NO: 43734 - DNA, 798 bp, Homo Sapiens
aaccggccagctcctgctctgtcccctcaggtgtcctgcaggcacagcatctcggggggcccaggccgatggcaggagttcctcatggccgaggagtctctgcctggcacgctgctgaagctggcggcacaggggctgggcatgcaggccgcctgcaccctgacgcgcctctgctgggcctgggagctcagtgacctgcacctgctgcagagcctcatggcccagagctgcagctcggccctgcgcacatccgtgccccacggggcgcttgtggaggccgcctgcgccttttgtttccatctgaccctcctgcacctgcggcacagtcctcccgcctacagcgggcccgctgtggctctgttggtcaccgtcacggcctacacggccgggcccttcacgtctgccttcttcaaccctgccctggccgcctctgtgacctttgcctgctcgggacacaccttactggagtacgtgcaggtgtactggctgggccctctgacagaggagcagcatggggaggtcatggagccccctcttggacctagatctggggattctggcccctggcttcagaggcccaggtggagcccacaccttctcctgcacctgctctcagacactcggctccacctcactgaggtaccagaagggcagctgggttcctatggaattctggaagcttttttcagcttctgctggctctacactggggaggtctcaggggcaatgcctcagcctccccttggggggaaagacaggagctgggggtctctcaggcacctggccctgcgatggtga

SEQ ID NO: 43735 - DNA, 558 bp, Homo Sapiens
gcaatgccagagggaggcttgtgcaaatattctcatagattctggtgctgatccaaatattgtagatgtgtatggcaacacagctgtccattatgctgttaacagtgagaatttgtcagtggtggcaaaattgctgtcctgtggtacagacattaaagtgaagaacaaggctggccacacaccacttttattggccataaggaaaagaagtgagcaaattgtggaatttttactgacaaaaaaatgcaaatgcaaatggagttgataagtttaaatgcattcatcaacaacttttggaatataaacaaaagatatctaaaaattctcaaaatagtaatccagaaggaacatctgaaggaacacctgacgaggctgcacccttggcggaaagaacacctgacacggctgaaagcttggtggaaagaacacctgacgaataggatacagtgaattcctcttcaaagattttagcctgtaaacatcctttaaaattcaagaggggggaagattaagtacaatgagttctgagttcctcatcaaagaacaaatatgtcagta

SEQ ID NO: 43736 - DNA, 588 bp, Homo Sapiens
tcagctcctgcttcaggtgcagaaatacagcgatttccagtgccagctgttgagccagtgccagcaccaggggcagattcccctccagggacagcgctggagctagaggaagctccagagccctcctgccgctgccctgggactgcccaggaccagcccagtgaggagctgcctgacttcatggcacctcctgtagagccaccggcctcagccctggagctgaaagtgtggctggagctagaggtggcagagaggggtggccagcacagctccagccagcagctcccacactgctcccagtcctgggcacagtggaagctatggaggcagagaccagggtttgcaatctgggctcctctgcctcactggagagggacttctctcattcagcagagcagcagccctgctgctgaagggcctgctgctactgctgctggggctgtttgcctgcctgcaggaggtgctggagagcaagaaaaggagcctgtgagcaggggttccagcaggtcctcctgctcccagaggcgacctcctcctccaggcatggaggtttgccctcagctgggcatctgggccatttgcccctaa

SEQ ID NO: 43737 - DNA, 366 bp, Homo Sapiens
atgcatgctgaagagaaaccacacagatgtaaggtttatgacaagatttttgaatataattcatacctggcaaaacatattagaattcaaactggagagaaaccttacaaatgtgatgagtgtggcaacacctttggtcaaaattcataccttgtaattcaaaaggcaattcgtattggagagaaaccctacaagtgtaatgaatgtggcatagtttttaatcaacagtcacaccttgcaagtcatcatagtcttcatactgcagagaaatcttacaaatgtgaagactgtgacaaagttgtcagtcacaaatcacagcttgaaagacaggagaattcatactggagaaaaaacatacaaatgtaa

SEQ ID NO: 43738 - DNA, 2445 bp, Homo Sapiens
atggagcctgaaataaactgctctgaattgtgtgacagttttcctggccaggagctggatcggagaccccttcatgatctctgcaagacaacaattacatcttcccaccacagcagtaagaccatctcttcattatctcctgtcctcttgggtattgtttggacttttctcagctgtggacttctgctgatacttttctttcttgcctttacaattcactgcaggaagaacaggattgtgaagatgtccagtcccaatctgaacattgtgaccttactgggcagttgtctcacttacagtagcgcttacctctttgggattcaggatgttttagtggggagctcaatggaaactctcattcagacaagactgtccatgctgtgcattgggacctcccttgtgtttggccccattctgggaaagagctggcgactctacaaggtgtttacccaaagggtcccggacaagagagtgattatcaaagacctgcagttgctggggttggtggcagccctgttgatggctgatgtgatcctgctcatgacgtgggtgctgactgatcccatccagtgcctccagattctcagtgtcagtatgacggtgacagggaaagacgtgtcctgcacttcgaccagcacccacttctgtgcttcccggtattccgatgtttggattgctctcatttggggatgcaagggtctgctcctgctgtatggtgcctacctggctggcctgactggccatgtcagctcccctcctgtgaatcagtccttaaccatcatggtgggggtcaacctccttgtactggctgctgggctgctttttgtagtcaccagatacttgcattcctggcccaacctggtctttggactcacatctggagggatctttgtttgtacaactacaatcaactgcttcatcttcattccccagctgaagcaatggaaggcatttgaagaggaaaaccaaacaatcagacgcatggccaaatatttcagcactcccaacaaaagcttccatacccagtatggtgaggaggagaactgccacccgaggggagagaaaagctccatggagaggctcctcacagaaaaaaatgctgtgattgaaagcctgcaggaacaagtaaacaacgccaaagagaagattgtgaggctgatgtcagctgagtgcacctatgacctcccagagggggctgccccacctgcctcttccccgaacaaggacgtccaggcggtagcctcggtccacaccctggcagctgctcaggggccttcgggtcacctctctgactttcagaatgatcctggcatggctgcccgggattcccagtgcacttcagggccctcctcatatgcacaaagccttgaggggcctgggaaggactccagcttctccccagggaaggaggagaagatatctgactcaaaagacttttctgatcatttagactcaggttgtagccagaagccatggactgagcaaagcctgggtccagaaagaggagaccaagtccccatgaaccccagccagagtctcctaccagaaagaggcggctcagatccccagagacagaggcatctggagaactcagaggagcccccagagcggcggtcacgggttagttcagtaatcagggagaaacttcaggaggtcttacaagatctgggcctgggccctgaggcttccctctccaccgccccctcttgtcatcagcaaacctggaagaacagtgctgccttcagcccccaaaagatgcccctctccaaggagctcggctttagcccttacatggtgaggagaaggcgggcagctcagcgggcccgctcacactttcctggctctgcaccctcatctgtggggcatcgggcaaacaggactgttcctggggcacacagcaggctacatgtgcagaatggggacagccccagcctggccccacaaactactgattccagagtacgaagaccttcttccaggaagccttcactaccttcagatcctcaagacagaccaggtaccctggagggcagcaaacaaagccagacagagcccgagggggctagagggagcaaagcagcctttcttcgccagccttctggttctggccgggccccaagtcctgctgccccatgcctctccaaagcctcacctgacttgcctgaacagtggcagctgtggcccccagtgccctcaggctgtgcctccctgtcttctcaacacagctattttgatactgagtccagcagctcagatgagttcttctgccgctgccaccggccctactgtgaaatctgcttccagagctcttctgactctagtgacagtggcacatcagacactgaccctgagcctactggggggctggcttcctgggaaaagctgtgggcccgctccaagcctattgtgaacttcaaagatgacttgaaacccacgctggtgtga

SEQ ID NO: 43739 - DNA, 930 bp, Homo Sapiens
atgaaaaataaaaccgtgttaactgagtttatccttctgggtctaacagatgtccctgaactccaggtggcagttttcacctttcttttccttgcgtatttactcagcatccttggaaatctgactatcctcatcctcaccttgctggactcccaccttcagactcccatgtatttctttctccggaacttctccttcttggaaatttccttcacaaacatcttcattccaagggtcctgattagcatcacaacagggaacaagagtatcagctttgctggctgcttcactcagtatttctttgccatgttccttggggctacagagttttaccttctggctgccatgtcctatgaccgctatgtggccatctgcaaacctctgcattacaccaccatcatgagcagcagaatctgcatccagctgattttctgctcttggctgggtgggctaatggctattataccaacaatcaccctgatgagtcagcaggacttttgtgcatccaacagactgaatcattacttctgtgactatgagcctcttctggaactctcatgttcagacacaagcctcatagagaaggttgtctttcttgtggcatctgtgaccctggtggtcactctggtgctagtgattctctcctatgcattcattatcaagactattctgaagctcccctctgcccaacaaaggacaaaagccttttccacatgttcttcccacatgattgtcatctccctctcttacggaagctgcatgtttatgtacattaatccctctgcaaaagaaggggatacattcaacaagggagtagctctactcattacttcagttgctcctttgttgaacccctttatttacaccctaaggaaccaacaggtaaaacaacccttcaaggatatggtcaaaaagcttctgaatctttaa

SEQ ID NO: 43740 - DNA, 1755 bp, Homo Sapiens
atgatctttgctggcaaggcaccctccaatacttccaccctgatgaagttctattctttacttttatactcactcttattctcattcccattcttatgtcatcctctacctctccccagctatctccaccacactatcaaccttacccattctctcctagccgcttctaatccctccttagtgaacaactgctggctttgcatttccctttcttccagtgcctacacagctgtccccgccttacagacagactgggcaacatctcccatctccctacacctccgaacttcctttaacagccctcacctttaccctcctgaagaactcatttactttctagacaggtccagcaagacttccccagacatttcacatcagcaagctgccgccctccttcgcacttatttaaaaaacctttctccttatatcaactctactccccccatatttggacctctcacaacacaaactactattcctgtggccgctcctttgtgtatctcttggcaaagacccactggaattcccctaggtaatctttcaccttctcgatgttcctttactcttcatctccgaagtccaactacaaacatcaatgaaacaattggagccttccagctccatattacagacaagccctctatcaatactgacaaacttaaaaacattagcagtaattattgcttaggaagacacttgccctgtatttcactccatccttggctatcttccccttgctcatcagactctcctcccaggccctcttcttgtttacttatacccagccccgaaaataacagtgaaagattgctcgtagatactcgacgttttctcatacaccatgaaaatcgaaccttcccctctacgcagttaccccatcagtccccattacaacctctgacagctgccgccctagctggatccctaggagtctgggtacaagacacccctttcagcactccttctcacctttttactttacatctccagttttgcctcgcacaaggtctcttcttcctctgtggatcctctacctacatgtgcctacctgccaattggacaggcacatgtacactagtcttccttacccccaaaattcaatttgcaaatgggaccgaagagctccctgttcccctcatgacaccgacacaacaaaaaagagttattccactaattcccttgatggtcggtttaggactttctgcctccactgttgctctcggtactggaatagcaggcatttcaacgtctgtcatgaccttccgtagcctgtctaatgacttctctgctagcatcacagacatatcacaaactttatcagtcctccaggcccaagttgactctttagctgcagttgtcctccaaaaccgccgaggccttgacttactcactgctgaaaaaggaggactctgcatattcttaaatgaggagtgttgtttttacctaaatcaatctggcctggtgtatgacaacattaaaaaactcaaggatagagcccaaaaacttgccaaccaagcaagtaattacgctgaacccccttgggcactctctaattggatgtcctgggtcctcccaattgttagtcctttaatacccatttttctccttcttttatttggaccttgtatcttccgtttagtttctcaattcatccaaaaccgtatccaggccatcaccaatcattctatacgacaaatgtttcttctaacatccccacaatatcaccccttaccacaagacctcccttcagcttaa

SEQ ID NO: 43741 - DNA, 474 bp, Homo Sapiens
atggcttctggaaggctcattaagttcgtggtttttgagctcctagagtttgccgctttctccatccccacactcgtgatcacagaacagtttgccaccgcctaccaaggaacaagggctagatctgacaacacacactactggctgatcatctcctgttctattgcctatgttgcgttagtgactctactgatctgggttcctgtaaaagttatcctgcacaagaaacgttatatttacagaaaaattaaaggatggagacctgttctgatgatgtgtgtggtcctcaccacactgccctgcctcaccttttccatagcagtgactgaggttcaaaagagcattaatgggtccgctgatgtcttacctgatatgttacctgacctgcccgtatctctggttctgttatccctgatcatggttgatattattaactcaggatatatcctcttagagggagtcaaaagagtaagt

SEQ ID NO: 43742 - DNA, 264 bp, Homo Sapiens
atggcaaaacatctgaaattcaccgccaggactgagatggtacaggaaggaaacgtggaaggtgcatacaggaccctaaacagaatcctcactgtggatgggctccttgaggacattaaatgtccatggtataatgaaaagccatgccgccagcgacagaggaaaagctataaaaggtgctggcagatctataacatggaaatggctcgcaagatcaacttcttgatgcaaaagaactgggtagatccgtggcagggctgctga

SEQ ID NO: 43743 - DNA, 471 bp, Homo Sapiens
atggcgctgaaagcaaagaaggaagctcctgcctctcctgaagccgaagccaaagcgaaggctttaaaggccaagaaggcagcgttgaaaggtgtccacagccacataaaaaagaagacccgcacgtcactcaccttccagcggcccaagacactgcgacgccggaggcggcctgaatatccttggaagagcacccccaggagaaacaagcttggccactatgctgtcatcaagtttccgctgaccacggagtcggccgtgaagaggacagaagaaaacaacacgcttttgttcactgtggatgttaaagccaacaagcaccagatcaaacaggctgtgaagaagctctatgacggtgatgtggccgaggtcaccaccctgattccgcctgatggagagaagaaggcatgtgttcgactggctcctgattacgatgcgttggatgttgccaacaaaattgggatcatctaa

SEQ ID NO: 43744 - DNA, 2106 bp, Homo Sapiens
atggctgatgggggctaccctaataaaattaagaggccttgccttgaagatgtcacccttgcaatgggcccaggtgctcatcctagtactgcttgtgcagaactgcaggtccctccattgacaataaatcctagccctgcggctatgggagtggctggccagtcattactgctggagaataaccctatgaatggcaacatcatgggctcaccatttgtagtaccacagactacagaagtgggactgaaagggcccactgttccttactatgagaaaatcaacagcgtgccggctgtagaccaggagcttcaagagctgctagaggagctcaccaaaattcaagacccttctccaaatgagctagatcttgagaagatactggggacgaagccagaagagccactggttttagatcatccccaggcaaccctaagcacaactcccaagccttcggttcagatgtcacacttggagagcctggcttccagcaaggagtttgcttctagttgcagccaagttactggcatgtcacttcagatcccatcctcctccacagggatcagctattcgattccttccaccagtaagcagatagtgtcaccgagttcttcaatggcacagtccaagagccaggtccaggccatgctccctgtcgctctgccccccttaccagtgcctcagtggcatcacgcccaccagctgaaggcgttggcagccagcaagcaggggtctgctacaaagcagcaagggcccacccccagttggtctggtctgcctcctccaggactctctccaccttaccgcccagtgccatcaccacacccaccaccgctgccactgccaccaccaccacccccattcagcccccagagcctcatggtgtcctgcatgtcgtccaataccttgtcgggtagcactctccgaggctctcccaatgccttactgtcaagcatgacgtccagcagcaatgctgccctggggcccgccatgccctatgctcctgagaagctccccagccctgctctcactcaacagccgcagttcggccctcagagctccattcttgccaacctcatgtcctctaccatcaaaacccctcaaggacacctgatgtctgctctgcctgccagcaaccctgggccgtccccaccctatcgcccagagaagctctctagcccaggcttgccacagcagtccttcaccccacagtgttccctgatccgaagcctcactcccaccagtaatcttctaagccagcaacagcagcagcagcagcagcagcagcaagcaaatgtgatctttaagcccataagcagcaactcatccaaaaccctgagcatgatcatgcagcaggggatggcaagctccagcccaggagccacggagccatttacttttggcaacaccaagcccttgtcccattttgtttctgagccgggtccccagaagatgccctccatgcctaccacctctaggcagccttccctgctccactacctgcagcagccgacaccaacgcaggcctcctcagccactgcctcctccacggccactgccaccttgcagctgcagcagcagcagcagcaacagcagcagcagcctgaccattcttcattccttctgcagcagatgatgcagcaaccccagcgttttcagcgatcagtggcctcagattccatgcctgctctgcccagacagggctgttgccatctgtttgcatggacttctgcagctagctcggtgaagccccagcatcaacacgggaactctttcactagcaggcaagatcctcagcctggagacgtgtcaccgtctaacattactcatgtagacaaagcctgcaagcttggggaagccaggcacccccaggtcagcctcgggcgacagcccccgtcctgccaggccctggggagtgagtccttcctgcccggcagctcctttgctcatgagctggcccgagtcacctcctcgtacagcacctcagaggcagcgccctggggcagctgggatccgaaggcctggaggcaggtgcccgctccactactgcctagctgcgacgccacagcaagaggaacagagatcaggtcttatggcaatgacccctga

SEQ ID NO: 43745 - DNA, 633 bp, Homo Sapiens
atgttcgaatcatttaacgttccaggactctacattgcagttcaggcagtgctggccttggcggcatcttggacatctcgacaagtgggtgaacgtacattaacggggatagtcattgacagcggagatggagtcacccatgttatcccagtggcagaaggttatgtaattggaagctgcatcaaacacatcccgattgcaggtagagatattacgtatttcattcaacagctgctaagggagagggaggtgggaatccctcctgagcagtcactggagaccgcaaaagccattaaggagaaatactgttacatttgccccgatatagtcaaggaatttgccaagtatgatgtggatccccagaagtggatcaaacagtacacgggtatcaatgcgatcaaccagaagaagtttgttatagacgttggttacgaaagattcctgggacctgaaatattctttcacccggagtttgccaacccagactctatggagtccatctcagatgttgttgatgaagtaatacagaactgccccatcgatgtgcggcgtccgctgtataagatggaacaaattccactgagctatcctcaaggtcacggattccatcctctgtcacctccatttcattga

SEQ ID NO: 43746 - DNA, 1847 bp, Homo Sapiens
atggaagcagtgtgtctgggcacatgcccagagccagaagcgagcatgagcacagcaattcctggcctcaaaaaaggaaataatgctttgcagtccatcattttgcaaactttgctggaaaaggaaaatggacaaagaaaatatggtggccctccacctggttgggatgctgcaccccctgaaaggggctgtgaaatttttattggaaaacttccccgagacctttttgaggatgagcttataccattatgtgaaaaaatcggtaaaatttatgaaatgagaatgatgatggattttaatggcaacaatagaggatatgcatttgtaacattttcaaataaagtggaagccaagaatgcaatcaagcaacttaataattatgaaattagaaatgggcgcctcttaggggtttgtgccagtgtggacaactgccgattatttgttgggggcatcccaaaaaccaaaaagagagaagaaatcttatcggagatgaaaaaggttactgaaggtgttgtcgatgtcatcgtctacccaagcgctgcagataaaaccaaaaaccgaggctttgccttcgtggagtatgagagtcatcgagcagctgccatggcgaggaggaaactgctaccaggaagaattcagttatggggacatggtattgcagtagactgggcagagccagaagtagaagttgatgaagatacaatgtcttcagtgaaaatcctatatgtaagaaatcttatgctgtctacctctgaagagatgattgaaaaggaattcaacaatatcaaaccaggtgctgtggagagggtgaagaaaattcgagactatgcttttgtgcacttcagtaaccgagaagatgcagttgaggctatgaaagctttaaatggcaaggtgctggatggttcccccattgaagtcaccctagcaaaaccagtggacaaggacagttatgttaggtatacccgaggcacaggtggaaggggcaccatgctgcaaggagagtatacctactctttgggccaagtttatgatcccaccacaacctaccttggagctcctgtcttctatgccccccagacctatgcagcaattcccagtcttcatttcccagccaccaaaggacatctcagcaacagagccattatccgagccccttctgttagaggggctgcgggagtgagaggactgggcggccgtggctatttggcatacacaggcctgggtcgaggataccaggtcaaaggagacaaaagagaagacaaactctatgacattttacctgggatggagctcaccccaatgaatcctgtcacattaaaaccccaaggaattaaactcgctccccagatattagaagagatttgtcagaaaaataactggggacagccagtgtaccagctgcactctgctattggacaagaccaaagacagctattcttgtacaaaataactattcctgctctagccagccagaatcctgcaatccaccctttcacacctccaaagctgagtgcctttgtggatgaagcaaagacgtatgcagccgaatacaccctgcagaccctgggcatccccactgatggaggcgatggcaccatggctactgctgctgctgctgctactgctttcccaggatatgctgtccctaatgcaactgcacccgtgtctgcagcccagctcaagcaagcggtaacccttggacaagacttagcagcatatacaacctatgaggtctacccaacttttgcagtgactgcccgaggggatggatatggcaccttctgaagatgcttttttaaatttaagaataagacacacaaaactctattaaaaaaaaaaaagaaata

SEQ ID NO: 43747 - DNA, 1914 bp, Homo Sapiens
atgctggggaaaggagtagtcggcggtggcggcggcaccaaggcccccaagccctccttcgtgtcgtacgtacgccctgaggaaattcacacaaacgaaaaggaagtaacagagaaggaagtaactcttcacttgttgccaggtgaacagctgctttgtgaagccagcacagtactgaagtatgtccaggaagattcctgtcagcatggggtctatgggaggcttgtctgcacagacttcaagattgccttcttgggtgatgatgaatctgcattggataatgatgaaactcaatttaagaataaggttataggagaaaatgacattacactccactgtgttgatcagatttatggagtgtttgatgagaaaaagaaaactctctttggacaactgaagaaataccctgagaagctcatcatccactgcaaagaccttcgagtgttccagttttgtctgaggtacacaaaggaagaggaagtcaaaaggattgtcagtggcataattcatcatacccaggctcctaaactgcttaaacgattatttctgttttcctatgcgactgctgcacaaaacaatacagtcactgatcccaagaaccataccgtaatgtttgacacacttaaggactggtgttgggaactggaacggaccaaaggcaacatgaagtacaaagcagtgagtgtcaacgaaggctataaagtctgtgagagattgccagcatactttgttgtccccacccctcttcctgaagagaatgtgcagcgctttcagggtcatggcataccaatatggtgttggtcctgccacaatggaagtgcccttttgaaaatgtcagcactgcccaaagaacaggatgacggcattttacaaatccaaaagagcttcttagatggaatttacaagaccatccacaggccaccctatgaaattgttaaaacggaagacctgtcaagcaacttcctgtccctgcaggaaatccagactgcatactctaaatttaaacagctatttctgatagataacagtactgaattttgggacacagatataaaatggttttctctgttggaaagtagcagctggcttgacataatcagacgttgcctgaaaaaagcaatagagattacagaatgtatggaagcacaaaacatgaatgttcttcttttagaggagaatgcatccgacctctgctgtctcatttcctctctggtgcaactgatgatggacccccactgcagaaccagaattggtttccagagcctcatccaaaaggagtgggtcatgggtggccactgtttcttggatcgctgcaaccatctccgccagaacgacaaagaggagcatcaacgacaactttctttgccacttacacaatctaagtcatctcccaaaagaggatttttcagggaagaaacagatcatttaattaaaaaccttctgggcaagagaattagcaaacttattaattcttctgatgagctccaagacaactttcgagagttctatgacagctggcatagcaagtccactgactaccatggtttgttgttaccgcatatcgaggggcccgaaatcaaagtctgggcccagcgctacctacgttggattccagaagcccaaatcctaggtggtggccaagtggccactctgagcaaactcttggaaatgatggaggaagtccagagtttacaagagaagatcgacgagagacaccacagccagcaggccccccaggctgaggccccctgcctgctgaggaactctgcccgcctctcgtctttgtttcctttcgctctgctccagcgacattcctctaagcccgtcttacccaccagtggctggaaagctttgggagatgaagacgatttggccaaacgagaagatgagttcgtggacctaggggatgtgtga

SEQ ID NO: 43748 - DNA, 936 bp, Homo Sapiens
acgagctgcccacgtcctctccaggaggggacaccgggttcacgagctgcccacgccctctccaggaggggacaccgggttcacgagctgcccacgtcctctccaggaggggacaccgggttcatgagctgcccacgccctttccaggaagggaccccgggttcacgagctgcccacgtcctctccaggaggggacaccgggttcacgagctgcccacgtcctctccaggaagggacccaggaagggaccccgggtccacgagctgcccacgtcctctccaggaagggacccggacgaactgcccacgtcctctccaggaagggaccccgggttcacgagctgcccacgtcctctccaggaggggacaccgggttcacgagctgcccacgccctctccaggaagggaccccgggttcatgagctgcccacgtcctctccaggaagggacccggacgaactgcccacgccctctccaggaggggacccggacgagctgcccacgtcgtctccaggaagggacccggacgagctgcccacgtcctctccaggaagggacccggacgaactgcccacgcgctctccaggaggggacaccgggttcacgagctgcccacgccctctccaggaagggaccccgggttcacgagctgcccacgtcctctccaggaggggacaccgggttcacgagctgcccacgtcctctccaggaggggacaccgggttcacgagctgcccacgccctctccaggaggggacaccgggttcacgagctgcccacgtcctctccaggaagggacccgcacgagctgcccacgtcctctccaggaggggacaccgggttcacgagctgcccacgcactttccaggaagggaccccgggttcaggtctcctgccggcccacatcgtgcctttgtgtaaatcagaagaaagatga

SEQ ID NO: 43749 - DNA, 273 bp, Homo Sapiens
atggacgcgcatgaaatttggtgccgtgactcggatcgggggacctcccttgggagatcaatcccctgtcctcctgctctttgctccgtgagaaacatccacctatggcctcaggtcctcagaccgaccagcccaagaaacatctcaccaatttcaaatccggcattgggctctcaccattggccaagattccctgccccggtgaggccggaagcagttcagacacctgacttctggcaacatgtgagcctgacccaagcagatcactggtga

SEQ ID NO: 43750 - DNA, 1338 bp, Homo Sapiens
aggttaatcataaagactgaatttttgcccacgaaataccgaggctatatgttacccttgtctcaggtgttctggcttgcgggctccctgctcatcattggcttggcctctgtgatcatccccaccatcgggtggcgctggctcattcgcgtcgcctccatcccgggcatcatcctcatcgtggccttcaagtttattcctgaatctgcccggttcaatgtctccactgggaacactcgggctgccctggccactctggagcgcgttgccaagatgaaccgctcggtcatgccggaggggaagctggtggagcccgtcctggaaaaaagaggaagatttgcagacctattggatgctaaatatttacggaccacattacagatctgggtcatatggcttggaatctcttttgcctactatggggttatcctggccagtgctgagctgctggagcgggacttggtctgtggttcaaagtcagactctgcggtggtggtgactgggggggactcaggggagagccagagcccctgctactgccacatgtttgcaccctctgactatcggaccatgatcatcagcaccatcggtgaaattgctttgaatcctttaaatatactgggcatcaatttcctgggaagacggctgagcctttctattaccatgggatgcacggctttattcttccttctcctcaacatttgcacttcaagtgccggcctgattggcttcctcttcatgctgagggctctggtagctgcaaacttcaacaccgtctacatttacacagctgaggtctaccccaccacgatgcgcgctttggggatgggaaccagcggctccctgtgtcgcattggtgcaatggtggcaccatttatatcccaggttcttatgagtgcatcaatactgggggccctgtgtctcttctcatctgtctgtgttgtatgcgccatttctgcattcactctccccatcgaaaccaaaggacgggccctccagcaaattaaatgaagacctgcaaagctatgtctaccagatgagaaaaatgaattctatcttcagaactgcggtgcatttttttaaaacttggttttacttctgtatgctactcggtaattagtaaagtgattttttttttaaaggcatatatgggaatggggtaggtaactgtatattgatctcttccttgaggaacaatatataaagtacttttataaaatataatttaagctttcaaaggggtgtgagagggagatggtgggggggaagatggcttttcttcattgaaatcaagtctgtaaacctttatatgaataaatactaaattttaaacttaca

SEQ ID NO: 43751 - DNA, 2689 bp, Homo Sapiens
attcccttccgtatggaaatgaggttaactcatttgcaggaacctaacgcccgccctcccccgactcggatcgctggcgtgaacccagcggccccgtgctctccgggtatccctggatcgaggcgcacgcgttgttgcaaagtctcgcacttagggattagaatgtgcctttgcgtttcgttttgttttgcaacaatacaggtgtgagggatcgcagccctggtccaggctctagtctccccgccctctcgctttcttgggcctccgggcgcctcaaaggtaaaactaggccatttgaagcctgcgaagcgaagggcagtcggtcttcaggcctagcgggcttggctgggctgggtcggtggacccctgggctggcggcgggagcagagcatcgagcggcttttagctggggttcgggcggaggacctgggacaaccgcgggcctcgctcctccccggacggggcgggacggggaagtcccgcccaccaggcccaggccccgggccgccccgagggctgcgcccacctccttcctgcctcggcaaccccgggccctgagggcaggccccaaccgcggaggagcaggagagggcggaggccggcgggccatgccctggtcgtcccgcggcgccctccttcgggacctggtcctgggcgtgctgggcaccgccgccttcctgctcgacctgggcaccgacctgtgggccgccgtccagtatgcgctcggcggccgctacctgtgggcggcgctggtgctggcgctgctgggcctggcctccgtggcgctgcagctcttcagctggctctggctgcgcgctgaccctgccggcctgcacgggtcgcagcccccgcgccgctgcctggcgctgctgcatctcctgcagctgggttacctgtacaggtgcgtgcaggagctgcggcaggggctgctggtgtggcagcaggaggagccctctgagtttgacttggcctacgccgacttcctcgccctggacatcagcatgctgcggctcttcgagaccttcttggagacggcaccacagctcacgctggtgctggccatcatgctgcagagtggccgggctgagtactaccagtgggttggcatctgcacatccttcctgggcatctcgtgggcactgctcgactaccaccgggccttgcgcacctgcctcccctccaagccgctcctgggcctgggctcctccgtgatctacttcctgtggaacctgctgctgctgtggccccgagtcctggctgtggccctgttctcagccctcttccccagctatgtggccctgcacttcctgggcctgtggctggtactgctgctctgggtctggcttcagggcacagacttcatgccggaccccagctccgagtggctgtaccgggtgacggtggccaccatcctctatttctcctggttcaacgtggctgagggccgcacccgaggccgggccatcatccacttcgccttcctcctgagtgacagcattctcctggtggccacctgggtgactcatagctcctggctgcccagcgggattccactgcagctgtggctgcctgtgggatgcggctgcttctttctgggcctggctctgcggcttgtgtactaccactggctgcaccctagctgctgctggaagcccgaccctgaccaggtagacggggcccggagtctgctttctccagaggggtatcagctgcctcagaacaggcgcatgacccatttagcacagaagtttttccccaaggctaaggatgaggctgcttcgccagtgaagggataggtgaacggcgtcctttgaagcaggatcagacccagccagcagagatggagagtgactctgttggcagaaggcaggcgaggataagctaacgatgctgctgtggcctctatgcactcagcaagagcgggacgcctgtgctgggccgggcaccagggatggtgctgagtcgggcagaggcctcctttcaaggagttcacagtgaacaagatgagaagggctgggccctggagggtcaagagccccaattatgtacaagacactttgggaggaaagaagactaccttttccccctgccattggtatagctggtgccccaaaacttccacctccctccctggctacctctaaaatgactggtataggtgctgccccaccccttagctcccctatcctgggctaggaggccacaggggctgtcctctagaattcttccttccctcccccacaccattcattcaattcatgaaacaaatctttgccaagagcagtttatgtgccaggaacatcattctgtccttgcaacctggaacaagaccagctaccagcctagcttcatccgctacttgcaccaaccagtcccgggttagatcccaaatgctagaagccagggatgcccaactctgggtggccccagtcagaacctctgggatctcagtgaagctggcctggcctctgctcctgctctcaaggggctgcttttcaaccaagagccttgtgagcctggtctgagccttgcacagccactgagtattttttttgccttagccagtgtacctcctacctcagtctatgtgagaggaagagaatgtgtgtgcctgtgggtctctacaagtgacagatgtgttgttttcaacagtattattaggttatgaataaagcctcatgaaatcctc

SEQ ID NO: 43752 - DNA, 519 bp, Homo Sapiens
atgaaggactactccaaattaggagtccatgacatgaacgaccgcaaacgtctcttccaacttatcaaaattattaagattatgcaagaagaagataaagcagtcagtatcccagagcgtcatcttcagacaagcagcctgcgcatcaaatctcaggaattaagatctggccctcgcagacagctgaattttgattctcctgctgacaataaagacagaaatgccagcaatgatgggtttgaaatgtgcagtttatcagatttctctgcaaatgaacagaagtccacttacctaaaagtgctagaacacatgctaccagatgattcccagtaccatacaaaaacaggaattctgaatgccacagctggtgattcctatgtgcaaacagaaatcagcacttcactcttttcaccaaattacctttctgcaatactgggggattgtgatattcccattattcaaagaatctctcatgtttcagggtataactatggaatccctcattcttgtatcaggtaa

SEQ ID NO: 43753 - DNA, 2248 bp, Homo Sapiens
gcgtgcaaaggcgcggagcgggacggaaaccacaaataaatagcggcggcggcagcgcgtcatctggtggagcaggaagtgcaggcagagtccggaggctggtgctttctgcgcgtccccaggactttgccatgggctgggggccgcggaggctgcgagcggccgggcgagggcagcggcggcggcgtccgcaccggggctgagcgagcagcgacgcgaggggcgcgcggagatggcagcgtccagcaactccagcctgtccggctcgtcggtgtcctccgatgctgaagaataccagcctcctatatggaaatcatacttatatcagttacagcaagaggcacctcgtcccaagagaatcatttgtcctcgggaggtggaaaacagaccaaaatattatggaagagagtttcatgggatcatctctcgggagcaggcggatgagcttcttggaggcgtggagggtgcctacatccttagagaaagccagcggcaaccaggatgctacacgctggctctcaggtttggaaaccagaccttaaactacaggctcttccacgacgggaaacactttgtgggtgagaagaggtttgagtcgattcatgatctggtgacagatggcttgataacactgtacatagaaacaaaagctgccgagtacatttcaaaaatgacaactaaccccatctatgaacacattggatatgccaccctactcagagaaaaagtatccagaaggctgagcaggtctaaaaatgaaccaagaaaaacaaacgtcacacatgaagaacacacagcggtggaaaagatctcctccctggttcgaagggctgccctcacacacaacgacaaccacttcaattatgagaagacacacaactttaaggtccacacgttccgaggcccacactggtgtgaatattgtgccaatttcatgtgggggctcatcgcccaaggggtccggtgctcagactgtggattgaacgtacacaaacagtgttccaagcacgttcccaatgactgccaacctgatctcaagaggatcaagaaagtgtactgttgtgacctcacaacacttgtgaaggctcacaacactcagagacccatggtggtagacatatgcattcgggaaattgaagcaagaggattaaaatcggaaggcctttacagagtctctgggttcactgaacacattgaagatgtcaaaatggcatttgacagagatggtgaaaaggccgatatatctgccaatgtctatccagacataaacatcatcactggagcccttaaactgtatttcagagacttacccatccctgtcatcacatatgatacctattccaaatttatagatgcagcaaaaatctccaatgcagatgagaggctggaagccgtccatgaagtgctgatgctgctgcctcctgcccactatgaaaccctccggtacctaatgatccacctcaaaaaggttactatgaatgaaaaagacaatttcatgaatgcagaaaatctggggatcgtgtttgggcccactctgatgaggccccctgaggacagcaccctgaccaccctgcatgatatgcggtaccaaaagctgattgtgcagattttaatagaaaacgaagacgttttattctaatccatcagggaaatgagctgaatggccccagcaccatccaagttgacacagctaaaggaataaaaacatttcttaccacttgatttgttttccaagcaagtgctagaatttcctggactgcagaggatcgctgagtggggtactgtgtctcatagacatgcgccacctccacgtgagaacaagggtgaaggtgagggaagcccctcaccttgggtcttttgctgtgcctcctatgtatgtctggtttgctggaagagtgattaatacatctttaatttattaaaaaacaatgtagacctttaaacttcagtcttattggtaataaaagggaacttaattcatacaggtacttgatacagttatacattttccacttacaaaaagaagacaattctgttaaatgaaacgtgtatcgtaaaatgtatttttattttacccacgagaatgttgttatttttagcaaatagaactcaatgcagtgcattggttattaccctgtgtaccttgtccctcattttgctgtgacaccctgaaaaagctgaccacaaatgcagtattatcttgacatacctctgtcctcctcagtgctttttaatgaaatttcacctg

SEQ ID NO: 43754 - DNA, 315 bp, Homo Sapiens
ttggccacatttcagtactacgccgaggtggagttggttcctccaaaccctgctgagatccctagagttattcagggcctggaaaaaaaagtcaatagcgctcaaactggtagcttcaaacagctcacagtcaaggaagctgtgttgaatgtttcagaggtcactggggtgtggatgtggttttatgtcacagagatcataggtgagtgtggcatcactggctacaatgaagatccatctttaacatttgatttatatttgatttatgatttgactgttcttagaccatatgtgatcagactactatctgaataa

SEQ ID NO: 43755 - DNA, 1584 bp, Homo Sapiens
atggacggcattgtcccagatatagcagttggtacaaagcggggatctgacgagcttttctctgcttgtgtcactaacagaccatttatcatgagcagcaactcggcctctgcagcaaatggacatggcagcaagaagttcaaaggtgacagcagaagcgccggtgtcccctccagagtgacccacatccagaagctcccagacgtcatcgaaggggaggtgatctccctggagctgccctttgggaaggttactaacctcctgatgctgaaggggaaaaaccaggccttcatcaagatgagcacggaggaggctgccaacaccatggtgaattactacacctcggtgacgcccgtgctgcgcggccagcccatctacatccagttctccaaccacaaggggctgaagaccgacagctctcccaaccaggcgcgggacccggcagcccaggccgtgaactcggtccagtcggggaacctggcctggactgccccggcggcagccgtagacgcagggatggcgatggccgggcagagcctggtgctcaggatcatcgtggagaacctcttctaccccacgaccctggatgtgctgcaccagattttctccaagttcggcacagtgaagaccatcacattcatcaaggacaaccagttccaggccctgctgcagtacacggaccccgagaacgcccagcataccaagctgtcgctggattggcagaacacctacaacgcctgccacacgctgtgcatcgacttctccaagctcatcagcctcaacgtaaagtacaacaacgacaagagccgcgactaccacgcccggacctgccctccggggacagctagccctcgctggaccagaatggccgtggccttcgacctttcagttcccaacatccacggagccctggcccccgccatcccctcggcggtggcggcagctgcagcggcaggccagatcgccatcctgggcctggcggggacaggaaattctgtcttgctggtcagcggcctcaacccagagagagtcacaccccaaagcctctttattcttttcagcgtctacggggacgtgcagcgcgtgaagatcccgttcaataagaaggagaacgctctggttcagatggcggacggcaaccaggcccagctggccatgagccacctgaactggcacaagctgcacgggaagccgcatctcatccgtatcacgcccttgaagcaccagaacgtgcagctgccccgcgagggccgggaggaccagggcctgaccaaggactatggcaactcgcccctgcaccgcttcaagaagccaggcttcaagaacttccagaacatattcccgccctcggccaccgtgcacctctccaacatcccgccctcagtatccgaggaagatctcaaggtcctctcctccagccatgggggcatagtcataggattcaagttcttccagaagaaccgcaagatggcgctgatccaaatgcgctccgtggaggaggcggtccagacccccattgccctacacaaccacgacatctgggagaaccaccacctgcgggtctccttctccaagtccaccatc

SEQ ID NO: 43756 - DNA, 801 bp, Homo Sapiens
gttgccctcatttgttttgggtgaggactcattactgcagtatattgatctcttcaccaaatgctttttctttttctgaataaatgctgtattagaggttctatttatatatgatttttaaaactttggtttccttctatccaccaaatactgtgaattgtttttccatttatttttcttagctaatgtaactttattcttcacttttttttagccctagacttcctagattttctgtggcattctgtaggacattgtattgcttggaaaaaaaaagatcaaaatcattctggggcaaatgctctattatccttatttatgacaagagaataatgaaattcataagaaattaataacattcagatattgctataaatgtacttgagtcattttcatttggggatagtaataatggctgtggcagctttaatggagaaacctgtgttggcctctttttctggcattaggatctcttgtcatagaactattggtaaagtacaggtttgatagcagagttcctgaattcagcatatcatcagaatttccatttaccttttgtcttttctttttattgtattttttaacctttttgtttctattcctacctcccatgagtaacattgatttctgctgaagttagaatttgtgttaagaattgactttaaacttctgaaatagttgaatattagaagtggcttcagttgccatgaaatgattgcttttctttttctttttttttccttaaataaaaataatgcagccttatatatgtctcttcccctcaagaatgtgaatttaggc

SEQ ID NO: 43757 - DNA, 1007 bp, Homo Sapiens
tgacgcatggactataataggatgaactccttcttagagtacccactctgtaaccggggacccagcgcctacagcgcccacagcgccccaacctcctttcccccaagctcggctcaggcggttgacagctatgcaagcgagggccgctacggtggggggctgtccagccctgcgtttcagcagaactccggctatcccgcccagcagccgccttcgaccctgggggtgcccttccccagctccgcgccctcggggtatgctcctgccgcctgcagccccagctacgggccttctcagtactaccctctgggtcaatcagaaggagacggaggctattttcatccctcgagctacggggcccagctagggggcttgtccgatggctacggagcaggtggagccggtccggggccatatcctccgcagcatcccccttatgggaacgagcagaccgcgagctttgcaccggcctatgctgatctcctctccgaggacaaggaaacaccctgcccttcagaacctaacacccccacggcccggaccttcgactggatgaaggttaagagaaacccacccaagacagcgaaggtgtcagagccaggcctgggctcgcccagtggcctccgcaccaacttcaccacaaggcagctgacagaactggaaaaggagttccatttcaacaagtacctgagccgggcccggagggtggagattgccgccaccctggagctcaatgaaacacaggtcaagatttggttccagaaccgacgaatgaagcagaagaagcgcgagcgagaggaaggtcgggtccccccagccccaccaggctgccccaaggaggcagctggagatgcctcagaccagtcgacatgcacctccccggaagcctcacccagctctgtcacctcctgaactgaacctagccaccaatggggcttccaggcactggagcgccccagtccagccctatcccaggctctccccaaccccaggcctgggcttcactg

SEQ ID NO: 43758 - DNA, 837 bp, Homo Sapiens
atgggaaagggaaatgaagaccccgatctccactgctcctccatccagtgctccactgaccagccccctttccaacagatctcctttacagaaaagggctcagatgagaagaaaccattcaaagaaaaaggcaagaccgccttctcccattccagtgagaagcacatacaaaggcaaggatcggagcccaatccaaacaaggagaattctgaggaaaccaagctcaaggccgggaacagcactgctggatcagaaccagagtccagctcatatcgggaaaactgcaggaaaagaaaaatgagttccaaggacagctgccaagacacagcagggaactgtccagaaaaggagtgcagcttgtcattgaataaaaaatcaagatcctccactcctgtgcacaacagtgaaatccaggagacctgtgatgcccaccataggggacgttccagggcttgcactgggcgcagcaagcggcataggtctcgggccctaggagtccaaacaccgtcaattcgaaaaagcttggtgacctctgtgcgagctatgtcagaggctgtttatcaagacctagcccaggtgtgggcacagcagatccattctccacttacctgtgagcagctgacactgctcactcggctccgggggcctctgtgtgcccaggtgcagaccttgtattccatggccacccaggcagcttatgtcttccctgctgagagctggcttgtcccagccacactgccaggtcctggggaatcagccctggatagagaagcccatcccttccctgggcaggagataactgagactgtcagtggatcagatgaggctaagctgtga

SEQ ID NO: 43759 - DNA, 1363 bp, Homo Sapiens
ctttttggtgtaaatctggactctaattctgtaatatatcaaggaatctcgtaaaaccgacactaaaacgtccctgcctacaaatcatccggccaaattatgagttcattgtattatgcgaatactttattttctaaatatccagcctcaagttcggttttcgctaccggagccttcccagaacaaacttcttgtgcgtttgcttccaacccccagcgcccgggctatggagcgggttcgggcgcttccttcgccgcctcgatgcagggcttgtaccccggcggggggggcatggcgggccagagcgcggccggcgtctacgcggccggctatgggctcgagccgagttccttcaacatgcactgcgcgccctttgagcagaacctctccggggtgtgtcccggcgactccgccaaggcggcgggcgccaaggagcagagggactcggacttggcggccgagagtaacttccggatctacccctggatgcgaagctcaggaactgaccgcaaacgaggccgccagacctacacccgctaccagaccctggagctggagaaagaatttcactacaatcgctacctgacgcggcggcggcgcatcgagatcgcgcacacgctctgcctcacggaaagacagatcaagatttggtttcagaaccggcgcatgaagtggaaaaaggagaacaagaccgcgggcccggggaccaccggccaagacagggctgaagcagaggaggaagaggaagagtgagggatggagaaagggcagaggaagagacatgagaaagggagaggaagagaagcccagctctgggaactgaatcaggaaactcaaatcgaatagggaagtaaaaaaacaaaacaaaaaacaaaaaaaacaaaaaaaaaaccctatttaaatgaaaggagtttaaaaacattttttaaggagggagaaaggagaaattttggtttttcaacactgaaaaaatactacctataggaaagtctgtcaggtttggtttttttgtacaatatgaaaaggatattatctacctgttctgtagctttctggaatttacctccccttttctatgttgctattgtaaggtctttgtaaaatcttgcagttttgtaagccctctttaatgctgtctttgtggactgtgggtctggactaaccctgtggttgcctgccctcctgagcctccgccttcccagcagcggcaccaaggggccttagggagccccaaaacctaccactcgcgtgttccccaagcgcctggctgctgcttcttgcttcccgtcccccagccccatgctcccttttacattctgtgtgtatctaaaggatggaaaaataaaacgcaattaaaaataaa

SEQ ID NO: 43760 - DNA, 747 bp, Homo Sapiens
gaatgtggcaaaggctttagtatattctcaacccttactaaacataagataattcatactggagagaaaccctacaaatgcaatgaatgtggtaaagcctttaactggtcctcaactcttactaaacataagagaattcatactggagagaaaccctacaaatgtgaagaatgtggcaaagcttttaaccagtcctcaacccttactagacataagatagttcatactggagagaaaccctacaaatgtgaagaatgtggtaaagcctttaaacggtccacaactcttactaaacataagagaatttatactaaagagaaaccatacaaatgtgaagaatgtggaaaagcctttagtgtattctcaacccttactaaacataagataattcatactggagcaaaaccttacaaatgtgaagaatgtggcagtgcctttagggcattctcaacccttactgaacataagagagttcatactggagagaaaccttacaaatgcaatgaatgtggtaaagcctttaactggtcctcaactcttactaaacataagagaattcatactggagagaagccctacaaatgtgaagaatgtggcaaagcttttaaccggtcctcaaaccttactcgacataagaaaattcatactggagagaaaccatacaaacctaaaagatgtgacagtgcttttgacaacaccccaaacttttctagacataaaagaaatcatatgggtgagaaatcctag

SEQ ID NO: 43761 - DNA, 990 bp, Homo Sapiens
atgcaattagttctattacttatgtttctccttgtctttataggcaatactgcacctgcattctcagtgaccttggaatctatggacataccacaaaatatcacagaatttttcatgctggggctctcacagaactcagaggtacagagagttctctttgtggtctttttgctgatctatgtggtcacggtttgtggcaacatgctcattgtggtcactatcacctccagccccacgctggcttcccctgtgtattttttcctggccaacctatcctttattgacaccttttattcttcttctatggctcctaaactcattgctgactcattgtatgaggggagaaccatctcttatgagtgctgcatggctcagctctttggagctcattttttgggaggtgttgagatcattctgctcacagtgatggcttatgaccgctatgtggccatctgtaagcccctgcacaatactaccatcatgaccaggcatctctgtgccatgcttgtaggggtggcttggcttgggggcttcctgcattcattggttcagctcctcctggtcctttggttgcccttctgtgggcccaatgtgatcaatcactttgcctgtgacttgtaccctttgctggaagttgcctgcaccaatacgtatgtcattggtctgctggtggttgccaacagtggtttaatctgcctgttgaacttcctcatgctggctgcctcctacattgtcatcctgtactccttgaggtcccacagtgcagatgggagatgcaaagccctctccacctgtggagcccacttcattgttgttgccttgttctttgtgccctgtatatttacttatgtgcatccattttctactttacctatagacaaaaatatggcattattttatggtattctgacacctatgttgaatccactcatttataccctgagaaatgaagaggtaaaaaatgccatgagaaagctctttacatggtaa

SEQ ID NO: 43762 - DNA, 1095 bp, Homo Sapiens
accccccccatcgccccgtcacacagccgagtcaccttttccctttctacactccacactctcagtcccccaccccgcccctttccaagcgtgtcccgggccgcacagaaaccgcaccatctccacccccacattctcctcgcgggaagcgcagcagtgcctccaagggttcttaaagcagagatgaataatacggcagctagtccaatgtctactgcaacttcaagtagtggaaggagtacagggaagtctataagctttgcaacagaattacagagtatgatgtattctttaggtgatgctagaaggcctcttcatgaaacagcagttttggtagaagatgtggtacacactcagttaattaatctgttacagcaagctgctgaagtttctcagctgcggggagcaagggtaatcactcctgaagatcttctgtttttgatgcgcaaagataagaaaaaacttagaagactgctaaaatacatgtttatccgagactacaaatcaaagattgtcaaaggcatcgatgaggatgatcttctcgaagacaaattgagtggcagcaataatgcgaacaaaagacaaaagattgctcaggacttcctcaactctattgaccagacaggagaacttttagcaatgtttgaagatgacgaaattgatgaagttaaacaagaaagaatggagagagcagaaagacaaactcgaattatggattcagctcaatatgcagaattctgtgaaagtcgacaattaagtttctccaaaaaagcttccaaatttcgagactggttggactgcagcagtatggagataaaacccaatgttgtcgcaatggaaatcttagcatatttagcgtatgaaactgtggcacagttagtggatctggctcttcttgtgaggcaagacatggtaaccaaggcaggggaccccttcagccatgccatttctgcaaccttcattcagtatcacaactctgctgagagcactgcagcctgtggtgttgaggctcacagcgatgccatccagccctgccacatcagagaggccattcgacgctacagccacaggattggcccactttccccattcaca

SEQ ID NO: 43763 - DNA, 888 bp, Homo Sapiens
aggatgcacccggcaggcttggcggcggcggctgcggggacgccccggctgccctcgaagcggaggatccctgtgtcccagccgggcatggccgacccccaccagcttttcgatgacacaagttcagcccagagccggggctatggggcccagcgggcacctggtggcctgagttatcctgcagcctctcccacgccccatgcagccttcctggctgacccggtgtccaacatggccatggcctatgggagcagcctggccgcgcagggcaaggagctggtggataagaacatcgaccgcttcatccccatcaccaagctcaagtattactttgctgtggacaccatgtatgtgggcagaaagctgggcctgctgttcttcccctacctacaccaggactgggaagtgcagtaccaacaggacaccccggtggccccccgctttgacgtcaatgccccggacctctacattccagcaatggctttcatcacctacgttttggtggctggtcttgcgctggggacccaggataggttctccccagacctcctggggctgcaagcgagctcagccctggcctggctgaccctggaggtgctggccatcctgctcagcctctatctggtcactgtcaacaccgacctcaccaccatcgacctggtggccttcttgggctacaaatatgtcgggatgattggcggggtcctcatgggcctgctcttcgggaagattggctactacctggtgctgggctggtgctgcgtagccatctttgtgttcatgtttccccttttgccgggcgcggtggctcatgcttgtaatcccagcactttgggaggccgaggcggtcggatcacgaggtcaggagatcaagaccatcctggctaa

SEQ ID NO: 43764 - DNA, 135 bp, Homo Sapiens
atggataatggaaagatctacggcaaggctggctgtctgccctgtctaaggaggacgtactggaccatcctgctctgcacatccagatgtgtccatgaatacatccataaaacgatggcctgtggaatcctatag

SEQ ID NO: 43765 - DNA, 159 bp, Homo Sapiens
agcataatttctcagttaaactttggaatgtttctaggaaaagtgtcatcatcacaggtcttaagccagccaccaaatatgtatttcacatccgagtgagaactgcgacaggatacagtggctacagtcagaaatttgaatttgaaacaggagatgaaa

SEQ ID NO: 43766 - DNA, 942 bp, Homo Sapiens
gtgtctaagttggagtctcctaaagagcctaaatggttgtggaagctcctcattggagggttgagctttgaaacaaccgctgagagcctgaggagccattttgagggggaaatgctcacaaactgtgtagcaatggatccaaacaccaagtgctccagagcttttgggattgtcacaaatgccactgtggaggaggcagatgcatgcatggccacacaaggggatggaagagttgtacaaccaagagctatctcaggagaagattctcagagaccaagtgcccacttagccgtgaaaaagatatttgttggcggcattaaagaagacactgaagaacatcaccaaagagattattttgaacagcatgggaaaattgaagtgattgaaaccatgactgaccaaggcagtggcaagaaaaagcgctttgcttttgtcacctttgatggccatgacttcgtggataagactgtcattcagaaataccacattgggaatggccacaactgtgaagttaggaaagccctgtcaaagcaagaggtggctagtgcttcatccaggcaaagaagccaaaattgttctggaaactttggtggtggtcatggaggcagttttggtgggatagacaactttggtcatggagaaaacttcagtggtcatggtggctttggcggcagctgtgatagtagtggatatggtggcagtgaggatgactataatggatttggtaatgacactggttatggaggagaaggtagaagatacaatgattttggcaagtacaacaatcagtcttcagattttgaacccatgaaggcaggaaactttgaaggcagaagctctgacccctatggtggtggaggccaatactttgccaaaccacgaaaccaaggtggctatggtggttccagtagcaacagtagctacagcagtagctactgtttt

SEQ ID NO: 43767 - DNA, 528 bp, Homo Sapiens
atgaaaacagaaatggttcaggcagagaaaacggctgctgagattattaggaagctggagaaacaggaggaaacacttaaacaaggaaaagaaatgctagctgcacttgccgtcccatctttggaaaacagaactccagaggagtgtgcaaagacaagtgtaaaacccaaaaagaagaaaaagcaaaagccccaggaggctcctcaggagaatggaatcaaagacccatctaactctttctccaaacctaataaaaggaaatctttttccaaggagaaattggttagcagccatcgagaagagaccgctggcagcatcagtcttcccaacaggaagacgtcttcacccaaggaggaagcagttaatgatcccaaagaggcaggcaacaggagtgtcactaagaaaaaaacaggaaattccccttcaaagaggaaggagctggtcagcagtggacctgaagaggctgctggcagcaagagcagctccaagaagaagaaaaagttacataaagtaccccaggaagatgag

SEQ ID NO: 43768 - DNA, 1620 bp, Homo Sapiens
atgtcttctgctgctgaaaatggagaggcagcacctggaaaacaaaatgaagaaaaaacctataaaaagactgcatcatctgctattaaaggtgctattcagctgggaataggatacacagtgggtaatctcacttccaagccagaacgagatgttcttatgcaagacttttatgtggtggaaagtgtgttcctacccagcgaagggagcaatctgaccccagcacatcactacccagactttagatttaagacatacgctccattagcattccgatatttcagagaactttttggtatcaagcctgatgattacttgtattccatctgcagtgaacctctaatagaactgtctaaccctggagccagtggatccttgttttttgtgaccagtgatgatgaatttatcatcaaaacagttcagcacaaagaagctgagtttcttcagaagctactgccaggctattacatgaatttaaaccagaatccaaggactcttttgccaaaattttacggactgtattgtatgcaatcaggaggcattaatatcaggattgtggtgatgaacaacgttttgccacgctccatgagaatgcactttacatatgacttgaaaggctcaacgtataagcgaagagcatcccgtaaagagagagagaaatccaaccccacatttaaggacttagatttcctgcaagacatgcacgaagggttgtattttgatacggaaacatacaacgcgcttatgaaaacacttcagagagactgccgggtgctagaaagcttcaagatcatggattatagccttctgttgggaattcatttcctggaccattccctcaaagagaaagaggaggagaccccacaaaatgtgcctgatgctaagcggactgggatgcagaaggttctctactcaacagccatggaatctatccagggtccagggaaatctggagatgggataatcacagagaacccagacacaatgggaggcattccagctaaaagccataggggagaaaaactacttttatttatgggcattattgacattctgcaatcatataggttaatgaagaagttagaacattcctggaaagctcttgtttatgatggggacactgtttctgttcatagaccaagcttttatgcagacagatttcttaagttcatgaattccagagttttcaagaaaattcaagctttgaaggcttcaccgtctaagaaacggtgcaattcaatcgccgccctaaaggccacttcacaggagattgtgtcctcaattagccaggaatggaaggatgagaagcgggatttgctgactgaaggacaaagttttagcagccttgatgaagaagccctgggatcccgacacaggccagacctggtccctagcactccatcactgtttgaagctgcttccttggcaaccacaatttcatcttcttccttatacgtcaatgagcactatccacacgacaggcctacactctattcaaacagcaaagggttaccttccagttcaacatttaccttggaagaggggaccatctacttgaccgctgagcccaacactctggaagtgcaggatgacaatgcttctgtgcttgacgtctattta

SEQ ID NO: 43769 - DNA, 1253 bp, Homo Sapiens
ggagcgcgcggtccgggcacacggagcaggttgggaccgcggcgggtaccggggccggggcgccatgcggaggccgagcgtgcgcgcggccgggctggtcctgtgcaccctgtgttacctgctggtgggcgctgctgtcttcgacgcgctcgagtccgaggcggaaagcggccgccagcgactgctggtccagaagcggggcgctctccggaggaagttcggcttctcggccgaggactaccgcgagctggagcgcctggcgctccaggctgagccccaccgcgccggccgccagtggaagttccccggctccttctacttcgccatcaccgtcatcactaccatcgagtacggccacgccgcgccgggtacggactccggcaaggtcttctgcatgttctacgcgctcctgggcatcccgctgacgctggtcactttccagagcctgggcgaacggctgaacgcggtggtgcggcgcctcctgttggcggccaagtgctgcctgggcctgcggtggacgtgcgtgtccacggagaacctggtggtggccgggctgctggcgtgtgccgccaccctggccctcggggccgtcgccttctcgcacttcgagggctggaccttcttccacgcctactactactgcttcatcaccctcaccaccatcggcttcggcgacttcgtggcactgcagagcggcgaggcgctgcagaggaagctcccctacgtggccttcagcttcctctacatcctcctggggctcacggtcattggcgccttcctcaacctggtggtcctgcgcttcctcgttgccagcgccgactggcccgagcgcgctgcccgcacccccagcccgcgccccccgggggcgcccgagagccgtggcctctggctgccccgccgcccggcccgctccgtgggctccgcctctgtcttctgccacgtgcacaagctggagaggtgcgcccgcgacaacctgggcttttcgcccccctcgagcccgggggtcgtgcgtggcgggcaggctcccaggcttggggcccggtggaagtccatctgacaaccccacccaggccagggtcgaatctggaatgggagggtctggcttcagctatcagggcaccctccccagggattggaaacggatgacgggcctctaggcggtcttctgccacgagcagtttctcattactgtctgtggctaagtcccctccctcctttccaaaaatatattacagtcacaccataagcacaaa

SEQ ID NO: 43770 - DNA, 1302 bp, Homo Sapiens
agggagcttgtgctcacgcagaccgggcagtgcgggaaccagatcggcgccaagttctgggaggtgatctctgatgaacatgccatcgactccgctggcacctaccacggggacagccacctgcagctggagcgcatcaacgtgcaccaccacgaggccagcggtggcaggtacgtgtcccgcgctgtgctcgtggatctggagccgggcaccatggactctgtgcgctcggggcccttcgggcaggtcttcaggccagacaacttcatttcccgtcagtgtggggccggaaacaactgggccaagggacgctacaccgaaggcgcggagctgacggagtcagtgatggacgttgtcagaaaggaggctgagagctgtgactgcctgcagggtttccagctgacccactccctgggtggggggactgggtctgggatgggtacccttctcattagtaagatctgggaggagtacccagacaggattataaacacattgagcatcctgctcttgcccaaggtgtcagacaccgtggtggagccctacaacgccaccctctcagtccaccagctcatagaaaacgcagatgagaccttctgcatagataacgaagcgctatatgacatatgttccaggaccctaaaactgcccacacccacctatggtgacctgaaccacctggtgtctgctaccatgagtggggtcaccacgtgcctgtgcttccccgaccagctgaatgctgacctgcggaagctggccatgaacatggtcccgtttccccggctgcatttcttcatgcccggctttgccccactgaccagccggggcagccagcagtaccgggccttgactgtggctgagctcacccagcagatgtttgatgctaagaacatgatggctgcccgtgacccccgtcacggccgctacctaacggcggctgccattttccagggtcgcatgcccatgagggaggtggatgaacagatgttcaacattcaagataagaacagcagctactttgctgactggttccccaacaacgtaaaaacagccgtctgtgacatcccaccctgggggctaaaaatgtcagtcaccttcactgggaacaacacagccgtccaggaactcaagcgggtctcagagcagtttacagcaacgttcaggcgcaaggccttcctccactggtacacgggcgagggcatggatgagatggaattcactgaggccgagagcaacatgaacgacttggtgtctgaatatcagcaatatcaggatgccacggccgagggaggaggagtatga

SEQ ID NO: 43771 - DNA, 279 bp, Homo Sapiens
catgaacatggacgtagtaaaatggaacttccagattataaacaatggaagatagaagggacaccattagaaactgtcaagaagaagttggctgcgcaagggctaagggatccatggggtcaaggtgaagcttggagatacatgggtggctttgcaaatagtggttcctttattggtgcattattaaaaggattcaagtggggatttgctgcatttgtgggagctgtaggagctgaatattatctggagtccctgaataaagataagaagcatcactga

SEQ ID NO: 43772 - DNA, 447 bp, Homo Sapiens
gacccacagaatgtaacggatgtctctcgattcctcctcctcaaactctcagaggatccagaactgcagccggtccttgctgggctgttcctgtccatgtgcctggtcacggtgctggggaacctgctcatcatcctggccgtcagccctgactcccacctccacacttccatgtacttcttcctctccaacctgtccttgcctgacatcggtttcccctcccccacggtccccaagatggttgtggacatccaatctcacagcagtatctcctatgcaggctgcctgactcagatgtctctctttgccatttttggaggcatggaacacatgctcctgaatgtgatggcctatgtccggtttgtagccatctgtcaccctctatatcattcagccatcatgaacccgtgtttctgtggcttcttacttttgttgtctttttttttt

SEQ ID NO: 43773 - DNA, 195 bp, Homo Sapiens
aataaagtgattaccaaggaatatctcgtgaacatcacagaatacagggcttattccactccaattcagcagtatcaggattatgatgttgagccctatcgctggggacaccacaacagcagccttaacttcttcaactggtttgctgaccgcaacttcacaggatctaacaggattgctgaggcgagtcctcac

SEQ ID NO: 43774 - DNA, 1332 bp, Homo Sapiens
atggaaaaaatgctctttcctctgaagagccctagtgccacgtggctgggccccagctccactccctggattgtggatttcatcctcacctcagtgtggagcctgggcttcctcttcctattagccccctacctccccagtgtcccaccctcacccccgcatgggaggaagaggagcagcaggaaggttcgctggcaccgccctccccgccataactctgtctccttacttccagcttgcagaatcctcctgagggagctggaggagactcaggacctgaccaaccttctggaaagccacctgagaaagctcactggggagggtggctcccatctgcccttaggtggagagcccggtgatatgtacaaaccagctcctgctaaggcccaccagccgcataggaaatgcatgcaagatccatctcctgacagcttgtccccaaggactcccccagttcctctggcctccaacctgtcaccagacacaatgaccttctcagagccttttggaccacgctcaaccctgagtgcctccaggcctccagagcccttgcttcccctaaaatgccctgcagtccggccacatatgtttccttcttcaccacagccccatgttcccgtggcctcctctccacctccacccgaacacagcctggctggacttcagtgtggctccacaatacgccctgtcccccagagctcccctctacacaaccaggggccaccttctccaaccagggtgatctctggccttgggtgctccagcggtcccatccgggacctctcccgctggagggaggctgccaccacctggggcctctccacctgctcacagggcaaatcccagcaacagcatcttcccaaccaccccccagaggcttccttctggggagaccccacacccaggcagatggaggcaggtggccgcacattcttccatcccaacgtgcagaagctgctggagactatctccaagagagcagtgatgaagatgtggcaggagaaagaatgggggtgggcagactacccgcagatgacatcactggggaaggagtgggacatcacgactctaaatcccttctggaacgtggcaaacctaccacagaagctgccccatcctcagcaggtctctgacgccatggccatgtgggaccacttagagcagaaatgcagccatctcttctgggatctcccctctttcaatagcgagtccctggtgaccatggcctgggtttctaggaacatttcctcacagaatgagcactctgtaccatcggataaagcctccacttcccttccaggtgaaactgaggttgagacaccctcacagctt

SEQ ID NO: 43775 - DNA, 741 bp, Homo Sapiens
atgatgggtcaacttgatgggaaagtcatcatcctgacagccgctgctcaggggattggccaagcagctgccttagcttttgtaagagaaggtgccaaagtcatagccacagacattaatgtgtccaaacttcaggaactggaaaagtacctgggtattcaaactcgtgtccttgatgtcacaaagaagaaacaaattgatcagttcgccaatgaagttgagagacttgatgttctctttaatgttgctggttttgtccatcatggaactgtcctggattgtgaggagaaagactgggacttctcgatgaatctcaatgtgcgcagcacgtacctgatgatcaaggcattccttcctaaaatgcttgctcaaaaatctggcaatattatcaccatgttttctgtggtttccagcatcaaaggagttgtgaacagatgtgtgtacagcacaaccaaggcagccgtgattggcctcacaaaatctgtggctgcagatttcatccagcagggcatcaggtgcaactgtgtgtgcccaggaacggttgatacgccatctctacaagaaagaatacaagccagaggaaatcctgaagaggcacggaatgatttcctgaagagacaaaagatgggacgatttgcaactgcagaagaaatagccatgctctgcgtgtatgtggcttctgatgaatctgcttatgtaactggtaaccctgtcatcattgatggaggatggagcttgtga

SEQ ID NO: 43776 - DNA, 2244 bp, Homo Sapiens
atggcgctggtggcgttggtggctggggctcggctggggcggcggctgagcgggccggggctggggcgagggcactggacggcggccaggcgctcccggagccggcgcgaagcggcagaagccgaggcggaggtgcccgtggtccagtacgtgggcgagcgcgctgcccgcgccgatcgcgtcttcgtgtggggcttcagcttctcgggggcgctgggcgtgccttcctttgtggtgcccagctccgggcccgggccccgcgccggcgcccgaccgcgccgcaggatccagcccgtgccctatcgcctggagctggaccaaaagatttcatctgctgcttgcggctatggattcacactgctgtcctctaagactgcggatgttacgaaagtctgggggatgggactcaacaaagattctcagcttggatttcacaggagccggaaagataaaacgaggggctacgagtatgtgttggagccctcacccgtctccctgcctctggacagacctcaggagacacgggtgctgcaggtctcctgcggccgagctcactctcttgtgttgactgacagggaaggagtcttcagcatgggaaacaattcttatgggcaatgtggaagaaaggtggtcgaaaatgaaatttacagtgaaagtcacagagtccacaggatgcaggacttcgatggccaggtggtccaggtcgcctgtggtcaggatcatagtctgttcctgacggataaaggagaagtctattcttgtggatggggtgctgatgggcaaacaggtctgggtcactacaatatcaccagctcgcccaccaagctgggtggagacctggcgggagtgaacgttatccaagttgccacctacggtgattgctgcctggccgtgtccgccgacggaggactttttggttggggaaactcggagtacctgcagctggcctctgtcactgactccacacaggtgaatgtgccccgctgcttacacttctcaggagtggggaaggtgcgacaggctgcatgcggtggcacgggctgtgcagtgttaaacggagaaggacatgtttttgtctggggctatggaattcttgggaaaggtccaaacctagtggaaagtgccgtccctgaaatgattccacccactctctttggcttgacggagttcaacccagaaatccaggtttcccgcatccgatgtggactcagccactttgctgcactgaccaacaaaggagagctgtttgtatggggcaagaacatccgagggtgcctgggaatcggtcgcctggaggaccagtatttcccatggagggtgacgatgcctggggagcctgtggacgtggcatgtggcgtggaccacatggtgaccctggccaagtcattcatctaaacctccctcacctgcttgggcggccccgtcccgggaaccactggcactccttggcagaggccagcgcgtggccagccccccggggttcttggatggtggtggcggaggaccctgcgtgcagtgtgacgctctgtcctgaatcccttagcgggtacctaccaggaggatcagggcaaggtccctctccagctgcaggtgaggcctgcggaactcagcttggatggcagcctttggtgggccgctgtggcccgcacgtctctgttctctccaagtaacatgcgacggtgtctggtgtcacgtctcgcctgagaagcccgtcttaggaaagcttagcttgaacacagtgctcgggaggtttctgctctgtctgtcatggcagtctcttggtttgtgtctggccaaggccatgcgtgtgcctcggaccgagccccagcttaggcgagggagtcaggctggcttcggccctcggttttcattcaggccaccctgctcatggcccttcctggccgcctgccacaccgcaagctcgctggggggacactagaagcaccgtggcctgggattccatctggagctgtccgcaggcaccagccccagcctcccaccacgctcactgcctggcttggaaaagttaagaagcccctcaggaagagaatcgaggctaagttcctctgcgccgagggccccgagcatatccgccaaggctcagctgcagtgccaggcggaggaggaagatccagaaattgtgaacaatgtttgatttagtagcgtgacttgcctttccctttaaaaacatcttttacaaatctgtcttggaataaagtctattttctgccttttggtttttaa

SEQ ID NO: 43777 - DNA, 309 bp, Homo Sapiens
atgcagtggcgtgatctcggctcgctgcaacctccaccttccagccgcctgccttggcctcccaaagtgctaagattacagcctctgcccggccgccccgtctgggaagcgaggagcacctctgcctggccgccccgtctgggaagcgaggagcccctctgcccggctgccaccctgtctgggaggcgaggagcgcctctgccctgccgccaccccgtctgggaggtgaggagcgcttctgcccggccaccaccccgtctgggaggtgaggagcgcctctgcctggccgccaccctgtctgggatgtga

SEQ ID NO: 43778 - DNA, 2159 bp, Homo Sapiens
aaaaaaattcaagtcaatccatagaagtgggtcgtggaattccaggcagaaagtgactaaatgaagatggaaggacagggagggggtggccacatcacagagaacctcttatcctaagaactctggacttcatcttcagaggcaaggtagagagagcaaggactttagagcaggaaaaggaccaggtcagtctagtggccatggggaaggtgggtgggaggggccgagatgggatgtatggaggtgcgtgaggtggaggcagtggtgagccaggaaatgtttaggacgtagaatcctcaggaattagagtgcggtgaattagaggggagaattgaggctgatgctcaagctcctggcttgggcaatgtgggtagttatgtcatacagggaactcggaagaagatatggtttgggggaagggaatgagttcactctggctatgagcagactttgtttgagatcccatgtcagacgtacttgaaaatgtccaagagttagctggatatgggtacagacagctttcgatttaactgaggtccgacttaagatttttttttactttatgatggtgcaaaagtgacacgcatttggtagaaaacataatttgacctttgctgtttccccaggacagtgatataaggttatgatactctcttgcgatgctgggcagtggcagtgagctgcagctcccagtgggtaaattaagcatggaaatctggaacacagcagcttttaagggatgcactggggagagcagtttgtaaaaataccttgggacggattaaatgtcttggcttagagaaagaacaacagacaataggaaactgtcattgaggagaagccgggattcaggagatgtacattattcaggtagctgagggaggggacaggaacctgaatcttcaacagaagcaaacaaactgggatggagggcccagcctcatgaaggtgaccagaaggacccggtgctgcaggctgtgtgggtagctgagcagagctaagcggcttgacggaccaacatctctccagctggttgaagacaagctctcagaagacaatgctgcatgtcacagccccagcaaccaacaacaccagcctgacaacttgctggggtggccgccttgtggtctgaggtggccgtctaaactatgtggtctgatctcaggctgcagaccttgcaggactgtcttcacacagactggaagtgctaacaggtggtgaggacaccgctttacaacgatgcagggggccccatgtcaccctcacccatgggaagtttgacttggtggactcagccaagccacagaggtctaacgcttctctgcggtgatttcaggctgccctggcagaaagcacagtgcctgcagacatgctgtcactgctccacacatcaacgctggcagtccttggggctctgtgtgtatatggtgcaggtcacctagagcaacctcaaatttccagtactaaaacgctgtcaaaaacagcccgcctggaatgtgtggtgtctggaataacaatttctgcaacatctgtatattggtatcgagagagacctggtgaagtcatacagttcctggtgtccatttcatatgacggcactgtcagaaaggaatccggcattccgtcaggcaaatttgaggtggataggatacctgaaacgtctacatccactctcaccattcacaatgtagagaaacaggacatagctacctactactgtgccttgtgggaggtgcacagcagcagacagtttgagccatcccattcaataaatgtttattgagtctttgtttataattacgaattgggaagccacagttaccaccagtgtgcttgtaaacagtttttaagataaacattcatgtggtgactctacttggagttgccaaattccacatattttctcaaagcagaagctttgcataagtctatacaagtgaccagcctcctctttttcagggttgtactctctcaccaacagcttttctaggtcacccatgcttatttttctggttcaacctctcctactcattatatattttttttctggtataatatatacacatttttagtgtgattcttttgtactagtcaatatgcattacataagttttctctgaccttcctatttctctcgattaaaaaatggatatgacatt

SEQ ID NO: 43779 - DNA, 389 bp, Homo Sapiens
ctggactgagtggcaggccatcctacaaacacccgcacactcgacatcactggtgtcaagacaactctaagaaggtttcaagtgatcctgcaagacctgtgttccatcctggtgattctgtcttcaatttcactgcacaggtaccacagtaagccagtgctgtgtgctccgagttccagggcatcccccagctcagccactacactgagcacaaggactctgacaaggccatcccggactgcagaccctcacggccttcccacactttgtcctcacttgcaacaggggcttcgggtgggcctcccgtttctaaagcacccactatggatgcacagcaggacagacccaagtcccaagactgcctgggcctactggcccccctagcatct

SEQ ID NO: 43780 - DNA, 2741 bp, Homo Sapiens
tttaatttcttatcacaagactcgattgtcaataactgttaacgtccatttaataatctatggtgaaataggtaatttcttcttattttcacaagcgtgtgagtaaaagactgggttttaagcaataaatcatttgttctaactaagcacatgcttggaaaaagtgctatttttccaaacgtatgccttgaaaacaaatacaattcaattgcctttttggttcatgggaagccatactgcggtggcttccaaggttggccaacctgtttttattcttaccacctctttcaaaaagggatgttgtctttgtccccaaattctggtgttgtcctatgctgatgcataatgaagccctgaggcttggaaacttgcaaaccaataagatgatttaatgatgaaacggcatgtcagtttgacactgtctattaatagtccttgagtgagcttaaatttgagacacttttaaaagcggcatgtagttccagttttgcttcccttatcagtggagcttgagatgtctgttcctgccgactgatgttttaacaaatttttagtttctcatgatgtgaaagattttgtatgcacgtcttagtctggatactgttttcattagttctaatgctgctgcatgcaaattttgtttaaaaccaaaattgactcttcacatctggactagattggacatggtgaggaggctggaaggaaagtcctttttgctctgtaggctctggacagctttcttagagttgacttatccaggattaagaaaaagttttcttttgcgtgactaaattctttccacagtttgcttgtgtaagcattttagatttaagcaagttcaacttgaaatatatttgaatatgaagtagaaacagcttcatttaatgggataatagcaatctctaacccatcaaattaatatctactaaatagcttccaaaaagcactgactggaaaatatttttcactatcatggctttattcagtttcaaaaacagtaggggctaaaatgtttggacatttatcctgcatttattttgtgtttcacaaggttaaaattttgtattttgtaaagtgtctgaaaaggagtccacaaagtatttctgctttcttgctcctgaatgcaaaggtctgagagaaggcacatcctcattagcttctgggtgttgtcaaacccaatcctctctcaagtaccaaatgcccagatacatttattgggatgcaggaatctcacttaagtagcggtttttgctgatataaagacaaacatcttgattaaagtgtagggagatagaaactataccaatttgggcaattttggctctaatgtctaatttgttgtgaaaggggaagatgttctaagctaatgttcttaaaagtaacttatgaatttcttaaaaatagtttttaaaaagctgtttcaggaaaagctgttttattgcatggcacagattaaatgtacagatgttatcttaaaacaatgaaagagttcccctaatttgaatattcaataccagctgttattcacatcaatattttaacattttaccatcaagatatttaatacaaaggattgatacatatttaactgtttagaattctagttaaacttgtccagatgagtaagagggaaggagaaataacattctccaagtacctaccatgtgcacaagctctacttatatatcttgcttaatcttagcaatgattccatgaggtagattttaactctcattttacaaacgaggagactaaggctcagagaggtcatacaacttcaggaaagttgtatgacctctctgaggtaataaatggcagaactggaatttgaacctaagtctccttgtctgcaaatcctgtgttttgcagaaaactctcctcttgtatttcataaaatgttaaatcttggcccaaattcaaatcaccatctttatgggttattggagagaggtataagttggcaagactctgttccacgatgggaaaaaatgggtaggatttgaatgagtaagagtgggatacttgcacagtatcatatttgtgtggctggagtaatgtttttctgtttccctcttagcaaagtggagtgggagaatcttgaaattgaactcagtcctgaggtctgattttcctattattagtcactttcaagccaggtgatttgtgaccatttaaatgttatgctatttcaaagtcttctacatctttagaaaaggacatgagggagggttagttaagtggggcaatgagaatgtagagtgtaatgtgcaaaagcaggactagcagttgctttgaagatatctggggaaggccgggcacggtggttcacgcctgtaatcccagtactttgggaggccaaggtgggcggatcacgaggtcaggagatcgagaccatcctggctaacgtgaaaccccgtctatactaaaaatacaaaaaattaaccggacgcagtggtgggcgcctgtagtcccagctactcgggaggctgaggcaggagagtggcatgaacccgggaggcggagcttgcagtgagctgagatcgcaccactgcattccagcctggacaacagagcgaaactccgtctcaaaaaccaaccaaacaaaaaacaaaaattagctgggcatggtggcgcgtgcctgtaatcccagcactttgggagccaaggtgggtggatcatgaggtcagaagattgagaccaccctggccaacatggtgaaatcctgtctctactaaaaatac

SEQ ID NO: 43781 - DNA, 1462 bp, Homo Sapiens
gattactagttagcaaatgagggggtaaatattccagtggatacaagcttggactcttttcttgaagctttctttctatcagaagcatttgctgatattgctgacattgaaacattaaaagaaaatttgagaagcaatgggcatcctgaagctgcaagtatttctcattgtgctctctgttgcattgaaccatctgaaagctacacccattgaaagtcatcaggtggaaaagcggaaatgcaacactgccacatgtgcaacgcagcgcctggcaaattttttagttcattccagcaacaactttggtgccattctctcatctaccaacgtgggatccaatacatatggcaagaggaatgcagtagaggttttaaagagagagccactgaattacttgcccctttagaggacaatgtaactctatagttattgttttatgttctagtgatttcctgtataatttaacagtgcccttttcatctccagtgtgaatatatggtctgtgtgtctgatgtttgttgctaggacatataccttctcaaaagattgttttatatgtagtactaactaaggtcccataataaaaagatagtatcttttaaaatgaaatgtttttgctatagatttgtattttaaaacataagaacgtcattttgggacctatatctcagtggcacaggtttaagaacgaaggagaaaaaggtagtttgaaccttggtaaattgtaaacagctaataatgaagttattcttgacatgagaaaatcagtaattggaccaggcgcggtggctcttgcctgtaatcccagcactttgggaggccgaggcaggcagatcacaaggtcaggagttcgagaccagcctgaccaacatggtgaaaccctgtctctactaaaaatacaaaaattagccgggggtggtgacatgtgcctgtaatcccagctactcaggaggctaaggcaggagaatcgcttaaacccaggaggcggaggttgcagtgagccgagattgcaccactgcactccagcctgggtggcagagtgagactcgtctcaaaaaaaagaaagaaaattagtaattgtaagtacccctgataagcaaattagtaattgtcaatacccctgttaagcaattcctttttgcagtatatttctgaaatgacagaatgctgttttaaaaacaaagaaataaaatcctgctcctgactcggtcaaaatattttttaaagtctattgtttgttgtgcttgctggtactaagaggctatttaaaagtataaaactgctttgtatccatgagggtttcattgtgtgttagcagcagtgagcttctattaaatgtatatgtcatttattttgtttaagtggctttcagcaaacctcagtcatattcttatgcagggtattgcgaaacaacttgtgttctattaatcgtgtcttcaattaaaagaccacagacttctgg

SEQ ID NO: 43782 - DNA, 1451 bp, Homo Sapiens
caacatggcagcggttggggctggtggttccaccgcggcgcccgggccaggggcggtttccgcgggtgcattggagccggggaccgccagtgcggctcacaggcgcctgaagtacatatccctagctgtgctggtggtccagaatgcctccctcatcctcagcatccgctacgcccgcacgttgccaggggaccgcttctttgccaccactgctgtggtcatggcggaagtgctcaaaggtctcacctgcctgctgctgctcttcgcacagaagaggggtaacgtgaagcacctggttctcttcctccatgaggctgtcctggtgcagtatgtggacacgctcaagctcgcagtgccctctctcatctacaccttgcagaataacctccagtatgttgccatctctaacctaccagctgccactttccaggtgacataccagctgaagatcctgaccacagcgctgttctccgtgctcatgctgaatcgcagcctttcccggctgcagtgggcctccctgctgctcctcttcactggcgtcgccattgtccaggcacagcaagccggtgggggaggcccacggccactggatcagaaccctggggcaggcctggcagccgtcgtggcctcctgtctctcctccggcttcgcaggtgtctactttgagaagatcctcaaaggcagctcaggctccgtgtggctgcgcaacctgcaactgggcctcttcggcacagcactgggcctggtggggctctggtgggctgagggtaccgccgtggccacccgtggtttcttttttgggtacacacctgctgtctggggcgtggtgctcaaccaggccttcggcgggctactggtggctgtggttgtcaagtacgctgacaatatcctcaagggctttgccacctccctgtccattgtgctgtccactgttgcctccattcgcctctttggcttccacgtggacccattatttgcccttggcgctggactcgtcattggtgctgtctacctctacagccttccccgaggtgcagccaaagccatagcctctgcctctgcctccgcctccgggccctgcgttcaccagcagcctcccgggcagccaccaccaccgcagctgtcttcccaccgtggagacctcatcacggagccctttctgccaaagttgctcaccaaggtgaagggttcctagccgctgggattgaagacattggcctggcctcgttctctcttcttgcccttggcccagctgggaccaaactctgatcagtattaggggtagagtgaggtagacactggactccctgtccccaccacccctgccccacccagggccaacatgactaagctctctcatgacccacctcagctcagccccccagcccctgccagctccacactatctcttagctgagtttttgcaaataaaatgtgttgtgtatcttgcc

SEQ ID NO: 43783 - DNA, 882 bp, Homo Sapiens
cacgagccaggacacacgcatgacaggatgcacccagcacacgacctacacacgggccacgagccaggacacacgcatgagaggatgcacccagcacacgacctacacacgggccacgagccaggacacacgcatgacaggatgcacccagcacacaacctacacacacaccacgaggcaggacacacgcatgacaggatgcacccagcacacgacctacacacaggccacgagccaggacacacgcatgagaggatgcacccagcacacaacctacacacacaccacgaggcaggacacacgcatgacaggatgcacccagcacacgacctacacacgggccatgagccaggacacatgcatgagaggatgcacccagcacacaacctacacacacaccacgaggcaggacacacgcatgacaggatgcacccagcacacgacctacacacgggccatgagccaggacacatgcatgagaggatgcacccagcacacaacctacacacacaccacgaggcaggacacacgcatgacaggatgcacccagcacacgacctacacacgggccacgaggacacacacgacaggatgcacccagcacgcaacctacacacgggccacgagccaggacacacgcatgacaggatgcacccagcacatgacctacacacgggccacgagccaggacacacgcatgagaggatgcacccagcacgcgacctacacacgggccacgagccaggacacacgcatgagaggatgcacccagaacacaacctacacacacaccacgaggcaggacacacgcatgacaggatgcacccagcacacaacctacacacgggccacgagccaggacacacgcatgacaggatgcac

SEQ ID NO: 43784 - DNA, 630 bp, Homo Sapiens
atgagcaacctgaagccggacggcgagcacggcggcagcaccggcaccggctccggcgcgggctccggcggcgccctggaggaggaggtccggacactgtttgtcagcggcctccctgtggacattaaacccagagaactctacttgctcttccggccgttcaaggggtatgaagggtccctgatcaagctcactgcaagacagcctgttggttttgtgatctttgacagccgtgcaggagcagaagcggccaagaatgcgctgaacggtattcgctttgatcccgaaaatccacagactctgaggctagagtttgccaaagccaacaccaagatggccaagagcaagctaatggcaactccaaatcccagcaacgtgcaccccgccctaggagcacacttcatcgcacgggacccctatgacctgatgggggctgctctgatccctgcatccccagaggcctgggccccctaccctttgtacaccacagagctgaccccagccatctcccatgctgcgttcacctacccaactgccactgccgctgccgccgccctccacgctcaggtgcgctggtacccttcctctgacaccacccagcaaggatggaagtaccgtcagttctgttag

SEQ ID NO: 43785 - DNA, 1746 bp, Homo Sapiens
ttgtgactcatttctatcttcttttccacaacctttctgcaatatagtgtctatggcatctaagttctccctgggacaaacagaactcattcttcttttgatgtgttttattttagcactgtctcgatcaagtattggtagtataaaatgtttacaaacaactgaagaacctccttccagaactgcaggagccatgatgcaattcacagcccctattcccggagctacaggacctttcaagctctctcaaaaaaccattggtaatacaatatcctggatccaatgctggtccaccttcagcaccccgcggtccacccatggcacccataataatttcacagagaaccgcaagaatacctcaagttcacactatggacagttctggaaaaatcacactgactcctgtggttatattaacaggttacatggatgaagaacttgcaaaaaaatcttgttccaaaatccagattctaaaatgtggaggcactgcaaggtctcagaatagccgagaagaaaacaaggaagcactaaagaatgacatcatatttacgaattctgtagaatccttgaaatcagcacacataaaggagccagaaagagaaggaaaaggcactgatttagagaaagacaaaataggaatggaggtcaaggtagacagtgacgctggaataccaaaaagacaggaaacccaactaaaaatcagtgagatgagtgtaccacaaggacagggagcccaaataaagaaaagtgtgtcagatgtaccaagaggacaggagtcccaagtaaagaagagtgagtcaggtgtcccaaaaggacaagaagcccaagtaacgaagagtgggttggttgtactgaaaggacaggaagcccaggtagagaagagtgagatgggtgtgccaagaagacaggaatcccaagtaaagaagagtcagtctggtgtctcaaagggacaggaagcccaggtaaagcagagggagtcagttgtactgaaaggacaggaagcccaggtagagaagagtgagttgaaggtaccaaaaggacaagaaggccaagtagagaagactgaggcagatgtgccaaaggaacaagaggtccaagaaaagaagagtgaggcaggtgtactgaaaggaccagaatcccaagtaaagaacactgaggtgagtgtaccagaaacactggaatcccaagtaaagaagagtgagtcaggtgtactaaaaggacaggaagcccaagaaaagaaggagagttttgaggataaaggaaataatgataaagaaaaggagagagatgcagagaaagatccaaataaaaaagaaaaaggtgacaaaaacacaaaaggtgacaaaggaaaggacaaagttaaaggaaagagagaatcagaaatcaatggtgaaaaatcaaaaggctcgaaaagggcgaaggcaaatacaggaaggaagtacaacaaaaaagtggaagagtaaggataaattttttaaaggcccataagacaagtgattattatgattcccatactccagatacaaaccatatcccagccattgcctaaacagattacaattataaaatccctttcatcttcatatcacagtttctgctcttcagaagtttcaccctttttaatctctcagccacaaacctcagtttccaaatatttgttttataagttaagacgtatatgattccgtcaagaaagactggatactttctgaagtaaaacattttaattaaagaaatatatagtaa

SEQ ID NO: 43786 - DNA, 795 bp, Homo Sapiens
cacacaacatggccttcagcaatgctgattcaggctttgtggatgcccagctggtgctgacccacaaggacctcctgtctggcagtatcatggccacggatgagcccatgcagcccatcttctgcttcatccaggaggggcctcaggaagaggcgagtcctgttcacgcactcaggctgaccatggctggatcctgctgcatgtgtccgacaggcagcaccaggccatcttggtgctggaggtgcaggccttggagccttacctctatgtggccaatggctccggcctcaaggtccctcaaggagaccagggtaccatcaatatggccgagctccacctgggcaccaacctcgacatccgcagtggggatgaggtccactaccacatcacagacagcccttgctggggacagttgctccaggccactcagccagcacagccttcgcccagaaggacctgctggttggggccgttctctttggccacaatggcagcctcagctcccgcaacaccctggccttctcaatggatgtggggccttctcaatggatgtggggccttctcaatggatgtggggccagtgcacacagacagtgcacacggtgcactctacaagtgaccattgccctagagggcccactagccccactgaagctggcctggcacaagaagatctacatcttcctgggagaggcagctgagatcagaagggaccagctggagaccacggagttcatcatctcggagccgctggccaatctgtactcatgtggggaccagaacacactgatggag

SEQ ID NO: 43787 - DNA, 841 bp, Homo Sapiens
gggcggatcgactgacgccggggccgggatggcgacgcctcggccctgcgcggacgggccctgctgctcgcatcccagcgcggtgctcggcgtacagcagacgctggaggagatggacttcgagaggggaatctggtcggcagccctgaatggagacctgggccgagtgaagcatttaatccagaaggccgaggacccaagtcagcccgactcggccggctacactgcgctgcactatgccagccgcaatgggcactacgctgtgtgccagttcctgctggaaagcggagctaagtgtgatgcccagacccacgggggtgccactgctctgcaccgagccagctactgcgggcacactgaaatcgcgcggctcctgctatcacatgggtccaaccccagggtggtggatgacgacggcatgaccagtctgcataaggctgctgagaggggtcacggggacatctgctccctcctcctgcaacacagcccagccctgaaggccatccgggaccgaaaggcacggctagcatgtgacctgctgccttgcaacagtgacctgcgggacctgctatccagctgagccgccaccctatctccagctgcctttaaagggtacacagaccagttctccaagcccctgccttggtcagcatccatgctgctgggcagggaactgaggccagaccacccaggaagagccccagtctggtcactgtggaagcgagggagtagatttggtgtggctaaaagtgtttaagactggacagatgatcatattctaaattagttcatatgagacatctatttatttggaaaaaaataaagttatatccttacctca

SEQ ID NO: 43788 - DNA, 1598 bp, Homo Sapiens
ggagacagagatcccaggacaaatgtgcagcaggcccctgagcatgtgtagaaatgttgtcatcatttccacatagaaagacttggaggaaatcaaagaagacagtaaaagtcacaagatcctatccaaccttcccttccctgaatgcctgggaagaattcaggggcctcttgcctgtggatggagagccgaaccctggagcgggcctaggtgtggaggagggactgctctgccgggtggttcattctccagaattcaacctgtttcttgactccgtggtgtttgaaagcaacttcatccaggtcaaaaggggcaggaattggagagacgtctacaaagcttccaacaccatggccctgggggtgacctcctcggtaccctgcctgcccctccccaacatcctactcatggccagtgtcaaatggcaccaggggcagaaccagacatggaacagaccatccatagcccccaacatcttcctgaagaggattctcccattgaggtttgtggagctccaggtatgtgaccactatcaacgcatcctgcagttgaggacagtcactgagaagatttattacctaaagctccatcctgaccatcctgagactgtcttccacttctggatccgactggttcaaattctgcaaaaggggctgtccatcaccaccaaagaccctaggattcttgtcacgcactgcctggtacccaagaactgcagcagcccctcaggagattcgaagttagtacagaagaaactccaagcctcccagcccagcgagagtctcattcagctaatgaccaagggggagagtgaagccctgtctcagatttttgccgacttacaccagcagaaccagttgagtttcaggagcagcagaaaggtggagaccaacaagaacagctcagggaaagattcttcccgtgaagacagcatcccttgcacctgtgacctacgttggagggcttcattcacgtacggagagtgggaaagagagaacccctccggcctgcagcccctctcactactcagcactctggcagcctccaccgggccacagctggccccacccataggaaattctatttgagccacccttccgcactggggagaatctatgcaagcctcgtcaacaccactttgcagcattcagctgctgagggattatcgggatggagagtaggagaaaactgcaaccaaggaagaatagagtcatctcacggtgacagcagagcctttccagctgtacataaccacgtcctcgccactgcacctcggcatatgccacctccatgccactgccagagctggcctagcaagatgtgctctcagaatggccgggcccaagagatgaaggaaaggagtgaaagggaagtaggaccagagaagtggaaggaagcaaaatggaggtgatgagaaaggtggtgggagaaagtcagcagatgagagacacaaagagaagtggtaataggaaacggaagagacttggtagacgagataaggaggacaagagaagggacacacccctgagagatgctcaccaagcttctatttatctaatttaaaacttgaaagtaaagccataaacaaaaaaaagaaa

SEQ ID NO: 43789 - DNA, 2687 bp, Homo Sapiens
ttggaaataaccaatatttagtttatttcattcgattcttaggggaactggtgaggagcctaagatgattttcccttcctagagaaagaatccaaagtccagggaaatagcgacaggggagttcaagactgcccctgctagtccttccttggctactctccgctgcgatcgcaggatagctctcattagcaggagaatcgggcaagtgtgtggataagtagagagtgtgttgaacaacttgtaacgttttatgaaatacgcattgtcatggttccctaaaaggctttgcggaagccgtttgtctttactaatcaagtctttacttacacaaaagtagaagtagaagtagttttagaaaacatactaacaatcttctatccccttgaagaccagagtagcagaaaacaggtgatttgcattataaaattgcactcactttttcctcctttcagatttcacattacattagcctatttgtgttacggtgtataaaaaatggaacaggcgcctccactacattgttctcctttaaaaatagatcacttacaccctaactttgttttccttaaattcgattcttaacaggagagctttctattatttcagatggagtgaggttgcacgactgggatggaagaaaggaatcccttaaatttgggggaatttctgttctctgttctaagaccattttacttggggtgtgggggtgggcgcggcggtcagggcagtggaacgcagtcgcggctgcgccatccctgcacttccaggcgcgcgggagggaccggcggggacgcgagctgcggactctggcgaactcgggggaggcagacagggggaggcggacacccagccggcaggcgtctcagcctccccgcagccggcgggcttttctcctgacagctccaggaaaggcagaccccttccccagccagccaggtaaggtaaagactgctgttgagcttgctgttactgagggcgcacagaccctggggagaccgaagcttgccactgcgggattctgtggggtaacctgggtctacggaagtttcctgaaagaggggagaagggtttgcatttttcctatggaggattcttctctctctagcatttcgtttgatgtattcaactggtagaagtgagatttcaacaggtagcagagagcgctcacgtggaggaggtttggggcgccgcggcgccacccccacccctcctcgggaccgcgcctatttctaaagttacacgtcgacgaactaacctatgctttaaattcctctttccagccccgtgagtccgcggcgacattgggccgtggggtggctgggaacggtcccctcctccggaaaaaccagagaacggcttggagagctgaaacgagcgtccgcgagcaggtccgtgcagaaccgggcttcaggaccgctgagctccgtagggcgtccttgggggacgccaggtcgccggctcctctgccctcgttgagatggacaacgcctcgttctcggagccctggcccgccaacgcatcgggcccggacccggcgctgagctgctccaacgcgtcgactctggcgccgctgccggcgccgctggcggtggctgtaccagttgtctacgcggtgatctgcgccgtgggtctggcgggcaactccgccgtgctgtacgtgttgctgcgggcgccccgcatgaagaccgtcaccaacctgttcatcctcaacctggccatcgccgacgagctcttcacgctggtgctgcccatcaacatcgccgacttcctgctgcggcagtggcccttcggggagctcatgtgcaagctcatcgtggctatcgaccagtacaacaccttctccagcctctacttcctcaccgtcatgagcgccgaccgctacctggtggtgttggccactgcggagtcgcgccgggtggccggccgcacctacagcgccgcgcgcgcggtgagcctggccgtgtgggggatcgtcacactcgtcgtgctgcccttcgcagtcttcgcccggctagacgacgagcagggccggcgccagtgcgtgctagtctttccgcagcccgaggccttctggtggcgcgcgagccgcctctacacgctcgtgctgggcttcgccatccccgtgtccaccatctgtgtcctctataccaccctgctgtgccggctgcatgccatgcggctggacagccacgccaaggccctggagcgcgccaagaagcgggtgaccttcctggtggtggcaatcctggcggtgtgcctcctctgctggacgccctaccacctgagcaccgtggtggcgctcaccaccgacctcccgcagacgccgctggtcatcgctatctcctacttcatcaccagcctgagctacgccaacagctgcctcaaccccttcctctacgccttcctggacgccagcttccgcaggaacctccgccagctgataacttgccgcgcggcagcctgactcccccagcgtccggctccgcaactgcccgccactcctggccagcgagggaggagccggcgccagagtgcgggaccagacaggccgcctaggcctcctggggaaaccgactcgcgccccatacccgacctagcagatcggaagcgctgcgactgtgcccgcaggttgaccttgccaagccctccaggtgatgcgcggccatgccgggtgaggagaactgagg

SEQ ID NO: 43790 - DNA, 117 bp, Homo Sapiens
gtgggcctgagcagttgtccggaacctgctgtgcccagtaacggggtgaagactggcgagcgctacttggtgaatgatgtggtgtctttccagtgtgagccgggatatgccctccag

SEQ ID NO: 43791 - DNA, 2025 bp, Homo Sapiens
ggggccccagaccctggcggcggctgccgcagccgagacggcagggcgaggcccggaggcctgagcaccctctgcagccccactcctgggccttcttggtccacgacggccccagcacccaactttaccaccctcccccacctctcccccgaaactccagcaacaaagaaaagtagtcggagaaggagcggcgactcagggtcgcccgcccctcctcaccgaggaaggccgaatacagttatggccacccaggtaatggggcagtcttctggaggaggagggctgtttaccagcagtggcaacattggaatggccctgcctaacgacatgtatgacttgcatgacctttccaaagctgaactggccgcacctcagcttattatgctggcaaatgtggccttaactggggaagtaaatggcagctgctgtgattacctggtcggtgaagaaagacagatggcagaactgatgccggttggggataacaacttttcagatagtgaagaaggagaaggacttgaagagtctgctgatataaaaggtgaacctcatggactggaaaacatggaactgagaagtttggaactcagcgtcgtagaacctcagcctgtatttgaggcatcaggtgctccagatatttacagttcaaataaagatcttccccctgaaacacctggagcggaggacaaaggcaagagctcgaagaccaaaccctttcgctgtaagccatgccaatatgaagcagaatctgaagaacagtttgtgcatcacatcagagttcacagtgctaagaaattttttgtggaagagagtgcagagaagcaggcaaaagccagggaatctggctcttccactgcagaagagggagatttctccaagggccccattcgctgtgaccgctgcggctacaatactaatcgatatgatcactatacagcacacctgaaacaccacaccagagctggggataatgagcgagtctacaagtgtatcatttgcacatacacaacagtgagcgagtatcactggaggaaacatttaagaaaccattttccaaggaaagtatacacatgtggaaaatgcaactatttttcagacagaaaaaacaattatgttcagcatgttagaactcatacaggagaacgcccatataaatgtgaactttgtccttactcaagttctcagaagactcatctaactagacatatgcgtactcattcaggtgagaagccatttaaatgtgatcagtgcagttatgtggcctctaatcaacatgaagtaacccgccatgcaagacaggttcacaatgggcctaaacctcttaattgcccacactgtgattacaaaacagcagatagaagcaacttcaaaaaacatgtagagctacatgtgaacccacggcagttcaattgccctgtatgtgactatgcagcttccaagaagtgtaatctacagtatcacttcaaatctaagcatcctacttgtcctaataaaacaatggatgtctcaaaagtgaaactaaagaaaaccaaaaaacgagaggctgacttgcctgataatattaccaatgaaaaaacagaaatagaacaaacaaaaataaaaggggatgtggctggaaagaaaaatgaaaagtccgtcaaagcagagaaaagagatgtctcaaaagagaaaaagccttctaataatgtgtcagtgatccaggtgactaccagaactcgaaaatcagtaacagaggtgaaagagatggatgtgcatacaggaagcaattcagaaaaattcagtaaaactaagaaaagcaaaaggaagctggaagttgacagccattctttacatggtcctgtgaatgatgaggaatcttcaacaaaaaagaaaaagaaggtagaaagcaaatccaaaaataatagtcaggaagtgccaaagggtgacagcaaagtggaggagaataaaaagcaaaatacttgcatgaaaaaaagtacaaagaagaaaactctgaaaaataaatcaagtaagaaaagcagtaagcct

SEQ ID NO: 43792 - DNA, 450 bp, Homo Sapiens
gaggtatcgtacgtgcggccagccgagccggcgtttctggcccgcttcaaggaacgggtcggctacagggagggacccaccgtagagactaagagaattcagcctcagcccccagatgaagatggggatcacagtgacaaagaagatgaacagcctcaagtggtggttttaaaaaagggagacctgtcagttgaagaagtcacgaaaattaaagcagaaataaaggctgccaaagcagatgaagaaccaactccagccgatggaagagtcatatatcgaaaaccagtcaagcatccctcagatgaaaaatattcaggtttaacagcaagctcaaaaaagaagaagccaaatgaagatgaagtaaatcaggactcggtcaaaaagaactcacaaaaacaaattaaaaatagtagcctcctttcttttgacaacgaagacgaaaatgagtaa

SEQ ID NO: 43793 - DNA, 875 bp, Homo Sapiens
caggcgggccatggcggatgtccccggggcacagcgagcggttcctggtgacggcccagagccccgggaccccctggactgttgggcctgcgctgttcttgtaacagcccagaatctgctggtggctgccttcaatcttctcctgctggtgctggtgctagggaccatcttgctacccgctgtcaccatgctgggcttcggcttcctctgccactctcagttcctgcgctcccaggcacccccttgcaccgcgcacctgcgggaccccggtttcacggccctactggtcaccggattcctgctcctcgtgccgctgctcgtgcttgctctggccagctaccgccgcctctgcctgcgcctccgcctagccgattgcctcgtgccctacagccgagccctttatcggcgtcggcgcgccccgcagccgcggcaaatccgggcctcaccagggtcccaggccgttcccacatcaggaaaggtctgggtctaatgaccctcgagtcaagaacaaccctgacggctgccctccctcttattcggcccaaggacttgaagcccggcatcttccgacctgccctgcccccacccctgcctgagcggagtcctagcatccccttgggagcagcagcgtcagtggacccagtgctgagaaaagcccccacatcccggaaaacccactttcctttcacgacccacatctcaatcctgaacatctaggctggaacctgcacacctccccctcagctccgtcgtgaatgggacaacaatctcgtgccctcgttttatggtgcagcttctctagtatttctggggctggggggcggggctggaggggaaggagtgtccacgcatcaataaagatttaacgaactgaa

SEQ ID NO: 43794 - DNA, 680 bp, Homo Sapiens
catcaagttcaccctcattgacagccaagcacagtatccagttgtcaacacaaattatggtaaaatccagggcctaagaacaccattacccagtgagatcttgggtccagtggagcagtacttaggggtcccctatgcctcacccccaactggagagaggcggtttcagccaccagaatccccatcctcctggactggcatccgaaatgctactcagttttctgctgtgtgcccccagcacctggatgaaagattcttattgcatgacatgctgcccatctggtttaccaccagtttggatactttgatgacctatgttcaagatcaaaatgaagactgcctttacttaaacatctatgtgcccatggaagatggaaccaacataaagagaaatgcagacgatataaccagtaatgaccatggtgaagataaagatattcatgaacagaacagtaagaagcctgttatggtctatatccatgggggatcttacatggagggaaccggtaacatgattgatggcagcattttggccagctatgggaacgtcatcgttatcaccattaactaccgtctgggaatactaggtatgcaagaggcacgtttgtgtgggagctcaaaaatgtttaattattttaaatctcctttcactaatttaataaattttttttgagttcaga

SEQ ID NO: 43795 - DNA, 1961 bp, Homo Sapiens
ctcatcttcacgttttctgcatctattgaagtgcgccactgagatcgtggagttcttccctgtttgtccatatgatgaacaacactgattttctgatgttgaacaatccctggaataaactctgtttggtttccatggatttctgtttccctttagattttgttagtaatttattttggatttttgcatccaagttcataattgtaactggacaaataaaggcagattttaaaaggacaagttgggaggctaaggcggaaggatcacttgagcctgggagattgaagctgcagctagcttcgattgttccactgtactccagcctggtgacagcaggacctgcctctaaaataataatacttaaaaggacgagtttacctacagtctcaccaagcaatgaaagagcttatcttcttcctgtttcctttacggatcttgctcatgtattttatcttagttactttagcataaatgctaaatcaaattctttttcactagacatcataatagctctaggcataccacataatacccaagcacattttaatcattaaaattgtttcctttttttgtggctactgtaaccacttcagcgaaccatttagtgtgtagtgggtttaaattttttctccttcctgggataaatttcccaggagagggataattgggtcaaaagttacgaacatatttatgggttcttttccacaagagatcgatcagtttgcaagtgccatctgcactgtgggggaaccaatcttcaacttgcctgcatttggtattagtatttcattaacctttcattgatctaattacggctctttgacacaattttcatcagtgatggactaagtgtgatccggcctgacccgcctccggccggcgtgagaaggggcatgtgtcgggctaccctcgggcttcccctgccgcccattgtgatccagcccgctaggcgctccctgccgcccattgtgacgcctgccagccgcaggctgggtccccgaggcgggcggcatttaggctcggtctccacagccatggccgcgacgcaggagctgctgctgcagttgcagaaggataaccgagatggtcgccagcggaagcaggagctagagaagctgatgcgcgggctcgaggccgagagcgagagcctgcctcaaccagcgcctgcaggacctgagcgagcgggagcggaggctgctgcggaggcgaagccaggaagcgctgcttctgcaaggggaggtgcgcgaggcggcgcgggagcgcgcgcagcgggtgcgcagaagactggaggaggcggagcgccacaaggaggacttgaagcccggtaaaccccgtccttacgagccccgcccctagctcttctactacggaggggaactgcagagccagaagagcacggagcagcaactcgcagcccaattggtgacgctgcagaatgaactggagctggcggagaccaaatgcgccttgcaggaggagaagctgcagcaggacgcgctgcagacagcggaggcctgggccatattccaggagcagaccgtagtcctgcaggtgtgacgggcagcttcgcagagtgcagtacagcaccgagtcgctcatggaggagatggccagggcggaccgagagacgcggctgttcggcggtcctcgcgcgctggccatcaggcgctgctgacgctgccgctcctcttcctggggctgtcgctgctctggacggtgctgttggaccccggcgccgtctccgcgtggctctggagcctcacctcggagacgacgctgcgccgcctgcgctacacgctgtccccgctgctggagctgcgcgctaacgggctgctgccaacctaagtgcagcgccccgcgcctggctccaggtggactccagggcaccggctttatttctggtgcactcctctcctgagagtgtagaccaaggtcgcctaataaactcctcaagggatgaa

SEQ ID NO: 43796 - DNA, 300 bp, Homo Sapiens
gcctgctccacacctgggtctgaccagggtgagtggatcttttggaacctagacagagcacaactgaaagggttgactgaactcccacaaagatgtcctgccagcaaacccagcagcttctcatgcatctcgttcatcagtgcctttcataccttcaagagctcttgcctcagagcattgctatgcctgaggtgtgtctcagaagcagccattggcacagtggcttggggctgggctcaaaaatttgctctcttgaagtttggatgtgattgctctgaacaagctgctttgccacaataa

SEQ ID NO: 43797 - DNA, 2110 bp, Homo Sapiens
ggatccaagctattgtcctgcccatggcttcccatctcaggacgctctctggccgctatcatcccagcagtggagttcagcccactactctgaaccagccgcaggtggctgcgatgggacggaagccatgaatggtgccggccctggccccgccgcagccgccccggtcccagtcccggtcccggtcccggactggcggcagttttgcgagctgcatgcgcaggcggccgccgtggactttgcgcacaagttctgccgtttcctgcgggacaacccagcttacgacacgcccgacgccggcgcctccttctcccgccacttcgccgccaacttcctggacgtcttcggcgaggaggtgcgccgcgtgctggtggctgggccgacgactcggggcgcggccgtgagcgcagaggccatggagccggagctcgcggacacctctgcactcaaggcggcgtacggccactcgcggagctcggaggacgtgtccacgcacgcggccaccaaggcccgcgttcgcaagggcttctcgctgcgcaacatgagcctgtgcgtggtggacggcgtgcgcgacatgtggcaccggcgcgcctcgcccgagcccgacgcggcagctgccccgcgcaccgccgagccccgcgacaagtggacgcggcgcctgaggctgtcgcggacgctggctgccaaggtggagctggtggacattcaacgcgagggggcgctgcgcttcatggtggccgacgacgcggccgcgggctccgggggctcggctcagtggcagaagtgccgcctgctcctgcgcagggctgtggccgaggaacgcttccgcctggagttcttcgtgccgcccaaagcctccaggcccaaggtcagcatcccactgtcagccatcattgaggtccgcaccaccatgcccctggaaatgccagagaaggataacacattcgtcctcaaggtagagaatggagccgaatacatcttggagaccatcgactctctgcagaagcactcgtgggtagctgacatccagggctgcgtggaccccggtgacagtgaggaagacaccgagctctcctgtacccgaggaggctgtctggccagccgcgtggcctcctgcagctgtgagctcctgactgatgcagtcgacctgccccgccccccagagacgacagccgtgggtgcagtggtgacagccccccacagccgaggtcgagatgccgtcagagaatccctgatccacgtcccgctagagacctttctgcagaccctggaatccccgggcggcagcggcagtgacagcaataacacaggggaacagggtgcagagacggatcccgaggctgaacccgagctggagctatccgactacccatggttccacgggacactgtcccgggtcaaggctgctcaactggttctggcaggggggccccggaaccacggcctcttcgtgatccgccaaagtgagactcggcctggggagtacgtgctgaccttcaacttccagggcaaggccaaggcaagtcacctgcgcctgtccctgaacggccacggccagtgtcacgtacagcatctgtggttccagtctgtgcttgacatgctccgccacttccacacacaccccatcccactggagtcagggggctcggccgacatcacccttcgcagctatgtgcgggcccaggaccccccaccagagccgggccccacgccccctgccgcgcccgcgtccccggcctgctggagcgactcgcccggccagcactacttctccagcctcgccgcggccgcctgcccgcctgcctcgccctccgacgccgccggcgcctcctcgtcttccgcctcgtcgtcctctgccgcgtcggggcccgcccccccgcgccccgtcgagggccagctcagcgcgcggagccgcagcaacagcgccgagcgcctgctggaggccgtggccgccaccgccgccgaggagcccccggaggccgcgcccggccgcgcgcgcgccgtggagaaccagtactccttctactagcccgcggcgccgcccgggtgggacacgccaagctcttcagtgaagacacgatgttattaaaagcctgttttagggactgca

SEQ ID NO: 43798 - DNA, 537 bp, Homo Sapiens
gaccacgaatccatcttcctcaatagccacagtgtgtcaaagccagagtcatcattggtcctgatggagctggacaagatcggggtctggtctgttcaagagcagccgagcaaagaggtcatccgggaactcccccgggccctgcggcaggcactgggagtattgctgttcggcaccgacatcatcatcaacaaccagatggggcagcatgccgtcatcgacatcaacgccttcccagcctacgagggtgtgagcaggttcttcacagacctctggaaccacatcgccaccattttccaagaccagagcacagccacagcagccacaggggatgtggccccactgaggcacagcaagctcctggccaagccggcgagcagcctagcaggcaagcagacatgcagcaccagccacagctgctgcagcagcatgatgggccaggatgcaccctggaaggccaatgcctatgtgggtagtacctccaagctgccgcacccgagactctgctgcaccaccagtatgtcgcccagcttctag

SEQ ID NO: 43799 - DNA, 2775 bp, Homo Sapiens
atggagccgcgggacggtagcccggaggcccggagcagcgactgcgagtcggcttccgcctcgtccagcggctccgagcgcgacgccggtcccgagccggacaaggcgccgcggcgactcaacaagcggcgcttcccggggctgcggctcttcgggcacaggaaagccatcaccaagtctggcctccagcacctggccccccctccgcccacccctggggcccggtgcagcgagtcagagcggcagatccggagtacagtggactggagcgagtcggcgacatatggggagcacatctggttcgagaccaacgtgtccggggacttctgctacgttggggagcagtactgtgtagccaggatgctgcagaagtcagtgtctcgaagaaagtgcgcagcctgcaagattgtggtgcacacgccctgcatcgagcagctggagaagataaatttccgctgtaagccatccttccgtgaatcaggctccaggaatgtcctcgagccaacctttgtatggcaccactgggtacacagacgacgccaggacggcaagtgtcggcactgtgggaagggattccagcagaagttcaccttccacagcaaggagattgtggccatcagctgctcgtggtgcaagcaggcataccacagcaaggtgtcctgcttcgtgctgcagcagatcgaggagccgtgctcgctgggggtccacgcagccgtggtcatcccgcccacctggatcctccgcgcccggaggccccagaatactctgaaagcaagcaagaagaagaagagggcatccttcaagaggaagtccagcaagaaagggcctgaggagggccgctggagacccttcatcatcaggcccaccccctcccccctcatgaagcccctgctggtgtttgtgaaccccaagagtgggggcaaccagggtgcaaagatcatccagtctttcctctggtatctcaatccccgacaagtcttcgacctgagccagggagggcccaaggaggcgctggagatgtaccgcaaagtgcacaacctgcggatcctggcgtgcgggggcgacggcacggtgggctggatcctctccaccctggaccagctacgcctgaagccgccaccccctgttgccatcctgcccctgggtactggcaacgacttggcccgaaccctcaactggggtgggggctacacagatgagcctgtgtccaagatcctctcccacgtggaggaggggaacgtggtacagctggaccgctgggacctccacgctgagcccaaccccgaggcagggcctgaggaccgagatgaaggcgccaccgaccggttgcccctggatgtcttcaacaactacttcagcctgggctttgacgcccacgtcaccctggagttccacgagtctcgagaggccaacccagagaaattcaacagccgctttcggaataagatgttctacgccgggacagctttctctgacttcctgatgggcagctccaaggacctggccaagcacatccgagtggtgtgtgatggaatggacttgactcccaagatccaggacctgaaaccccagtgtgttgttttcctgaacatccccaggtactgtgcgggcaccatgccctgcggccaccctggggagcaccacgactttgagccccagcggcatgacgacggctacctcgaggtcattggcttcaccatgacgtcattggccgcgctgcaggtgggcggacacggcgagcggctgacgcagtgtcgcgaggtggtgctcaccacatccaaggccatcccggtgcaggtggatggcgagccctgcaagcttgcagcctcacgcatccgcattgccctgcgcaaccaggccaccatggtgcagaaggccaagcggcggagcgccgcccccctgcacagcgaccagcagccggtgccagagcagttgcgcatccaggtgagacgcgtcagcatgcacgactatgaggccctgcactacgacaaggagcagctcaaggaggcctccgtgccgctgggcactgtggtggtcccaggagacagtgacctagagctctgccgtgcccacattgagagactccagcaggagcccgatggtgctggagccaagtccccgacatgccagaaactgtcccccaagtggtgcttcctggacgccaccactgccagccgcttctacaggatcaaccgagcccaggagcacctcaactatgtgactgagatcgcacaggatgagatttatatcctggaccctgagctgctgggggcatcggcccggcctgacctcccaacccccacttcccctctccccacctcaccctgctcacccacgccccggtcactgcaaggggatgctgcaccccctcaaggtgaagagctgattgaggctgccaagaggaacgacttctgtaagctccaggagctgcaccgagctgggggcgacatcatgcaccgagacaagcagagtcgcacgctcctgcaccacgcagtcagcactggcagcaaggatgtggtccgctacctgctggaccacgctcccccagagatccttgatgcggtggaggaaaacggggagacctgtttgcaccaagcagcggccctgggccagcgcaccatctgccactacatcgtggaggccggggccgaccagcagggcgacactccccggcagcaggctgagaaggctcaggacaccgagctggcggcctacctggagaaccggcagcactaccagatgatccagcgggaggaccaggagacggctgtgtag

SEQ ID NO: 43800 - DNA, 1024 bp, Homo Sapiens
gagcgccaggggttccagctgcacgtcccaggctctccagcgcgcggcaggccggggcgggacgaggagagctgcggggacaacgcctgtggctgggtccggaggtgcgggtgcggcgcgggacaagcgggcagcatgctcagggcggtcgggagcctactgcgccttggccgcgggctaacagtccgctgcggccccggggcgcctctcgaggccacgcgacggcccgcaccggctcttccgccccggggtctcccctgctactccagcggcggggcccccagcaattctgggccccaaggtcacggggagattcaccgagtccccacgcagcgcaggccttcgcagttcgacaagaaaatcctgctgtggacagggcgtttcaaatcgatggaggagatcccgcctcggatcccgccagaaatgatagacaccgcaagaaacaaagctcgagtgaaagcttgttacataatgattggactcacaattatcgcctgctttgctgtgatagtgtcagccaaaagggctgtagaacgacatgaatccttaacaagttggaacttggcaaagaaagctaagtggcgtgaagaagctgcattggctgcacaggctaaagctaaatgatattctaagtgacaaagtgttcacctgaataccatccctgtcatcagcaacagtagaagatgggaaaaatagaatatttaccaaaatatctgccatggttttattttggtaacaagaagcacaatgtcttttttatttttattttttagtaaacttttactgaagtataccatgcattcaaaaagtggacaaaactgtatacagtctgatagatatttatgtcgtgaacacctgtgtaaccactgccaaagtgaagatgtagaatattggcaacacttcacagcctcattcctgccttttctcagccattacctcccaaacatagcagtttttctgagtttcatcacctttgattcattttgcctgtttttgaactttatataaatggatttatacatta

SEQ ID NO: 43801 - DNA, 981 bp, Homo Sapiens
atgtccagcactcttggccacaacatggaatctcctcatcacactgatgttgaccctgtcttcttcctcctgggcatcccaggtctggaacaatttcatttgtggctctcactccctgtgtgtggcttaggcacagccacaattgtgggcaatataactattctggttgttgttgccactgaaccagtcttgcacaagcctgtgtacctttttctgtgcatgctctcaaccatcgacttggctgcctctgtctccacagttcccaagctactggctatcttctggtgtggagccggacatatatctgcctctgcctgcctggcacagatgttcttcattcatgccttctgcatgatggagtccactgtgctactggccatggcctttgatcgctacgtggccatctgccacccactccgctatgccacaatcctcactgacaccatcattgcccacataggggtggcagctgtagtgcgaggctccctgctcatgctcccatgtcccttctttattgggcgtttgaacttctgccaaagccatgtgatcctacacacgtactgtatggctgtggtgaagctggcctgtggagacaccaggcctaaccgtgtgtatgggctgacagctgcactgttggtcactggggttgacttgttttgcattggtctctcctatgccctaattgcacaagctgtccttcgcctctcatcccatgaagctcggtccaaggccctagggacctgtggttcccatgtctgtgtcatcctcatctcttatacaccagccctcttctccttttttacacaccgctttggccatcacgttccagtccatattcacattcttttggccaatgtttatctgcttttgccacctgctcttaatcctgtggtatatggagttaagaccaaacagatccgtaaaagagttgtcagggtgtttcaaagtgggcaggaaatgggcatcaaggcatctgagtga

SEQ ID NO: 43802 - DNA, 2436 bp, Homo Sapiens
cccggggcgctgcccccgcagcctgcggcgcttccgcccgcgcccccgcagggctccccctgcgccgctgccgccgggggctcgggcgcctgcggtccggcgacggcagtggctgcagcgggcacggccgaaggaccgggaggcggtggctcggcccgaatcgccgtgaagaaagcgcaactacgctccgctccgcgggccaagaaactggagaaactcggagtgtactccgcctgcaaggccgaggagtcttgtaaatgtaatggctggaaaaaccctaacccctcacccactccccccagagccgacctgcagcaaataattgtcagtctaacagaatcctgtcggagttgtagccatgccctagctgctcatgtttcccacctggagaatgtgtcagaggaagaaatgaacagactcctgggaatagtattggatgtggaatatctctttacctgtgtccacaaggaagaagatgcagataccaaacaagtttatttctatctatttaagctcttgagaaagtctattttacaaagaggaaaacctgtggttgaaggctctttggaaaagaaacccccatttgaaaaacctagcattgaacagggtgtgaataactttgtgcagtacaaatttagtcacctgccagcaaaagaaaggcaaacaatagttgagttggcaaaaatgttcctaaaccgcatcaactattggcatctggaggcaccatctcaacgaagactgcgatctcccaatgatgatatttctggatacaaagagaactacacaaggtggctgtgttactgcaacgtgccacagttctgcgacagtctacctcggtacgaaaccacacaggtgtttgggagaacattgcttcgctcggtcttcactgttatgaggcgacaactcctggaacaagcaagacaggaaaaagataaactgcctcttgaaaaacgaactctaatcctcactcatttcccaaaatttctgtccatgctagaagaagaagtatatagtcaaaactctcccatctgggatcaggattttctctcagcctcttccagaaccagccagctaggcatccaaacagttatcaatccacctcctgtggctgggacaatttcatacaattcaacctcatcttcccttgagcagccaaacgcagggagcagcagtcctgcctgcaaagcctcttctggacttgaggcaaacccaggagaaaagaggaaaatgactgattctcatgttctggaggaggccaagaaaccccgagttatgggggatattccgatggaattaatcaacgaggttatgtctaccatcacggaccctgcagcaatgcttggaccagagaccaattttctgtcagcacactcggccagggatgaggcggcaaggttggaagagcgcaggggtgtaattgaatttcacgtggttggcaattccctcaaccagaaaccaaacaagaagatcctgatgtggctggttggcctacagaacgttttctcccaccagctgccccgaatgccaaaagaatacatcacacggctcgtctttgacccgaaacacaaaacccttgctttaattaaagatggccgtgttattggtggtatctgtttccgtatgttcccatctcaaggattcacagagattgtcttctgtgctgtaacctcaaatgagcaagtcaagggctatggaacacacctgatgaatcatttgaaagaatatcacataaagcatgacatcctgaacttcctcacatatgcagatgaatatgcaattggatactttaagaaacagggtttctccaaagaaattaaaatacctaaaaccaaatatgttggctatatcaaggattatgaaggagccactttaatgggatgtgagctaaatccacggatcccgtacacagaattttctgtcatcattaaaaagcagaaggagataattaaaaaactgattgaaagaaaacaggcacaaattcgaaaagtttaccctggactttcatgttttaaagatggagttcgacagattcctatagaaagcattcctggaattagagagacaggctggaaaccgagtggaaaagagaaaagtaaagagcccagagaccctgaccagctttacagcacgctcaagagcatcctccagcaggtgaagagccatcaaagcgcttggcccttcatggaacctgtgaagagaacagaagctccaggatattatgaagttataaggttccccatggatctgaaaaccatgagtgaacgcctcaagaataggtactacgtgtctaagaaattattcatggcagacttacagcgagtctttaccaattgcaaagagtacaacccccctgagagtgaatactacaaatgtgccaatatcctggagaaattcttcttcagtaaaattaaggaagctggattaattgacaagtga

SEQ ID NO: 43803 - DNA, 918 bp, Homo Sapiens
agcctgccagcacctattccacctcccagcccagcatggcacccctgctgcccatccggaccttgcccttgatcctgattctgctggctctgctgtccccaggggctgcagacttcaacatctcaagcctctctggtctgctgtccccggcgctaacggagagcctgctggttgccttgcccccctgtcacctcacaggaggcaatgccacactgatggtccggagagccaatgacagcaaagtggtgacgtccagctttgtggtgcctccgtgccgtgggcgcagggaactggtgagtgtggtggacagtggtgctggcttcacagtcactcggctcagtgcataccaggtgacaaacctcgtgccaggaaccaaattctacatttcctacctagtgaagaaggggacagccactgagtccagcagagagatcccaatgtccacactccctcgaaggaacatggaatccattgggctgggtatggcccgcacagggggcatggtggtcatcacggtgctgctctctgtcgccatgttcctgctggtgctgggcttcatcattgccctggcactgggctcccgcaagtaaggaggtctgcccggagcagcagcttctccaggaagcccagggcaccatccagctccccagcccacctgctcccaggccccaggcctgtggctcccttggtgccctcgcctcctcctcctgccctcctctcccctagagccctctcctccctctgtccctctccttgcccccagtgcctcaccttccaacactccattattcctctcaccccactcctgtcagagttgactttcctcccattttaccactttaaacacccccataacaattcccccatccttcagtgaactaagtccctataataaaggctgaggctgcatctgccaca

SEQ ID NO: 43804 - DNA, 1277 bp, Homo Sapiens
gaatgagagcgcggggcggtgccgttgggaccacggcggccagagcggcaggatggcttccggcttcaagaagcccagcgctgcctccaccggccaaaagagaaaggtggcacctaagcccgagctcactgaggatcagaagcaagaagttcgggaagcatttgacctcttcgacgtggacggaagtgggaccatcgacgcgaaggagctgaaggtggccatgagagcgctgggcttcgaacccaggaaggaagagatgaagaaaatgatctccgaggtggacagggaaggcacggggaagatcagcttcaatgacttcctggccgtgatgacgcagaagatgtccgagaaggacaccaaagaagaaatcctgaaggccttcaggctctttgatgacgatgagaccgggaagatctcgttcaaaaacctgaagcgtgtggccaacgagctgggggagaacctcacggatgaggagctgcaggagatgatcgacgaagctgatcgggatggggacggcgaagtgaacgaggaggagttccttcggatcatgaagaagaccagcctttactgaagtcggttcagaagctaaagtgactctctgggttgcctgcttccattttgtgaaaccttagaggacagcggctgcctgtcccttcttcaccccctcacccccataatttgtctagatctatttccatatctctagttcaataatagaatttgaaagatgcttgtaatgtgagttttgggttttaattctcaagagtcaacctggagcacatgaggttaaacaaagggccctgaagtttgagtgcgccctccatttgccctgtgctgaacttgctgttcatctgttgatctggaggcaggacagcttctgggacacacaaaaatgtggttccctttgtcacttctttggtggtcttaaattatcttgcttcatatatcattccttaaattccagtcattgttccagcataatgagatggaatctgccagtagatttgcctagcctgtccacttagctgaataccagtttgaaggaaaacagggtggccacttacaaacttacggagctcaggacagataatcttataaagaatagacttgcttgggtggtagtacgttgtgcaattttgactattcactggctttatacctgcaaatgattcttcgttcatgtgtaaattgtccaccatgggtttatctagggctagtatgtatacctgggctacagaataaaaataaaatctaatactggcccaagcaaagtataa

SEQ ID NO: 43805 - DNA, 1366 bp, Homo Sapiens
gagcagtgtcctcacgcattggactggcctccaatgggtgtagttacagggccccaaccacctttcaccagattgtatactcacctgtatctgaccttattgctactcacactctaggtcccaggataaaatcccaacatgatggaggagtgccccctcattatgtgaagcacctgctgggcttggaaccaaattcagtgatgaaatcccaagatgatggaggagtgaaccctgacgacaggaagtacctgctcacctatgaacaaaatttgaggaatatggatgtatcctgtggatccctcagagaagacaggcaagagtccaccaccaaggcacctctatggaggtctccttcttggccacgcagccaggactgatctctatgtaatggtgacattcattgtgatgctagccagagctcatagtcaggcctggtgccctgaggcgtgcatgtgcatttgagggcatgcttgctggcctggctttcacagatgttagcctgtggaagcagaagaaaatggtacacatagagctggctcggtatccagaaataggctgcctgcaataatgcactgcgggaccctacaatgctcgaagttagggcgacttcaagccgtctccctggtcagctcctgcaggagtaggaggcattcagagactgaggtggtcgctgaaatctgttcttctgattcccttttggaaagaggctgtgtgcaagaatccagtcccatggggattggaatgtagtctggatcgtgggactatcctgtggatcccacagagaagagagaggacagtccaccactgatgcacctccacagaggtctccttctccgccaaacctcacggaattgtgacattcatggtatcaagcagctgtctgataaaagctggataagaagagtttccttcttggctactgttacagaaatttatggttttaaaacaatcaaagttgcccagtcattaaaacccaatagtatttagaagaaaacactcatgaaatggattcccttgagggtcgtcttccattaagtggtaaacatttaatgtggaatatgtacagccagacccaagaaaccttaggctgatgaggtacatggatgtcaggaaaataagaggcgaatgtgcgggaccccatccatccctcaccagcttgtatcctcagctttatctgaagttaaaagtatctttcccataatgaaatccaaagatgatggaagagtgccccctcacggtgtggaggtcctgcttggctagcaactgaatatgaagtaaattcaagggaccctgcggaccggactgctagtgtttctaaatggggtgtacactggacaataaaacactgaaagatttctgttcctga

SEQ ID NO: 43806 - DNA, 186 bp, Homo Sapiens
tgtccgcgttgccagcaacctgttttcttcgctgagaaggtgatgtcattaggcagaaattggcaccgaccgtgtctgaggtgccagcgttgccacaagaccctgactgctgggagtcatgctgagcatgatggagtcccctactgccacgtcccctgctacggctacctgtttggccccaaaggt

SEQ ID NO: 43807 - DNA, 1631 bp, Homo Sapiens
cccagctcagacactcctagccttggggcagctgccgggcgagtcagcggagtagcggccagcgggcgatggagacagagagacacccgacgagaggaggcggggtgggggaggcggggagagtgcgggggcggaggctggcagggggcgctggaagctggagcggtccgtgcgctccccgcgcccgagggtgcaggaggctctgaagcggctgctgcaccgcggggcccaggcggcggctggggggctggggggcgctgccgccgccgccgccgggggcgtcgctggcctcggcccctttgttctcgcgcgctccccctcgccgcccactcccctgctgtcgcgcggcggcggcggtggcggcggcggctcctcccgcccgaggcagtcgggctcggcgccgggggcgggagggggcggggggagcacgccagccgccgagagtggggggcgatggcgaagctccgggtggcttacgagtacacggaagccgaggacaagagcatccggctcggcttgtttctcatcatctccggcgtcgtgtcgctcttcatcttcggcttctgctggctgagtcccgcgctgcaggatctgcaagccacggaggccaattgcacggtgctgtcggtgcagcagatcggcgaggtgttcgagtgcaccttcacctgtggcgccgactgcaggggcacctcgcagtacccctgcgtccaggtctacgtgaacaactctgagtccaactctagggcgctgctgcacagcgacgagcaccagctcctgaccaaccccaagtgctcctatatccctccctgtaagagagaaaatcagaagaatttggaaagtgtcatgaattggcaacagtactggaaagatgagattggttcccagccatttacttgctattttaatcaacatcaaagaccagatgatgtgcttctgcatcgcactcatgatgagattgtcctcctgcattgcttcctctggcccctggtgacatttgtggtgggcgttctcattgtggtcctgaccatctgtgccaagagcttggcggtcaaggcggaagccatgaagaagcgcaagttctcttaaaggggaaggaggcttgtagaaagcaaagtacagaagctgtactcatcggcacgcgtccacctgcggaacctgtgtttcctggcgcaggagatggacagggccacgacagggctctgagaggctcatccctcagtggcaacagaaacaggcacaactggaagacttggaacctcaaagcttgtattccatctgctgtagcaatggctaaagggtcaagatcttagctgtatggagtaactatttcagaaaaccctataagaagttcattttctttcaaaagtaacagtatattatttgtacagtgtagtatacaaaccattatgatttatgctacttaaaaatattaaaatagagtggtctgtgttattttctatttccttttttatgcttagaacaccagggtttaaaaaaaaaaaaaaggtgaggacatctgggtctcatttgcttctgctaggttaaacttttacttgacaacaaggattcctgctgaagtctgaaccttactgtgtaaccctcagtttccactattaaagagtatcttttga

SEQ ID NO: 43808 - DNA, 890 bp, Homo Sapiens
gcacgtttgccgtgctccgccgggaagatggggaaagtgagggggttgcgcgcccgagtgcaccaggctgccgtgaggccgaaaggggaggccgcccccggccccgcgccccctgccccggaggcgacccctccgccggcctcggccgcggggaaggactgggcgttcatcaacaccaacatctttgccaggaccaagatagaccccagcgccttggtgcagaagctggagctggacgtgaggagtgtcacttccgtcaggagaggtgaggcaggctcgagtgcacggagcgtcccttccatcaggagaggtgcagaggccaagaccgttttgcccaagaaggagaaaatgaagctgaggcgtgagcaatggttgcagaaaatcgaagccataaaactggctgagcagaagcacagggaggagcggaggcggagggccacggtggtggtgggggacctgcaccctctcagggatgccctgcccgagctgctggggctcgaggctggcagccggcgccaagcccgcagcagggagagcaacaagccccggccctcagagctcagccggatgagcgcagcccagagacagcagcttctcgaggaagaaaggacccggtttcaggagctgctggccagtccggcctacagagccagccccctggtggccatcgggcagacgctggcccggcagatgcagctggaagatggcggccagctctgaccagggcagcgggcatgccacaactcctcaggacacatgtgggccaagtagagagcgccggcccctcaaggaccatggcctgagcctggtggacgcccttccctctggtcggttgtggggctcaataaatggctctgtgaacttcccctgcactgccagggccgttccca

SEQ ID NO: 43809 - DNA, 2370 bp, Homo Sapiens
gctggcggcgcccggctccgtcctgcccgcggccggcccccgcgtctgctccctccccgcccgggcccctgtcggccgccgccagtccccgccccgactgtgaatgaaaggcgggcgccgccgagggctggctgggaacgccgcagcgacgccggcctctcgagaggcgcgcgccccgccgagatgtacggtgtgtgtggctgctgtggtgccctacgccccaggtacaaaaggctggttgacaacatcttccctgaggatcccgaggatggtctggtgaagaccaacatggagaagctgaccttctatgccctctcagctccagaaaaacttgatcgtattggcgcctacctctctgagaggctcatccgtgacgtgggtcgccatcgatatgggtacgtgtgcattgctatggaggctttggaccagctgctcatggcctgccactgccagagcatcaacctcttcgtggagagcttcctcaagatggtggccaagctgctggagtcagagaaacccaacctgcagatcctcggcaccaactcgtttgtgaagtttgccaacatcgaggaggacaccccgtcctatcaccggagctatgacttctttgtgtcccgattcagtgaaatgtgccactcgagccatgatgacttagaaatcaagaccaaaattcgaatgtcaggcatcaaaggcctgcaaggggtggtgaggaagacggtgaatgatgaactgcaggccaatatctgggacccacagcacatggataagatcgttccatcactgcttttcaatctacagcatgtagaggaggcagagagccggtctccctcacccctccaagcacctgagaaggagaaagagagccccgcggagctggctgagaggtgtcttcgggagctgctgggccgggctgcctttggcaacatcaaaaacgccatcaagcctgttctcatccatctggataaccattctctttgggaacccaaggtgtttgccatccgttgctttaaaatcatcatgtactcaattcagccgcagcactcacacctggtcatccagcagctcctgggccacctggacgccaacagccgcagcgctgcgacggtgcgcgcgggcatcgtggaagtcttgtcggaagccgcggtcatcgctgccaccggctctgtggggcccacagtactggagatgttcaacacgctgctgaggcagctgcggctcagcatcgactacgcgctgaccgggagctacgacggggcggtcagcctcggcaccaagatcatcaaggagcacgaggagcgcatgttccaggaggccgtcatcaagaccgtgggctcctttgccagcacgctgcccacctaccagcgctccgaggtgatcctcttcatcatgagcaaggtcccgcggccatccctgcaccaggcggtggacacaggcaggacgggggagaataggaaccgtctgacccagattatgctgctaaaatccctcctgcaggtatccacaggtttccagtgcaacaacatgatgtcagccctgcctagcaacttcctggaccgccttctctccaccgccctcatggaggatgcagaaattcgactctttgttctagagattctcatcagtttcattgatcgtcatggcaaccgccacaagttctctaccatcagtaccctcagtgacatctctgtcctgaagctgaaagtggacaagtgctctcgacaggacaccgtcttcatgaagaagcactcccagcagctctacagacacatctacctgagctgcaaggaggaaacaaacgtgcagaaacactacgaggcgctctatggcttgctggccctcatcagcatcgagctggctaacgaggaggtggtggtggacctcatccgtctggtgctggctgttcaggacgtggcccaagtcaatgaggagaacttgcctgtctacaaccgctgtgccctctatgctctgggcgcagcctacctgaacctcatcagtcagctcacaacagtgcctgccttctgccagcacatccatgaggtgatagagaccaggaagaaagaggctccatacatgctccccgaggatgtgtttgtggagaggcccaggctgtctcagaatcttgatggggtggtcattgagctcctcttccgccagagcaagatcagtgaagtcctgggaggcagtggctacaactcggaccggctctgcctgccctacattcctcagctgacagatgaggatcgtttatccaagaggaggagcattggagagaccatctccctgcaggtggaggtagaatcgaggaacagtccggagaaggaggaggtgagtgtccgtgccaccgtcctggggcagccccacctcctgtag

SEQ ID NO: 43810 - DNA, 2574 bp, Homo Sapiens
ggttctctactcacatcttttaatcttgaagactagaaaatataactggatctaccacttgtttggaaaatttctctaccaagcaataaattacccgctgtgcttttgttgtagtgtagaagtttttgagttctccaaatctaaacaagattttgtcccattttcccatgaagctacattgttgcttattcactttagtggcaagtattattgtgccagctgcttttgttttggaagatgtggacttcgaccaaatggtttcactggaagcaaatcgtagttcttacaatgcatcctttccctcaagctttgaactctcagcaagttcccactcggatgatgatgtcatcatagccaaagagggaactagcgtttcaattgagtgtcttctcacagccagtcactatgaagatgtccattggcacaattcaaaaggacagcaactggatggcagaagcagaggtggaaagtggttggtttctgataacttcctaaacatcaccaatgtagcttttgatgaccgtgggctctatacctgtttcgtcacctctccaattcgtgcctcctactctgtcaccctacgtgttatcttcacctcgggagacatgagtgtctattacatgattgtttgcctgattgcctttacaatcacactcatcttgaatgtcacacggctgtgcatgatgagcagccatcttcgcaagactgagaaggctatcaatgagttctttagaactgaaggggctgagaaacttcagaaggcctttgagattgcaaaacgtatccccatcattacctcagccaaaactctggagctcgccaaagtcacacaatttaagaccatggagtttgctcgttatattgaagaactggcaagatgtccctcttccacctcttattctaaactgtcgagcctttgttgaggagatgtttgaggctgtgcgagtggacgaccctgatgacctgggtgaaagaattaaagagagacctgccttgaatgctcaaggtggcatctatgtcattaacccagagatgggacggagtaattcaccaggaggagattcagatgatggctctctgaatgaacaaggccaggaaatagcagttcaggtttctgtccaccttcagtcagaaaccaaaagtattgatacagagtctcaaggcagcagtcatttcagtccacctgatgatataggatctgcagaatctaactgtaactacaaagatggggcatatgaaaactgtcagctgtaacctacaatgctgtaacccagtacctacaaaatcagctcgctctcagaaaaggaacctgtttcttagaagaagtaacatttttgccaaaagatgactggggttttccgtttgttaatattaagcacatcagaacgtgaattgccaaagtcttcattagaaggcagcatttttcctctctgatacttttcagtcattttccttagagctttattaaattatgcatgctaagatttaaaggagccccagataaacatgatggggaaaagcactgaactaagagtcccatggtttctcttctggtcacagttcttccattggttggatctgatacttatcttgggacttcagtttttccgtcaataagatgagggattaggtgagatctgaagttgtttctagctctatagcttcttaacccatcacctttaaattaccagaatcttcactcatctctaagtaaacctttcccgggacttttactcgcttcttttggaaaggattaagctgagatctaaatttccacaccaatgtcataatgcacagaggtttttgaaaaacatctgagtgtttttcagatgttttgccatgtggagcatataatgatatgtgcaagattgaatcttttcaatgtagcacatgtctgtagggttatacagatgtcagagagctaactgctctgtaaactactttccatgagtaaattggtccttggtgggggtgtatcatatttttaacttactgagatatcattttagttcattgaggttggcagggattgcctaactgatcttccaaagtgagcagtttatttctaaggtataacgtctttgatgcttttagaataagaacagtgtcaaatcatctgtcttctggaaaatcatggattttcatatttctgttaacagaatttctcaggctttccctttttaaaagtattggactctacaaataggttctatatttgggatctcatcctaggagaaaacccaaaactggattcctcttaagacctctgtcaaccctcctgccctttgtggtcttaggtatggtgctataggttgcatgcgtctttatcttgtttgtttggttaatattttgttgttgaggtttttatttttgtttacttcagatacataattctgagctatggctgcttttgtagcctttccaagaagcactaacctgaaataagattagataattgtgagggtgtgttactatattaaaatacacacacaactgatctagacatcaagaggaagaaaaatgatggatgatgccacctgcttcaactgtatataataaacacttatgatgaca

SEQ ID NO: 43811 - DNA, 522 bp, Homo Sapiens
atgcttcactcctctatccacagcccccattgtccccttttctgggaggtcactggcctttcatgtctgtcatcttcatcactcccccatttcttaggacagaaggaacagggatttttgtctctagtttttatacatgggagatacagcctagagaaagtggatgatttctataaattacaaagtatgacagaaggcccagggcagagctcctgtggactgccttggagacaagggcccttggcatcctggcagcaagtactcacaggaaacttagtatgtgctttatgtggatggcgggtgggagagttgctgatggcaaatggccttttacttttcagtgttttgttgccaacccccacccaaccattaaaaagtggctgttgtgaccagggagcacacacacagacaaagacggaaagtatagctttctatggtaaggaggaggctggtctggaaatgaggggtagagtttacttagaagcaggtaagaaaaccgggcatggtggctcatgcctgtaa

SEQ ID NO: 43812 - DNA, 2131 bp, Homo Sapiens
ttcgcatgcggctgccgggccggaggtggtagcggcgccgggcgcgctccgcccgcccctcctccgggccgcactgaggctcgggcgcgcggggacatgtcggtggcgacgggcagcagcgagacggccggcggggccagcggcggcggcgcacgggttttcttccaaagcccccggggtggcgccggtggcagccccggctccagcagcggctcaggctcctcccgggaggactcggcgcccgtggccacggcggccgctgcagggcaggttcagcagcaacagcagcggcgacaccagcagggaaaagtgacagtgaaatacgatcgtaaggagcttcggaagcggctggtgctggaggaatggatcgtggagcagctgggtcagctctacggctgcgaggaagaagaaatgccagaggtagaaattgacattgatgatcttcttgatgcagacagtgatgaagagagagcttcaaaattacaggaagctcttgtagactgctacaaaccaacagaggaatttatcaaagagctgctttctcggataagaggcatgaggaaactgagccctccgcagaagaagagtgtatgattctggaacagggtgaaactctcccagagacgaagaaagagtcctgggatttgtacttcatgaagacttttgtgaaagaataggtgtccttatgaacaacgtttttgtttttttttttttcttttttggtgtgaaggtgggggggtctattagacatttattcaagagcgttctttttttggttttaaaggtttttgttaatgtaatattttaatagcaaagatatcatgactctagccacagcctaaccaaggattatcaaaggaggtggacactcaaggaagggccacgccaggctgcgtttcctgcaaggactcagatgttcagtaccttatgatacagggaagatagttttcttacaagtagtttggtaatattttttttcttaagttgtacatttgactcagctgtcaaatttctcacacttgtatatatctacacacaactaagttaaaatgttgatgtgagttttatttcacatggatggaataaacttgtggttgtcctttaactggaggtcccagcacatgtgttttcaagaggccactaggcattcttcactgagtgctgctgacttcaacgttcactttatgcaccaaagtgaaagaattcagtgtatccgttattttaatgcactacaccacagaaatgttaagttggtcaagggcttaatttatggaatttctattatttcattggttgggatgctttgccaggtcatgtgcttattgtctcattttgtagtcttttaaagttgtatgaacccttaatttgaagaactaacttgatttctagagaaatatccacactatctcagtggtattttgcattggaaaaaggaagcactgtgtagcagtgaattgtctgctttccaccgagtactgtgtttattctctctccaggaaagcagatcaaaagaaagttagcagatcgagtgtcttcttccttagaaataggttctggtagcttctgtgcctgggtagtatcagaccagtgggagtaaaccgagtgttaagtgtcaaggtgagaaagcctcacattctctcaagacagttgctctaggagctgagttgctggtttggaagtgtggagattgcatttctggcttctctcaatggcttgtgttgaggactctgggtgctcctggccctaattgtgcaccctgatccccgtgcttggagctaggcctggtggcgtgctctagccctctcagttaccagctctttggagaaggatcaaaattcagatggaatgtgggatgggtaataggtgagagtagaaacccttccctccaggaggcccccgctgactcccacagaaacccacctaccataagatgtcttcaggtggccttgtccaaggatgggggtcaggcattttatatcaagggtgctctgaacatattttattttttaaaaaaactatgtttgtgaattttgcgtatactggcaagcttttgaaaatgtatttaattttgtattgtttaccaatgatttatttacaagatatttactcaaataaatggagctgcttacaa

SEQ ID NO: 43813 - DNA, 1819 bp, Homo Sapiens
caggaactcttaacattcagggatgtggccatagaattctctccagaagagtggaaatgcctagaccctgcccaacagaatttatatagagatgtgatgttggagaactacagaaacctcgtctccctggctgtgtattcttattacaaccaaggcattttaccagagcaaggcatacaagattcattcaaaaaagcaacactgggaagatatgggagctgtggccttgaaaatatatgcttatggaaaaactgggaaagtataggtgaaggtgaaggacaaaaggaatgttataatctatgtagccaatatttgacaactagtcataacaaacatttaactgtgaaaggagacaaagaatatagaatatttcagaagaagcctcagtttctgtcagctgctcctacagaaccatgtattcctatgaataaatatcaacataaatttttgaaatctgtcttttgtaataaaaatcagataaattttaaccatgactcaaatattagtaaacatcatagtactcattttctagaaaactattacaattgtaatgaatgtgaaaaagtattttaccaatcctcaaagcttattttccctgaaaatatccatattcaaaaaaagccttacaactctaatgaatgtggtgaaacttctgacccattctcaaagcttactcaacatcaaagaatttatattggagagagctcacaaagatgtaataaaaaatgtataatagtctttagtcaatcacatctaaagggacataagataattaacactggagaaaaatcagtgaaatataaagaacgtggcaaagcttttaccaggggcttacatcttggacatcagaaaattcatactggagagaaaccttacaaatgtaaaaaatgtgacaaagcctttaacaagagttcacaccttgctcaacatcagagaatccatactggagagaagcctttcaagtgtaaggaatgtggcaaagcttttaacagaggctcataccttactcaacatcagagaatccatactggagagagagctttcaaatgtgaagaatgtggcaaagcctttaacagggggtcataccttactcaacaccagagaatccataccggagagaaacctttcagatgtaaggaatgtggcaaagcctttaatagaagctcatacgttactcagcatcagagaatgcatactggagagaaacctttcaagtgtaaggaatgtggcaaagcttttaacagagcttcacaccttactcaacatcagagaatccatactggagagaaacacttcaaatgtaaagaatgtggcaaagcctttaacaggggctcacaccttactcgacatcaaagaatccatactggagagaagtctttcaaatgtgaagaatgtggcaaagcttttatctggggctcacaccttactcaacatcagagagtccatactggagagaaattcttcaaatgtaaagaatgtggcaaagcttttaccaggagctcacaccttactcaacatcagagaattcatactggagagaaacctttcaaatgtaaagaatgtggcaaagcttttaacagacgctcaacccttactcaacatcaaataattcataccaggtagaaaccctgcaagtgtaaagaatgtgctaaaaccctaaactggtgctcacaccttactcaacattagaaaatcaatactggatagaaatcccatatgtgtaatgatttttgaaacatcaaaatgaagattaaataaaaattagaagtgtcactttagaaagaactaaggtgctagcacttccgtaaattactctgaa

SEQ ID NO: 43814 - DNA, 844 bp, Homo Sapiens
gataaatccccgtaggccgcgggcagcgagatgttgcgttccggtgtgggtgtgggtgtgcctccgacggcgtctcggtgccagtgtcgaggttctttctgcttagctacccggagccgactacggaggaggacacctgagtttacgtctcttccatctgctgctcacctcagctgcctgggtccccgacgagagccaggtgacacttaactccgccatctgcgttttgagcactgttctcataatggagtttcctgatttggggaagcattgttcagaaaagacttgcaagcagctagattttcttccagtaaaatgtgatgcatgtaaacaagatttctgtaaagatcattttccatacgctgcacataagtgtccgtttgcattccagaaggatgttcacgtcccagtatgcccactctgtaatacccccatcccagtaaaaaagggccagataccagacgtggtggttggtgatcacattgacagagactgtgactctcaccctgggaagaagaaagagaagatttttacataccgttgctcaaaagagggctgcaagaagaaagagatgctgcagatggtatgtgcccaatgtcacggcaacttctgtatccagcacagacaccctttggaccacagctgcagacacgggagtcgccccaccatcaaagctgggtgagaagagactccgctgcgatggctcggagcacgcagtagcatgcgtggaagcagcttacactctagtgggaagtggagccccattgagcaccatcccacactggctgctgatcttgtttgttgagggagatgggactataataaaattgaatgctgaagttga

SEQ ID NO: 43815 - DNA, 2040 bp, Homo Sapiens
agttcctttacagaatcaaccctggggtggctttaggactgggctctttggagctcatccttggacccacagtggagcgctggtctgtgctaacatcttcagataccaatcaatgggcatttggctccttgcttccactgacctcttgagtactttcaacgatcggtgtcaagggtgcccctgctgctgtttctagagcatctctgcaacccacggtggcctctcctctttctgcgggccatggacagcacagtcccttcagccctggagctgccccagcggctggcactgaacccaagggagagcccaaggagtccggaagaggaggagccccacctgctgagcagcttggctgcagtccagaccctggccaatgtcatccggccttgctatggcccccatggccggcagaagttcctggtgaccatgaaaggagaaacagtgtgcacggggtgtgccactgccatcctcagggccctggagctggagcacccagcggcatggctcctccgggaagcagcccaaacccaagcagagaatagtggggatggcacagccttcgtggttctgctgacggaagccttgctggaacaggcagagcagctgctgaagttcggcctgcctcgcccgcagctccgggaggcctacgccacagccactgcagaggtcctggccacactgccctccctggccatccaatctctggggcctttggaagatccgtcctgggccctccattctgtgatgaatacccacaccctgccccccatgaaccacttgaccaagctggtggcccacgcctgctgggctatcaaggagctagacggcagcttcaagcctgagcgtgttggggtgtgcacgctgcacggggggacactggaggattcctgcctcctccaggggttagcaatatctgggaagctctgtgggcaaatggccgcagtgttaagtggtgccagggtggctctctttgcttgcccctttggtcctgcccatccaaatgcaccagcaacggcctgtctttctagtcctgctgatctagctcaatttagtaaaggaagtgaccaattactagaaaagcaagtaggccagctggcagccgcgggaattaatgtggcagtggtgttgggggaggtcgacgaggagaccctcacactggcggacaagtatggcatcgtggtgattcaggctaggtctcggatggagatcatttacctgagtgaggtgttggacacaccgctgctgcctcgtctgctccctccccagaggccaggcaagtgccagagggtttacaggcaggagctgggagatggtttggctgtggtatttgaatgggaatgtacaggcacacctgccctcaccgtggttctcaggggagccaccacccaggggctgcggagtgcagagcaggccgtctaccacagcattgatgcctatttccagccatgtcaagatcccagactgatcccaggagctggggccacagaaatggctttggcaaaaatgctctctgataaaggaagcagattggaagggcccaatgggcctgcattcctagcatttgcccgggccctgaagtatcttcctaaaaccttggcagagaatgcaggcttagctgtctcagacgtggttgcagaaatgagtggagtgcaccaaggtgggaacctcctaatgggtgtgggagctgaagggataataaatgtggcccaggaaggggtgtgggacaccctaatagtcaaagcccaaggatttcgagcagtggctgaggtggtgctacagctcgtgactgtagatgaaatcgtagtggccaagaaaagtcccacacatcagcagatctggaatcctgactctaagaagacaaagaaacgcccacctcctgtggaaaaaaaaaaaatccttggaatgaataactagtgataccctcaataaaacagggattgccaagaagggaacaatcaccccaaaaatgaatgtttgcctttattccatgtttggtacttgattcagtttctttaaataaaaacatgaaggaacataaaa

SEQ ID NO: 43816 - DNA, 2372 bp, Homo Sapiens
ctgagatctgtggaggtttttctctgcaaatgcaggaagaaatcaggtggatggatgcataattatggccctgctcctggtctctttgctggcattcctgagcttgggctcaggatgtcatcatcggatctgtcactgctctaacagggtttttctctgccaagagagcaaggtgacagagattccttctgacctcccgaggaatgccattgaactgaggtttgtcctcaccaagcttcgagtcatccaaaaaggtgcattttcaggatttggggacctggagaaaatagagatctctcagaatgatgtcttggaggtgatagaggcagatgtgttctccaaccttcccaaattacatgaaattagaattgaaaaggccaacaacctgctctacatcaaccctgaggccttccagaaccttcccaaccttcaatatctgttaatatccaacacaggtattaagcaccttccagatgttcacaagattcattctctccaaaaagttttacttgacattcaagataacataaacatccacacaattgaaagaaattctttcgtggggctgagctttgaaagtgtgattctatggctgaataagaatgggattcaagaaatacacaactgtgcattcaatggaacccaactagatgagctgaatctaagcgataataataatttagaagaattgcctaatgatgttttccacggagcctctggaccagtcattctagatatttcaagaacaaggatccattccctgcctagctatggcttagaaaatcttaagaagctgagggccaggtcgacttacaacttaaaaaagctgcctactctggaaaagcttgtcgccctcatggaagccagcctcacctatcccagccattgctgtgcctttgcaaactggagacggcaaatctctgagcttcatccaatttgcaacaaatctattttaaggcaagaagttgattatatgactcaggctaggggtcagagatcctctctggcagaagacaatgagtccagctacagcagaggatttgacatgacgtacactgagtttgactatgacttatgcaatgaagtggttgacgtgacctgctcccctaagccagatgcattcaacccatgtgaagatatcatggggtacaacatcctcagagtcctgatatggtttatcagcatcctggccatcactgggaacatcatagtgctagtgatcctaactaccagccaatataaactcacagtccccaggttccttatgtgcaacctggcctttgctgatctctgcattggaatctacctgctgctcattgcatcagttgatatccataccaagagccaatatcacaactatgccattgactggcaaactggggcaggctgtgatgctgctggctttttcactgtctttgccagtgagctgtcagtctacactctgacagctatcaccttggaaagatggcataccatcacgcatgccatgcagctggactgcaaggtgcagctccgccatgctgccagtgtcatggtgatgggctggatttttgcttttgcagctgccctctttcccatctttggcatcagcagctacatgaaggtgagcatctgcctgcccatggatattgacagccctttgtcacagctgtatgtcatgtccctccttgtgctcaatgtcctggcctttgtggtcatctgtggctgctatatccacatctacctcacagtgcggaaccccaacatcgtgtcctcctctagtgacaccaggatcgccaagcgcatggccatgctcatcttcactgacttcctctgcatggcacccatttctttctttgccatttctgcctccctcaaggtgcccctcatcactgtgtccaaagcaaagattctgctggttctgtttcaccccatcaactcctgtgccaaccccttcctctatgccatctttaccaaaaactttcgcagagatttcttcattctgctgagcaagtgtggctgctatgaaatgcaagcccaaatttataggacagaaacttcatccactgtccacaacacccatccaaggaatggccactgctcttcagctcccagagtcaccagtggttccacttacatacttgtccctctaagtcatttagcccaaaactaaaacacaatgtgaaaatgtatctgagtattgaatgataattcagtcttgcctttgaagggtatgtcacaaagagctgacagtgcttctacacatttcatctaatttaatattcctggcatacctttaaggtaaattggtcaggaactattaattccatgtgatacattaggaagctgaattattagtaacaacaataataattaaagaatgcaatactgta

SEQ ID NO: 43817 - DNA, 12277 bp, Homo Sapiens
caggataaatcggccagcaaagaaaaatccaagaaaccagtaagatttctaccacagctgtctatggagaaattagccagcaaagaaaagttcaaggcaccagcaagagctttaccacagctgtctatggtgagtacaaagccccactggcagcaggcagctccatcattccatttgagtgtaaagcaggatgatgagagtccagaaccatttagtgttaaaaatgaacagtcccatgctgaatacatggaacgttttggaaaaaagggcaaattaccccaccaagttgatgatagttatgttggaccatctacttccaaatcaaagggcaaatctccacataaagaacgagaaaactttagaagtactcttgttaatgtcattatgcaacaagatgctgacttagactcagctgtccctgatggaagcacaattccaaaaccgaccgcttctgctatagagaaagacatcttgagatattactattatattcaccatggaattgatacagaccatgtagccccaatggaagattcttggctagaacacgtactggatttagttccacaacatctgaaagtcttcactgacagcatagttacattatctgatgaaatgagagaggattatcttcttagtgtaaggaaatccatagttgattttgttttaaaagatcctcgagagaaaggagatgataagaagacagatgaacttccagcccatcgtgctgaaatggaaattctgccaaaaccttggaggaaatcttttttagctgcaagcagttatattagggatcacttgaatgcaatgaaccccacaatgctggctgtactagatttgtggcacactaattttaaaaaattacgtttagttgatatcaaagaatttcataattgccaggatgcattagagctgtcaagttttcagaacattatcatgagacacatggactctgccaaagagactctacttaaaatgtggtttccagaagtgcagaatatttattaccaaggtaataaaaaaaagcaattgccaactggtgacagcagtgccaaattggaatcttttttcaactgtgctgctgcacttatgactttacagctgcaggacctcactttagtctccatgcaagatttcacggacttaattgcacaacccccagattctgttagagcttttgaacatccaggtttcatcatgaggctgattcttgataatgacaccattaagtttgaacctgagttgagtgactatatagatatctttctaaatgtttatgacgtcatgattaaagctgtcagttttgtgccaagagttgagacaaaattgtattccaagtgggaaagtaagtctaaaccaacaaccttgaagcccataattctgaatgaaattgtagatgctcacaaagaaaagatcaaggaagttattatgaaagagagtgtggcacctactgagcacctcagactctatgacaagtatgactttttaattaccagaaaagctgagcgagatgttgataacttcctcgcagaaaatcatagttatgaaaaaataatagatgaaatttgcaaataccagaaactaatagaggaaatacagtacacatccataaagactattcgtttaggaatgtttgaaatgcactgtgaggaattaatcagagctttggtgaagcgagcagatattatttgtgggaaacttctagctaaaatgttcagagatcatcaggaagtaaatacaagattatgcgatgaatttgagaggatagctgaaaaagctcttagcactcctccaaatacagcagaactaatggaaatgaaggcttacattcagaaagtggaggtaactgatatgattgaactagaacagagattagtggattccaaaaactgcctcgccttcctcatcgagtatgtcaacttttctccagcagacatgaggctaaataatagtgttttccagtggtatggaaggatgggagaaatttttgaagaacacaggaaaatcattaaagagaaaatagaacaatatcaagaaggtctgaagttacggtgtgaacggtttgtggaggaattggagagttatgctaagcaatcagaagaattttattcatttggagatcttcaggatgttcagcggtacctaaaaaaggctcaaatactgaatggaaagttggatttagctgcagataagattgagcagtttaatgctgaagaggaagcatttggttggctaccatctgtatatcctcaacgtaaaaaaatccaagatggcttgaacccttatcttcgtctttatgaaactgctgtcgaatttagcagcaactatagagcatggacagaagggccatatcataaagtgaatccagaccaagtagaagcagatattggaaattactggagaggattatataaactggagaaaacctttcatgattctccatatgcattggcaatgacaaaaaaagtaagatcaaaggtggaagatttcaagcagcacattcctctcattcaagtgatctgtaatcctggtttgcgccccaggcactgggaggccatgtctgccattgttggttaccctttgcagccatcagatgactccacagtctcctcttttttagacatgaatctggaaccatatatagaccgatttgaaggtattagtgaagcagctagcaaagaatattctcttgaaaaggcgatggagaagatgattactgagtgggatgcagtggaatttgtcatccattcttatagagaaactgggacatttattttggcatcagttgatgaaattcagatgttgttggatgaccatattattaaaacacaaactatgcgaggatctcctttcattaagccttatgaaaaacaaatgagagaatgggagggcaagctcctactgcttcaggagattctggatgaatggctcaaagtccaagccacgtggctgtatctggagcccattttcagctctccagacattatgtctcaaatgcctgaggaaggcagacgatttacagctgtggataagacatggagagatataatgagaagtgtcatgcaggataaacatgttctgacagttgtaaccattgacagaatgctggaaaggctgaaaaaatctaatgaacttttggagctcattcttaaaggacttaatgaatatttggaaaagaaacgcctctttttccccagattcttttttttgtccaatgatgaacttcttgagatactatctgagactaaagatcccactagggtgcaacctcacttgaagaaatgttttgaaggaatcgcaaaggtagaatttacggaaactttagacattactcacatgaagagcagcgaaggagaggttgtagaactcatagagattatttcaacagccaaagccagaggtcaagtggagaagtggttggttgaattagagagagttatgattaactccatccacaaggtaactggagatgcaacttttgcctatacaaaatatgaacgaattaactgggtaagggattggcctggacagactgttctctgtgtatcccaaatcttttggacaaaagaagtacaaacagctattccaatggggataaaggctcttgagcaatacttgaaaacatgtaacagacaaattgatgatattgtcactttggtgcgtggcaaattgtccatgcagaatcgcgtaactctgggagcacttgtggtactggatgtccatgctagagatgtcctctcatcacttgtaaaaaaaaatattagcgatgactctgactttgaatggttaagtcagcttaggtactactggcaagaaaatcatttagaaacaaaaatgatcaatgctggtttgcgatatggatatgaatatctgggtaattcccctaggctggttattacaccactcacggatagatgttacagaaccttatttggagcccttcatttgcaccttggaggagcacctgagggtccagctggcactgggaagactgaaactaccaaggatttggcaaaagctgtagccaaacaatgtgttgttttcaactgctctgatgggttggattatttggctttgggaaaattctttaagggactgttatcttgtggagcctgggcttgctttgatgagtttaacagaattgatttggaagtactctctgtggttgctcaacaaatccttactatccaaagaggtattaatgcaggtgctgatatactgatgtttgaaggaactgaactaaaacttgaccccacatgtgctgtctttataacaatgaaccctgggtatgctgggcgatcagaactgccagataacctgaaggctctctttcggacagtagcaatgatggtacctgactatgccatgattgctgaaatagtcctatactcctgtgggtttgtcactgctcgaccactgtctgtaaaaattgtggctacgtatcgcttgtgttcagagcagctgtcatctcaacatcactacgactatggaatgagagccgtgaagtcagttcttactgctgctgggaatctgaagctgaaatatccaaatgaaaatgaagaaattttgctgcttagatctatcattgatgtaaatctgccaaaatttttatcccatgatttaccactctttgagggaattacttcggatttgtttcctggggtaaaattaccaaaaccagattacaatgatttgctggcagctatcaaagacaattgtgcctccatgaatttgcaaatgactgcattcttttccgagaagattcttcaagtatatgaaatgatgattgtgcgtcatggttttatgattgttggagaaccatttggaggaaaaactagtgcatatcgtgtcttagctggagcactaaatgatatatgtgaaaaggcaaggctaatggaagaaaacaaagttcaaataactgttttaaatcctaagtctgtcaccatgggccaactgtacggacagtttgattcagtgtcccatgaatggtctgatggggtccttgctgtcagttttagagcatttgcctcttcagtgactccagataggaaatggttaatttttgatggcccagtagatgcagtgtggattgagaatatgaacactgtgctggatgacaacaagaagctatgtctgatgagtggggagattattcagatgtcaccacaaatgaatctaatttttgagccaatggatttagaagttgcttcccctgccactgtttccagatgtggcatgatttacatggagcctcacatgttaggctggagaccactgatgttgtcctgggtgaatctgttacctgcgtcagtcagtgttattcaaaaggaattcataatgggcttatttgacagaatggtccctgtttcggttgaatttattagaaagcatacaaaggaattatctcctacttccgatacaaacttggtccggtccttaatgaatctaatagactgttttatggatgattttgctgatgaagtcaaactaaaggagagaaatgatcgagaaacttactctttgcttgagggcatttttctgttttcattgatctggtccgttggtgcttcttgtacagatgatgatcgattgaaatttaataagattcttcgagaactaatggaaagtccaatttcagatcgaactcgaaatacgtttaaattacagagtggtactgagcaaacatcctcaaaggcactaactgtcccatttcctgaaaaaggaacaatttatgattatcaatttgtcactgagggaataggaaaatgggaaccatggataaagaaattgaaagaagctcctccaattcctaaagatgtaatgtttaatgaaatcattgtgccaactctggacacaattcgatactctgcattaatggaattgctgaccacccatcaaaagccttcaatatttgtaggaccaacaggaactgggaaaagtgtttacattacgaattttcttttaaatcaactaaataaggaaatctacaaacctctgctaattaacttctcagcacaaactacagcagctcaaactcagaatattgtcatgtcaaaattggacaagagaagaaagggagtttttggtcctcctttgggcaagagaatggttgtctttgtagatgatgtcaatatgcctgctcgggaggtatatggggctcaacctcccattgagttacttagacagtggttagaccactggaactggtatgatctaaaagattgttccatgattaaactagtggacattcagatcatgtgtgctatgggacctccaggtggtggtcgaaatccagtaactcctcgatacatgcgacatttcaatattataacaatcaatgagtttagtgataaatccatgtatacaatcttctctagaatcttaacttggcatttagaaatctgttataaatttccagatgaatttctagatttgaccacacaaatcgtaaatggcacaatgactctgtataaagaagcaatgaagaatctcttgcctactccagctaaatctcactacttgttcaacctccgtgatttctcccgtgtcattcaaggtgtttgtttgtcaagaccagaaacaacagaaaccacagaagtgattaaacgtctttgggttcatgaggtccttcgagtgtattatgaccgccttctggacaatacagacagaagctggctcatcaactacattcaagaaattttgagaaactacatgtatgaagattttcatgagctttttcagcgtttggattttgataatgatggcatggtggaagcagatgacttacgcagcttaatgttttgtgatttccatgatcccaagagggaggataccaactacagagaaatcgcagatgtggataatcttcgaatgatagtagaaattcacctagaagaatacaacaatataagcaaaaaacccatgaaccttgtcttgtttcgatttgccatagagcacatcagcagaatttccaggatcctgaagcagcctcgcagccatgctctcctagtaggggttggagggagtggaaggcagtctgtcaccagattagctgcccacatggctgattattcagttttccaagttgaaatctctaaggggtatgatactactgaatggcatgaagatttaaaagtgatcttaaggaaatgtgcggaaggtgagatgcagggtgtcttcctgtttacagatactcaaattaaagaagagtcttttctggaagatgtcagtaatctgctaaatgctggggagattccaaatctctttgcattagatgagaagcaagagatatgtgataagatgcgtcagttagatcgccagcgggataaaaccaagcaaacagatggcagccccatagcccttttcaacatgtttattgatcattgccgcagccaactgcatgtggtccttgccatgagtcccattggagatgcatttcggaatcgtcttagaaagttccctgctcttgttaactgctgtaccattgactggtttcagtcatggcctgaagatgcactccaggcagttgcctcacgattcttggaagaaattgaaatgtcagaggaaatacgagatggctgtatcgacatgtgtaaaagcttccacacttctactatagatttatccaaatctttctttgttgaacttcaaagatacaattatgtgactcctacctcttacctcgaattaatctccaccttcaaactgttgttagaaaagaaaagaagtgaagtaatgaaaatgaaaaagagatatgaagtgggtttggagaaactggattctgcttcatctcaagtagccacaatgcagatggagttggaggcactacatcctcaattaaaagttgctagcaaagaggttgatgaaatgatgataatgattgagaaagagtctgtagaagttgccaaaactgaaaaaatagtgaaagctgatgaaacaatagcgaatgaacaagctatggcttccaaagccatcaaagatgagtgcgatgctgacctggcaggtgccttgccaatattagagtcagcactggccgcccttgatactcttactgcacaggatattacagtggtaaaatccatgaagagtcctcctgctggtgtcaagcttgttatggaagctatatgcatcttgaaaggaatcaaagctgacaaaatccctgacccaacaggttcagggaaaaaaattgaggatttctggggcccagctaagagacttcttggtgacatgaggtttctgcagtcacttcatgaatatgacaaggacaatattcctccagcttatatgaatatcataagaaaaaattatattccaaatccagattttgtaccagaaaaaatcagaaatgcttctacagcggccgaaggtctgtgcaaatgggtcatagcaatggattcatatgataaagtggcaaaaatagtagctcccaaaaagataaaactggctgcagctgaaggggagcttaaaattgccatggatggtcttagaaagaagcaggcagcccttaaggaagttcaggacaagctggccaggcttcaagacacacttgaattaaataaacaaaagaaggctgacctggaaaaccaggttgacctttgcagcaaaaaactagaacgagctgaacagttgattggaggccttggaggtgagaaaactcgatggagccacacagctctggagctaggtcagctgtacatcaacttgactggggatatcctcatttcctccggagtggttgcttacctcggagccttcacatccacctatagacagaatcaaactaaagagtggacaactttgtgcaaaggaagagatatcccctgctcagatgattgctctcttatgggtaccctgggagaagctgtgacaattcgaacttggaatattgctggattaccttctgactcattttccattgataatgggataatcataatgaatgcaagaaggtggcctctgatgatagatcctcaaagtcaggctaataaatggatcaagaacatggaaaaagccaatagtctttatgtgattaaacttagtgaacctgactatgtcaggactctggaaaattgcatccagtttggtactcctgtgttgctagaaaatgttggcgaagaactagatcctattttggaacctcttctactaaaacaaacctttaagcagggtgggagtacatgtatccggcttggggactccacaattgaatatgcacctgacttccgcttctatattactaccaagttaagaaatcctcattatcttcctgaaacatcagtaacattattaaacttcatgataacccctgagggaatgcaagatcagcttctgggaattgtggtggcacaagaaaggccagaccttgaagaagaaaagcaagccttgatattacaaggagctgaaaataaaaggcagttaaaagaaatagaagacaagattttagaagttctttcatcttcggaaggcaatatattagaagatgaaactgctattaagatattatcttcctccaaggccttggctaatgagatttctcagaagcaggaagtagccgaagagacagagaaaaagattgacaccacccgcatgggctatcgtcctattgccatccattcttccatcctatttttttctcttgctgatttagccaacattgagcccatgtaccagtattcactgacctggtttattaaccttttcatcctgtctattgaaaattcagagaaatcagaaattttggcaaaaaggcttcagattctcaaggatcactttacttattcactgtatgttaatgtctgccggtcactctttgaaaaggataagctgctcttttccttttgtctaaccataaatctactgctgcatgagcgggcgattaataaagctgagtggagatttctgctaactggtggcattggactggataatccttatgccaacctttgtacatggcttcctcagaaatcctgggatgaaatatgtcgattagatgatttgcctgccttcaaaaccattcgtagagagtttatgcgcttaaaggatggatggaagaaagtatatgatagtttggaaccacaccatgaggttttccctgaagaatgggaagataaagcaaatgagtttcaaaggatgcttattattcgttgcttgaggccagacaaggttattccaatgttgcaggaatttataatcaacagattgggacgtgcattcattgaaccacccccctttgatttagccaaggcatttggagacagtaactgctgtgcaccactgattttcgtgctctctcctggagcagatcccatggctgcccttctaaaatttgctgatgaccagggatatgggggatcaaaacttagctctttatctcttggtcaaggccaagggcccattgctatgaagatgttagaaaaagctgtcaaggaaggaacatgggttgttcttcagaattgtcaccttgccacctcttggatgccaacccttgagaaagtctgtgaggagttaagcccagagtcaacacatccagatttccgaatgtggctaacgagttacccatctccaaatttccctgtgtcagtactgcagaatggagtgaaaatgaccaatgaagcaccaaaaggtttacgggctaatatcattcgatcatacctcatggacccgatctctgatccggagttctttggcagctgcaaaaagcctgaggaattcaagaaattgctttatggcctgtgtttctttcatgctttggtacaagaaagacggaaatttggacccctagggtggaatattccttatgagttcaatgagacagatctgagaatcagcgtacagcagctccacatgttcctgaaccagtatgaggaactgccgtatgaggctctgcggtacatgactggcgaatgcaattacggaggcagagtgaccgatgactgggaccggcgcacgctgcgcagcattctaaacaaattcttcaatcccgaattagttgaaaattcagactataagttcgactcaagtggcatctattttgttcctccttctggtgatcacaaaagctacatcgaatacacaaagactctgccactgaccccagcaccagaaatctttgggatgaatgccaatgcagatatcactaaggatcagtcagaaactcagctgctatttgataacattcttcttacacagtctcgttcagcaggtgctggtgcaaaatcatcagatgaagtagtgaatgaggtcgctagtgacatcttgggcaaacttccaaacaacttcgacatcgaggctgccatgaggaggtacccaacaacttatactcagagcatgaacactgtacttgtccaagagatgggacggttcaataagttactgaagaccataagagattcgtgcgtaaatattcaaaaagcaatcaaggggcttgcagtcatgtctacagatcttgaagaagtggttagcagcattttgaatgtcaaaattccagaaatgtggatgggtaaatcctacccaagccttaaaccacttggcagctatgtgaatgacttccttgcaagactaaaattcttgcagcaatggtatgaggttggtcctcctccagtcttctggctttctggcttcttcttcacacaagccttcctgaccggtgcccagcagaactacgccaggaaatacacaattcctattgatcttcttgggtttgactatgaagtgatggaagacaaagaatacaagcatcctcctgaggatggtgttttcattcacggattatttctggatggagcttcctggaatagaaagatcaagaaacttgcagaatcgcatcccaaaattctttatgatacagtgcctgtgatgtggctaaagccctgtaagagggcagatataccaaaacggccaagttatgttgctccattgtataagacaagtgagcggagaggagtattatccaccactggccattccacgaattttgtgattgccatgactcttccctctgaccaacccaaggaacactggattggacgaggtgtagcactgttatgtcaacttaattcataaccagaagacatcatttccttgttcctatttcttgttggctggctgagtagagaaagcatattttactacttaaacctttttttttgtttgtttaaatacatttgactaaagttataattatgaatttacttatgagcaaatgcagctaaacttaatatgactcatacttaaatgtaaggaaatgttctgaaataaagactaaagaaaacacactggc

SEQ ID NO: 43818 - DNA, 633 bp, Homo Sapiens
gaggctgaggtcggagtcccgattttctcctgctgctgtggcccggacatggcgactcccggccctgtgattccggaggtcccctttgaaccatcgaagcctccagtcattgaggggctgagccccactgtttacaggaatccagagagtttcaaggaaaagttcgttcgcaagacccgcgagaacccggtggtacccataggttgcctggccacggcggccgccctcacctacggcctctactccttccaccggggcaacagccagcgctctcagctcatgatgcgcacccggatcgccgcccagggtttcacggtcgcagccatcttgctgggtctggctgtcactgctatgaagtctcgaccctaagcccagggtctggccttgaaagctccgcagaaatgattccaaaacccagggagcaaccactggccctaccgtgggacttactccctcctctcctttgagaggcccatgtgtcgctggggaggaagtgaccctttgtgtaactgtaaccgaaagttttttcaaaaatcctagatgctgttgtttgaatgttacatacttctatttgtgccacatctcccctccactcccctgcttaataaactctaaaaatccacttgtatttaa

SEQ ID NO: 43819 - DNA, 3217 bp, Homo Sapiens
aaagattgatctctgggctggtgaacataatctctgtcccagtcagaaaaggagagaggaaattagcagagcgattggtggagaatgatatctgtcaaaagaaacacttggagagcactgagtttagtaataggtgactgccggaaaaaagggaactttgaatattgtcaagatcgtactgagaagcactccacaatgccagactcacctgtggatgtgaagacgcaatctaggctgactcctccaacaatgccacctcccccaactactcaaggagctccaagaaccagttcatttacaccgacaacgttaactaatggcacgagccattctcctacagccttgaatggcgccccctcaccacccaatggcttcagcaatgggccttcctcttcttcctcctcctctctggctaatcaacagctgcccccagcctgtggtgccaggcaactcagcaagctgaaaaggttccttactaccctgcagcagtttggcaatgacatttcacccgagataggagaaagagttcgcaccctcgttctgggactagtgaactccactttgacaattgaagaatttcattccaaactgcaagaagctactaacttcccactgagaccttttgtcatcccatttttgaaggccaacttgcccctgctgcagcgtgagctcctccactgcgcaagactggccaaacagaaccctgcccagtacctcgcccagcatgaacagctgcttctggatgccagcaccacctcacctgttgactcctcagagctgcttctcgatgtgaacgaaaacgggaagaggcgaactccagacagaaccaaagaaaatggctttgacagagagcctttgcactcagaacatccaagcaagcgaccatgcactattagcccaggccagcggtacagtccaaataacggcttatcctaccagcccaatggcctgcctcaccctaccccacctccacctcagcattaccgtttggatgatatggccattgcccaccactacagggactcctatcgacaccccagccacagggacctcagggacagaaacagacctatggggttgcatggcacacgtcaagaagaaatgattgatcacagactaacagacagagaatgggcagaagagtggaaacatcttgaccatctgttaaactgcataatggacatggtagaaaaaacaaggcgatctctcaccgtactaaggcggtgtcaagaagcagaccgggaagaattgaattactggatccggcggtacagtgacgccgaggacttaaaaaaaggtggcggcagtagcagcagccactctaggcagcagagtcccgtcaacccagacccagttgcactagacgcgcatcgggaattccttcacaggcctgcgtctggatacgtgccagaggagatctggaagaaagctgaggaggccgtcaatgaggtgaagcgccaggcgatgacggagctgcagaaggccgtgtctgaggcggagcggaaagcccacgacatgatcacaacagagagggccaagatggagcgcacggtcgccgaggccaaacggcaggcggcggaggacgcactggcagttatcaatcagcaggaggattcaagcgagagttgctggaattgtggccgtaaagcgagtgaaacctgcagtggctgtaacacagcccgatactgtggctcattttgccagcacaaagactgggagaagcaccatcacatctgtggacagaccctgcaggcccagcagcagggagacacacctgcagtcagctcctctgtcacgcccaacagcggggctgggagcccgatggacacaccaccagcagccactccgaggtcaaccaccccgggaaccccttccaccatagagacaacccctcgctagacgtgaactcagaactgtcggaggaaagacaacacaaccaacgcgaaaccaattcctcatcctcagatgctcaaagttgttttttttgtttgtttgtttattagatgaattatcctatttcagtacttcagcaagagagaacctaactgtatcttgaggtggtagtaaaacacagagggccagtaacgggtcgtaatgacttattgtggataacaaagatatcttttctttagagaactgaaaagagagcagagaatataacatgaaatgatagatttgacctcctccctgttattttcaagtagctgggattttaaactagatgacctcattaaccgatgctttaccaaacagcaaaccaagagattgctaattgctgttgaaagcaaaaatgctaatattaaaagtcacaatgttctttatatacaataatggaaaaaaaaaaaagaggaaaaccctcaagggcatgagcattggatacagcagtagacattttaacaagaagatgaatggcgtccgtgggttgctaactgaactttgaagacccgctacaaaacgcgcagatgtgcagcagattggaaggagacacagatgttcggtttttttcctgtttctgaaaagaaataataatatccaggtcaacagaatgaaaaatgaaagatgatttgcaatgggatgtatgaatacagcagcaagaaaaaaaaatgccataatacaaaaggctccatatatatatatatatatatatatatacacacacacacacgcacatatacacacacacacacacacacacacacacacacacacacacacacacacacacacaagtaagagactcagcctgcagttaattagcattctggcagttttgacatcagccagctgccctaaataacccttcaacgtttcttcacttttgcaaggttccacagagtaagacattgggtctattccagctcattcattttatattgaaaaaaataattttaaaaatggtggcttcagctccagcccctttccaaaatttttcaaccccaccctgtttggatttttaattaaaaactagtagttctcttggtgttaaaacacttctgtcctgtgaggtttcccaatggtgtttttcttgtaaatgtgttggacaaatgtgaagatgcattgtagtttaaccatatgcccacatttagtctctttattcctagttggtgagaaacctgtatctttctatgctgcttttatatctgtatgtattagtgatatttctctagtagttaaaaaaaaaaaaaggaaaaaaagactctttttggttgtcctcaag

SEQ ID NO: 43820 - DNA, 1247 bp, Homo Sapiens
ccccaggcgtgggaagatggaaccagaacaattcgaacgagcagagcaaaacagatcggaattgcagacttcaggtcgtggcagagaaaaccagctgagacagggcgccacttactagctctgaaagtctaggatattttgccactggaagaccagcagacaatgtcatgacaactcaagaggatacaacagggctgcatcaaaagacaagtctttggaccatgtcaagacctggagcgaagaaggtaatgaactcctacttcatagcaggctgtgggccagcagtttgctactacgctgtctcttggttaaggcaaggtttcagtatcaacctgacttcttttggaaggatcccttggcctcacgctggagtgggcacctgccctagcccacagagctggatttctccctttcttcaatcacacagggagcaccactatgcaaagacctcatcacattcacagccgtctccgcagagcctcgcactgtgcttggcatatagcaggtgctcaataaatatctgccaaatgactgaatgcatctcgctagcctcaggatgccaccaggccctgagggagccaggaagatcagaggaaagcttttggattcctgccacaccttacattagcaacatcttctccgagtcctgacagccagcctcctgggacaccattcaagccagctgaattccggtcaccgcttcaccttggaaaggcatccgcagccctcaccaagcggccccgtaattgacgtcacagcggggccaggagctgccctgttaatatttaatgtggccttcactgcgcaaaatgcagcctctaagagctggaggggccgtgcagagtctccatggggttgtgaggagggcacagaagggaaagggctttataaaccataaagcgcccaacagatgagcattctgccgacccatttcagtccctggcttaactcagaaagagccggggctgcacatgcctgcagtgggacaagaagactgctgaccaagcccgaacactaaatcaatgggggattaggggctcctgggtacattccattgagacagcgggagagcagagcactggtgccagcccaacctggactccactccaggtttgccccctgcacagctgtgtgactgggtcagcaagtgcactgctgagcctcagtcccccttatctgtgaaatgggaatgatgctttccttgtagcactgctgtgaagattcaatgaaacgagtgatgccgaaga

SEQ ID NO: 43821 - DNA, 1106 bp, Homo Sapiens
agggagtgagcggggcgcatctcccgctaggagttcctagtaaagtggcgggagccgcagctatggagccgcaggaggagagagaaacgcaggttgctgcgtggttaaaaaaaatatttggagatcatcctattccacagtatgaggtgaacccacggaccacagagattttacatcacctttcagaacgcaacagggtccgggacagggatgtctacctggtaatagaggacttgaagcagaaagcaagtgaatacgagtcagaagccaagtatcttcaagaccttctcatggagagtgtgaatttttcccccgccaatctctctagcactggttccaggtatctgaatgctttggttgacagtgcggtggcccttgaaacaaaggatacctcgctagctagttttatccctgcagtgaatgatttgacctctgatctctttcgtaccaaatccaaaagtgaagaaatcaagattgaactggaaaaacttgaaaaaaatttaactgcaactttagtattagaaaaatgtctacaagaggatgtcaagaaagcagagttgcatctgtctacagaaagggccaaagttgataatcgtcgtcagaacatggactttctaaaagcaaagtcagaggaattcagatttggaatcaaggctgcagaggagcaactttcagccagaggcatggatgcttctctgtctcatcagtccttagtagcactatcagagaaactggcaagattaaagcaacagactatacctttgaagaaaaaattggagtcctatttagacttaatgccgaatccgtctcttgctcaagtgaaaattgaagaagcaaagcgagaactagatagcattgaagctgaacttacaagaagagtagacatgatggaactgtgacaaaagccaaataaacatccttttccctaacaaagtaaattgaataggactttacagagttctttttcctcttggcatttcctaataacaaaactttctgtgttcttagattacagaatatcataattgatagaatatggtttcttactgtgtgttgcatttttgtgcccaaatacatagttttcatattaaaaagccttttctctt

SEQ ID NO: 43822 - DNA, 180 bp, Homo Sapiens
atgaaatggcctcccaccttcagcgttcccagtactgacctcctttgttccttccactccaccgctccccacagctttgcccgcctttccttcacatacacacaccattttaatttcaggagtcattactccacacaccttattgctgccaaaaccacatgggctgggggccagggatag

SEQ ID NO: 43823 - DNA, 1455 bp, Homo Sapiens
ctgtgcgacatcgtcctgcacgtggctgccaaggagatccgtgcgcacaaagtggtgctggcctcctgcagcccctacttccacgccatgttcacaagcaacgagagccgccagacccacgtgacgctgcacgacatcgaccctcaggccttggaccagctggtgcagtttgcctacacggctgagattgtggtgggcgagggcaatgtgcagactctgctcccagccgccagtctcctgcagctgaatggcgtccgagacgcttgctgcaagtttctactgagtcagctcgacccctccaactgcctgggtatccggggctttgccgatgcgcactcctgcagcgacctgctcaaggccgcccacaggtacgtgctgcagcacttcgtggacgtggccaagaccgaggagtttatgctgctgcccctgaaacaggttctggaactggtctctagcgacagcctgaacgtgccttcagaggaggaggtctaccgagccgtcctgagctgggtgaaacacgacgtggacgcaggcagcatgtcccacgggcaccaccctgactgcaaggacctcctcatcgaggccctgaagttccacctgctgcctgagcagaggggcgtcctaggcaccagccgcacacgtccccggcgctgcgagggggccgggcctgtgctttttgctgtgggcggcgggagcctgtttgccatccacggagactgtgaggcctacgacacgcgcaccgaccgctggcacgtggtggcctccatgtccacgcgccgggcccgggtgggagtggctgcggtggggaaccggctctatgctgtgggcggctatgatgggacctcagacctggctaccgtggagtcctacgaccccgtgactaacacgtggcagccggaggtgtccatgggcacaaggcgaagctgcctgggtgtggccgccttgcatggactcctgtactcggccggcggctatgacggggcctcctgcctgaacagtgctgaacgctacgaccccctgaccggaacgtggacgtccgtcgctgccatgagcacccggaggcgctatgtgcgagtggccacgcttgatgggaacctgtatgctgtgggcggctacgacagctcctcacacctggccactgtggagaagtatgagccccaggtgaacgtgtggtcgcccgtggcgtccatgctgagccgacgcagctcagcgggcgtggccgtgctggagggtgccctgtacgtggcagggggcaacgacggcaccagctgcctcaactcggtagagagatacagtccaaaggctggagcctgggaaagcgtggcgcccatgaatatccgcaggagcacgcatgacctggtggccatggacggatggttgtacgccgtggggggtaacgacggtagctccagcctcaactccatcgagaagtacaacccgaggaccaacaagtgg

SEQ ID NO: 43824 - DNA, 708 bp, Homo Sapiens
atgctggttaacttcctggttaccaagaaaaccatatcatactatggatgtgcagcccaactgggtggattcttggttttcattgtggctgagattttcacgctggctgcaatggcctatgaccgctatgtggctatttggagccctctgctctacgccgtagtggtgtctccaaaggtgtgtcgtctgctggtgtccctcacataccttcagagtcttatcacagcactgactgtctcttcctgtgtgttctctgtgtcatactgttcttccaacattatcaaccatttttactgtgatgatgtccctttgctagcattgtcctgttctgatacctacattccagaaacagcagtctttatcttttcagggaccaacttgcttttctccatgatcgttgttctgatatcctacttcaacattgttattaccattttgaggatacgttcctcagaaggacgacaaaaagccttttccacctgtgcttctcacatgatagctgtggttgtgttctatgggactctccttttcatgtatttgcaaccaaggagtaatcattcattagatactgacaaaatggcttcggtcttctacaccctggtgataccagtgctgaaccctctaatctacagcctcaggaacaagaacgtgaaggatgcactaaagaggttcctagataacccatgccgatcactcaaactaatgtaa

SEQ ID NO: 43825 - DNA, 930 bp, Homo Sapiens
atgggattgggcaatgagagttccctaatggatttcatccttctaggcttctcagaccaccctcgtctggaggctgttctctttgtatttgtccttttcttctacctcctgacccttgtgggaaacttcaccataatcatcatctcatatctggatccccctcttcataccccaatgtacttttttctcagcaacctctctttactggacatctgcttcactactagccttgctcctcagaccttagttaacttgcaaagaccaaagaagacgatcacttacggtggttgtgtggcgcaactctatatttctctggcactgggctccactgaatgtatcctcttggctgacatggccttggatcggtacattgctgtctgcaaacccctccactatgtagtcatcatgaacccacggctttgccaacagctggcatctatctcctggctcagtggtttggctagttccctaatccatgcaacttttaccttgcaattgcctctctgtggcaaccataggctggaccattttatttgcgaagtaccagctcttctcaagttggcttgtgtggacaccactgtcaatgaattggtgctttttgttgttagtgttctgtttgttgtcattccaccagcactcatctccatctcctatggcttcataactcaagctgtgctgaggatcaaatcagtagaggcaaggcacaaagccttcagcacctgctcctcccaccttacagtggtgattatattctatggcaccataatctacgtgtacctgcaacctagtgacagctatgcccaggaccaagggaagtttatctccctcttctacaccatggtgacccccactttaaatcctatcatctatactttaaggaacaaggatatgaaagaggctctgaggaaacttctctcgggaaaattgtga

SEQ ID NO: 43826 - DNA, 1372 bp, Homo Sapiens
aagagaaggcagccaacatgaaggaaaatgtggcatctgcaaccgttttcactctgctactttttctcaacacctgccttctgaatggacagttacctcctggaaaacctgagatctttaaatgtcgttctcccaataaggaaacattcacctgctggtggaggcctgggacagatggaggacttcctaccaattattcactgacttaccacagggaaggagagacactcatgcatgaatgtccagactacataaccggtggccccaactcctgccactttggcaagcagtacacctccatgtggaggacatacatcatgatggtcaatgccactaaccagatgggaagcagtttctcggatgaactttatgtggacgtgacttacatagttcagccagaccctcctttggagctggctgtggaagtaaaacagccagaagacagaaaaccctacctgtggattaaatggtctccacctaccctgattgacttaaaaactggttggttcacgctcctgtatgaaattcgattaaaacccgagaaagcagctgagtgggagatccattttgctgggcagcaaacagagtttaagattctcagcctacatccaggacagaaataccttgtccaggttcgctgcaaaccagaccatggatactggagtgcatggagtccagcgaccttcattcagatacctagtggtgaccccttgatgttgggtgcctctcattacaaaaatctcaaatcttacagaccaagaaaaatctcaagtcaaggaagacttgcggtgttcacaaaggcaacattgaccacagtccagtagagctgaagagcatataccagaattcaggaactcaacattttctcccctctgtccaaccacaggacagactgtgcaccccagggagatgctgtgtgtccactggcctcactgacttggattactcctgcagcacgtgaccagccagctcatatgatcactccctactgcccccaaagcagaattgactgggagctggaaacccacacaaaaagggacaattatattgaatgtaacatactccctctgcttacctagtgccttcacctcctatgggcatttggagtaaaaggttgttatgcaggtgtttgtgaaggatgtggccaagtcagttgtctcccttacagggtgacccaagattaatgatatctacccatccccagtccctcgaccccctagttgcaatcagctttgtcactgtcccccttaggcactgccatgtaaagcacgtggtcccccattctgaagcagtgggaaacctagaagagatgtactcttcgcaacctggttggatcttaaaaacatggttctaactgaaaagaaaaaagaca

SEQ ID NO: 43827 - DNA, 2148 bp, Homo Sapiens
agcaaggagatgacccagctgaacaatgcatttggtccactcctgcgaggggaggagaacgccgagggacaggaactgcgcgccagcaaaagacaccctaacctggggtgcgcccgccagctgctttcccaaggtgaaaacctccaagaggcgagatgcaaatcccagtggcgtccacacccggaggtgtcttctctccaggtcgcccctccgtctcatgcgacaccccaatccccgcagcctctgctcagcgtgggaccaagaatggggagtcctacccctcctcggctttccagccccctaacccaagacaagagggcgcgcgcccgggctgggacaggtcccagccgcattttcgtagattgcactccccgcccgggagcgacccgttccagcagcccccttcccgccccatcaacgcggccgcactgtcggcgtctagaggcgacatcctggcaaagacaggaatcaagtcagaaattcaggctctagaagcaaaggctgcggtgcctcctggctggaagaaaacggcgggtgggtggaggatgcggtgcgcgggaatttccccacggacgcttgctgtttcctgctcacctttcaggaaggtgcccctctacctgcaccctcccctgcaatttggagctcgtccgcgagctcagctacccgctggctccctctgcccgcgcccgcacaccacagactccgcttaccgtaccctacccggtcctagagggcccagaggggatctcctgaaaccaactcgcctgcttggagccagccccgacgcatatctcgagagtggcgggaggcaaagcagccggaatgcccgagaaaaaagtgggcgtcagaggcccttgtcctagcgactcccccaccgcaccgactgagtcccgggactgcagggatctaagcccttacctgtctcggcgcctcctttctgtgcgctctgctgctccggaagccggatcgagagtcacagtgtggttgggcgcaggcgggccgctcggttttcacctcgaggacccggacttgcacttgcagagccgctgcgtgggggatgtccctcttttttcctcgccccggcgggctcctccggcgtgtcagggtctctgggttccagctggagttggcgctccggccccacagctctttccagcgtctcggacctgtgcgccccgccccgcgctggactccgccccggggtccccgcctgcctcctagtccaggccaagggtggatgcccagctcccccaccccaccgcgtgctctcgggctggtgcgtccagggcgcgggcaccgtagctccggccgcgctgacgcgagtccccggcagcgggggcagcctctcgcacggatttcagcgccttcgcatcccgtctgaatcggaccacacagtagccgggtttctaccgtgcgcttgggaacagtgagcaccgccctctgccgccagtcgtggcaccgcacccgggtcgcgcgcgcaggaggggagagtcctgtcttccggaggtgcccagtgccagcgtccgcgcccactagaaggtgaccctttcaaggaaagcccggctccgacgagtgcggtgtgggcctttggagatggcggtgaaggaggaggcccccaggaggaagctggggatggggacagtttgctctgctcaaagcccctgaagtcctcacccaaactttgcgatgaccaccactatcagattccatggccgtataaagacaatcccaggagtgcctcagcccatctgtccggagagtctggagcccttcactttgcttctgacaggttcgaaatcctcccacgaccttcctggttaaacacaggaactgcccattcaaatgactggtgcccaggaagctctgggcatacaggattgaacctgtggcaggaccctgaaggtctaaaaaggtgttccccatcgttaaaccccagccagcggattattggcaggtgggaacatggactccactttgtcagagcttcccattgttttcaagagaatctggaattcgagaactttaaaaatagtctttgggttcgttaaagcaaaaatcttgttttggtcaaagagaacctgtctcagactgaacacagtccacaaggctgccaattaaaaatttttggataaatgaacttcaaactcc

SEQ ID NO: 43828 - DNA, 4170 bp, Homo Sapiens
cgtagcgcccgcagagcaacgcaaagaggaagaacagagaaacggctatgagaaaaagggccgaagagtgagaagcagagggccttacccgagggggcggcaaccgggggccccacggtctccggccgcgcccgcgctggccgctgatagcgggctcacaacgatgacgtagcgaggagcggaaaacgcggtaaccaaggcggccccaggcgcgcacttccgcccggccttccaccggtccaggtctgcccctccgcagcgatagttcacgctctcggcggggctgtaccggaagttgcctctacttccgcccgttccggggcggggcttacttcgcagcgactacttgccgcacttccgggctgccaggcagctgctgtggctccaggatgatggagacagagcgacttgtgctaccccctccagatcccctggacctaccccttcgggccgtggagctcggatgcacggggcactgggagctgctgaacttgcctggagctccagagagtagccttccccatggcctccctccttgtgccccagatctgcagcaagaagcagaacagttgtttctgtcatccccagcctggctgcctctgcatggtgtggagcactcagcccgaaaatggcagaggaagacggatccctggtctcttttggctgtcctgggagccccagtcccatccgacctacaggcccaaagacacccaaccacaggccagatactgggttacaaagaggtcttgctggagaacacaaatctctcggctacaacctccttgtctcttcgccggcctccagggccagcctcccagtccttatggggaaatccaactcagtatcccttctggccaggggggatggatgaacccaccataacagatctgaacacacgggaggaggctgaggaggagatagactttgagaaagatcttcttactattccacctggtttcaagaaaggcatggactttgcaccaaaagattgtccaactccagctcctggactactaagccttagctgtatgttggagcctctggatttgggtgggggtgacgaggatgagaatgaggcagtgggacagccaggaggtcccagaggggacactgtttcagcctctccctgcagtgctcccctggcccgagcaagcagcttggaagacctagtgttgaaggaagcgtccacagctgtatccaccccagaggccccagagcctccatctcaggagcagtgggccatccctgtggacgccacctcccctgttggtgatttctatcgcctcattccccagccagccttccagtgggcatttgagccagatgtgtttcagaaacaggccatcctgcacttggaacggcatgactctgtctttgtcgcagctcacacatctgcaggaaaaacagttgtggctgaatatgccattgccctggcccagaaacacatgacacgcaccatctacacttcgcccatcaaggccctgagcaaccagaagttccgggacttccgaaacacattcggggatgtggggctgctcaccggggatgtacagctgcatccggaggcctcctgcctcatcatgaccacagagatccttcgctccatgctgtacagtggctcagatgttattcgggacctggagtgggtcatctttgatgaggttcactatatcaacgatgtcgagcgtggggtcgtgtgggaggaggtgcttatcatgctacctgaccacgtttctatcatccttctgagtgccaccgtccccaacgcccttgagtttgctgactggattgggcggctgaagcgtcgtcagatctatgtgattagcactgtaacccgccccgtgcccctggagcactatcttttcacagggaacagctccaagacccagggggagctctttttgttgctggactcccgaggagccttccatacaaaagggtactatgcagctgtggaggccaagaaggagagaatgagcaaacacgcccagacctttggggccaagcagcccacacatcaggggggccctgcacaggaccgcggagtgtacctgtccctcctggcctccctccgcacacgtgcccagttgcccgtggtggtgttcaccttctcccggggccgctgtgatgagcaggcctcaggcctcacctcccttgacctcaccaccagttcggagaagagcgagatccacctcttcctgcagcgctgccttgctcgcctccgtggctctgaccgccagctgccccaggtcctgcacatgtcagagctcctgaatcgcggcctgggtgtgcaccatagcggcatcctgcccatcctcaaggagatcgtggagatgctcttcagccgtggcctggtcaaggtcttgtttgccacagagacctttgccatgggagtaaacatgcctgctcgtacagtagtgtttgactccatgcgcaaacacgatggctccaccttccgggacctgctccctggggagtatgtgcagatggcaggccgggcagggcggaggggcctggaccccacaggcaccgttatcctgctctgcaagggccgagtgcccgagatggcagacctgcaccgcatgatgatggggaagccgtcccagctgcagtcccagttccgcctcacgtacactatgatcctcaacttgctgcgagtggatgccctcagggtggaggacatgatgaagaggagcttctctgagtttccctcccgcaaagacagcaaggcccatgaacaggccctggctgaactgaccaagaggctgggagctttggaggagcctgacatgactggccaactggtcgacctgcctgaatattacagctggggggaggaactgacagagacccagcacatgatccagcgacgcatcatggagtctgtgaacgggctgaagtctctctcagcaggaagggtggtggttgtgaagaatcaggagcatcacaacgcattgggagtgatcctacaggtctcctcgaactccaccagcagagtattcacaaccctggtcttgtgtgataagcccttgtcccaggacccacaggacagggggccagccactgcagaggtgccctatccagatgacctcgtgggattcaagctgttcctgcctgaagggccttgtgaccacaccgtggtcaagctccagccaggagatatggctgccatcaccaccaaggtgctccgggtgaatggggagaagatcttggaggacttcagcaagaggcagcagccaaaattcaagaaggatcctccccttgcagccgtgaccactgctgtccaggaactgctgcgtctggctcaggcccacccagccggacctcccaccctcgaccctgtcaatgacctgcagctcaaagatatgtcagttgtagagggtgggctccgggcccggaagctggaggagctgatccagggggctcagtgtgtacacagcccccgttttcctgcccagtacctgaagctgcgggagcgaatgcagatacagaaggagatggagcggctgcgcttcctactgtcggatcagtcattgctgctgcttcctgagtaccatcagcgagtagaggtgctccgaaccctgggttatgtggacgaggcgggcactgtgaagctggcagggcgggtggcttgtgccatgagcagccatgagttgctcctcactgagctcatgtttgacaatgcactgagcaccctgcggcctgaggagattgctgccttgctctctggcctggtctgccagagccctggggacgctggggatcagctcccaaacaccctcaagcagggaatagaacgtgtccgggctgtggccaagcggattggtgaggtccaggtggcttgtggcctgaaccagacggtggaggaatttgtgggggagctgaattttgggctggttgaggttgtatatgagtgggcccggggcatgcccttctccgagttggcagggctctcagggacccctgagggcctggtggtccgctgcattcagcgcctggctgagatgtgtcgctcactgcggggggcagcccgcctggtaggagagcctgtgctgggtgccaagatggagacagcggctaccttgctacggcgggacatcgtatttgcggccagcctctacacccagtgaatgccccatgtaaaaacatgatgataaaacagcaaagcac

SEQ ID NO: 43829 - DNA, 1331 bp, Homo Sapiens
gcgcgcagcagccatctccactccaaagttagacaaaatgccaggaatgttcttctctgctaacccaaaggaattgaaaggaaccactcattcacttctagacgacaaaatgcaaaaaaggaggccaaagacttttggaatggatatgaaagcatacctgagatctatgatcccacatctggaatctggaatgaaatcttccaagtccaaggatgtactttctgctgctgaagtaatgcaatggtctcaatctctggaaaaacttcttgccaaccaaactggtcaaaatgtctttggaagtttcctaaagtctgaattcagtgaggagaatattgagttctggctggcttgtgaagactataagaaaacagagtctgatcttttgccctgtaaagcagaagagatatataaagcatttgtgcattcagatgctgctaaacaaatcaatattgacttccgcactcgagaatctacagccaagaagattaaagcaccaacccccacgtgttttgatgaagcacaaaaagtcatatatactcttatggaaaaggactcttatcccaggttcctcaaatcagatatttacttaaatcttctaaatgacctgcaggctaatagcctaaagtgactggtccctggctgaagggaattaacagatagtatcaagcgcagaaggaatgtgccagtatggctccctgggtgaacagcttggccttttttgggtgtcttgacaggccaagaagaacaaatgactcagaatggattaacatgaaagttatccaggcgcagagttgaagaagcataagcaagacaaaaacagagagaccgcagaaggaggaagatactgtggtactgtcataaaaaacagtggagctctgtattagaaagcccctcagaactgggaaggccaggtaactctagttacacagaaactgtgactaaagtctatgaaactgattacaacagactgtaagaatcaaagtcaactgacatctatgctacatattattatatagtttgtactgagctattgaagtcccattaacttaaagtatatgttttcaaattgccattgctactattgcttgtcggtgttattttattttattgtttttgactttggaagagatgaactgtgtatttaacttaagctattgctcttaaaaccagggagtcagaatatatttgtaagttaaatcattggtgctaataataaatgtggattttgtattaaaatatatagaagcaatttctgtttacatgtccttgctacttttaaaaacttgcatttattcctcagattttaaaaataaataaataattcatttaag

SEQ ID NO: 43830 - DNA, 792 bp, Homo Sapiens
atggccaaacgcctgcaagcagagttgtcctgtccagtttgcctggattttttctcctgttccatttctctctcttgtacacacgtgttctgctttgattgcatccagaggtatatactagaaaaccatgattttagagcgatgtgccccttgtgtcgagacgtggtgaaggtacctgctttggaagaatggcaagtgagcgtcctaacacttatgaccaagcagcacaatagccgacttgagcaaagtctgcacgtgagggaggagctccggcattttcgggaggatgtgaccctggatgcagccactgccagctccctccttgtcttctccaatgatctaagaagcgctcagtgtaagaagatccaccacgatctgacaaaagatcccaggctggcctgtgtcctgggtactccctgcttctcctccggccaacattactgggaggttgaagtgggagaggtgaagtcatggtccctgggcgtctgcaaggagccggctgacagaaagagcaatgatttattccctgagcatggcttctggatcagcatgaaggcaggagcaatccatgctaacacccacctggagagaattcctgcaagccctcgccttcgccgtgtgggaattttcctggatgctgacttagaagaaatccagttttttgatgttgacaataatgtcctcatctatacacatgatggtttcttctctttggagcttttgtgtccattcttctgtcttgagctcttgggagaaggggagagtggcaacgtcctgaccatctgcccatga

SEQ ID NO: 43831 - DNA, 1513 bp, Homo Sapiens
ggcaggagctcttttgccatggctaccaggccgatctccgagcggaaccaggatgccactgtgtacgtggggggcctgaatgagaaggttagtgaaccgctactgtgggaactgtttctccaggctggaccagtagtcaacacccacatgccaaaggatagagtcactggccagcaccaaggctatgactttgaattcttgagtgaggatgatgctgactatgccattaagatcatgaacatgatcagactctatgggaagccaatacgggtgaacaaggcatcagctcacaacaaaaacctggatgtaggggccaacattttcaatgggaacctggaccctgagattgatgagaagttgctttatgatactttcagcgcctttggggtcatcttacaaacccccaagattatgtgggaccctgacacaggcaactccaaaggttatgcctttattaattttgcttcatttgatgcttcagttgcagcaattgaagccatgaatgggcagtacctctgtaaccaccctatcaccgtatcttatgccttcgagaaggactccaagggtgagcgccatggcttagcagctggacgacttctggcagctcagaacccgctctcccagcctgaccgccctcatcagctgtttgcagatgcacctccttcaccctctgcccccaatcctgtggtatcatcattggggtctgggcttcctccaccaggcatgcctcctcctggctccttcccacccccagtgctgcctcctggagccctcccacctgggatacccagccatgccccaccacctatgcctcctggggctgcaggacatggccccccatcggcaggaaccccaggggcaggacatcctggtcatggacactcccaagctcacccattcccaccaggaggagtgccccatccagggatgtctcagatgcagctggcacaccatggacctcatggtttaggacatccccattctggacacccaggctctgggggacagccaccaccccaaccaccacctggaatgccttatcctggacctcctccaatgggcatgcccccccgaaggcctccattctgatctcccatgggtcacccaggtcctatgcctccacatggtatgcgtggacttcctccactgatgccccccatggatacactggccctccacaacccacaccctatggctaccagcctctccctccaaccaggcccactccccagccaccagttgcccctcgaggcccgctttggagccctctccctcagtaaattcacattttccttcctcctattacatcttcccaatatcttttcgataccttggaccaatcagagatgctgtagctccttggggctaaggcactaatccctttcagcacccccaccccattcccctttttaatgtaactttttccacaggaggtatttcttttttatgttggtcctgagtattttgcaaatgcacagagaaaataaaactaaactccttgtttaaaaaaaaa

SEQ ID NO: 43832 - DNA, 270 bp, Homo Sapiens
gcctgtcaccttgcaagggacggtgtggggcttgccagtcttgttcccccagtagcctctgtgcacggggacaatggagagcttgggcaggatgatagccccacggatggcggtggccacctccttggagcacttaacacccaggcctacgtggccattgtagtccccaatagcaacaaacgccttgaacctgcgctggccagcatgggtctgcttctgcaccggcattatcttcaaaacctcgtcctcgagagaggcccccaggaaaaa

SEQ ID NO: 43833 - DNA, 690 bp, Homo Sapiens
tctgggtccccacagaacactctggtgcccggagcccttgggctcgcgtggcagcgccaggtttacgtgggcagagatgacttcaagtcaggccagaccaaagtcaagtccgtgctcgtggacttcctcatcggctatggcctcaagaccaagtcgattgtgaattataaccacctggggaacaacgaccggcagaacctgttggcgccatcgctgttctctgaggcggtgtccaagagcaacgtagtggacgacatggcgcaaagacacccagtgctctacgcgcctggcgaggagcctgaccgctgcgtggtcatcaagtacatgccgtacgcgggtgaccccaagcgtgcgctggatgagtctaccttggagctgatgctgggcgtaaccaacacgctggtactgcacaacacgtgcgaggactcgctgctggccgcccccatcatcctggacctggcgctggtgaccgagctgtgccactgcgtgagcttctgcaccaatgacaacaccgagccacagaccttccaccccatgccgtccctgcttagcctcttcaaggcgccgctggtgccgccgggcagcccggtggtcagtgcgcttttccgccagctcagctgcatcgagaacatccacagggcctgtgtggggcttccgccacagaaccacgtggtcctggtgcacaagatg

SEQ ID NO: 43834 - DNA, 1677 bp, Homo Sapiens
atgtaccgctacctggccaaagcgctgctgccgtcccgggccgggcccgctgccctgggctccgcggccaaccactcggccgcgttgctgggccggggccgcggacagcccgccgccgcctcgcagccggggctcgcattggccgcccggcgccactacagcgagttggtggccgaccgcgaggacgaccccaacttcttcaagatggtggagggcttcttcgatcgcggcgccagcatcgtggaggacaagttggtgaaggacctgaggacccaggaaagcgaggagcagaagcggaaccgggtgcgcggcatcctgcggatcatcaagccctgcaaccatgtgctgagtctctccttccccatccggcgcgacgacggctcctgggaggtcatcgaaggctaccgggcccagcacagccagcaccgcacgccctgcaagggaggtatccgttacagcactgatgtgagtgtagatgaagtaaaagctttggcttctctgatgacatacaagtgtgcagtggttgatgtgccgtttgggggtgctaaagctggtgttaagatcaatcccaagaactataccgaaaatgaattggaaaagatcacaaggaggttcaccatggagctagcaaagaagggctttattggtcctggcgttgatgtgcctgctccagacatgaacacaggtgagcgggagatgtcctggattgctgatacctatgccagcaccatagggcactatgatattaatgcacacgcctgtgttactggtaaacccatcagccaagggggaatccatggacgcatctctgctactggccgtggtgtcttccatgggattgaaaacttcatcaatgaagcttcttacatgagcattttaggaatgacaccagggtttagagataaaacatttgttgttcagggatttggtaatgtgggcctacactctatgagatatttacatcgttttggtgctaaatgtattgctgttggtgagtctgatgggagtatatggaatccagatggtattgacccaaaggaactggaagacttcaaattgcaacatgggtccattctgggcttccccaaggcaaagccctatgaaggaagcatcttggaggtcgactgtgacatactgatcccagctgccactgagaagcagttgaccaaatccaacgcacccagagtcaaagccaagatcattgctgaaggtgccaatgggccaacaactccagaagctgataagatcttcctggagagaaacattttggttattccagatctctacttgaatgctggaggagtgacagtatcttactttgagtggctgaagaatctaaatcatgtcagctatggccgtttgaccttcaaatatgaaagggattctaactaccacttgctcctgtctgttcaagagagtttagaaagaaaatttggaaagcatggtggaactattcccattgtacccacggcagagttccaagacagtatatcgggtgcatctgagaaagacattgtgcactctgccttggcatacacaatggagcgttctgccaggcaaattatgcacacagccatgaagtataacctgggattggacctgagaacagctgcctatgtcaatgccattgaaaaagtcttcaaagtgtacagtgaagctggtgtgaccttcacatag

SEQ ID NO: 43835 - DNA, 1166 bp, Homo Sapiens
gggccctagcaaccagagcagtgacagtagcaaccgccggaatggcgaaagcaacaacaatcaaagaagccttagcgagatgggaagagaaaactggccagaggccatctgaagccaaagagataaaactttatgcccagattccccctatagagaagatggatgcatccttgtccatgcttgctaattgcgagaagctttcactgtctacaaactgcattgaaaaaattgccaacctgaatggcttaaaaaacttgaggatattatctttaggaagaaacaacataaagaacttaaatggactggaggcagtaggggacacattagaagaactgtggatctcctacaattttattgagaagttgaaagggatccacataatgaagaaattgaagattctctacatgtctaataacctggtaaaagactgggctgagtttgtgaagctggcagaactgccatgcctcgaagacctggtgtttgtaggcaatcccttggaagagaaacattctgctgagaataactggattgaagaagcaaccaagagagtgcccaaactgaaaaagctggatggtactccagtaattaaaggggatgaggaagaagacaactaatgccacgctttccactgtgtgttaacttatttaaatgtcataagaacaatagataaattttatataattgtctattttaaagattctgtatgggacaaaagtttcttaagataaaacagatcactcattctcatctttttttttcctttaacttattcagtgtttctccccaaaactggtaatgccaaccttatatatcctatttctctttttagaaaccacaaattttcgatttttgtcttcagtctcagttacgtactgtgtagccccatctactaaaacaaaacctttgtagaccagtcatttttaataacaaaggaacaaatgtttttttcagtttgttcattttttttaggttagacattttaaaagatgtacatttgaaaattcagaacatttttcctgaaggtctgtctctgtacaattcagaagcacatgcctttagctcagaaggcagcatggtgatgggaagagttcctcttagaaatacagcaggtccggaaccaagactccaaagttccattggaaaagatatggtgaaaaaaggaaaaa

SEQ ID NO: 43836 - DNA, 480 bp, Homo Sapiens
atggtaatcaccaagaaggtaacactgatggtaatctgtgccaatagctgggcagtttatcacagcttatgtatgtgtcaaatctgtatatatacattgggcctgcgtgcccaatgcttatgggtcaggcttatgtgtcaagcctatgtgtatgtattgggtttgcatgcccaaagtttatatatcaggcctgtgtgccaaacctgtgtatcaaacctgtgtgtccaaggcctatgtctccctcggcctaggggatggaatgtaaggtacacggatgtgctttggtcgaagaatagaccaaggcggatatccaggcctgcaggaatcagcaagtttggtgcacaggtgcaaacctccacttgttatataacctgtttgtataagttcatactttgctctgagccactattgcctgtgaaaggtataattgccctgctaatgctatacagcggctcgtgggcttggcttggctcaacatag

SEQ ID NO: 43837 - DNA, 1481 bp, Homo Sapiens
acctggccggaggagcctttcaagtgggcgtgtctttcggctggggaaaagggaggagttagactctgggcaacatcactcctccctggtcagctgggagagcaatcaaaactgcagcaagtcagaggctccggccagagagcaggagctgcccagaggcttgtggtcctgaaagctcctctccggggagctaaccagggagaggaggtactgaagagcgactaaactggctgcagcggagagatcagcccgaaggcgtccttgaggagcatacggaactccaaggaaggagtagaataaggagcaggcagagaaaccagacccggtggaatctctaagaggtaacaaccgggtttgacatggatcgctgaaagcgtctcttctaccatctggatggtcagggagacttggcttctctgactgtcctctaagacgcagattcacagagttcactccaggaacggccagtgaccgagagtctggaaatgtcaaaaacttttgtaaaatccaaggagatgggagagctagtcaacacaccatcctggatggataaaggtctgggctcccaaaatgaggtgaaggaggaagagagcagaccaggtacttatgggatgctcagcagcttaactgaagagcatgacagtattgaggaagaagaagaagaggaagaagatggggagaaacctaagagaaggggtcccaagaaaaagaagatgaccaaagctcgccttgagagattcagggctcgaagagtcaaggctaatgccagagaacggacccggatgcatggcctgaatgacgccctggataacctgaggcgagtcatgccatgctactctaaaacccaaaaactttccaagatagagactcttagactggccaggaactatatttgggctttatctgaagtcctggagactggccagacacctgaagggaaaggctttgtggagatgctgtgtaaagggctctctcagcccacaagcaacctggtggctggatgtctccaactgggccctcagtctgtcctcctggagaagcacgaggataaatctcctatttgtgactctgccatctctgtccacaacttcaactatcagtctccggggcttcctagccctccttatggtcatatggaaacacatctccttcatctcaagccccaagtattcaagagtttgggagaatcgtcctttgggagccatctgcctgactgcagtacacccccttatgagggcccactcactccacccctgagcatcagtgggaacttctccttgaagcaagatgggtctcctgacctagaaaaatcctacagcttcatgccacattacccttcttcaagtctaagctcagggcatgtgcattcaactccttttcaggctggtaccccccgttatgatgttcctatagacatgtcctatgattcctacccccatcatggtattgggacccaactcaatacagtcttcactgagtga

SEQ ID NO: 43838 - DNA, 960 bp, Homo Sapiens
aaccgccgcctcaggtgtcgtctcctgcccgcgaaacaccacccaccgttagtgtccctatgttaactacttgagacaaaaataaatatggccttctacagttataattcagttctggctattgctcgaacaagattccctagccattttgtccatcctacctgctcttcttattccccatcatgtgcatttcttcacttgccagattcccatttaaataagacatgtatgaagaactatgagagcaagaagtactcggatcctagtcagccaggcaatacagtacttcacccaggaactagactaatacaaaagctacacacatccacttgctggctgcaagaagttcctggcaaacctcagctggagcaagccacaaaacatccacaggtgacaagccctcaggccacaaaagaaactggcatggagattaaagaaggcaaacaatcttatagacaaaaaatcatggatgaactaaaatattattacaatggattctacttactttggattgacgccaaagttgctgccagaatggtttggaggctgttgcatggacaggtcctgaccagacgagagagacgaaggctgttgagaacttgtgttgatttcttccgcctggttccatttatggtgttcttaattgtacccttcatggaattcttattaccagtgtttctgaaactcttcccagagatgttgccatcaacttttgaaagtgaatccaaaaaggaagaaaaacagaaaaagaaaatggctgtaaagttggaactagcaaaatttcttcaagaaaccatgacagaaatggcaaggaggaacagagccaagatgggcgatgcctctacacagctctcatcctacgtgaagcaggtgtccttatgtaatgccgaacaacttcggggctgggcgttctatgaaaaacgcatgtcatcatggatttcccaaattgttcaccatctt

SEQ ID NO: 43839 - DNA, 786 bp, Homo Sapiens
atgagcctacctaatccgatactgcaatggaattccggatatttgcagacagatctcccggctttgcaagtgtttgatgagatacgttcggaatctccttttttttctagagcccggttccaggccgtagagcaagccgacctggggctgcggcccctgccccacacccggcccgcgcgcccggcccgaggccagcacaggacgcagcccctccggggccggggctggcgggggccgctcgggctgcgggccgctctgcaacaggtcaccctgaccgcgactccgcgggttcgcgggcggccaactctgcggccaggcttctgggcgcagccgccagggccaggggagggggtgtggcccggcttctgctggtcctggctccgaggtccgggatcgggctcacctgaaggaagactgaggcgccgctgggcgccagaacagagcgggcggaggctgggggcttccgccacccaagagggagagcgaggcgggttcaaggggtcgcagcgcccccggcttcaggacggcgcccccgagcggggaccccacggccgctccgactctgagaacccgcggccgagggaggcgcgccgcccagcgcccttctccctcagcctcagccccagctccgcagccccctccctgcgcgcagggcgagcagccccggggcccgcggccgggagagccacactccgcagcgccgccgccgccattccccgcgccgcccggggggcgccgcgtacccaccctccctccctccctcccccgcaccgccccgcggcctga

SEQ ID NO: 43840 - DNA, 887 bp, Homo Sapiens
gagggacgcagggcgttgggaacagaggacactccaggcgctgaccctgggaggccaggaccagggccaaagtcccgtgggcaagaggagtcctcagaggtccttcattcagcggttccgggaggtctgggaagcccacggcctggctggggcagggtcaacgccgccaggccgccatggtcctgtgctggctgctgcttctggtgatggctctgcccccaggcacgacgggcgtcaaggactgcgtcttctgtgagctcaccgactccatgcagtgtcctggtacctacatgcactgtggcgatgacgaggactgcttcacaggccacggggtcgccccgggcactggtccggtcatcaacaaaggctgcctgcgagccaccagctgcggccttgaggaacccgtcagctacaggggcgtcacctacagcctcaccaccaactgctgcaccggccgcctgtgtaacagagccccgagcagccagacagtgggggccaccaccagcctggcactggggctgggtatgctgcttcctccacgtttgctgtgaccaacagggaggacagggcctgggactgttctcccagatccgccactccccatgtccccatgtccttcccccactaaatggccagagaggccctggacaacctcttgcggccctggcttcatcccttctaaggctgtccaccaggagcccggtgctaggggaagcatccccaggcctgactgagcggcaggggagcacggcccgtgggtttgattgtattactctgttccactggttctaagacgcagagcttctcacatctcaatcaggatgcttctctccattggtagcactttagagtccatgaaatatggtaaaaaatatatatatatcata

SEQ ID NO: 43841 - DNA, 414 bp, Homo Sapiens
atgacatcccctcttgtttttgcctctctttctcctgatgcaatggccaaaatgctggaaatggctgccttaaatgtagggaccattaggatctcgctcaacacagaacccaggccacctgtaataacacagctggctcccagtcctgaaaccctgcctttctgccctgaatggggtgcagagaaccagtccagacacctgaaactgccacccttcttcatctgtaggtgcaggggccctctgtatcaggaagagagcctctctgaaatccactgtcattctgggcttttcctggaccagctctccttacctacccccttctctagcctgtcagtttcactcattcattggacatttataagcactaagtatgtaccaggcatcatgctggcctttggtggtaccaacaaataa

SEQ ID NO: 43842 - DNA, 6774 bp, Homo Sapiens
cggccccagaaaacccgagcgagtagggggcggcgcgcaggagggaggagaactgggggcgcgggaggctggtgggtgtggggggtggagatgtagaagatgtgacgccgcggcccggcgggtgccagattagcggacgcggtgcccgcggttgcaacgggatcccgggcgctgcagcttgggaggcggctctccccaggcggcgtccgcggagacacccatccgtgaaccccaggtcccgggccgccggctcgccgcgcaccaggggccggcggacagaagagcggccgagcggctcgaggctgggggaccgcgggcgcggccgcgcgctgccgggcgggaggctggggggccggggccggggccgtgccccggagcgggtcggaggccggggccggggccgggggacggcggctccccgcgcggctccagcggctcggggatcccggccgggccccgcagggaccatggcagccgggagcatcaccacgctgcccgccttgcccgaggatggcggcagcggcgccttcccgcccggccacttcaaggaccccaagcggctgtactgcaaaaacgggggcttcttcctgcgcatccaccccgacggccgagttgacggggtccgggagaagagcgaccctcacatcaagctacaacttcaagcagaagagagaggagttgtgtctatcaaaggagtgtgtgctaaccgttacctggctatgaaggaagatggaagattactggcttctaaatgtgttacggatgagtgtttcttttttgaacgattggaatctaataactacaatacttaccggtcaaggaaatacaccagttggtatgtggcactgaaacgaactgggcagtataaacttggatccaaaacaggacctgggcagaaagctatactttttcttccaatgtctgctaagagctgattttaatggccacatctaatctcatttcacatgaaagaagaagtatattttagaaatttgttaatgagagtaaaagaaaataaatgtgtatagctcagtttggataattggtcaaacaattttttatccagtagtaaaatatgtaaccattgtcccagtaaagaaaaataacaaaagttgtaaaatgtatattctcccttttatattgcatctgctgttacccagtgaagcttacctagagcaatgatctttttcacgcatttgctttattcgaaaagaggcttttaaaatgtgcatgtttagaaacaaaatttcttcatggaaatcatatacattagaaaatcacagtcagatgtttaatcaatccaaaatgtccactatttcttatgtcattcgttagtctacatgtttctaaacatataaatgtgaatttaatcaattcctttcatagttttataattctctggcagttccttatgatagagtttataaaacagtcctgtgtaaactgctggaagttcttccacagtcaggtcaattttgtcaaacccttctctgtacccatacagcagcagcctagcaactctgctggtgatgggagttgtattttcagtcttcgccaggtcattgagatccatccactcacatcttaagcattcttcctggcaaaaatttatggtgaatgaatatggctttaggcggcagatgatatacatatctgacttcccaaaagctccaggatttgtgtgctgttgccgaatactcaggacggacctgaattctgattttataccagtctcttcaaaaacttctcgaaccgctgtgtctcctacgtaaaaaaagagatgtacaaatcaataataattacacttttagaaactgtatcatcaaagattttcagttaaagtagcattatgtaaaggctcaaaacattaccctaacaaagtaaagttttcaatacaaattctttgccttgtggatatcaagaaatcccaaaatattttcttaccactgtaaattcaagaagcttttgaaatgctgaatatttctttggctgctacttggaggcttatctacctgtacatttttggggtcagctctttttaacttcttgctgctctttttcccaaaaggtaaaaatatagattgaaaagttaaaacattttgcatggctgcagttcctttgtttcttgagataagattccaaagaacttagattcatttcttcaacaccgaaatgctggaggtgtttgatcagttttcaagaaacttggaatataaataattttataattcaacaaaggttttcacattttataaggttgatttttcaattaaatgcaaatttgtgtggcaggatttttattgccattaacatatttttgtggctgctttttctacacatccagatggtccctctaactgggctttctctaattttgtgatgttctgtcattgtctcccaaagtatttaggagaagccctttaaaaagctgccttcctctaccactttgctggaaagcttcacaattgtcacagacaaagatttttgttccaatactcgttttgcctctatttttcttgtttgtcaaatagtaaatgatatttgcccttgcagtaattctactggtgaaaaacatgcaaagaagaggaagtcacagaaacatgtctcaattcccatgtgctgtgactgtagactgtcttaccatagactgtcttacccatcccctggatatgctcttgttttttccctctaatagctatggaaagatgcatagaaagagtataatgttttaaaacataaggcatttgtctgccatttttcaattacatgctgacttcccttacaattgagatttgcccataggttaaacatggttagaaacaactgaaagcataaaagaaaaatctaggccgggtgcagtggctcatgcctatattccctgcactttgggaggccaaagcaggaggatcgcttgagcccaggagttcaagaccaacctggtgaaaccccgtctctacaaaaaaacacaaaaaatagccaggcatggtggcgtgtacatgtggtctcagatacttgggaggctgaggtgggagggttgatcacttgaggctgagaggtcaaggttgcagtgagccataatcgtgccactgcagtccagcctaggcaacagagtgagactttgtctcaaaaaaagagaaattttccttaataagaaaagtaatttttactctgatgtgcaatacatttgttattaaatttattatttaagatggtagcactagtcttaaattgtataaaatatcccctaacatgtttaaatgtccatttttattcattatgctttgaaaaataattatggggaaatacatgtttgttattaaatttattattaaagatagtagcactagtcttaaatttgatataacatctcctaacttgtttaaatgtccatttttattctttatgtttgaaaataaattatggggatcctatttagctcttagtaccactaatcaaaagttcggcatgtagctcatgatctatgctgtttctatgtcgtggaagcactggatgggggtagtgagcaaatctgccctgctcagcagtcaccatagcagctgactgaaaatcagcactgcctgagtagttttgatcagtttaacttgaatcactaactgactgaaaattgaatgggcaaataagtgcttttgtctccagagtatgcgggagacccttccacctcaagatggatatttcttccccaaggatttcaagatgaattgaaatttttaatcaagatagtgtgctttattctgttgtattttttattattttaatatactgtaagccaaactgaaataacatttgctgttttataggtttgaagaacataggaaaaactaagaggttttgtttttatttttgctgatgaagagatatgtttaaatatgttgtattgttttgtttagttacaggacaataatgaaatggagtttatatttgttatttctattttgttatatttaataatagaattagattgaaataaaatataatgggaaataatctgcagaatgtgggttttcctggtgtttccctctgactctagtgcactgatgatctctgataaggctcagctgctttatagttctctggctaatgcagcagatactcttcctgccagtggtaatacgattttttaagaaggcagtttgtcaattttaatcttgtggatacctttatactcttagggtattattttatacaaaagccttgaggattgcattctattttctatatgaccctcttgatatttaaaaaacactatggataacaattcttcatttacctagtattatgaaagaatgaaggagttcaaacaaatgtgtttcccagttaactagggtttactgtttgagccaatataaatgtttaactgtttgtgatggcagtattcctaaagtacattgcatgttttcctaaatacagagtttaaataatttcagtaattcttagatgattcagcttcatcattaagaatatcttttgttttatgttgagttagaaatgccttcatatagacatagtctttcagacctctactgtcagttttcatttctagctgctttcagggttttatgaattttcaggcaaagctttaatttacactaagcttaggaagtatggctaatgccaacggcagtttttttcttcttaattccacatgactgaggcatatatgatctctgggtaggtgagttgttgtgacaaccacaagcactttttttttttttaaagaaaaaaaggtagtgaatttttaatcatctggactttaagaaggattctggagtatacttaggcctgaaattatatatatttggcttggaaatgtgtttttcttcaattacatctacaagtaagtacagctgaaattcagaggacccataagagttcacatgaaaaaaatcaatttatttgaaaaggcaagatgcaggagagaggaagccttgcaaacctgcagactgctttttgcccaatatagattgggtaaggctgcaaaacataagcttaattagctcacatgctctgctctcacgtggcaccagtggatagtgtgagagaattaggctgtagaacaaatggccttctctttcagcattcacaccactacaaaatcatcttttatatcaacagaagaataagcataaactaagcaaaaggtcaataagtacctgaaaccaagattggctagagatatatcttaatgcaatccattttctgatggattgttacgagttggctatataatgtatgtatggtattttgatttgtgtaaaagttttaaaaatcaagctttaagtacatggacatttttaaataaaatatttaaagacaatttagaaaattgccttaatatcattgttggctaaatagaataggggacatgcatattaaggaaaaggtcatggagaaataatattggtatcaaacaaatacattgatttgtcatgatacacattgaatttgatccaatagtttaaggaataggtaggaaaatttggtttctatttttcgatttcctgtaaatcagtgacataaataattcttagcttattttatatttccttgtcttaaatactgagctcagtaagttgtgttaggggattatttctcagttgagactttcttatatgacattttactatgttttgactacctgactattaaaaataaatagtagatacaattttcataaagtgaagaattatataatcactgctttataactgactttattatatttatttcaaagttcatttaaaggctactattcatcctctgtgatggaatggtcaggaatttgttttctcatagtttaattccaacaacaatattagtcgtatccaaaataacctttaatgctaaactttactgatgtatatccaaagcttctcattttcagacagattaatccagaagcagtcataaacagaagaataggtggtatgttcctaatgatattatttctactaatggaataaactgtaatattagaaattatgctgctaattatatcagctctgaggtaatttctgaaatgttcagactcagtcggaacaaattggaaaatttaaatttttattcttagctataaagcaagaaagtaaacacattaatttcctcaacatttttaagccaattaaaaatataaaagatacacaccaatatcttcttcaggctctgacaggcctcctggaaacttccacatatttttcaactgcagtataaagtcagaaaataaagttaacataactttcactaacacacacatatgtagatttcacaaaatccacctataattggtcaaagtggttgagaatatattttttagtaattgcatgcaaaatttttctagcttccatcctttctccctcgtttcttctttttttgggggagctggtaactgatgaaatcttttcccaccttttctcttcaggaaatataagtggttttgtttggttaacgtgatacattctgtatgaatgaaacattggagggaaacatctactgaatttctgtaatttaaaatattttgctgctagttaactatgaacagatagaagaatcttacagatgctgctataaataagtagaaaatataaatttcatcactaaaatatgctattttaaaatctatttcctatattgtatttctaatcagatgtattactcttattatttctattgtatgtgttaatgattttatgtaaaaatgtaattgcttttcatgagtagtatgaataaaattgattagtttgtgttttcttgtctccc

SEQ ID NO: 43843 - DNA, 2432 bp, Homo Sapiens
ctaccactccctggactccggagctccagggacccacctctaaggatgaagcaggggtctcagaacaccctgaggcccctgcgagagaacctttgagaaggacaacccctcagcaaggagccagtggcccagggaggtcacctggggccaacaagcacaagggctggagccggcagggcctgcgcagaccttccatcttgcctgagggctcttcagattcaagaggtccagccgtggagaaacatccgggaccctcagacactgttgtttttcgggagaaaaaaccaaaggaggtgatgggaggcttttcaagacgctgctccaaactcatcaactcctcccagctgctttaccaggagtatagtgatgttgtcctgaataaggagatccagagccagcagcggctggagagcctgtccgagacacccgggcctagctctccgcggcagcctcggaaggccctggtctcctccgagtcgtacctgcagcggctctccatggcctccagcggctccctctggcaggaaatccccgtggtgcgcaacagcaccgtgctgctctccatgacccatgaagaccaaaagctgcaagaggtcaaatttgagctgattgtgtcagaggcctcctacctgcgcagtctaaacatagctgtggatcatttccaactttcaacttcactccgggccacactttccaaccaggagcaccaatggctcttctctcgtttacaggatgtgcgagacgtcagcgccacgttcctttcagacctggaagagaactttgagaacaatatcttctccttccaagtatgtgacgtagtcctgaaccacgccccagacttccgccgggtctacctgccttatgtcaccaaccagacctatcaggaacgcaccttccagagcctgatgaatagcaacagcaatttccgggaggtcttggagaagctggagagcgaccccgtctgccagcgcctttccctcaagtcctttctgattctgcccttccaacgcatcacccgcctcaaactgctgctccagaacattctgaagagaacacagcctggctcctcggaggaggcagaggccacgaaggcacaccacgccctggagcagctgatccgggactgcaataacaatgtccagagtatgcgacggacagaggaactaatctacctgagccagaagattgagtttgagtgcaaaatattcccgctcatttctcagtcacgctggctggtgaaaagtggggagctgacagccttggagttcagtgcttccccagggctacgaaggaagctgaacacgcgtccagtccacctgcacctcttcaatgactgtctgctgctgtctcggccccgagagggtagccgattcctggtatttgaccatgctcccttctcctccattcggggggaaaagtgtgaaatgaagctacatggacctcacaaaaacctgttccgactctttctgcggcagaacactcagggcgcccaggccgagttcctcttccgcacggagactcaaagtgaaaagcttcggtggatctcagccttggccatgccaagagaggagttggaccttctggagtgttacaactccccccaggtacagtgccttcgagcctacaagccccgagagaatgatgaattggcactggagaaagccgacgtggtgatggtgactcagcagagcagtgacggctggctggagggcgtgaggctctcagacggggagcgaggctggtttcctgtgcagcaggtggagttcatttccaacccagaggtccgtgcacagaacctgaaggaagctcatcgagtcaagactgccaaactacagctggtggaacagcaagcctaagtcttctctgagaggagtttcgtgagctgaagaacaagctgctcatggcaagggctggccccagaaccctgcaagagaggccttctgtggatggagaactaggccttctcaaagctcaaggacaaaatccagctaacccagtccctcggcccaggcctcctttcgtgctttgtgcttggtgggggggatttcgagggactttgcactggactctgggaacctttcatcattaaaaaaagggggaccattggggcctgagccaaggaactttccttctactgccttatagtgcttaaacattctccgcctccagggtgcagattcagagctggccagagtttcagtgatagccgtatgttaaacagaatctcacctcagtctcctggagggagatgtttaagaggggttaacacatcagatgggagggtcagcccggtgacctctaaggtatcttctaacctagaaattcaccataattatggtgcaaggtcagtgtgtctctgagatctatgtctgttggtggcaatgtgagggtgatactctctcactctaataaacttggcacttctccgagta

SEQ ID NO: 43844 - DNA, 1613 bp, Homo Sapiens
ctgcctgtcagatgcctcattcccacctgtgatgctcagagagaaaccatgagccctgaaaaacaccatattgttttgtgatgtcacctctggaatgttctgagtgttttggtgaccaacttctgcataggacctatacctggcaactcacattgcactcaaggccaaattatacaagaaaaagagataccagatctgaaagcctagaaattccaatcagtgtggttctacctcagaggggcacagccgaacccttcccgaggctccacaacttgtacagcacccctcgctgcgcgcagcaggccgccctgccccggctgagccgcaggatggcgagccagcactcctatccactgaaccgcttctcctccgtgcctttagaccccatggagcgccccatgtcccaggccgacctggagctggactacaacccgccgcgggtgcagctcagcgacgagatgttcgtgttccaggacgggcgctgggtaaatgagaactgccgcctgcagtctccctacttctccccatccgcctccttccaccacaagctgcaccacaagaggctggccaaggagtgcatgctgcaggaggagaacaagtctctgcgggaggagaacaaggccctgcgcgaggagaaccggatgctcagcaaggagaacaagatcctacaggtcttctgggaggagcacaaggcctcgctgggccgagaggagagccgggccccctcgccactgctgcacaaagacagcgcgtccctggaggtggtgaagaaggaccacgtcgccctgcaggtgccccgtggcaaggaggacagcaccctgcagctcctccgggaggagaatcgcgcgctgcagcagctgctggagcagaaacaggcctactgggcgcaggcagaggacacggccgcccctgccgaggaaagcaagcccgccccctcaccccacgaggagccctgcagccccgggctgctgcaggaccagggctccggcctctcctcccgcttcgaggagcccaaagggcctccggcccggcaggaggactccaaggagctgcgcgccctgcggaagatggtcagcaacatgtccgggccctccggggaggaggaggccaaggtgggcccgggcctgcccgacggctgccagcccctgcagctgctgagagagatgaggcaggcgctgcaggccctgctcaaggagaaccggctcctgcaggaggagaacaggaccctgcaggtgctacgggcagagcacaggggcttccaggaggagaacaaggccctgtgggagaacaacaagctgaagctgcagcagaagctggtcattgacaccgtgaccgaggtcaccgcgcgcatggaaatgctcatcgaggagctctacgccttcatgccggccaggagccaggaccccaagaagcctagcagggtctgaggcctcggccttgcaccgggacgccgagtttgggacaccgaacactgggcaaaagagaatcccctgccttcctttgtcgtcctcgccttccccagccagttcgtacctattgaaaagcagcgttagcagccttcctaaactcagagttttaataaaggtgtgaggaggctggggccagttgacacc

SEQ ID NO: 43845 - DNA, 4446 bp, Homo Sapiens
cccacctcggccacactgcttcgctcccccctccccaccttcagctggcaccgcaaacaagccttacctcgttgcatctgcgaggagaggtagcaacagcgagcctagccagccagaggcggtggagaggaggaaggggcggggtgggggggcagagagcgggccgaggccgcccttggtgggggtagcgggggcagagctgccgagcagacccggcagccgccctcctccgcccccaccctccagaagcactcttgcctgagaaccgaattattccactagtattatttcattttttattactccccctcctcactccccagccgcccccacccccacgccggcctcgcctctggttgcatggcagcgctgcccgggcgcgggggctcagggctggcccccagggaagggggaggaggaggaggatcatgaaggccggagtcgcgaccgcgccggacggcgggcagcagccagaggacgagccggagcagcccccgccccggagacacccggacgccgagcagcagtcgcctccgccgccgcagcagcagctgcgggcgcgggccgacccggagccggaggaggagggcgaccgcgacccagaggaggaagaggaggagaaggcgaggccactcgcccgcccggacctgcccttctctcggctcttgcccctcgaccgaagggacctttgatggaaccgaggggagggcgccacggatttgccgactgcagcaggggtgggctgggggctgagataatgtaaccactcctttctcctgttctctcccacacgcccctctcctctacccctattctctgctccactgccctctcaccccggtacacacacccttcctctagccaggatcttcatgctcaggaaggaggcgcctctgcaagggttaaacgatcttttctttttctcccatcctttttccttcccaaacctctattttacctcccttctcctaattggctttcccctcttcggtgtaaccctttggctgcggaggcaaagcacaagcccctagcccagtttcacctgcaacacccctcccccacccaactgctctcttaaaagcaactctggtgcttctgggggttaattgccccagttttctgcccaggagaattaaaacttctcccaatcttctctcctcccctaccttgactcccccaacccctaccacctgagaaaaacgatcttttctctctcacacatgcagtcctcaattcttcattgagctagttttctctaagcccagctcaatccactccagatttgatttacaattgtccccacccttttatataaaagaaagatttctcactgcgtaggaatttgagaagaacccaataatcctttcctggggaacttttaaacaattcgacattgatttaaacaattcgacagaggctctagtggcccctccaccacgcttcttcaatccctctgctcctaccagtgtcctcaggtcaaaagcagaaaggagacacactgaacaaagttggaggttggggtgggtgtgtgagggcaagaaaaacttttttgttattgggctttccaggtggagttcagaaccagtgactcacacttctcagtcctgggagcaatttatttgctacttggaggggttgtaagaaaagccagtgagaaagcagactccccccacaacacagatccactgtggacccccaaaacctgtcctgtccccctcttttaagactccagccacccctcttgggctctctacttccacggggcacatgctgatgcccctgtgtgggctgctctggtggtggtggtgctgctgctccggctggtactgctatggattgtgtgccccagccccccagatgttgcgccaccagggtctcctcaagtgccgctgccgcatgctcttcaatgacctgaaggttttcttactgcggcgccctcctcaagcgcccctgcccatgcacggcgacccccagccccccggtttggcggccaacaacacccttccggctctgggcgccggggggtgggcaggctggaggggcccccgagaagtggtgggcagggagccccctcctgtgccacctccaccccccttgccaccttcttctgtggaagatgactggggtggcccagccacagagccacctgcctcgctgctcagcagtgcctcctcagatgacttctgtaaggagaagaccgaggatcgctactcactgggcagcagcttggacagtggtatgaggaccccactctgccgcatctgcttccaggggccagaacagggggagctgctgagcccatgccgctgtgatggctcggtcaagtgcacacaccagccttgcctcatcaagtggatcagcgagcggggctgctggagctgcgagctgtgctactacaagtaccacgtcatcgccataagcacaaaaaatcctctgcagtggcaggccatctctctgacggtcattgagaaggttcaggttgcagccgccatcctgggctccctcttcctcatcgccagtatttcttggctcatctggtcaactttcagcccctcggcaagatggcagcgccaagaccttctcttccagatctgctacgggatgtatggcttcatggacgtggtgtgcataggtctcatcatccatgaaggaccctcggtgtaccgcatctttaaacggtggcaggctgtcaaccagcagtggaaagtgctgaactatgacaagacaaaagacctggaggatcaaaaggcaggaggcaggaccaacccccggacctcctcatccacccaggccaatatcccctcctcggaagaggagaccgcaggcacccctgcccctgagcagggccctgcccaggctgccggccacccctcaggccctctgtcccatcaccactgtgcttataccatcctgcacatcctgagtcacttgagacctcatgaacagcgaagtcccccaggcagcagccgagagctggtcatgagagtcacgacagtgtgagagcagaggcccggaaggaaggccatgaccaccactgagggcccggagcagggtggggaggtgcagtggcacccccagagccaacagagggagcaggcagagggtgggggacctggcgggagccctggggtagtgtcagagcgggagtgaggctggtgcaggagcagttctgctatttccaatcagtcaatgccactctccacaacaacaatgaaaaccaacaccaactcaacaacaaagtgcaatacaggctgaacctggcccaacagaaaaaccctgccccaatgcacctgcaggcaaggtacccgaagaagcagaggctgagggcaggcaaagcctgtgtgactgtggcagtgccggaggccaagggggccaagaggaaaagcatctgtggtctgctctgctctcaccctgtttggttttgtttctcctggggctgtgttctgcaggcagccagaaaaggaggaggcacgggtgagctggcagggacacactgcctttggggctcctgggctcatttggatgggcaagattcgctgacaaatggctgtggggatggtggggtggatggtcagggagggatgctcagggagggatatgctggtgtgagcagccagagggagagtgtgtctccttcctgaaggaacttccaaatggaactcccgatttcaggtgggctaaaagagggcttaggtttggaaaagggtgtccttctgtgcccttgttaatttattttatagtgatttggttcaaagatgtttacaggacacacacacacacacacacacacacacacacacacacccctagagaaaagtacagatttccagtggatatttcaagcacagttctgctgctgtggcttcagctttggaagctgtcaatcccggagcaactttcccaactacccaaccccaccatggccaggacatgtgcaatgccagccccttcttgtcttggcacatgcacagacccagtcccctcacggtagggcacccctgacctacgggcttccaagagagcagctgcagtggttgggaggagcttgaccagtgtgccccaaggagtggagtagagcccaatctaagtattccttgctgcttggaaccctccctgtttggaaccctccccaaagaggcagtcaggctgatgctcagtgctttgtgctccctgctccttcccgcgtagccaggtgggcccaagggtgcctggcagggagcactacccctggacccctcctgctcgctctggggaccctgccagggaaggccactgggtgttcacctgcaaagtttctggttgtcactgcacagtggtcgcgtcatccatgggtattaaaaggacactgtcaagtacttttttaaactagtttttagggttttttaaaactctctgttgtttgtaatattctcttaaaagcttgaaaataaaacttctttccctacc

SEQ ID NO: 43846 - DNA, 474 bp, Homo Sapiens
atgctccaaacaacttggcctcaggagtcagtgacctttgaggatgtggctgtttacttcacccagaatcaatgggccagcctcgaccctgcgcagagggccctgtacggggaggtgatgctggagaattatgcaaatgtggcttctctggtagcgtttccattccccaaacctgctctgatctcccacctggagagaggggaagcaccatggggcccagatccctgggacaccgagattctgagaggcatcagtcaaggtggtgagtcctggatcaaaaatgaagggctagttataaagcaggaagcctctgaagaaacagagttgcacagaatgccagtaggaggacttctcaggaacgtttctcagcactttgattttaaaaggaaggcactgaagcagactttcaatctaaatccaaatctgatacttcgaggtggatcagttgaggtcaggagtttgagaccagcctga

SEQ ID NO: 43847 - DNA, 890 bp, Homo Sapiens
gaattcttaacagtaaagttctgtaattgagacagaattcccaaataaagtcaagagtaaaattcagatagaggagcagttatacatcagtgggaaatttggttggcagaaaaattaccaggtcatacaacttaatgatagacctgaagtcttatttaaaatgattctctaaaattgaagaattggattaagggggccttgtttggctgattttcatactttttcctcttagtctacaggttggctgcatagaagaaaaaggtagagttatttataatcttgtaaatcttggactttgagtcatctattttcttttacagtcatcgaatacttttggaaataaggtaatatatgccttttgagctgtcttgacgttcacagatataaaatattaaatatattttaattttgtgcccttgcagattgatcacttattcattagtaatttaccagagattgtggtggagttattgatgacgttacatgagccagcaaattctagtgccagtcagagcactgacctctgtgacttttcaggggatttggatcctgctcctaatccacctcattttccatcgcatgtgattaaagcaacatttgcctatatcagcaattgtcataaaaccaagttaaaaagcattttagaaattctttccaaaagccctgattcctatcagaaaattcttcttgccatatgtgagcaagcagctgaaacaaataatgtttataagaagcacagaattcttaaaatatatcacctgtttgttagtttattactgaaagatataaaaagtggcttaggaggagcttgggcctttgttcttcgagacgttatttatactttgattcactatatcaaccaaaggaaattaaccattttctctcagtaa

SEQ ID NO: 43848 - DNA, 384 bp, Homo Sapiens
ggggaagtgacacgggcaccggccgtccctgggaaagccggggtccccggagttacagctcccggagctctggcggctgctttaccggctaaagagatcccggaggtcctagtggacccgcgcagccggcagcgctatgtgtggggccgctttttgggcaagggcggctttgccaagtgcttcgagatctcagacgcggacaacaaggttgtgttcgcgggcaagattgtgcctaagtcgctactgctcatgccgctccagaaggagatgtccatgggaatatccattcaccgcagccttgcccagcagcacgtcgtaggattccatggttttttcgaggacaacgactttgtgttcgtggtgttggagccctgccgccggagg

SEQ ID NO: 43849 - DNA, 309 bp, Homo Sapiens
atgggttcccgctgtgccaagctcaacacaggccagagcccaggccacagcccaggccacagcacgggccatggccggggccacgaatcctccatgaaaaagctcatggcctgtgtgagtcaggataacttctccttgtcatcagcgggcgaggaagaggaggaagaggaggaggagggggaagaggaggagaaagaagagctgccggtgcagggcaagctgctgctgctggagcctgagcggcaggaggagggccacaaggacaacgccgaggcccagcagagccccgagcccaagcggacaccctcc

SEQ ID NO: 43850 - DNA, 348 bp, Homo Sapiens
atgacaaagaaaagaaggaacaatggtcgtgccaaaaagggccgcggccacgtgcagcctattcgctgcactaaatgtgcccgatgcgtgcccaaggacaaggccattaagaaattcgtcattcgaaacatagtggaggccgcagcaatcagggacatttctgaagcgagcgtcttcgatgcctatgtgcttcccaagctgtatgtgaagctacattactgtgtgagttgtgcaattcacagcaaagtagtcaggaatcgatctcgtgaagcccgcaaggaccgaacacccccaccccgatttagacctgcgggtgctgccccacgtcccccaccaaagcccatgtaa

SEQ ID NO: 43851 - DNA, 1041 bp, Homo Sapiens
atgctattcaaacagcaggcgtggctgagacagaagctcctggtgctgggaagccttgccgttgggagtctcctgtatctagtcgccagagttgggagcttggataggctacaacccatttgccccattgaaggtcgactgggtggagcccgcactcaggctgaattcccacttcgcgccctgcagtttaagcgtggcctgctgcacgagttccggaagggcaacgcttccaaggagcaggttcgcctccatgacctggtccagcagctccccaaggccattatcattggggtgaggaaaggaggcacaagggccctgcttgaaatgctgaacctacatccggcagtagtcaaagcctctcaagaaatccacttttttgataatgatgagaattatggtaagggcattgagtggtataggaaaaagatgcctttttcctaccctcagcaaatcacaattgaaaagagcccagcatattttatcacagaggaggttccagaaaggatttacaaaatgaactcatccatcaagttgttgatcattgtcagggagccaaccacaagagctatttctgattatactcaggtgctagaggggaaggagaggaagaacaaaacttattacaagtttgagaagctggccatagaccctaatacatgcgaagtgaacacaaaatacaaagcagtaagaaccagcatctacaccaaacatctggaaaggtggttgaaatactttccaattgagcaatttcatgtcgtcgatggagatcgcctcatcacggaacctctgccagaacttcagctcgtggagaagttcctaaatctgcctccaaggataagtcaatacaatttatacttcaatgctaccagagggttttactgcttgcggtttaatattatctttaataagtgcctggcgggcagcaaggggcgcattcatccagaggtggacccctctgtcattactaaattgcgcaaattctttcatccttttaatcaaaaattttaccagatcactgggaggacattgaactggccctaa

SEQ ID NO: 43852 - DNA, 372 bp, Homo Sapiens
atggccaagatcaaagctcgagatcttcacgggaagaagaaggaggagctgcggaaacagctggatgacctgaaggtggagctgtcccagctgcgcgtcgccaaagtgacaggcggtgcggcctccaagctctctaagatccgagtcgtccacaaatccattgcccattttctcacagttattaaccagactcagaaagaaaacctcaggaaattctacaagggcaagaagtacaagcccctggacctgcggcctaagaagacacgcgccacgcgccaccggctcaacaagcgcgaggagcacctgaagaccaagaagcagcagtggaaggagcggctgtgcctgctgcggaagtacgcggtcaaggcctga

SEQ ID NO: 43853 - DNA, 1068 bp, Homo Sapiens
ggtgactcgaagaagccttccaaaaagcgtgtgaaaaggaagccctactctaccaccaaggtagcctcatcttctctgatagagaatataagaagatatgctgtgcacaccaaccagtgtaggagacctcatggctcccgggtaaagaagaagaggtacccacaagaagatgacttccatcatacagtcttcagcaatcttgaaagattggacaagcttcagcccactcttgaagcctctgaggagtctctagttcacaaggacagaggagatggagagaggccagtcaacgtgaggggcgtcgctaacgaggtcgaagtccagggcatcgcacacaaggacgccatccagggcatcgctaacgaggatgccgcccacggcatcgctaacgaggtcgccgcccacggcatcgcaaacgaggacgctgcccagggcatcgcgaacgaggacgccgcccagggcatcgctaacgaggtcgccgcccacggcatctctaaggaggacaccgtccagggcatcgcgaacgaggacgccgcccagggcatcgctaaagagaaccccgtccagggcgtcgctaacgaggaccctgtccagggcgtcgctaacgaggttgaagtccagggcgtcgcacacgaggacgccgtccagggcatcgctaacgaggacgccgcccacggcatcgcgaacgaggtcgctgcccagggcatcgcgaacgaggacgccgcccaggacatcgcaaaggaggatgccgcccaggacatcgcaaacgaggacgccgcccagggcatctctaaggaggacgccgtccagggcatcgcgaacgaggacgccgcccagggcatcgctaaggaggaccccgtccagggcgtcgctaacgaggacgccgtccagggcgtcgctaacgaggttgaagtccagggcgtcgcacacgaggacgccgtccagggcatcgctaacgaggacgccgcccacggcatcactaacgaggtcgccgcccacggcatcgcgaacgaggacgccgcccagggcatagcacatgaggatgccgtccagggcatcgctaacgag

SEQ ID NO: 43854 - DNA, 945 bp, Homo Sapiens
atggaaaataagacagaagtaacacaattcattcttctaggactaaccaatgactcagaactgcaggttcccctctttataacgttccccttcatctatattatcactctggttggaaacctgggaattattgtattgatattctgggattcctgtctccacaatcccatgtacttttttctcagtaacttgtctctagtggacttttgctactcttcagctgtcactcccatcgtcatggctggattccttatagaagacaaggtcatctcttacaatgcatgtgctgctcaaatgtatatctttgtagcttttgccactgtggaaaattacctcttggcctcaatggcctatgaccgctatgcagcagtgtgcaaacccctacattacaccacaaccatgacaacaactgtgtgtgctcgtctggccataggctcctacctctgtggtttcctgaatgcctccatccacactggggacacatttagtctctctttctgtaagtccaatgaagtccatcactttttctgtgatattccagcagtcatggttctctcttgctctgatagacatattagcgagcttgttcttatttatgttgtgagcttcaatatctttatagctctcctggttatcttgatatcctacacattcatttttatcaccatcctaaagatgcactcagcttcagtataccagaagcctttgtccacctgtgcctctcatttcattgcagtcggcatcttctatgggactattatcttcatgtacttacaacccagctccagtcactccatggacacagacaaaatggcacctgtgttctatacaatggtcatccccatgctgaaccctctggtctatagtctgaggaacaaggaagtgaagagtgcattcaagaaagttgttgagaaggcaaaattgtctgtaggatggtcagtttaa

SEQ ID NO: 43855 - DNA, 1515 bp, Homo Sapiens
atggagcccgaagagccacactccgagggggcatcgcaggaggatggggctcaaggtgcctggggctgggcacccctaagtcacggctctaaggagaaagctctcttcctgcctggcggagccctcccctccccccggatccccgtgctttcccgagaggggaggaccagagaccggcagatggctgcagcgctcctcactgcctggtcccagatgccagtgactttcgaggatgtggccttgtacctctcccgggaggagtggggacggctggaccacacgcagcagaacttctacagggatgtcctgcagaagaaaaatgggctgtcactgggctttcccttcagcaggcctttctgggcccctcaagcgcacggcaagggtgaggcctcgggctccagccggcaggcaggagatgagaaggagtggagaggcgcgtgcacaggagccgtcgaggtggggcagagggtgcagacctcatccgtggcagcccttgggaatgtgaagcccttcagaaccagggcagggagagtccagtggggcgtcccgcagtgcgcgcaggaagcagcctgcggccggagctcagggccggccaaagactccgggcagccggctgagccagatcgcaccccggatgcagctccgccagaccccagtcccacggagccccaggagtaccgcgtcccggagaagcccaacgaggaggagaagggcgccccggagagtggcgaggagggcctggcccctgacagtgaggtgggcaggaagagctaccggtgcgagcagtgcggcaagggcttcagctggcactcgcacctggtgacgcaccggcgcacgcacacgggcgagaagccctacgcctgcactgactgcgggaagcgcttcggccgcagctcgcacctcatccagcaccagatcatccacacgggcgagaagccctacacctgccccgcctgccggaagagcttcagccaccactccacgctgattcagcaccagcgcatccacaccggagagaagccctacgtgtgcgaccgctgcgccaagcgcttcacccgccgctcggacttggtcacccaccagggcacccacacgggcgccaagccgcacaagtgccccatctgcgccaagtgcttcacgcagagctcggcgctagtcacccaccagcgcacccacactggggtcaagccctatccgtgccccgagtgcggcaagtgcttcagccagcgttccaacctcatcgcgcacaaccgcacacacacaggcgagaagccctaccactgcctcgactgcggcaagagcttcagccacagctcgcacctcaccgcgcaccagcgcacccaccgtggcgtgcggccctacgcctgcccgttgtgcggcaagagcttcagccggcgctccaacctgcaccggcacgagaagatccacaccaccgggcccaaggccctggccatgctgatgctgggggcggcggcggcgggggctctggccacacccccacccgctcccacctag

SEQ ID NO: 43856 - DNA, 6007 bp, Homo Sapiens
atgagcggcggcggcgacgtggtgtgcaccggctggctgaggaaatcgcctcccgagaagaagttgaggcgctatgcctggaagaaacgctggtttatcctgcggagtggccggatgagcggtgacccagatgttctggaatactacaagaacgatcactccaagaagcctctgcggatcatcaacctgaacttctgtgagcaggtagatgcaggcctgacctttaacaagaaggagctgcaggatagttttgtgtttgacatcaagaccagtgaacgcaccttttacctggtggctgagacagaagaggacatgaataagtgggtccagagcatctgccagatctgtggcttcaatcaggctgaggagagcacagactccctgagaaatgtttcctcagccggtcatggcccccgctcttctccagctgagctcagcagctctagccagcaccttctccgagagcgcaagtcctcagccccatcacactccagccagccaactctgttcacgtttgaaccccctgtgtcaaaccacatgcagcccaccttgtccaccagcgcacctcaggagtatctctacttgcaccagtgcataagccgaagagcagaaaatgcaaggagtgccagcttctctcagggcaccagagcctcttttctcatgaggagtgacacagctgtacaaaaacttgcccagggcaatggacactgtgtcaacgggatcagtggtcaagtccatggcttctatagccttcccaagccgagccggcacaatacagaattcagagacagtacctacgacctcccccgcagcctggcctcccatggccacaccaagggcagcctcacaggctccgagacagataatgaggatgtgtacaccttcaagacgcccagcaacaccctgtgcagggagttcggggacctcctggtagacaatatggatgttccggccaccccactctcagcctaccagatccctaggacattcactctggacaaaaaccacaatgccatgacagtggccactcctggggactcagccatagctcccccaccccgcccccccaagccaagtcaggcagaaacacctcgatggggcagtcctcagcagagaccgccaatcagtgaaaatagcagatctgtcgctgccaccatccccagacgcaacaccctccctgcaatggacaacagccgacttcaccgagcttcttcctgtgagacctacgagtacccacagcgtggtggagagagtgcaggccggtctgctgaatccatgagtgatggagttggctctttcctgccagggaaaatgattgtgggccgatcggacagcaccaattctgaagacaactatgtgcccatgaatccaggttcttccaccctgttggccatggaacgagcaggtgataattcccagagcgtctacatcccaatgagcccaggggcccatcactttgactcacttggctacccatcaacaacccttcctgtgcaccgaggccccagcagaggaagtgagattcagccaccccctgtcaaccgcaacctcaaacctgatcggaaagcaaagccaacaccacttgacctgaggaacaacaccgtcatcgatgaactccccttcaagtcacctatcaccaagtcttggtctagggccaaccacaccttcaactccagctcctcccagtactgccgccccatctccacccagagcatcaccagcacagactcaggagacagcgaagagaactatgtccctatgcaaaacccagtgtctgcatctcccgttcccagtggcacgaacagtcctgcccctaagaagagcaccggcagcgttgattatctggccctggacttccagccgagctccccaagcccccaccgcaagccatctacttcatccgtcacctctgatgagaaggtggactacgttcaggtggacaaggagaagacccaggccctgcagaacaccatgcaggagtggacagacgtgcggcagtcctcagagccttccaagggtgccaagctgtgatgagagggccaccgcagagcccaggaggcagcatctccagagctggcccttcccatctcccctctcccctctcccgttcttcctcccatccacctcctctctactctgccagtctcagccttcaaagcacttgacatcagggaccctgaacccttcccctgggaggtgagggcctgatcaaggcacctcctctgcccactcggggcccagctgtgatttttatcagtaatggccatgcctccacccaccttagttaggagctacttccaaaaagcatccttcagcctcttcctgtcctttagacctgactctctaccagatgtttggagggaagggctggggctctgagccagattccacacctcacgttcagtcacagccctcagctatcttccctccggccactgggctacctctccttcagtcccagaagacaagtctcaccaacccagggagtcaaggaccagcaaaccaaagtggataatggactttttcattcctgtttttcttggcaggagagaagcaaggccactaaaagaggagatggtggagacggaggctcagcagtggtcttgaggggtaaaggacttagatgcccagatgaagagggaaagctgacatctgcagggaacccactttgaggctgaggccatggcaggacagctgctgtggggtgcagaggcagaagatgaaggacaaaaggaagggaaaactgatggccaacctagagcagcaaggagcagggcttggagctcgggtggtggagatgacaaggacactgtggggtctgggtccccagaactctggagctacaggccactctaggcccaagggctagtcctcttccccagtcccctcagaggcccccgccagccccaccttgaaagcagcatacaggggaaggcttggaccaagctgggcgaccaagcacatggggcaggaacacatggtaaaggggtggggaatatgggagggagtgtggtgtggatgggggtgatgcagggactgaggggaaccctgggacaggcacaggctgggcagaggcacagggcagtgcaggggactctgcagtggggtcgggaagtgagtttctttgcagtgagcagtgcagtggaagtcgggcacagaggtagcagacagatgtgaagcagtggtgaaggccatgtagcaagtggggaaatacatccaaagggcctgggagttggggggtgcccaacgcaatccttgggggtgcagggtggagcagaaagtgaaggagggacacgtgcaagagtggtgtgcatggtggtgtgacatgaggaccgttcctaggatgggacagtgggtcaggcaggacaaggagaaagcagggcagaatgatgcctagaggaccacatcaggcatggctgacagcttgtgcccatgggctgtggcgtatgtcagatcgcagggtaggaacgagtctggcctggtgccggcccagtgtttcctcagctcatccgccctctgttgctccctagcattccaggagccatcttggactctcctccccaggtttgaaaggccatcagattagcagggacggggtgtagggcatcacccaaggttccttctcttaaactaagggtgggggatctgaatgtttttatgttgactgttcttgactaaattttcaagagtttcagaagcaacaggacagaccagacgtttcattctaccctggggcgaacagaacttcttcctcccaaacaatgacttcctgccatgtttgatggggacagctaccactgtcctctgcccccattcccctttcagctcccatgagcatgcatagttcaccagaccaatggcctagccattctctaagtcccatcctggaagaagttatttcttcaagagctgcacctctcctcctagcattagtttagatcaactcaaggagtatttattaatggctgctgtctccagtttctggggttaagcactaaggacacaagaatcaatcagaccttctccctgaacttaagatagccacaatcagaaaaaggacaaggacatgagacagtggtgatggccatcagacagagacttcaaatgctgatggagggcagaggaagtacttagggaggttggtgtcagaggcaggagtgggggatcagggaaggtggattctaggaaaagggagtgcctgaggtaggccttagaaggggatgagtcagatttttacagaggaggagggcagggcttgggtccagtggaggaagaaggaaggagaggcttggaaagccttgtgtcttgggaacaaaaggcctttgagcatatgggtccagccactcagaagtgtaggggccatgccttggtgttccaataagtgaatggaagcagtggtggtagctacactgggcagagttggcagggtgctggttcactctgcccagccctgaatgtgtgccttaaaggccccctacaaggggccccatacgacagagcttttaactggtgccttccctgtacccgcagcagccacaagtgggcccagactattgcagcctcccataaacatgtgagcatgttctgagtgtgccatgatgtgagtggacctggctggaatcttcggagagcgactgaggtgttcaaatcgaatctcccaggaggcttccttccagccccctattctggtaactaccaggaggcttccttccagccccctattctggtaactaccaaaatccctcgggtgcaagtgtaggggtagagatggaaggatgagaggtgaaattgaccttttgaaagcaaagctctggctcacaggccccaaactaccagccgtatctagcatatccccaccctccacccactacctcctccaacaaaggagtcaactcagttgaaaaaactggtcctttggcctatccatgggtcaaagtccacctctcctgggggcctggagaggactgagcctacggaaaggggataccttcccactcagcactgcttcacacaggccccctgcctggggctctccaaggagccttcttcacccacttccagctccacttctgcaaggttaagtcaagtgagaacgatgagaaatagggagatggtgtctccttaagtccttgatctgcctgtctgtggaatgggaggttggattagctgcgctgaggtcccatccacagctggtgctcagctgcttgaaggggagactccctcctctgtaacttctttctgggggattggggtgggcagtacctatccccagtcccctcctagcttgactttagtggtttccaatgtagaagttaacaaagtatgccccattcctgtgacaaaagcacaaccattctgaagttactggagcatgggctcagctcatcctccctctggccccttctcccatggggacatctcggcccagcacccctatcccatttccagagttcttccttccccatctgggccttcataaaatgcaggggaagccagactggtctcaggagcgctaaagcccttccgtggggggtcgtctttctgggactagccctgctgtttaggacctgggaccacaatggggtacctgccgagggggtccccaagagatccaggctgtcatgtgatttatggtggcatgtgttgtgtatttgttggctacttgtgtcttgaaatctagaattatttcacgcagaattgtcactgtttgtcaggaagagaaaatgggctagtggaagcccagtcttgagttcttgtcttgttaccatttaaaattgacatttaattttcaaatcactgttggtgcctaatcacttaagttattaatttattctgttgtattcttttttttaaattgtaacatatttatccggtgggtgggacaggagtgtgttcaagtgggtcatgtttttgctgtggtgacacatggtacaggcttggagcttgcaggtccctttctactgtggtgttggagcaggacaataaagtccactagaaatgcacccca

SEQ ID NO: 43857 - DNA, 2056 bp, Homo Sapiens
atgcagggggaggcacaccctagtgcttcccttattgacagaaccatcaagatgagaaaagaaacagaggctaggaaagtggtcttagcctggggactcctaaatgtatctatggctggaatgatatatactgaaatgactggaaaattgattagttcatactacaatgtgacatactggcccctctggtatattgagcttgcccttgcatctctcttcagccttaatgccttatttgatttttggagatatttcaaatatactgtggcaccaacaagtctggttgttagtcctggacagcaaacacttttagggttgaaaacagctgttgtacagactacgcctccacatgatctggcagcaacccaaatccctcccgctccaccttccccttcaattcagggtcagagtgtgttgagttatagcccttctcgttcgcccagtaccagtcccaagttcaccaccagctgtatgactggttacagccctcagctgcaaggtctgtcctcaggtggcagtggttcttatagccctggagtgacctactcgcccgtcagtggttataataagttggcgagctttagcccctctcctccttctccgtaccctaccactgttggaccagtggagagcagtggattgagatctcgctaccgttcttcacctaccgtctacaactcacctactgacaaagaagactacatgaccgacctacgaactttggatacttttctcagaagtgaagaggagaaacagcatagggttaagctggggagcccagattctacctctccttccagcagtcctactttctggaactatagtcgttctatgggggattatgcacaaactttaaagaagtttcagtatcagcttgcctgtaggtctcaggccccatgtgctaacaaagatgaagccgatctcagctctaaacaagccgcagaagaggtctgggcaagagtggctatgaatagacaacttcttgatcatatggattcatggacagctaaatttagaaattggatcaatgagacaatattagtgccacttgttcaagagattgagtctgtcagcacacagatgagacgaatgggttgtccagagctacagataggagaggctagtattactagcttgaaacaagctgccctggttaaagcgcctctcattccgactttgaacacaatcgttcagtatctagaccttactccaaatcaggaatacttgtttgaaaggatcaaagaactatctcagggaggttgtatgagctcatttcgatggaacagaggtggcgacttcaaaggacgaaagtgggatacagacctgcccaccgattctgctatcatcatgcatgtattttgcacctaccttgattccagattacctccacatccgaagtatcccgacggaaaaacttttacttctcagcactttgttcagacaccaaataaaccagatgttacaaatgagaatgttttttgcatttatcagagtgctatcaaccctccccattatgagctcatctaccagcgtcatgtatacaacctgccaaagggcagaaataatatgtttcatacattgttgatgtttctctacatcataaagaccaaagagtcaggaatgcttgggagagttaatcttggtctatctggtgtgaatatattgtggatctttggcgagtagcaagtcatatatttaattctgacatttagactatttcactgaaccagaagtcgaaactaaacatctctgagccactgactcttctgaaataaaatacacatgggtgtatgttacagactctttagatttaacagaaaatgtagctgttatgaaatgtaattgtaaaaatatgtcccgtatcttctatatcgagacattgcctttaattttatatcgcttttcagaaatttcagttgactacaaaactgcaacccttcggatttttattgactcaaaatagtgccattccccttaatgaaatagattttgagtctttttttcattgtaacccccaaatgagaatcatctacctgattcttgtaccaaaaaaaaa

SEQ ID NO: 43858 - DNA, 1044 bp, Homo Sapiens
tccagagacaatggccccgatgggatggagcccgaatgcgtcattgagagtaactggaatgagattgttgacagctttgatgacatgaacctctcggagtcccttctccgtgacatctatgcctatggttttgagaagccctctgccatccagcagcaagccattctaccttgtatcaggggttataatgtaatcgctcaagcccgatctgggactgggaaaatggccacatttgccatatcgattctgcagcagattgaattagatctaaaagccacccaggccttggtcctagcacccactcgagaattggctcagcagatacagaaggtggtcatggcactagtagactacatgggtgcctcctgtcatgcctgtgtcaggggcaccaatatgcgtgctgaggtgcagaaactgcagatggaagctccccacatcatcgtgggtacccctagccgtgtgtttgatatgcttaaccagagatacctgtctcccaaatacatcaagatgtttgtactggataaagctgatgaaatgttaagccgtggattcaaggaccagatctatgacatattccaaaagctcaacagcaacacccaggtagttttgctgtcagctacaatgccttctgatatgcttgaggtgatcaagaagttcatgagggaccccattcggattcttgtcaagaaggaagagttgaccctggagggcatccgccaattctacatcaacgtggaacaagaggagtggaagctggacacactatgtgacttgtatgaaaccctgaccatcacccaggaagtcatcttcatcaacacccggaggaaggtggactggctcactgagaagatgcatgctcgagatttcactgtctccgccatgcatggagatatggaccaaaaggagcaagacgtgatcatgagggagtttcattctggctctagcagagttttgattacaactgacctgctggccagaggcattgatgtgcagcagggaaaactatatccacagaatcagtcgaggtggacggtttggccgtaa

SEQ ID NO: 43859 - DNA, 1146 bp, Homo Sapiens
gctgcgggaccgccgggcgcagagcacaagccgggcacccacggactgagcggcgcgcgggccgagatgcgcgcccgcctgctgcccccgctcccgggcctggagcggcgcgaccccatggcaggtagcggcggcctgggcggcggggccgggggcggccagggcgcaggggccgggcaaggggccgctctgcgggcgtcccgcgcgccgatgctgctcgtggccctggtgctcggcgcctactgcctctgcgccctccccggccgctgcccgccggccgcccgcgcccccgcgccggcccccgcgccctccgagccgtccagctccgtccaccgcccgggagcacccggcctgcctttggccagcggtcccggccgccggcgcttcccgcaagcgctcatcgttggcgtgaagaagggcggcacgcgcgccctgctggagtttctgcggctgcaccccgacgtccgcgcgctgggctctgagccccacttcttcgacaggtgctacgagcgcggcctcgcctggtaccggagtctgatgccccgaaccctggatgggcagatcaccatggagaagacccccagctacttcgtgacgcgagaggccccccgccgcatccacgccatgtccccggacacgaagctgatcgtggtggtgcggaaccccgtgacccgggccatctccgactacgcccagacgctctccaagaccccgggcctgcccagcttccgcgccctggccttccgccacggcctgggccccgtggacacagcctggagcgccgtccgcatcggcctgtacgcccagcacctggaccactggctgcgctacttccccctgtcccacttcctgttcgtcagcggggagcgtctggtcagcgacccggccggagaggtcggccgcgtgcaggacttcctgggcctgaaacgggtcgtcacggacaagcacttctacttcaacgccaccaagggcttcccctgcctcaagaaggcccagggcggcagccgtccccgctgcctgggcaagtccaagggccggccacacccacgcgtgccccaggccctggtccggcgcctgcaggagttctaccggcccttcaaccgcaggttctaccagatgacgggccaggacttcggctggggctga

SEQ ID NO: 43860 - DNA, 2701 bp, Homo Sapiens
attcgagaatgggacatggaatgaggcgacggccccagcaagccccagcagccccagccccagccccaggcccagcagcagcagcagcagcccctgctctcccgccgcccggagaggctctgcagccatgaagccaaccgtcccgaggcaccgccggtaagcagggagcctccgcggagctcccgccgccgctcccccttggcgccaaaggcacccggtcccggagcagccacgcgcggcccgtgagcctcgccaccagcgggggctcagaggaggaggacaaagacggcggggtgctgttccacgtcaacaagagcggcttccccatcgacagccacacctgggagcgcatgtggatgcacgtggccaaggtgcaccctaaggggggagaaatggtgggcgccatcaggaacgccgccttcttggcaaagccttcaataccccaggtcccaaactacaggctgtcgatgacgatcccagactggctccaggcgatccagaattacatgaagaccctacaatataatcacacagggacccagttctttgaaattaggaaaatgagaccgctgagtgggttaatggaaacagcaaaagaaatgacccgagagtccttgcctatcaaatgccttgaagctgtcatcctgggcatctacttaaccaatgggcagccttccattgagcggttccccatcagctttaaaacctacttctcaggaaactactttcaccacgttgtgctggggatttactgcaatggccgctatggctcattgggcatgagccgcagggctgagctgatggacaagccattgacttttcggactctgagtgacctcatctttgactttgaggactcttacaagaaatacctgcacacagtcaagaaggtcaagattgggctgtacgtcccccatgagcctcatagcttccagcccattgagtggaagcagctggtcctcaacgtctcaaagatgctgagggctgacataaggaaggagctggagaaatatgccagggacatgagaatgaagatcctgaaacctgcaagtgcccactctccgacccaagtgagaagccggggaaaatccctgtcccccagaaggagacaggcaagccccccgaggaggctcggccggcgagagaagtcgcctgcactgcctgaaaagaaggtggctgatctgagcactctgaatgaagtgggctatcaaatccgaatttagccaagccataccggccagcaagagggtttctgtggtgcttctctctgcactttacccagcatcttcaggaggaactgcaactatttattaagaacttgtgaattttatttttaaggattcacctggaaatagaatctgagtgggtggtaaccattagctttaaaaaattcactaaaaggcaccatgaaaaggctgaagtaataagccccactggggttggactatgtccctcactcaagatcttaaggataaccgtaactgaagttttatatttttccatttacctactttcttttacttgctttgaacattatgcctcaccaatagtaaatgttcatgaaataatctcttgaacttttggtatagtaaggtaactctaacagtattactgtctttttcagcaataacagaaagcaaaaatgggtgggttttttttaagcagttattacctcagcattttgacatcagatatgcaaacttaatggcgttttgtttttttatattctatttgtattctttccccagtatttcccatggggatctccacaagtttggagttttttcctggtgcacacacgtgaggagatttaaggtactatatgcaagtgttttactaaaaagcactgaaattcttctggcaatacaagaaccattttcaggatcttggagttacttccttcttaatctttcttaaagcattcactgatgtttttgttttttcaaaatgaaacaaaaatatcacattgagaagctagtctatgttctgtcactaacatttaaactttgcagactctaacaaaaagcacaagaggtcacgtactattatacaaatttagcggtactggatttacctctgacattaacacactcaggcagagaccaggagtgatcagcaggtcttcagaaccaaaaaacctttctgttcacatttcatctgatttttaaactgaggcaggctttgattcttctgaaggatgccaagaatcaaactaagggaggactcactgttaaagatgtgttctgatgtcttatattaagaccaaatgtgacatgatgtgattatcttccagtactttgcttttaggtaccatttcatgacattttaggaatgagtattggaaaatataaagaattagaaaagcagcactttttttttaatggaaaagtcttcggtccagtgttacaccttatagtgtaattcagtccctaagcacagaatgaatgtctggcctgcatatggtagttacagtgtaacctctggctgcagaccacacaggacaaccctaacagcctagtcttgtatggtgtaaatatcaagagtacagcttcaatttcatttgctttatcttagcaacaatgccaactcaggagagcagacggccgatttcagtgaagtctggtagtcaacagatgttatttcagtctcagtgcatctcctctggctttctttgactgaaggtgtttataggaaggaagtt

SEQ ID NO: 43861 - DNA, 615 bp, Homo Sapiens
gggttcccgtctgctgcctctcggagagtcccgggtgactgccgcaggctccatcgccctgtggcctgcaggtattgcgagatttatagggaggacgctgggacccccaaaagctgggaaatgggactattggcattcagggatgtggctctagaattctctccagaggagtgggaatgcctggacccagctcagcggagtttgtatagggatgtgatgttagagaactacagaaacctgatctcccttggtgaggatagcttcaatatgcaattcctatttcacagtcttgctatgtctaagccagaactgatcatctgtctggaggcaaggaaagagccctggaacgtgaacacagagaagacagccagacactcagttttgtcttcttatcttactgaagacattttgccagagcagggcctgcaagtttcattccaaaaagtgatgctgagaagatatgaaagatgttgtcttgagaaattacgcttaaggaatgactgggaaattgtggcctgtgaagatgtgcttgcttcccctttgccttctgccatgattctaagtttcctgaggcctccccagaagcagaagcatgtaaagcccacagaaccgtga

SEQ ID NO: 43862 - DNA, 3461 bp, Homo Sapiens
cttgaaaaaagcgaattcaaagatgaacccctacttttccgttttttttcggatgaggaaatggagggatcaaatatgaaacatcgacttatgaaacatgacttaaaagttgtggaaaatgttatagctaagtcattattgattaaatccaatgaaggcagctatggctttggattagaagacaaaaataaagttccaataataaagttggtagaaaagggatctaatgctgagatggctggcatggaagtcgggaaaaagatttttgctattaatggtgacctagtttttatgagacctttcaatgaagtggattgcttcctgaaatcgtgtttaaacagcagaaaacctctaagagttcttgtgagcacaaagccaagagagacagtgaaaattccagattcagctgatggacttggcttccagatccggggatttggcccttctgttgtgcatgctgtaggaagaggaactgtggctgcagcagctggtcttcaccctggacagtgcattatcaaggtgaatggaatcaatgtcagcaaagagacacatgccagtgtcattgcacacgttacagcctgcaggaagtacaggcggccaacgaagcaagattccatacaatgggtttataatagcattgagagtgctcaagaagaccttcaaaaatctcactccaagccccctggagatgaagcaggggatgcttttgactgtaaagtagaagaggttattgacaaattcaacactatggccatcattgatgggaagaaggagcatgtgagtctgacagtggacaatgtccacctggaatatggtgtcgtgtatgagtacgacagcacagctggcatcaagtgcaatgtggtggaaaagatgattgagcccaaaggtttcttcagcttaactgccaagattcttgaagccctggctaaaagtgatgagcattttgtacaaaactgtaccagcctaaattctctaaatgaagtgattcctactgaccttcagagtaaattcagtgccctttgcagtgaaagaattgaacacctatgtcagagaatatccagttataaaaagttttctcgtgtactgaagaatagggcctggcctacttttaaacaggccaaatctaaaatctccccactgcacagcagtgatttctgccctaccaactgccatgtcaatgtgatggaagtttcttatcccaaaacatcaacctctttgggaagtgcatttggtgttcagttggatagcaggaagcataattctcatgataaagaaaacaaatcttcggagcaagggaaactgagccctatggtgtacattcagcacaccatcacaaccatggcggccccttcaggtctgtctctgggacagcaggatggccatggtctcaggtatctgctaaaagaagaagacttagaaacccaagacatctatcagaaactgctgggcaaacttcagactgcactgaaagaggtggagatgtgtgtttgtcaaatagatgaccttctgtcttcaataacatattctcctaaattagaacgtaagacatcagagggcataataccaacagacagtgacaatgagaagggagaaagaaacagcaaacgggtatgttttaatgtagcaggagatgaacaggaagattctggtcatgacaccatcagcaacagagactcttacagtgactgcaacagcaataggaattccatcgcctccttcaccagcatctgcagcagccagtgcagctcgtatttccacagtgatgaaatggactcaggtgatgaacttcccttaagtgttcgcatatctcatgataaacaggacaagatacatagttgccttgagcatcttttcagccaggtggattcaattaccaatctcctaaaagggcaggctgttgtgagggcctttgaccaaaccaagtatctcactccaggccgaggattgcaagaatttcaacaggaaatggaaccaaagctgagttgtccaaaaaggctacggcttcatatcaagcaagatccttggaatcttcccagcagcgtccggactcttgctcagaacatcaggaaatttgttgaagaggtaaagtgtaggctactcctggctcttcttgaatattcagatagtgagacacagctccgtagagacatggttttctgccagactcttgtggccactgtctgtgccttctctgagcagctcatggcggccttgaaccagatgtttgacaacagcaaggaaaatgagatggaaacttgggaagccagcaggaggtggctggaccagatagcgaatgcaggtgttctttttcactttcagtcacttctgtcaccaaacttgacagatgaacaagccatgttagaagatacactggttgcactatttgatttggaaaaggtttccttttactttaaaccatcagaagaggaacctctggttgcaaatgttcctcttacatatcaagcagaaggaagtcggcaagctctgaaagtttacttctacattgatagttatcattttgaacaacttcctcaacggctgaaaaatggaggagggtttaaaattcatcctgttctttttgcacaagcactagagagcatggaaggatattattacagagacaatgtttctgtggaagaatttcaagctcagataaatgcagcctcactggaaaaggtcaaacagtacaaccagaagctcagggcattctacttggacaagtcaaattcaccaccaaactccacatccaaagctgcctatgtagataagctaatgaggcctctcaacgctttggatgaactttaccgactggtagcctcgtttatcagatccaagcgcacagctgcctgtgcaaacacagcttgcagtgcttctggggttggactgctgtcagtttcctcggagctgtgcaacaggctgggcgcctgccacatcatcatgtgcagcagcggtgtgcatcggtgcaccctgagcgtgacgctggagcaagccatcattctggccagaagccacggactgccacctcgttacatcatgcaggctacagatgtgatgcggaagcagggagcaagagttcagaacacagcgaagaatttgggagtcagagaccggactccacagtctgcaccaaggctgtacaagctgtgcgagccacctcccccagctggagaagaatgaaaagaactcccaagaaaccaggcaggcagaagctcctgaatgctggactagacaaactacatgctggctaaacattctccactgaagatacatcaatgcttttttttttttttttttctgtaaatctttcttcccattgcaaacaagtagtgatcagtttatactttgatatttatgctggaaatggatagaagttcaatcagacagttcagcttcacgaactgatgtctctctgtattgacattaagtattcacttttagagtaaaatccatccctgggacat

SEQ ID NO: 43863 - DNA, 1855 bp, Homo Sapiens
aggaaaccaaggcaagctccccctgtcaaagcaccttggcccataagaagaaaagggggagccccagatgtgatgagcgcttccaggcttcaggctcagaaggcgcccccagctctcctgtaactcagaggccagtgtgatgggagttcctccactcagcacacttcccctgtaaacacgcctgtggtgggcaaaagggctttggaacgggttgcttgtcttttctctcctgcgtaatttccactttcattcatgataatgtcgaacacgcacaaagctcggctggaacgccgggtcactggctcaaccaaccggtggcgtttgcccaaacagcctttctctggggacctgctctcactttcccagatgtgcaaggctctgagcatagactttgaggaagctttgaggaacccagacaggttatgcatttcacaaatccagaagtttttctttgagaatttcaagaacaaggacatccaaagtggggaagcagatgtgattctcgagtgcctgggcttcaaatgggagctccatcagccccagctttttcagtctgagaccttggccaagctctacctgaaagccctggcgcagggcaccacacaccccctgagggagctggaggagcttctgcgagctcaatcacctaagaagaccaaagaaaaatcccctgcaaagaggatcatcatttccttgaagatcaatgacccactggtcactaaagtcgccttcgccacggccctgaagaacctctacatgagtgaggtggagattaacttggaagacctactgggagtgctggcttccgcccacatcctccagttcagtggcctgtttcaaaggtgcgtggatgtgatgatagccagactcaagccaagcaccatcaagaaattctacgaggccggctgcaagtacaaggaagagcagctcaccaccggctgcgagaagtggctggaaatgaacttggttcctctaggggggacgcagatccacctccacaaaatcccacaggacctgctccacaaagtgctgaagtcccccaggttatttacctttagtgaattccatcttctgaaaacaatgcttttgtgggtcttcttgcaactgaactacaagattcaggcaattccgacttatgaaaccgtgatgacattttttaagagctttcctgagaactgttgctttctggaccgggacataggacggagcttgaggccgctcttcctctgcttgcgtctgcacggcatcaccaaaggcaaggatctggaggtgctgcggcaccttaacttcttcccagagtcatggctcgaccaggttacagtcaaccattaccacgcactggagaatgggggcgacatggtccacctgaaagatcttaacacccaggctgtgagatttgggctgctctttaaccaggagaatacaacttattcgaaaacgattgctctatatggattcttctttaagataaagggactcaaacatgatactacctcttatagtttttacatgcagagaataaagcacacagacctggaatctccctctgcggtctacgagcacaaccacgtcagcctgcgagcggcacgcctggtgaagtatgagatcagagcagaggccctggttgacggcaagtggcaggagttcaggacaaaccagatcaagcagaagtttgggttgaccacgtcatcctgcaaaagccatgcaagtaccttgaaaatccaaactgtgggcatcccaatctatgtaagttttgcattcatcttcccagcatcttgacagtttccagaagaatctatgggattttccccccactggtctgcataaaagaaaataaaatgacataaaagggagc

SEQ ID NO: 43864 - DNA, 501 bp, Homo Sapiens
atgctggagtacagtggcatgatcttggctcactgtaacctccgcctcctggattcaagtgattctcatgcctcagcttcccgagtagctgggattacagatatgcatcaccatgcccggctagtttttgtatctttagtagagatggggtttcaccatgttagccaggctggtcttgaactcccaacctcaagtgatccacccacctcagcctcccaaagtgctgggattacaagtgtgagccaccgcgcccggccagcagtggtcttaagccaccagcaaagccatctccaactccttcagacccttcagcaaaaggccaaatggcactggatcccctctggggtggggctttgtgagggcagctgtcggcatcagctccctgccaatacctgcagccctgctgacagtctcgctccagtgagtgggggacttggggacaccctgggcagatggagcagaggacatatggggatggtcagggtgggaggggggctctga

SEQ ID NO: 43865 - DNA, 2357 bp, Homo Sapiens
atccacagtaggcattttaataggacagataatactgaaggggtaagcaaaccagatggatttcaagaacatgttacagctactcacaaaacttacagatgtaatgatttggtagagttggcagtaggcttgagtcatggagatcacagcagcatgaagttagtagaagaagcagtacagctgcaatatcagaatgcttgtgtgcaacaaggcaactgtacaaaaccatttatgtttgacatttcaagaattttcacttgctgtctaccaggcttacctgaaacttcttcttgtgtttgtccaggatatatcactgttgtgtcagtatctaataatcctgtgatcaaggaattgcagaatcagcctgtgcgaatagttctcattgagggtgacctcacagagaattaccgccacctgggatttaataagtctgcaaatattaaaacagtattagatagcatgcggcttcaagaagacagctcagaagaactgtgggcaaatcacgtgttacaggtgttaatccagttcaaggtgaaccttgtcctggtacaaggaaatgtgtccgaacgcttaattgaaaaatgtataaacagtaagcggttggtaatcggctcagtgaatggcagtgtgatgcaggcttttgcagaggctgcaggagcagtacaggtggcctacattacacaagtgaatgaagattgtgtgggcgacggggtctgcgtgaccttctggagaagcagccctttggatgttgtagataggaacaacagaatcgcaatcttattaaaaacagaaggaattaatttggttacggccgtgctcactaacccagttactgcacagatgcaaatcaaagaagataggttctggacatgtgcctatcgtttgtattatgctctaaaagaggaaaaggtcttccttggaggtggtgcagttgaatttttgtgtcttagctgtcttcatattcttgcagagcaatctctgaaaaaagaaaaccatgcctgctcagggtggctgcataatacttcctcttggctggcttcatctctggcaatatacagaccaactgtgcttaaattcctggcaaatggatggcagaaatacctttcaactctcctatataacactgccaattactcatcagaatttgaagccagcacatacattcaacatcatctgcaaaatgccacagactctggctctccttcatcttacatcttgaatgaatatagtaaactaaatagtagaatttttaattcagacatttcaaataaactggagcagattccgagagtttatgacgttgttacaccaaagattgaggcgtggcgccgagcattggatttagtattgttagtacttcagacagacagtgaaataattactggacatggacacacacagataaattcacaggaattaacgggctttctatttttgtagtgttactggctaagtctttggaaaataatttttcataatatgtcatgctaataataaatatattgatagccaagtcatggtgcctaaaatgccagctattgccaagaagaaaatagttgatgtctgtcaataactgtgcatggtctgagattttaccctacttataagctaacaagttagcctgttactgtttcgtgggatgctacagaatgcataagacacctgggtcagaaacaaaggacttatcgctcacagcaaaagctgtagccagagcttcatgttggttttattcagttcctcatttttctagttcccacaggaggaacacaaagggcccatgatgaaagcctgcacacagtgggttatgttgtaagcttgggttattaactgcttttatagtaagcaaaaaaatcctggtctttgtccaaagggagttattaccccatacttgaagatagcttagtgtaaacacaagcctaggacatggactaggtaaagacaaagtccttgcattcttgacatacccagtaagtatgcagggacactcagagcccatagtggatagtctcttccaacagtctgctcctcagcctgagatgttcttggccaaacttgaattttcacatgagtatgccactctatcagctactctgattaacctgacagtcgggttgtttagtcagtaccaaatttgttcatttggtctcatatagcaattaatgcaggctattatcagacacagcagcaggatgaagccaacctgcagtattaacctcagtcctgtcccccaaggtcttgactcaatcaactctaagttccaagggaggaccaataggtctttttattaggcagccagaatgtagtgaaggacaatttattatactttatgacccaataaagggagctttgactgacgt

SEQ ID NO: 43866 - DNA, 273 bp, Homo Sapiens
atggcagccatcagaggagccccattgctattaggaggctcctattgccctccccttcagcctctgactttcacctgtgctacccaattctggttccttcactcccattcaaaaatggaccccagaaaagccttattttgtggagtacctagttcccttttgggtttgtctcttgactgctacgggcattgccccagggcaaccatgacagtgaagatgactggccaagcttgtggactggccagcaagcttgggctgcctgagacgctttga

SEQ ID NO: 43867 - DNA, 2860 bp, Homo Sapiens
tgtttttgttttttacagattggaaaatgccttttatgaacatgcacagacttattactacactgagatcagaagagtgaaatctcataaagaatttttgaataaaacaacacaccagcttttatttgttaggcatcagttcaaaatagctttcttcagtgagttgaaacaagatacacaaaatgcgctgaagaattataggaccgcctataatcttgtacacgaattgagagcccatgaaactaatattctggaaattaagactatggcaggatttataaactacaagatctgtaggctgtgttttcaacacaacaccccattggatgcaattgctcagttccgaaaacacatcgacttgtgtaagaaaaagattggaagtgcagagctgtcttttgagcatgatgcatggatgtctaaacaattccaggcctttggagatttatttgatgaagctattaagttagggttaacagctattcaaactcagaatcctggtttctattaccagcaggcagcatactatgcccaggagcggaaacagcttgcaaaaaccctctgtaaccacgaagcttctgtaatgtatcccaatcctgatcccttagaaacacaaacaggcgttcttgacttttatggacaaagatcatggcgacaaggaatactaagttttgatctttctgatcctgaaaaagaaaaggtgggaattcttgccattcagctgaaggagagaaatgttgttcactctgagataatcataactcttctgagcaatgctgttgcacagttcaagaagtataagtgcccgcgaatgaaaagtcacctaatggttcagatgggagaggaatattattacgcaaaggattataccaaagctttgaagttgctggattatgtgatgtgtgattatcggagtgaaggatggtggactctgctcacttctgtattaactacagctctgaagtgctcctacctcatggcccaattaaaggattacattacttactccctagaactccttggtagagcttcaactctgaaagatgaccagaagtctcggatagaaaagaacctcataaatgttttaatgaatgaaagtcctgatccagaacccgactgtgatatcttagctgtgaaaactgctcagaagctgtgggcagaccgaatttctctggctggcagcaatattttcacaataggagtacaggactttgtgccatttgtgcagtgcaaagccaagtttcatgccccaagttttcatgttgatgttcctgttcagtttgatatttatctgaaggctgattgtccacatcccattaggttttccaagctctgtgtcagctttaataatcaggaatacaaccagttctgtgtaatagaagaagcatccaaagcaaatgaagttttagaaaatctgactcaaggaaagatgtgcctagttcctggcaaaacaagaaaactgttatttaagtttgttgcaaaaactgaagatgtgggaaagaaaattgagattacttcagtggatcttgctctgggcaatgagacgggaagatgtgtggttttaaattggcagggaggaggaggagatgctgcttcctcccaagaagccttacaggcagctcggtctttcaaaaggcgacctaagctacctgacaatgaagttcactgggacagcattataattcaggcaagcacaatgatcatatccagagtcccaaacatttctgtacatctgctacatgaaccccctgcactgactaatgaaatgtattgtttggttgtgactgttcagtcccatgaaaagacccaaatcagagatgtgaagctcaccgctggcttaaaaccaggacaggatgccaatttaactcagaagactcacgtgactcttcatggaacagaactgtgtgatgaatcctacccggctttactcactgacattcctgttggagacttacatccaggggaacagctggaaaaaatgttgtatgttcgctgtggaacagtgggttccagaatgtttcttgtatatgtttcttacctgataaatacaaccgttgaagaaaaagaaattgtttgcaagtgtcacaaggatgaaactgtaacaattgaaacagtctttccatttgatgttgcggttaaatttgtttctaccaagtttgagcacctggaaagggtttatgctgacatcccctttctgttgatgacggacctcttaagtgcctcaccctgggccctcactattgtttccagtgagctccagcttgctccatccatgaccacagtggaccagctcgagtctcaagtggacaatgttatcttacagactggagagagtgctagtgaatgcttttgtcttcaatgcccatctcttggaaatattgaaggtggagtagcaaccgggcattatattatctcttggaaaaggacctcagcaatggagaatatccccatcatcacaactgtcatcactctgccgcacgtgattgtggagaatatccctctccatgtgaatgcagatctgccgtcatttgggcgtgtcagagagtcgttacctgtcaagtatcacctacagaataagaccgacttagttcaagatgtagaaatttctgtggagcccagtgatgccttcatgttctcaggtctcaaacagattcgattacgtatcctccctggcacggagcaggaaatgctatataatttctatcctctgatggctggataccagcagctgccatctctcaacatcaacttgcttagatttcctaacttcacaaatcagctgctcaggcgttttatacctaccagtatttttgtcaagccacagggtcgactcatggatgatacctctattgctgctgcatga

SEQ ID NO: 43868 - DNA, 1551 bp, Homo Sapiens
tatccagtagtggatcatgaatttgatgcagtggtggtaggcgctggaggggccggccgagctgcatttggcctttccgaggcagagtttgatacagcatgtgttaccaagctgtttcctaccaggtcacacactgttgcagcgcaggttggaatcaatgctgctctggggaacatggaggaggacaactggaggtggcatttctatgacaccgtgaagggctccgactggctgggggaccaggatgccatccactacgtgacggagcaggcccccactgccatggtcgcggtagaaaattatggcatgccgtttagcagaactgaagatgggaagatttatcagcgtgcatttggcggacacagcctcaagtttggaaagggcgggcaggcccatgggtgctgctgtgtggctgatcggaccggccactcaatattgcacaccttatacgggaggtctctgcgatatgataccagctgttttgtggagtattttgccttggatctcctgatggagaatggggagtgccgtggtgtcttcgcactgtgcatacaggacgggtccatccatcgcataagagcaaagaatactattgttgccacatactggcgcaactacttgagctgcacgtctgcccacaccagcaccagcgacggcacggccatgatcaccagggcaggccttccttgccaggacctcgagtttgttcagttccaccccacaggcacatatggtgctggttgtctcattacggaaggatgtcgtggagagggaggcattctcattaacagtcaaggcgaaaggtttatggagcgatacgcccccatcgcgaaggacctggcgtctagagatgtggtgtctcggtggatgactctggagatccgcgaaggaagaggctgtggccctgagaaagatcacgtctacctgcagctgcaccacctacctccagagcagctggccatgcccttgcccggcatttcagagacagccatgatcttcgctggtgtggacgtcacgaaggagccgatccctgtcctccccaccgtgcattataacatggacggcattcccaccagctacgaggggcaggtcctgaggcacgggaatggccaggatcagattgtgcccggcctgtacgcctgtggggaggccgcctgtgcctctgcacatggtgtcaaccgcctcggggcaaactcgctattggacctggttgtctggtcaggcatgtgccctgagcatcgcagagtcgtgcaggcctgttcttggtatggctgcttctatgaattaaaaacaaataatgtgccacagtcaacgcaaaatcatgctgccgtgttccgtgtgggaagcttgttgcaagaaggttgtgggaaaatcagcaagctctatggagacctgaagcatctgaagacgtttgaccggggaatggtctggaacacggacctggtggagaccctggagctgcagaacctgatgctatgtgcgctgcagaccgtcaatggagcagaggcggggaaggagtcacggggcgcgcacgccggggaagactacaag

SEQ ID NO: 43869 - DNA, 2405 bp, Homo Sapiens
gagagccgagctagcgacgagcagtcgttgcggccgccggcgccgcgggaggtggtggaggcctagccggagccgagaggtctcttgttcccgtcccacggtcccggcgtcacccctccggcgcccagtccccgtcccggaactcccgggcctgtcctgggcccccggtctgtgcactccgctcgccgcagcgcccggcccgggccgcacccgccggccccatgaggagggacgtgaacggagtgaccaagagcaggtttgagatgttctcaaatagtgatgaagctgtaatcaataaaaaacttcccaaagaactcctgttacggatattttcttttctagatgttgttaccctgtgccgctgtgctcaggtctccagggcctggaatgttctggctctggatggcagtaactggcagcgaattgacctatttgatttccagagggatattgagggccgagtagtggagaatatttcaaaacgatgtgggggctttttacgaaagttaagtcttcgtggatgtcttggagtgggagacaatgcattaagaacctttgcacaaaactgcaggaacattgaagtactgaatctaaatgggtgtacaaagacaacagacgctacatgtactagccttagcaagttctgttccaaactcaggcaccttgacttggcttcctgtacatcaataacaaacatgtctctaaaagctctgagtgagggatgtccactgttggagcagttgaacatttcctggtgtgaccaagtaaccaaggatggcattcaagcactagtgaggggctgtgggggtctcaaggccttattcttaaaaggctgcacgcagctagaagatgaagctctcaagtacataggtgcacactgccctgaactggtgactttgaacttgcagacttgcttgcaaatcacagatgaaggtctcattactatatgcagagggtgccataagttacaatccctttgtgcctctggctgctccaacatcacagatgccatcctgaatgctctaggtcagaactgcccacggcttagaatattggaagtggcaagatgttctcaattaacagatgtgggctttaccactctagccaggaattgccatgaacttgaaaagatggacctggaagagtgtgttcagataacagatagcacattaatccaactttctatacactgtcctcgacttcaagtattgagtctgtctcactgtgagctgatcacagatgatggaattcgtcacctggggaatggggcctgcgcccatgaccagctggaggtgattgagctggacaactgcccactaatcacagatgcatccctggagcacttgaagagctgtcatagccttgagcggatagaactctatgactgccagcaaatcacacgggctggaatcaagagactcaggacccatttacccaatattaaagtccacgcctacttcgcacctgtcactccacccccatcagtagggggcagcagacagcgcttctgcagatgctgcatcatcctatgacaatggaggtggtcaaccttggcgaactgagtatttaatgacacttctagagctaccgtggagtctctccagtggaagcaaccccagtgttctgagcaagggttacaaagtgagggagggcagtgtccagatccccagagccacacatacatacacatacacacccttacccccatccactctagctttgtgaccatgggactgaagtttgtgatggcttttttatcaagtagattggtaaaatttaaccattcctgttgaggtgcccataagaaaatcataggccaagatagggaggggcattccagcaaaccccgtgttaatgctactgtggtttttaaatttttgtctaggggtttctttggggattttagaacagcatctgctgtcctccggggtcaagaaaagcatggaaagacaatatatgatgtacccagggaccagaaagaaaatttctttgcatcttagaaatggtagacattcattgtgactaaagagcttctatgcttccttgtttccatgccaacatgctgagcatgctcacaaagaaggctcgtccattcctcctgtgttttagtatttggcccagaggtttcctaaatggttgccttgaaatcactgtggtccaaatgtaattcttacacactcaaattatcactgtctgtagcacacttgtgcacctgtcttacattctctgttgctcccccccacactcttgctcagtctgtcacctgttcagtctgcttactcactcaattgttacccttttgctgttgtcgtgtttacagtttgcattttgaatgattagttgggattaccaaacattttttaaaaagatattatcaataaatatttttttaattctaaatttta

SEQ ID NO: 43870 - DNA, 2353 bp, Homo Sapiens
atgcttcccggggtgggcgtgttcggcaccagcctcacggcccgtgtcatcatcccgctgctgaaagacgagggcttcgcggtgaaggcgctgtggggccgcacgcaggaagaagcggaggagctggccaaggagatgagtgtccccttctacactagccgcattgatgaggtgctgctgcatcaggacgtggacttggtgtgcattaacctgccgccgcccctcaccagacagatcgctgtcaaaaccctaggcatcggcaagaacgtcatctgcgaccgcacggccacgccgctggacgctttccgcatgacctcggccgcccactactaccccaagctcatgagcatcatgggcaacgtgctgcgcttcctgccggctttcgtgcgcatgaagcagctgatcgaggagggctacgtgggcgagccgctggtgtgtgaggtgcaggtgcacggcggcagcctgctgggcaagaagtacaactggagctgcgacgacttgatgggcggcggcggcctgcactccgtgggcacctacatcatcgacctgctcaccttcctcaccggccaaaaggccgtcaaggtccacgggctgctcaagaccttcgtgaagcagactgaccacatcaagggcatccgacagatcaccagcgatgacttctgcaccttccagatggtgctggagggcggggtgtgctgcaccgtcaccctcaacttcaacgtgcccggcgagttcaagcaggatgtcactgtggtgggctcagccgggcgcctgctggccgtgggcaccgacctgtacgggcagcgcaacagcgccccggagcaggagctgctggtgcaggacgccacgccggtgagcaactccctgcttccggagaaggccttcagcgacatcccctcgccctacctgcgcggcaccatcaagatgatgcaggcggtgcgccaggccttccaggaccaggacgaccggcgcacgtgggatgggcggcccctcaccatggccgccaccttcgacgactgcctgtatgccttgtgcgtggtggacaccatcaagaggtccagccagacgggcgagtggcagaacattgccatcatgaccgaggagccggagctgagccccgcctacctgatcagcgaggccatgcgccgcagcaggatgtccctctactgttagcacagattgagaacctcggggacttgagccttctgcaggggatgtccacagagagggaagggccgaggggagagggtgaccatggggaatgtggggatcagggaggtggagggacagtgtgaataaatggcatctaggaaggtaaactccaatcccggtgaccgaccccaaaccagactgttggtgggctgagctcctagcctggaagcattcaggagagcctgccattcctgggatgatccctgctgggtatttgcacgagagtggtttggtttagctgcctctgctgccctttactgtgacaagcaaggaggggttgcttccctccctacctcatccatcccacacaccttggccttctgcaagccaagtggttctgcaaggtcaaggcactagtatcagatggcaagctcagtgcccgggatacccactgctggcaggagaaggcccattttcacagtccacagaagcgtgttaggctggggttgggggtgggatgggctggtgagaaagttcaaattccaggaagccactttttattggatataaggtatctaacggcaaaagtacttagtagcaaagtggccaccttttgattgattgggcttcctcataggaagcactgagggtgtgtctttgtacttggttcattgcccttcacctggtagagaaagagaggtcagaaatagcaagcaaaaagcaggactcccaggagccacaagaaaagagcacaggctgcaccaaagcaggggcagcagagaataaaatatccctttgaacttgtcaacaattaaaaaactgcaaggagtcaccttataacactatttccagtaaaggtggaattgagtatcagagggattactgcggtgttaaggtagccctgccacgtggctctccaggcagggccaagaagacagcacaaagtatgggtttggccataagctcatatgctgcccccaaagactggggagagctgtgtgcctcagtgttgcagtgtgaattcctaaatagagggtaaagtgagcctagccaggaggtgtttggggctctatcgcgcatctctcctaccaagctgggcaagagcttttaggagattcatccagctttgtggatttagaaaggaagccttcagttccaatcagaatcctctttccttacaaaaaaaaaaaaaaaaaaaaaa

SEQ ID NO: 43871 - DNA, 3319 bp, Homo Sapiens
ccagtggctaagggtgcgcgagtagccgccacccgttcggcgttggctctggcgtcggggtcgttgtgtcgtgacaaccgctgcggtagccgtttccgaggcagcagttgcggccgctttagccctgagcgggatctgcggctgcctgcgagtctctgctgtgccgacccttctcttcgcggaccccacgccaagcagcgaccctgagccgacagccggagcgcccggcaatggcggcctcgacggcctcgcaccggcccatcaaggggatcttgaagaacaagacctctacgacttcctctatggtggcgtcggccgaacagccccgcgggaatgtcgacgaggagctgagcaaaaaatcccagaagtgggatgaaatgaacatcttggcgacgtatcatccagcagacaaagactatggtttaatgaaaatagatgaaccaagcactccttaccatagtatgatgggggatgatgaagatgcctgtagtgacaccgaggccactgaagccatggcgccagacatcttagccaggaaattagctgcagctgaaggcttggagccaaagtatcggattcaggaacaagaaagcagtggagaggaggatagtgacctctcacctgaagaacgagaaaaaaagcgacaatttgaaatgaaaaggaagcttcactacaatgaaggactcaatatcaaactagccagacaattaatttcaaaagacctacatgatgatgatgaagatgaagaaatgttagagactgcagatggagaaagcatgaatacggaagaatcaaatcaaggatctactccaagtgaccaacagcaaaacaaattacgaagttcatagacgagatttgttcaacactgcaattgtttgttagatgtaaaccctgtgactatagtacgttgcttcttgttcttcacaattcatgacttaagtaccaaaatgcataccagttattatatattgccaagaattaaatgataaacttagagactgattagactgaaaatgcctaatcgatatatatattcttgtgcctagtactttaccacaaatacagtgtaatatcatcagtccaaaactgcattacttttgtaaaaacactggttaatttgtataagatattatagagctttttatgctttagaagttaaacaatatctttgggggggaactaatttattttcatcacttgaaatgtggtagctcttacaaagtttattgatttgatttttttaaaaatcaaaagccaattgaacaacaggatatatagactgataaatatttaggctgaatagtattttaacacttgtcttcaacttgatttgtctgtttaattgaaaagaattataagagttactgttgcattttctgacctactatttttaaaattcctgttgagtttctttgtgtttacaaggaaaggactgaactttttctcatcaaaactagcttttttccccacaaataaattatcaggttaaactttcaccaatgtctgctctgttttttgtttttggggggtttttgtttgtttttgttttttaatgtttttggtacactgggcagacttcagagcagttttttaaaaaaataaatattctaatgtagctatctcgccattccctttaaatacctgtcttaacctcctgcttttctttcctactcctttccacacatacgcacacaatcttctaccttttaaaggatcattaagactgtcaccacattaggagctctttctctcactcttctgtcatttgctgctatgttgaaattcttattttgaccatcaatgcctatgaattcttctaatacgtgaagaaaatagtttgagtagcagcagtgctataggtgggaaatacagtttagctgctgaatttctatacctctctgatttacagattgctaattaaatggctattattagtttggattaattagacttaagaaaacaactaactgagggttttttttgtttgttttttgagggttttctttgcatgagaattgtatgtaaccagtgatatgattattcctgaatgtacagacagaagtaagcctggacattgttaaatagtccctgctttaagggactacgataatgtgtactatgacaaacgtgctttattcttctaacgcagtaagaattaggtggaattttttccttcaaccaagtgcaggaaagccctgtgtgtcttggtttagttatggtttcatttctagccatacaattgatgaattgtgtacaacttttgttagtaccaaaataatctgttatatgaacagacttctaaaataacgtctgtatattttatatatagatacatatatgaaagaaggcttttattgaacagcttatcttccacttgcaggtttatggaaacagcagtatttgaaaataaataaaaagtgggagaattccttgctgttagaagaatgtggccattattttgattttttgaatgagatatataatcaaagtactgctgaactgtgagtgcagtattctaaacatttcagctaggaataccactgatttagaaacaaaactgtttgtctctggtttctgaatttaaaatgttgggattacctgtttaaatctgtcttgggggatgtagagattaagtctgtacatgtgcgtgcacatatattcatgcaccctctgattttggttttcttgtttctgagttcttagaaagtacccacatactctttttttttttttgtagaagtagctgtcatagagtgaagaaaaggataagactttaaacagttgattctttttgtgttttctacaaactattttttgaaatttaaatcacaaactcattttctggtttttagaaagtagatgatgatttcagaggagtaaggcatgccaagcagcatgctcagtggggttttaggctgtcacatgcagctgagaaaaggtatgttcaagtcataagtaggtaattgatagggtatgaactagtcaaaatatgaaccattatgattcaagttagattttcctctggagagacagatctgaatgttcagttctagccaaggtagattttactttcaactttttaatcagtatcactttctgtgcttaactatttggtgttaccttgtctgttttcatttgtctaaaattctgcagagatgactaaaatttgacataatggtgtaaatggattgttaaggtaactttcagttgaagattaaagcaagatgccattttccccatgactttggttttgtttacatttttccctttcagttagtatacactacacgtactgtaataaaatacaataatatgacaa

SEQ ID NO: 43872 - DNA, 444 bp, Homo Sapiens
atgggagccactgggcttggctttctactttcctggagacaagacaatttgaatggcactgactgccagggatgcaatattttatacttctctgagactacggggagcatgtgttctgaactttccttgaacagaggtcttgaggccagaaggaagaaggatcttaaagactcatttctctggagatatgggaaggttggctgtatctcacttccacttcgtgagatgaccgcctggattaacccaccccaaatttcagagattttccaaggctaccaccagagggtgcacggagctgatgcactgagcctgcaaaccaactctctgagaagcaggttatcttcacagtgcctcggacagagcttccttctcaggacactcgagagaggccgtggtttcagggcacttggggacatctgtggccacgttcatgaagaagactaa

SEQ ID NO: 43873 - DNA, 2777 bp, Homo Sapiens
aggcaggtgaaaagacatttacaacagataaagggcatataaagaacaacaggaagaaacgagggaaatcttacggctcagccactgtcagggctggggggttctcggtgcaccctggaagcagctcccaccaccggggccacagagaaacccacacaagccccagacacgtggacaagaatactcagagcagcctggctctccacaacttctgaccaagaaccaccggaggcccagcagagcagaacggagcagtctgctgtgccgaggtgggtttctgcagcggacattattcggctatgaaaatgaacttgtggcagcccctctgcatgggcaaccctcatgccaagtgagcaacgtgagacttcagcaaacaccaagatccacgtacaaagctcaaaacaggcaaaactgagcatgtccaggacacgcacaggtggcaaagccataaagcaaaacgaggacatggtcacaggctgggatgtggctaacctcccaggtgacacctggggatggtaaggggctggccaggttccatttcacatgggtgcagcctaaactgcatacagctccttatagttacccacatgtccacaggcctcacgcacttttcttctgtgtcacattccacaacaaaagaacaccacacacaggattctggggaatcccacaggctggaagagccaggagcgtggcctcacctggggttgatctccagcgtgggctgcaggagctgtgcgcgctcctcctgggtcttggccagctgctgcatgcgcaggaagtggcgggcagcccccatctccagcacggtgaccatggcagggtgggtgtccagtcggagggtcacctgtgagcaaagcccggggttgagggtgatagaggttcccaatgtgagagggctggcaggatcttaccaggggtgaaggtcacccagaccacgaggtagcaggcggggtctcaaggactcccctggaccagcgctgctccctccccattacccactaacttgtgggccctgagctgatgccccacgcaaagatactgtgcccgaggggctccaccaccctggtgccccgctgctgcctccaggagctgcccgaatccatcgtcctctgctccatgccagcccaccctgcatgaggccccttcctccaagtgaccatgcatgggacgctcatttctcactctgagctagacaggttggtggggggagtcttagctctctgaagcccacccaaaacccccgactaagcacccaagtgagcatgtgagctcctgagggctggggtagcatgtcccttgtttggaacccccacgtcctcagccattgcagctcccactcaggatgctggtttttcagttctcagttcacacctgctctggagcagggctgggagaaagacacggccttcctgcctcagcggcactcccgagcaacacgtgccgagcagggacccacagggtctccacctgacaccaagggcttctgctgctgctggaaggacacccaacgggccaggtactgggagccaccagctggccagcctgttagggacactgcggccaagtggtggtccatccccgggaaagcctcaccttcacgttggtgacacgcgaccccagcacatttctcatccaggccatgagctcctccgtctccttctctgataggcactcggcggctgcggaagagcaggcgacagggagctcaggcctgcatcccaactccccggcttccatgggggccacgcagcatgcttccagctcccacctcctctcccaccaggatggagacacaagctagcaagatgcttttcatctaaaagtaaaacctcaaaggatgcttcaggttgcctgaggcccatacaacttggttagggctttaaaaaaatacacagcctctcaagaagctgggccagctccagaagccaccgtggcaggagcactggacagacccctgatatctaaaccaggaggcaccttcctccagtcaccagggtgctcccacaaggctcttctcgggggtggctgagcccaggtcaactgacgaaaacccaaaggaagccctcgctgcggggcaggagaggcgtgcggggagtggaaaccagccccacgcctagagagcaggggatgccgacctggggacctgtcctcaaacttctcctccttgtagtgatccacgactatgtccgtctccacagagatcagcttcttcttgtcaaactcacgaaggtgcagcagggtgagctcatcaaactgctcaaagcagaagagaacctgcaggtggccaagagcagctccatcagaccccgggggcctccagccaccacagaagaaaggatgagggcggcaggagggctgggggagccaagcgggccacactggggaacaccggggcagttggggttcctaggcctgcatgacagttactacgacacctgggtctaaggaaggctctgactgccttcaaggcagaagcactccacgcataaagaaatccacatgtggctgagtgcagtggctcacgcctgtaatcccagcactttgggaggccaaagcaggcagatcatgaggtcaggagttcgagaccaacatggtgaaatgccgtctctattaaaaatacaaaaatttgctgggtgtggtggtgtgcacctgtagtcccagctactcaggaggctgaggcaggagaatgacctgaacccaggaggcggaagttgcagtgagccgagatcgcaccactgcactctagcctgggcgagagagcaagactccatctc

SEQ ID NO: 43874 - DNA, 1302 bp, Homo Sapiens
ggaaaaggcaatgtgatcactacaaatgatggtgccaccattctgaaacaaatgcaagtgtcacatccagcaagaatgctgggggggctagatatagaagcaggagatagcactgcatcagttggcactattgctggctctctcataggttcctgggccaagcttcttcagaaagggattcatccaaccatcacttccaagtcatcccagaagtctttggaaaagggtattgagatcttaagtaacatatctcaacctgtggaactgaatgacagagaaactttgttaaacagtgccaccagttctttgaactcacaggttgtctttcagtattcactgcttcctccgacgagtgtaaatgcagtgatgaaagtgacccagctacagaaacttggtggaaaaattgatgactgtgagttggtggaaggtcttattctcacccagaaagtggtaaattctggcataacccaatttgaaaaggctaagattgggcacattcagttttgcttatctgctcccaacagatttggaaatcaagtagcagtttctgacaatgttcagatggacgctatgagagagagagcctatattttaagtttagtaaaacttttacaaatgggatataatgtccttctcatacaggacactttagagacgctcctagtgatcttgcatcatttcctgaacaaaattattatgttggttaagaatattgaaaaagaagatgttgaattcatttgtaagacaattggaaccaagccagttgctcgtactgaccaagtcacagacatgctgggttttgctgagttagctgagaaggtcagtttaaatggttctggaaaactgctcaagactacaggctgtacaagtgctggaaaaacagttaaaattgtcataggactgaagaatgagccttccattcacgatgtgctatgtattatttgctgtttggtgaagagagctcttactgcaggaggtggtgctccagtagaattggccctatggttaactgaatgtttgaacattgagtggtatggaattttacagtgttcatgttttgcagatgctatggaggtcattccaactacactagctgaaaatgctggcaatcccatttctacagtaacagaactaagaaatcaacatgccaagaaaaaaattgcaggcattagtatcaaaagggcagtatttccattttggaaaactggttgcccaacttttgtgatttcatttattgctctgaccctagcaaatgaaactgtccagagaattctgaaaattgatgctgtggtaaatgctcag

SEQ ID NO: 43875 - DNA, 3694 bp, Homo Sapiens
cagtccggccgggcggagctaggggcgggcccctgcgtctctgggcgctggagcgcggcgactatcacgccgcgtggcggacggacggactgacggacgcgcagccttacccgaaaggccatggcggagcacgcccctcgccgctgctgcctgggctgggacttcagcacgcagcaggtaaaggttgttgctgttgatgcagagttgaatgtcttctatgaggaaagtgtgcattttgacagagatcttccagaatttgggactcagggtggtgttcatgtgcacaaggatgggctgacggtcacttctccagtactaatgtgggtccaggcactggatatcatcttggagaagatgaaggcttcgggcttcgacttctctcaagtcctagccttgtccggggcgggccagcaacacggaagtatatactggaaggctggagcccagcaggcactgacaagcttatcaccagacctccggctacaccagcagctgcaggactgtttctccatcagcgactgcccggtgtggatggactccagcaccacagcccagtgccgccagctggaggctgctgtgggtggtgctcaggctctcagctgcctcacggggtcccgtgcctatgagcgttttacagggaaccaaattgcaaaaatttaccagcagaaccccgaggcctactcacatacggagagaatttctttggtcagtagctttgctgcttccctgttccttggctcttactcccctattgactacagtgatggttctggaatgaatttgttgcagatacaggataaagtctggtcccaggcttgccttggtgcctgtgcacctcatttagaggagaagcttagcccaccagtaccatcatgctcagttgtgggagccatttcttcctactacgtccagcgctacggatttcctccaggatgcaaagtggtggccttcactggggacaacccagcgtcgctggcaggcatgagactggaggaaggtgacattgcggtcagcctgggcaccagtgacaccctgtttctctggctccaagagcccatgcctgccctggaaggccacatcttctgcaacccggttgactcccagcactacatggcactcctgtgctttaaaaatggctccctcatgagagagaagatccgcaacgagtctgtatcccgttcctggagcgatttctctaaggcactgcagtccacagagatgggcaacggtggaaacctgggtttttattttgatgtaatggagatcacccctgaaattattggacgtcataggtttaacacagaaaaccacaaggttgcagcattccctggggatgtggaggttcgagcactaattgaaggacaattcatggccaagaggattcacgcagaaggcctgggctatcgagtcatgtccaagacaaagattttggccacaggaggagcatctcacaatagagaaatcttacaggtgcttgcagatgtgtttgatgccccggtgtatgttatagacactgccaactcggcctgtgtgggttctgcataccgagcttttcatggtcttgcaggtggaacagatgtgcccttttcagaggttgtgaagttagctccaaatcccagactagctgctaccccaagcccgggagcttctcaggtctacgaggcccttctcccccagtatgccaaactcgagcagagaatcttgtctcagacccgggggcctccggagtgaacaggcatccctgttgcccctgcctgcccagatttactgaccccatttgtcgacatggccccagacaggagggatccacttctctgttctgaacagctcttcctgcccctactgactccttggagtgtccaggaccatcttaaagccgccctcagcacatctgcatgaagatagataggcactcctgtccctgtgcccgtgtgccccagggcaggaaagcatctctcttttcctgtcttttatcccaggaggcaggacaacactgagactgggatatgtccaataaaaactatgacttttccccttgcagaggcagaattaaagctaatctagggactcaaatcagcagaatgggggagacaaagcccggtctcaccccctaacctcatcctatctctttctccaaccctgactgcccactcctccacaaaccgtgacccatagccgcccccaccccataccttgatctaccatccatcctcttccccaatccaaaccccacagtctcttctctcccacaccctgccctccttgtttcagctgtctgaggtgcctcgcagggcctctcttacttgccccatgctcaccctttccatgctgtccccattctctcctttcaccatctctcctctccccctccttcatctctcctccctccccaaactcacttggcataattcacaacctcccacccaaacaatgggcctggtggacgtgcttcctgtgccctccctttagctatgcccacagatcactgagagggaccatctcccaagtggtgcagtttagaacttctctccctttttctccctcattccctctctcttcttgcagtccacttgctgaagaagttgtgtcatttctctggaagaatttccaaaattctggatttcttttttattttggagtatttcatcagctgaaaagtgattctcactttgagttttcttcctatatttgtatagtgagttcctttttccttcctctttatccctcctgttttactttatacctctctattccttgctcaaattattgcaaaagcctctatagaaagtcctctgtgatctgactcctgcagactcttccagatttttctgcccaaggcctttactgagctcaggactccagctaaatcaaaatacgcatgttctcacccagagtgacaaaatcctgcagataggtttaagacctagtggctcagagcagtagctactgggaagttaaaaggaaggggcttagaaaatgaatgggaccaaaggcatcacttctgatggagatgaagccatcttgaaagtgagtggtgtcctttggaggcatggtggatgaaaggcgcaaaggaagcaagaggttaaagataatggcccattagatacaacagcaagcccaagattccgaagaagacagacaactccccctagtaccacctagacattactttttaaagacattttacattattgtccagcagaaaaaggctgtcttggaccatgaaacagtaaactgtaactaaacacttcaacatgaatttgaaaataaataattgtggatataaaagaacaccagagatcagaaattcaaaaactcagaataaaaatgaaaaagctacaagcatatatgagaagagaactgactgaacttgggaaataatttgaacaaaaagataaatcttcacagatatgaatactaaattatatcttaatgaaaatagatatggtcacaagtacattaaggcacgtagaaggtaggagtaagaaaagctaagagaagcaaaacaaacaaagcaatattaaaggaagagccaaaaagacccagaaataaaatgacagataaagaagattgtcaaagaaaagatgatacaggtaagattggaactcatgaagacaaaagataagacagtggcatagagttaatatttaaaattcaaatattaaaactcaaataaaccccaaagaacttttgg

SEQ ID NO: 43876 - DNA, 519 bp, Homo Sapiens
atgtacctggtcacggtgctgaggaacctgctcatcatcctggctgtcagctctgactcccacctccacacctccatgtacttcgtcctctccaacctgcgctgggttgacatcggtttcacctcggccacggttcccaagatgattgtggacatgcagtcgcatagcagagtcatctcttatgcgggctgcctgacacagatgtctttcttggtcttttttgcatgtatagaagacatgctcctgactgtgatgtcctatgaccaatttttggccatctgtcaccccctgcactacccagtcatcgtgaatcctcacttctgtgtcttcttagttttggtgtccttttccttagcctttttttgcttattttacggagcaggcattggcgtgtacctgacttcagctgtgtcaccaccttccggcaatggtgtggtggcttcagtgatgtacactgtggtcacccccatgctgaaccctttcatctacagcctgagaaacagggacattcaaagtgcc

SEQ ID NO: 43877 - DNA, 755 bp, Homo Sapiens
gtgtcctgcgcgctacgccgtctgtttctagggcaacgccggcgtctcttagcaaccgcgcgcggcctaggtgggtccccccggcacccccagacctgccatggcgaccgcgagtcctagcgtctttctactcatggtcaacgggcaggtggagagcgcccagtttccagagtatgatgacctctactgcaagtactgctttgtgtacggccaggactgggcccccacagcgggtctggaggaggggatctcacagatcacatccaagagccaagatgtgcggcaagcactggtgtggaacttccccattgatgtcacctttaaaagcaccaacccctacggctggccacagatcgtgctcagcgtgtatggaccagatgtgttcgggaacgatgtggttcgaggctatggggccgtgcacgtgcccttctcacctggccggcacaaaaggaccatccccatgtttgtcccagaatctacgtctaaactgcagaagtttacaagtttgtgcctggtcgcctcctcagatctgcaagctgctccacccactgaggacaaatagaaacaggtcccctgggagtgctgagtcacggggctcccttcagccctgttccagcagcagaaggccgggcgattttaccctgtgccctgtgaaaaatctttgtgtctgagggagcagaggaaaaactcttgtcagatgggaaaaatgctcatgacataatgtgacattaaaaggtgggaaacaagaggatata

SEQ ID NO: 43878 - DNA, 2967 bp, Homo Sapiens
actcgccgctgagcccatctccctgcaacactgcaggtagcggagtctagagacaacacagacagcggctgccgacggctgggactgggagaggatggctatggggcacgtttccttccagggtgataaaggcattcattccaagatagactgtgatgatggctgcacgctctgtagatgacatctcaatcaagctgcttcatgagaaaggcccagccactgaccacggggtgaacgtcctgccatccacagtccctggccgagaagaaggtatgactgacaggaagcactggttttctttcgggacacaaccgaacgtgccaggactgcaggagccgctggattacagagcagcaaaccaggcatggcaggcggtgctcgcggaggtaccacggggcggaccagggtgtgcagcgttacgtgacttgggaagatgtggggggcccgatgtatctaccaggagacagtggagacctctaccctttagctgtcctctgtcccacacaacccagcccccactgggcggccactgcaggggaagctcagctggaaggttccatgggagagaccagaccagtcctggcactgtccagcagctgccttcggcccatgttctgaaaccgggatgcacacagcatggagatctcagccctgggcaggcctcgccccctccagcagctgccctcggcccatctcccaaagcctggacgcatacactggggagacctcagctctgggcaggcctgggttcccatcgcttcggcgtccctgggcccgggacacggaacacacttgctgcgtgctgtgtacaagaatgaacgaatcggcctgcctagcaccccttggccggctccaggcctccacttgctgtgtcaagtgaggctcccacgtgctgaggggacagagggtccctgtgacctgcaatgctcccactctcacccacgcagctgctcacctacacagccggtttctccagggctaacaggccacccagatgcaagccagtctcagcccctgaccacactggttttcaaatgaactgtggactctcatgacagagaagcggctgggagtcccagcgtgggatgtggtgggacggggctggggtgtgcagagacgatgatggaggagctcctgggggcacacagacctagtgtcgctctcagggctgggtccgcaggccactctccctccctcaacaacactcacgcctgctgcagccccaggaagggtcaggactcacagatgccaacaagcaagcagcccgtgctggaagcatcaccaccaccggccccagcaaaggcttcctggtgtgtgcggctgaccatcggccactcgggtagacagaagtgtgggtgggctgtgtgcatgccagggcagacggacagcccggggtctcaggccaatggaaacaggaagtttccggctccatttgaatactggtggaaatgccgggccctcatgctgaataggacactccatccaagcttgccgcctcctcggaggcttgggccagtcaccgggcccggctgtgctttcacagctgcttttcttatgggagagcaagatctcctgggattcaagaccctaccaggagtagaagacaagggtcatgggaaggctgtgtgagccctcaaggggcaccatggaccccgagcaccagcgatttgcgctcctggttccgagagcccagcgctgaatcctggcagatggggaagctgagctctgtctgacctgctctggaaaacaactggtccagagaaggacgaagatgtcacttaattctgagttgctgaggataagccaggggccctggaggtgactgtgctgcccacagcatcccaagggatgccacatccccacaggggcagcccaggtcccccagaggattgtgtgccccccaccaccaaggtccttgcccactggtctgtgcctcaataggacagcctccttctcacactattttgaaatataaaaataacactcatcacccatcacccagtcactcagaatcacaccagcgggggcacagaggcgacggcatgtagttctccagcctgtttgtgagcacgggtgtacatgtacacacacacacacacacacacacacaaatgcacatgcacggacacatgcacacacacatacacgtgcacacacagacatgcacacacacgtacacacatgcacacacacacacgtacgcacatgcggggtcagggagctgatgctgtgcgaggctgtcgagggcttcttcactcagcggcacttgggaagcgctgctctgtgggaggcccctcatccatgtcctcgttattggcagcacaaatctccaagtgaggaggggccatgtttaccagccgtccttccagcccacgtctcctacggttccttattttcacaggtactgttttgcagacacagagcccccaagcagcccacacgtcttagccgggtgaagctttgctttatgaagtgctgcctggacccctgatggtcggccctccccgtcgagacagtggcaggcaggcgggggtgctcagggctgtctgcagggggcagccaggacctcactgaggtggccgactgggtccacgccctcctcagcctgcactgctggacaggccccaagaagtcgtgctcggcgtggcccaagaacgggaagcggcagcgtcctggcgtcctaggtgagacttcaagacggctccctgctcccacctgggctaaaggtggaaccccaggtgtaaagagccccctggggtacaggggaggctggatcagcagacgccggctctgggagggccctgaggggctgtggagggaaggtgaccccgcagtggcagcggcagcggaagcaggacggcgcggtgcccgacacctgaggccactctccctggacggggggcgggcggcactgagaggcggccataaaaaccggagtttatttaataaaacaagagcccacgcggc

SEQ ID NO: 43879 - DNA, 573 bp, Homo Sapiens
atctatctcttctctctgcccatcaaggagtctgtgatcattgactttttcgcctctctcaagaaggaggttttgaagacgccagtgcagaagcagacctgcaccggccagaacaccaggttcaaggcgtttgttgccatcagggacagtggccacactgatctgggtgttaagtgctccaaggaggtggccactgccatctgcggggccatcatcctggccaagctctccgttgtgcccatgcgcagaggctactgggggaacaagatcggcaagccccacaccatcccttgcaaggtgacaggctgccacggctctgtgctggcgcgggtcatccctgcgcccaggagcactggcatcgtctcggcccccatggccaagaagctgctgctgatggcagctatcaatgactgctacacctcagccaggggctgcactgccatcctgggcaacttcgtcatggtcattttttatgccatctctaaggtctacagcaggctgaaccctgacctctggaaggagactgtattcaccaagtctccctatcaggaattcactgaccacctcctcaag

SEQ ID NO: 43880 - DNA, 2367 bp, Homo Sapiens
gccgaggatgaggaggtgcaacagcggctccgggccccgtcgctgctgctgctgctgctgtggctgctcgcggttcccggcgctaacgcggccccgcggtcggcgctctattcgccttccgacccgctgacgctgctgcaggcggacacggtgcgcggcgcggtgctgggctcccgcagcgcctgggccgtggagttcttcgcctcctggtgcggccactgcatcgccttcgccccgacgtggaaggcgctggccgaagacgtcaaagcctggaggccggccctgtatctcgccgccctggactgtgctgaggagaccaacagtgcagtctgcagagacttcaacatccctggcttcccgactgtgaggttcttcaaggcctttaccaagaacggctcgggagcagtatttccagtggctggtgctgacgtgcagacactgcgggagaggctcattgacgccctggagtcccatcatgacacgtggcccccagcctgtcccccactggagcctgccaagctggaggagattgatggattctttgcgagaaataacgaagagtacctggctctgatctttgaaaagggaggctcctacctgggtagagaggtggctctggacctgtcccagcacaaaggcgtggcggtgcgcagggtgctgaacacagaggccaatgtggtgagaaagtttggtgtcaccgacttcccctcttgctacctgctgttccggaatggctctgtctcccgagtccccgtgctcatggaatccaggtccttctataccgcttacctgcagagactctctgggctcaccagggaggctgcccagaccacagttgcaccaaccactgctaacaagatagctcccactgtttggaaattggcagatcgctccaagatctacatggctgacctggaatctgcactgcactacatcctgcggatagaagtgggcaggttcccggtcctggaagggcagcgcggtggccctgaaaaagtttgtggcagtgctggccaagcttccgcttgttcctccccacagtatttccctggccggcccttagtccagaacttcctgcactccgtgaatgaatggctcaagaggcagaagagaaataaaattccctacagtttctttaaaactgccctggacgacaggaaagagggtgccgttcttgccaagaaggtgaactggattggctgccaggggagtgagccgcatttccggggctttccctgctgtgggtcctcttccacttctgactgtgcaggcagctcggcaaaatgtagaccactcacaggaagcagccaaggccaaggaggtcctcccagccatccgaggctacgtgcactacttcttcggctgccgagactgcgccacttcgagcagatggctgctgcctccatgcaccgggtggggagtcccaacgccgctgtcctctggctctggtctagccacaacagggtcaatgctcgccttgcaggtccagcgaggacccccagttccccaaggtgcagtggccaccccgtgaactttgttctgcctgccacaatgaacgcctggatgtgcccgtgtgggacgtggaagccaccctcaacttcctcaaggcccacttctccccaagcaacatcatcctggacttccctgcagctgggtcagctgcccggagggatgtgcagagcagccgccccagagctggcgatgggagccctggagctggaaagccggaattcaactctggaccctgggaagcctgagatgatgaagtcccccacaaacaccaccccacatgtgccggctgagggacctgaggcaagtcgacccccgaagctgcaccctggcctcagagctgcaccaggccaggagcctcctgagcacatggcagagcttcagaggaatgagcaggagcagccgcttgggcagtggcacttgagcgagacacaggggctgcattgctggctgagtccagggctgagaagaaccgcctctggggccctttggaggtcaggcgcgtgggccgcagctccaagcagctggtcgacatccctgccagctggaggcccgagctggggccgaggccagtggctgcaggtgctgggagggggcttctcttacctggacatcagcctctgtgtggggctctattgtccttcatgggcctgctgggtacacctacttccaggccaagataagggcagggccatgctggccaccctgcagcctgaaccacctggggaggaggcgggagagggagctgccatctctaggcacctcaagccccctgaccccattccctcccctcccaccccttgctccttgtctggcctagaagtgtgggaaattcaggaaaacgagttgctccagtga

SEQ ID NO: 43881 - DNA, 1362 bp, Homo Sapiens
atggcttcacccagcctcccgggcagtgactgctcccaaatcattgatcacagtcatgtccccgagtttgaggtggccacctggatcaaaatcacccttattctggtgtacctgatcatcttcgtgatgggccttctggggaacagcgccaccattcgggtcacccaggtgctgcagaagaaaggatacttgcagaaggaggtgacagaccacatggtgagtttggcttgctcggacatcttggtgttcctcatcggcatgcccatggagttctacagcatcatctggaatcccctgaccacgtccagctacaccctgtcctgcaagctgcacactttcctcttcgaggcctgcagctacgctacgctgctgcacgtgctgacactcagctttgagcgctacatcgccatctgtcaccccttcaggtacaaggctgtgtcgggaccttgccaggtgaagctgctgattggcttcgtctgggtcacctccgccctggtggcactgcccttgctgtttgccatgggtactgagtaccccctggtgaacgtgcccagccaccggggtctcacttgcaaccgctccagcacccgccaccacgagcagcccgagacctccaatatgtccatctgtaccaacctctccagccgctggaccgtgttccagtccagcatcttcggcgccttcgtggtctacctcgtggtcctgctctccgtagccttcatgtgctggaacatgatgcaggtgctcatgaaaagccagaagggctcgctggccgggggcacgcggcctccgcagctgaggaagtccgagagcgaagagagcaggaccgccaggaggcagaccatcatcttcctgaggctgattgttgtgacattggccgtatgctggatgcccaaccagattcggaggatcatggctgcggccaaacccaagcacgactggacgaggtcctacttccgggcgtacatgatcctcctccccttctcggagacgtttttctacctcagctcggtcatcaacccgctcctgtacacggtgtcctcgcagcagtttcggcgggtgttcgtgcaggtgctgtgctgccgcctgtcgctgcagcacgccaaccacgagaagcgcctgcgcgtacatgcgcactccaccaccgacagcgcccgctttgtgcagcgcccgttgctcttcgcgtcccggcgccagtcctctgcaaggagaactgagaagattttcttaagcacttttcagagcgaggccgagccccagtctaagtcccagtcattgagtctcgagtcactagagcccaactcaggcgcgaaaccagccaattctgctgcagagaatggttttcaggagcatgaagtttga

SEQ ID NO: 43882 - DNA, 487 bp, Homo Sapiens
cagcatcctcaaccctgatggcttcctgggctatccctgtgcctcctacaatgagttttgggaggcgaatagctgtttcccttgtccagctgaaggatgccccaaaatggggcactatgctgaccaatttaaggggaaaaccagtgccgttgaacaaatatttttcctcaacacaggagagagtggtaactttactagttggagatataaggtatcagtcacactgtctggaaaaaagaaagtgagtgggtacatcaggattgctttgtatggaagtaatggaaactcaaaacaatatgagattttcaaaggatccctcaaaccagatgcaagtcacatgcatgatattgatgtggatctcaatgttggaaaaatacagaaagttaagttcctctggaacaaccatgtgataaatctattctggcccaaactgggggcttcccaaatcacagtgcaaagtggtgaagatgggactgagtatgtattt

SEQ ID NO: 43883 - DNA, 432 bp, Homo Sapiens
atggttttagcagatgcagctaagatgaggtcaccccgtgttaggatggccccgaatccagtgcctggcacccttataaggagagggaaacttggacgcagacaggaaggccgggtgaagacagaagcagagaccgggggccaaggagtgcctggggttgcccagagccaccacgggctgcaagaggtgtgggacagactctctcagccacagaagggcccagccccgcacaggcctggatttcagagggcgaacatttctgtggccgaagctcccagtgcgtttgcagtccttggagacggccgcagacacatttgttcttggcctgtctccaggtctgtagaccccacagtgagcggccactggccggaggggaacaggaagagctggaggggacgtcacacacatgagccttttaggaataacgagtga

SEQ ID NO: 43884 - DNA, 673 bp, Homo Sapiens
cgcggccatcccggcacaccccgtaggaccaatgctcaggccaaaggtgtccaaactatacagacccacagaatctaacaacagatgtctcaatattcctcgtcctagaactctcagaggatccagaactacagccggtcctcgctgggctgttcctgtccatgtgcctggtcatggtgctggggaacctgctcatcatcctggccgtcagccctgactcccacctccacacccccatgtacttcttcctctccaacctgtccttgcctgacatcggtttcacctccaccatggtccccaagatgattgtggacatccaatctcacagcagtcatctcctatgcgggctgcctgactcagatgtctctttttgccatttttggaggcatggaagaaagacatgctcctgagtgtgatggccctatgaccggtttgtagccatctgtcaccctctatattattcagccatcatgaacccatgtttctgtggctttctagttctgttgtcttgttgtctcagtcttttagactcccagctgcacaatttgattgccttgcaaattacctgcttcaaggatgtggaaattcctaatttcttctgtgacccttctcaactcccccaccatgcgtgttgtgacaccttcaccaataacatagtcatgtatttccctgc

SEQ ID NO: 43885 - DNA, 431 bp, Homo Sapiens
ccttatccacaccttctcaattatcagtgccttccgttttgcctggcttgggagccaggaaacttgcatcagcacagcacctgtctgcctgtgtgttcatgtcacagaccacagatgctcagttggctactgtcctaagactgctgtacctggtggggttagtaatgaataccctctgattagaagtcctggtgctctgtggttgagcactaacacaatgttcattgttaacaggcttggaggttggtcttttggattaaaaatccccagtgaagctggaggtgcaaatggaaacatatcaaaacccccaactctggcaaaggtgtggtataatcagaagggttttcattccctaccttcctacttaaatcatctaaacaaccttattttgtggcagcacctaccccctactgtggactggagacaatacg

SEQ ID NO: 43886 - DNA, 648 bp, Homo Sapiens
ctggggcctcaccagatgcagatgctggtgccacgcttcctgtacagcctgcagagccatggctgcacaaacctttcttcctcataaatcacccagcctcgggtgttcctttctagcaacacacacggactgagccggatgacatgaagcagctgttcccgcctcctcctggcacctccctgactcacgcacttggtgcgtggaggggtcgtgagcgggcacaggcagccacttcgctgcttgcctcatcagcctcacagttccccacagctgtcgaggatgccctgatgtctgttctcacatcacattgcgctccaagtaccccggctgcaaccagagctcagcaaaccgggaccagagggcacatccaccctgcctgcccatgtcaacagagttgtgtgggagccagccggcccccaggaagaccccagatcttcctgcccctgaccacagctctgtccctggaagcatatgctgcagacacttgctctgctgcagattttctgcacaacccctcctcatgggggaaggtttggtacctgaatgaggcctcttttgacctctattcctatcactatttttggtgacctcaatatttatgaaggtaataacttggtctttaatccagacaattttcacctccaggaa

SEQ ID NO: 43887 - DNA, 1332 bp, Homo Sapiens
atgactctgggtgacaaagatgtagaaacgtagttcatcaattgtaacaaatgtaccgctatgctggaaaacgttactaatggtggaggctatgtatgtggcggtaagatgtgtttagaaaatctccgtatcttatgctcaaatttgctgtgaacctacaattgctctaaaaaaaaatcaagtctattaaaaaatttatcatgtagtagatcttgtataaagtctcaacaaatatcaaagaattaacatcatacaaactctctaagcacaagcaacttaagtaaaaaattaacagaaaaaaattttttgagtcaataggagttattttgggaacaaaacacaaagtaaagacttgaggggattgaaaccatcaggatgaatgtaagccagacgggggcaaattgcagaatgtcaattgccttaacctaggaaaggtaaatttctaaaaatgataccaaatggttaaaaatcactaaatgaggaattgaagagaatttcaggttagaaggttgtaaaaagtgaaataattgtccaaagtcaccaaactagttcacgagaaagctggaactagaaactcatgcctctcaatccagtgttctttccactgtaacagattggcaccatagaacatgtttgactcaaggcagtaaattaagtacactgaagaaaaagataagaaaaaagtgataaaatgtaaagtctttgattcagacccaagtattacagctgctatggcaaaaaatagccacaatttctaagtgactttaaccaggaaaaaaagaaagagatgagatttgaaaaggaattaaatttcaagaatcaacaggaagtgatgacagccttccctatttggtagtttcaggcctgaacttttgtcattaaggtaataattcaaagtgctttaatgcctggactgaccacactaaataacaaaattataacccgttgagctacggtcagttttataaactgtgcctaaaatttcctgagttcaaatctgattataaatgggcaataaattcatctgttcattgggctgatttactttattttctgggtgcatttaaaatcttttttattgtggaaactttcaaacatacaaaaagagtacataataaatgattcccttgtacccatcattcaatttcaataagtcacattttgcctttcaaattttacctattgccactaacatcctttttttttctggagtagctgaactgatttaagatgaaggaggaaaaataaaggatgaaaggaatattttcaatctgttattcattgatactctagccaaaaagattccagattatgaggcaaaaagaaaaaaaa

SEQ ID NO: 43888 - DNA, 255 bp, Homo Sapiens
ttattttttatagagacaaagtctcactatgttgctcaggctggtcttgaactcctggcctcaagcgatcctcccaccttagcctcccaaagagttgggattatagacatgagccactgcacctggccgaccttgggcaagttcttaaacccttcaaagcctcatttttctccaatcataaaagggaaagatggtaatattttcccctccaaattcttgtcggatgccctcacagaattgagattatgtacgtaa

SEQ ID NO: 43889 - DNA, 465 bp, Homo Sapiens
agccctccaggacaggctgcatcagaagaggccatcaagcagatcactgtccttctgccatggccctgtggatgcgcctcctgcccctgctggcgctgctggccctctggggacctgacccagccgcagcctttgtgaaccaacacctgtgcggctcacacctggtggaagctctctacctagtgtgcggggaacgaggcttcttctacacacccaagacccgccgggaggcagaggacctgcaggtggggcaggtggagctgggcgggggccctggtgcaggcagcctgcagcccttggccctggaggggtccctgcagaagcgtggcattgtggaacaatgctgtaccagcatctgctccctctaccagctggagaactactgcaactagacgcagcccgcaggcagccccacacccgccgcctcctgcaccgagagagatggaataaagcccttgaaccagc

SEQ ID NO: 43890 - DNA, 1335 bp, Homo Sapiens
atgtccggcaccaaattggaggactcccccccttgtcgcaactggtcatctgcttcggagctgaatgaaactcaagagccctttttaaaccccaccgactatgacgacgaggaattcctgcggtacctgtggagggaatacctgcacccgaaagaatatgagtgggtcctgatcgccgggtacatcatcgtgttcgtcgtggctctcattgggaacgtcctggtttgtgtggcagtgtggaagaaccaccacatgaggacggtaaccaactacttcatagtcaatctttctctggctgatgtgctcgtgaccatcacctgccttccagccacactggtcgtggatatcactgagacctggttttttggacagtccctttgcaaagtgattccttatctacagaccgtgtcggtgtctgtgtctgtcctcacactgagctgtatcgccttggatcggtggtatgcaatctgtcaccctttgatgtttaagagcacagcaaagcgggcccgtaacagcattgtcatcatctggattgtctcctgcattataatgattcctcaggccatcgtcatggagtgcagcaccgtgttcccaggcttagccaataaaaccaccctctttacggtgtgtgatgagcgctggggtggtgaaatttatcccaagatgtaccacatctgtttctttctggtgacatacatggcaccactgtgtctcatggtgttggcttatctgcaaatatttcgcaaactctggtgtcgacagatccctggaacatcatctgtagttcagagaaaatggaagcccctgcagcctgtttcacagcctcgagggccaggacagccaacgaagtcccggatgagcgctgtggcggctgaaataaagcagatccgagccagaaggaaaacagcccggatgttgatgattgtgcttttggtatttgcaatttgctatctaccaattagcatcctcaatgtgctaaagagagtatttgggatgtttgcccatactgaagacagagagactgtgtatgcctggtttaccttttcacactggcttgtatatgccaatagtgctgcgaatccaattatttataattttctcagtggaaaatttcgagaggaatttaaagctgcgttttcttgctgttgccttggagttcaccatcgccaggaggatcggctcaccaggggacgaactagcacagagagccggaagtccttgaccactcaaatcagcaactttgataacatatcaaaactttctgagcaagttgtgctcactagcataagcacactcccagcagccaatggagcaggaccacttcaaaactggtag

SEQ ID NO: 43891 - DNA, 1543 bp, Homo Sapiens
gaaaagagggccgtgtgcagtgtcggaaggaaaagtgggcagtgcgcactgtgggagggaaaagagggccatgtgcactgtcggagggaatgtgagtgaggatgcctgctatggagagcccctggagtttcctgaaaacactaaaaatagagccaccttgggatccagcagtcccactgctgggcatacgccccaaagaaaggaaatccgtatatcgaagatgtatctgcacatccctattcattgcagcactacttacaatggccgagatttggaatcaacctcagtgcccatcaacagacgaacggataagaaaaatgtggtgcgtaggcacagtggatactgttcagccagagaagaaaggaatcctgtcatttcagccgcatggatgagcctggaggaattggggaaatcagccaggtgcaggaagacaaacaccccaggatctcacacatctgtgggagctaaaaaagccgaactcaaggcggtggtgatggactgctggttgccagagtctggggagggggtaagagttagagccagacgggagaataagctctagtgttcctggcactccacgcaactgtggttgacaacaatttattgtatgttttcagagagctggaagagaggctttggaatgttcccagcacaaagaactgacaaaggtttgaggtgacaggcacgtgaaccgccctgatctgactatcccacatcatacacgggcgtcgaaacaccaccctgtattccagaaacaggtgcaattattgtgtgccaattaaaaaaaggagagcgagaagagagagagggcgagctgggccgtggaagtggaatcagactcggagctgatgaggccagcgtttcctcctgtctcctttgatgctgaggcctgacgtcactcccgtgccattcccagccttccttcagagtccctgcgagccctcaggagctgcgtggtggggttgacgatggccacatcccgggcacctctggctgctgcaggcctcccaagaccgcttcacacttctgtgccgaccaggccaccagccagcgttgcctcttgcagaccactcggccgctagtggggtgcgcacagcagcaggctttctgtacccagagaggcggcagcaggagagccacagagagcacgggagcttctccacctcgcctggcccctcacgtgcggagcacgtcccctccagactgaagggcgcacatcttgggctgcaggacagacgcccccagggctgagctgtgtggtgcaggccaaacgctcccggctcccctgagcactggccttggaggtgaccacagagaaatgacctgatggccagaaaacccaccgtgatatttaccaactgcactcaatttaaaaaagcaaatccctaaaccatcacgtgtgcctaataaatggagcgacataaatggctaagaccagtttctaaacaaatgcctttacaaaatgaaacccagccattgtttaggaacaaaggtataatcagatcctcattttctattccaataaagtctttgaattaatgtc

SEQ ID NO: 43892 - DNA, 660 bp, Homo Sapiens
ggcagttccagcaggcctaatcgccactcatcagcaaaggcaggctatgctatagtatcttccacatctatcactgaggctaccgctccgctcccctccattacctctgaacaaaccgaattagttgccttaactcaagccctcgctcttgcaaaaggactacgcgtcaatatttatactgactctaaatatgcctttcatattctgcaccaccatgctgttatacaggctgaaagaggtttcctcactacgcaagcgtcctccatcattaatgcctctttaataaaaactctgcttaaggccgctttacttccaaaagaagctggggtcattcactgcaaggggcatcaaaacgcatcagatcccgttgctctagacaatgcttatgctgataaggtggctagacaagcagctagctttccaacttctgtccttcacggccagtttctctccttcacatcgttcactcccacctactcccccgctgaaacttccacctatcaatctcttcccacacaaggcaaatggttcttagaccaaggaaaatatctccttccagcctcacaggcccattctattctgtggtcatttcataacctcttccatgtaggttacaagccgctagcccgtctcttagaacctctcatttcctttccatca

SEQ ID NO: 43893 - DNA, 309 bp, Homo Sapiens
atgtcaagttcaggttaccctcccaaccaaggagcattcagcacagaacaaagtcattatcctcctcactctgtaaagtatacgtttcccagcacccaccaccagcaggatccagcatttggaggcaaacatgaagctccatcctctccaattctggggcaaccgtgtggagatgatcaaaatgcttcaccttcaaaactttcaaaggaagagttaatagagtgtatggatcgtgtagatcgagaaattgcaaaagtagaacagcagatccttaaactgaaaaagaaacaagtaaaagtcttcgtctaa

SEQ ID NO: 43894 - DNA, 1455 bp, Homo Sapiens
atgtatgacgactcctacgtgcccgggtttgaggactcggaggcgggttcagccgactcctacaccagccgcccatctctggactcagacgtctccctggaggaggaccgggagagtgcccggcgtgaagtagagagccaggctcagcagcagctcgaaagggccaagcacaaacctgtggcatttgcggtgaggaccaatgtcagctactgtggcgtactggatgaggagtgcccagtccagggctctggagtcaactttgaggccaaagattttctgcacattaaagagaagtacagcaatgactggtggatcgggcggctagtgaaagagggcggggacatcgccttcatccccagcccccagcgcctggagagcatccggctcaaacaggagcagaaggccaggagatctgggaacccttccagcctgagtgacattggcaaccgacgctcccctccgccatctctagccaagcagaagcaaaagcaggcggaacatgttcccccatatgacgtggtgccctccatgcggcctgtggtgctggtgggaccctctctgaaaggttatgaggtcacagacatgatgcagaaggctctcttcgacttcctcaaacacagatttgatggcaggatctccatcacccgagtcacagccgacctctccctggcaaagcgatctgtgctcaacaatccgggcaagaggaccatcattgagcgctcctctgcccgctccagcattgcggaagtgcagagtgagatcgagcgcatatttgagctggccaaatccctgcagctagtagtgttggacgctgacaccatcaaccacccagcacagctggccaagacctcgctggcccccatcatcgtctttgtcaaagtgtcctcaccaaaggtactccagcgtctcattcgctcccgggggaagtcacagatgaagcacctgaccgtacagatgatggcatatgataagctggttcagtgcccaccggagtcatttgatgtgattctggatgagaaccagctggaggatgcctgtgagcacctggctgagtacctggaggtttactggcgggccacgcaccacccagcccctggccccggacttctgggtcctcccagtgccatccccggacttcagaaccagcagctgctgggggagcgtggcgaggagcactccccccttgagcgggacagcttgatgccctctgatgaggccagcgagagctcccgccaagcctggacaggatcttcacagcgtagctcccgccacctggaggaggactatgcagatgcctaccaggacctgtaccagcctcaccgccaacacacctcggggctgcctagtgctaacgggcatgacccccaagaccggcttctagcccaggactcagagcacaaccacagtgaccggaactggcagcgcaaccggccttggcccaaggatagctactga

SEQ ID NO: 43895 - DNA, 1989 bp, Homo Sapiens
atggggaacatactgacctgtcgtgtgcaccctagcgtcagcctcgagtttgaccagcaacaggggtcggtgtgtccctctgaatctgagatctatgaggcagtagctggggacaggatggcaggagcgcccatggctgctgctgtgcagcctgctgaggtgactgttgaagttggtgaggacctccacatgcaccacgttcgtgaccgggagatgcctgaagctttggagtttaacccttctgccaatccagaggcaagcacaatattccagaggaactctcaaacagatgttgtagaaataagaagaagcaactgtacaaaccatgtatctactgtgcgtttcagtcaacaatacagcttgtgttcgacaatattccttgatgacagcacagcccagcattatcttacaatgacaataatatctgtgaccttggagatacctcatcatatcacacaaagagatgcagatagatctttgagcatacctgatgaacagttacactcatttgcggtttccaccgtgcacattacgaagaacagaaatggaggtgggagtttaaataactattcctcctccattccatcgactcccagcaccagccaggaggaccctcagttcagtgttcctcccactgccaacacacccacccccgtttgcaagcggtccatgcgctggtccaacctgtttacatctgagaaagggagtgacccagacaaagagaggaaagccccggagaatcatgctgacaccatcgggagcggcagagccatccccattaaacagggcatgctcttaaagcgaagtgggaaatggctgaagacatggaaaaagaaatacgtcaccctgtgttccaatggcgtgctcacctattattcaagcttaggtgattatatgaagaatattcataaaaaagagattgaccttcagacatctaccatcaaagtcccaggaaagtggccatccctagccacatcggcctgcgcacccatctccagctctaaaagcaatgacctatccaaggacatggacaccgggctgggtgactccatatgcttcagccccagtatctccagcaccaccggccccaagctcaacccgcccccctctcctcatgccaataaaaagaaacacctaaagaagaaaagcaccaacaactttatgattgtgtctgccactggccaaacgtggcactttgaagccacgacatatgaggagcgggatgcctgggtccaagccatccagagccagatcctggccagcctgcagtcatgcgagagcagtaaaagcaagtcccagctgaccagccagagcgaggccatggccctgcagtcgatccaaaacatgcgtgggaacgcccactgtgtggactgtgagacccagaatcctaagtgggccagtttgaacttgggagtcctcatgtgtattgaatgctcaggtatccaccgcagtcttggcacccgcctttcccgtgtgcgatctctggagctggatgactggccagttgagctcaggaaggttatgtcatctattggcaatgacctagccaacagcatctgggaagggagcagccagggacagacaaaaccctcagaaaagtccacgagggaagaaaaggaacggtggatcctttccaaatatgaggagaagctctttctggccccactaccctgcactgatctgtccctgggccagcagctgctgcgggccaccgctgatgaggacctgcagacagccatcctgctgctggcacatggctcccgtgaggaggtgaacgagacctgtggggagggagacggctgcacggcgctccatctggcctgccgcaaggggaatgtggtcctggcgcagctcctgatctggtacggggtggacgtcatggcccgagatgcccacgggaacacagcgctgacctacgcccggcaggcctccagccaggagtgcatcaacgtgcttctgcagtacggctgccccgacgagtgcgtgtag

SEQ ID NO: 43896 - DNA, 432 bp, Homo Sapiens
atgcttgccccctgttcaggttgggagcttggctgcttccgtctctgtctccgtcaggtccgactgtgggctggcgttgggcgctggtcttgctgggcttgccaagccaggccgtacagctcaggtagaggcgagcgctggcccggatcggagactgaggtccctccgcctggcccggcgcgccgaactctgaaggagtggacactgcaggtgagcccgttcggtcggctgcgggcgcggctcccgtgccacctggccgtgaggcccctggaccccctcacctacccggatggcgaccgcgtgctggtcgcggtgtgcggcgtggagggcggcgtgcggggcctggacggcctgcaggtgaagtacgacgaggatctggaggagatggccattgtgtctgatactatccacccccaggcgtccgtggaggtg

SEQ ID NO: 43897 - DNA, 327 bp, Homo Sapiens
atgcccaaccggcgggggggtgtctccctgcccccgacccccccatacccccttctctgtgacacacacatcttctcgtctctttttctttcattgttaaagggaagctttttaagaaggcaattttcatattgtttctacaggatggttttggttcccttcccttcccacccccccttaagcctgtcagccccctccaaatgtctcaggatcccccctctcccctggggctgggtgacagcaccccggctgcgttcacaccccagtgtcacagggcgagctgttctggagagaaaaccatctgtcgtggctgagcggggagcttga

SEQ ID NO: 43898 - DNA, 3268 bp, Homo Sapiens
gccgcccggtgatattgacaataggagagagaaaggggcattgactgggacccaccgcgggtagcgaaaggtggctctggcagcggcggctccagctcctgcggctcctcctccttattctgtccccttctcttgctgccgctgcagatccagtcttcctccctcccttccccccctccccacgtcgtcgccgccgccgccgggtccggggcaacgagctgaggcgccgcccgccaggaatgtgagcgaggagccaccggcggagccgcaacggggtcggtgccgatttgatgggacgggcccgcgggggaggatcgtgaggccgccgccgccaccggaacgctgaggttcgggtccggccgtgaggcctagaggctccgccgccgcggaaccggagggaccccgtaccggacagccgtcgccccaggctccccgcagctgcccggacctccccctgcacgtcccggtcccgccgcccgcccccgctgcggccacctcgcccgtctcccgcccctccaagccacagatcatctttggattcttccccagaagcttcaagtagggatatgtcctcagcaccaactactcctccatcagtggataaagtagacggattttctcggaagtccgtcagaaaagccagacagaagaggtcgcaaagttcctcacagtttaggtctcaaggcaagcctattgagttaacacctctgccgctgctaaaagacgttccatcctcagagcagcctgaactgttcctaaagaaacttcagcagtgctgtgtcatttttgacttcatggacacgctatctgatcttaaaatgaaagaatacaagcgctccactcttaatgaactggtggactacattacaataagcagaggctgtttgacagagcagacttaccctgaagtagttagaatggtatcttgcaatatattcagaactctccctcctagtgacagcaatgaatttgatccagaagaagatgaacctacccttgaggcatcgtggccacacttacagcttgtatatgaatttttcatacgatttttggaaagccaagaattccaacccagcattgccaaaaaatatatagatcagaaatttgtattacagcttctggagctatttgacagcgaagaccctcgggaacgggactacttaaaaacagtcttacacagaatttatggcaagtttcttggtcttagagcatttatccgaaaacagattaacaatatttttctaaggtttgtttatgaaacagaacacttcaatggtgtagctgaactgctggaaatattaggaagtattatcaatggctttgctttacctcttaaggcagaacacaaacagtttctggtgaaagtattgatccctttacacactgtcaggagcttatcactcttccatgcacagctggcatattgtatagtacagtttctggagaaagatccttcactcacagaaccagttattagggggttaatgaaattttggcctaaaacatgtagtcaaaaagaggtcatgttccttggggaactggaagaaatattggatgtgattgaaccttcacaatttgttaaaatccaagaacctttgtttaaacaaatcgccaagtgtgtatctagcccccattttcaggttagtaaaagagcactctattattggaataatgaatacatcatgagtttgatagaagaaaactctaacgtcatccttcccatcatgttttccagcctttataggatttcaaaagaacattggaatccggctattgtggcgttggtgtacaatgtgttgaaggcatttatggaaatgaacagcaccatgtttgacgagctgacagccacatacaagtcagatcgtcagcgtgagaaaaagaaagaaaaggagcgtgaagaattgtggaaaaaattggaggatctggagttaaagagaggtcttagacgtgatggaataattccaacttaacaaaaacaatgacaacaacattactaacctgtggagtcacacgtttatgtagtagaagatggagcaacagttttctgtattgtgcaactttacagtagatttcacctttgtttcattattacagcagcactgtatatacctgtctctaagtaaaggaaaaaacaaaataaggacttcaatccaaagtttggacagtagatggacttctcagaactttgcaaacataatcattgttctcaccctcttttaaaaaaaaaaatcggtcttcaaagatctgttgatgaaattgctatgttaaaattccattatcgggagttccttatttatcactagcagagagtatgatacaattttcaaatgtgaacaatcttaaatttagcttgtctttctgctaagctgttaaatgtatttatagtaaaggaagaaaaaaagactgtcatttccttataagtttgtgtaacatcctcctctggataacttgactgtaatttaacatctttttcttttgcacatcttcctgagttgaatgtccacgtggaatggggtcatgaattataaaagtccctgataaaagttttgtttactggggtgaacatctttccagtaaccaggtagtcctggtactcctttagttttaaaattaggagttaagagagaagaggtgataaacatagtagggaagggaatatcggattcatgcatcagtttatggtgaatccaaatcaatgtcttgaatcctttgaaaacaggcactgggacatcacaggcttcagtacctgaccagtattagttgcatatatcattgaacacacataccagagatgttttagaaatgtgagaaaaacatccttttggaccatttgaaataagaaagacaaacactaaacaatacaaccatgaaattgatcaccgggattgcaaatctaattgggaaaagagttgagcaaacagcttggactgtttggagttgttgccttactttttaatatgtatttataaagtattccagcaaaagaggatgtagcctctgggaaaaaacaaacatgttacagtgttttttgtagattctcgttctatatctcatcacagcgccagccctgtttttagccggaaaggattcaggataaacattattatgcattctgaattggatgcatattcctaactactgtatttgttaccaaaagtggttctacaaatgctactgaaaaaaatctggaaattcctaatgtcctgagtattaataataaagtttaaaaatgcttttatatcaaaggtgcatcgtgaccaaattgttt

SEQ ID NO: 43899 - DNA, 1218 bp, Homo Sapiens
atgcggccttatgatttacaagatccaagaattcatactgtcctgagtggagaagtgtacacctgtatgtgcttcctcattgatatggtgaatgtaagtctggagcttaaagatccaaaaagaaaagaaggtgctgggtccctagccagatttgacttcaagaaatgcaaactgctctatgaaagtttttccaaccaaaccaagtccattaacttggtttcccattccatgatggcttttgacacccgttatgctgggcagaagaccagccctggcatgacgaatgtgttcagctgtatctttcagcccgctaagaacagcagcaccacccaagggtccattcagattgaactacatttcagatctaccaaggattcctcctgctttacagtagttctcaacaatctccgtgtgtttctcatatttgactggctactgttagtccatgattttctccacactcccagtgatattaagaaacaaaatcatgttactccttctcgccaccgtaactctagcagcgaatctgctatagttcccaaaactgtgaagagtggagtagttaccaagcggtcttcccttcctgtgtccaatgaaaggcacctggaggtcaaggtcaatgtaacaggtacggagtttgtggtcattgaagatgtgtcctgcttcgacaccaatgccattattctgaaaggcaccacagtgctcacctataagccccggtttgttgatcgccccttttcaggaagtttgtttggcattgaggtgttttcatgccgactagggaatgagcatgatacagctctttcaattgtggatcccgtacaaattcaaatggagttggtggggaattcttcttatcaaaatagttcaggattgatggatgcattcaatagtgaagatttcccacctgtcctggagattcagttacaagccctggatatcagactctcctataatgatgttcagctgtttcttgccattgcaaaatccatcccagagcaagctaatgctgcagtgccagactcagtggccctggagtcagactccgttggcacttaccttccaggtgcatctcgcgttggagaggaaatcagagaagggacaagacacaccttagatcctgtcttggagttacagctggctaggctgcaggagctgggattcagcatggatgattgtcgcaaagctcttttggcgtgtcaaggtaatttgaacagg

SEQ ID NO: 43900 - DNA, 459 bp, Homo Sapiens
atggcggattctgagcgcctctcggctcctggctgctgggccgcctgcaccaacttctcgcgcactcgaaagggaatcctcctgtttgctgagattatattatgcctggtgatcctgatctgcttcagtgcctccacaccaggctactcctccctgtcggtgattgagatgatccttgctgctattttctttgttgtctacatgtgtgacctgcacaccaagataccattcatcaactggccctggagtgatttcttccgaaccctcatagcggcaatcctctacctgatcacctccattgttgtccttgttgagagaggaaaccactccaaaatcgtcgcaggggtactgggcctaatcgctacgtgcctctttggctatgatgcctatgtcaccttccccgttcggcagccaagacatacagcagcccccactgaccccgcagatggcccggtgtag

SEQ ID NO: 43901 - DNA, 561 bp, Homo Sapiens
attgagtccctaagtcctgagttggtggcagctgcatctgctgtggcagattctctcccttttgacaagcaaataaccaagtcagagctgttgaggcagctccagcagcatgaggaagagtcaagggcacagagagatgcagagagaactaaaattagtttcagtaacgtaatatcagatatgaatgttgccagatctgctacagctagagtttgttcaagaccagagcatcagattcagtttgacaagggctatgacaattatcctggccaggagaagactgctgatcttacaaaaaggaaaaatatattcacggggaaaagacttaatatttttgacctgacgtcagttactaaagacacacctgaaacagatatttacattgacttgttcttacttaaaatgtttttattatacgacacatcaccttcactttgggatgtggaatttgctaagcagttagccacagtcaatgaacaaccccttcagaatggctttgaagagctgatcctgtggacaaaagaggggaaactgtgggagttcccagttaacaatgaagca

SEQ ID NO: 43902 - DNA, 2135 bp, Homo Sapiens
ttcccacaaaagctaggctggttctgattcttaacctgctccagcagtgacacactcagtcccacagggagtggacgacccccaggaagaagatgatgttttggaggaaactccccaaagccctcttcattgggctgactctggccattgctgtcaatctccttctggtattttctagcaaggggactttacaaaacctgtttacgggtggtctccacagggagcttcctttacatctgaataaacgctacggggcagtgataaagagactctcccacttggaggtggaattgcaggatctgaaagaaagtatgaaattagctctgaggcaacaagaaaatgtgaacagcacactgaagagggcgaaagatgaagtacgccctcttctaaaggcaatggaaaccaaggtgaatgagacaaagaagcacaaaacccaaatgaaactcttcccacactcacagcttttcaggcaatggggcgaggatctttctgaggcccagcagaaggcggcccaggacctcttccggaagtttggttacaacgcgtacctcagcaaccagctgcctctcaatcgcaccatccccgacacgcgagactacagatgtcttcggaagacatatccttcccaactcccatccctcagtgtcattctcatattcgtgaatgaagctctgtccattatacaacgggccatcaccagtatcatcaaccggacgccctctcgattgttgaaggaaatcatcttggtggatgatttcagctcaaatggagaactaaaggtacacttggatgagaagattaagctttacaaccagaagtatccaggactactgaaaataatacggcatcctgaaaggaaaggtcttgctcaagcccgcaacactggctgggaagctgccacagcagacgtggtcgccatcttggatgctcacattgaagtcaatgttgggtgggcagagccaatcttggctcggattcaggaggaccgcactgtgattgtgtctcctgtgtttgacaacattcgttttgacaccttcaaactggataagtatgaactggcagttgatgggtttaactgggaactctggtgccgctacgatgcactgccacaagcctggattgatctgcatgatgtcactgccccagtgaagagtccttcaatcatgggcatcctggctgctaacaggcacttcctgggagagatcgggtctctggatggtggaatgctcatctatggaggagagaacgtggagcttagcctgagggtgtggcagtgtggagggaaggtcgagattttgccctgttcccggattgcccacctagagagacaccacaagccctacgccttggatctcaccgctgccttgaagcgcaatgctctgcgagtggccgaaatctggatggatgagcacaaacacatggtctacttggcctggaacatacctctccagaactctggaatagattttggagacgtttcttccagaatggcactccgggaaaaactgaaatgtaaaacttttgactggtacctgaaaaatgtttatccactcttgaagccactccacaccatcgtgggctatggaagaatgaaaaacctattggatgaaaatgtctgcttggatcagggacccgttccaggcaacacccccatcatgtattactgccatgaattcagctcacagaatgtctactatcacctaactggggagctctatgtgggacaactgattgcagaggccagtgctagtgatcgctgcctgacagaccctggcaaggcggagaagcccaccttagaaccatgctccaaggcagctaagaatagactgcatatatattgggattttaaaccgggaggagctgtcataaacagagataccaagcggtgtctggagatgaagaaggatcttttgggtagccacgtgcttgtgctccagacctgtagcacgcaagtgtgggaaatccagcacactgtcagagactggggtcagaccaacagccagtgatcctcagatggtgctggatctgggtcatcaattcttgcaagtggaatggcttctactcctaacactcccagcttctttctcaatgagaaagaaagcatgtgtatgtctgtttatggcgacttcaggtgg

SEQ ID NO: 43903 - DNA, 2808 bp, Homo Sapiens
gaatcttcctagttctagtggttggacaagtctttaactccatagcctagctccagctaggttcatgagctggccctactgctctctcctttccccttttcctcttatcccattgcattagtctggattcttgcttacagataaccaaaaccttagtcaatctgatttaagcaaaaaccagaattgataggctcacataactgaaattccagggtagaccctaaggccgggctggatgcagggactcagtcatctcactcgggctaggtctctctcaatgcctagtccctatttcatctgagttggcttccctctcaggtgggctttttctcatggagatcctcagcagcccatggaaggagagttttttcccatcatcttgtacaagtccccaggttgagtctcattggcctgctggccccatgcccatccctgaacaatactgcaattggtcacctgcagtcacatgccctgtgactgcaggaaggtggggatgggctagttacccaaaggaaagtccaggtgctgtgcccagaagggagaatggatgtggggcagagcaaaccgtagatgtctaccttacccagccagacaagactgcatgtaagaaccaggcttacgggccagcccctctctgcaggcccacactgtacactcctgaaatgccattccttagtctggccaaccctcattcacccttccaatctcagcttatatagatggctccccatgctgcctaggaactaccccacattgcactcccatctctgcatgctccctggaggcagggaggaggttttgtccacctctatatccccagtctctggcccacatcagtgttttcagtaagtgttagtgtgttagtggcatcacttccaactgatatacctccttggtactacccttcccagacttaggaggccatctttggacaatggtgtatggtgggaaagtgctcagcaaggaggctctccttccatcctaggaccctgggccagttgtttcacctctggtcctcataccccagactgtgctgatacggttttccttcctaccccacaagataggatcaaatgagatgctgtgtggacagccctctgacatacacagatatgaggggttgtttggattagggggggaggcagcaggatgagcagaaaggaaactgcacagtgtccccaggaggccatggttaggatatctccaactatgagatacgggagacagaaagtatccaaccaggacaatgtgaccaaactaaagtgagaaaaatgtaggctttggggcagtgtaagtgggtatatcttctgtgaatagcaatttggcaaaatccattacatttcagagcaagcacattctttgacctgaaattccatgcccaggagtttatataagagagacagtgatgagcaaagatttatttgctgaagtgttacttaccatagcagaagattgaaaatgacccaaatgcacgtcctttggggataaataagttagagcatatctaaacaagaaaatattacgtaaaataaattggaggtctccacaaaaaaaaaaaaaaaaaaaaacccattttttttcagacaggatctcacaccgttgcccaggctggagggcagtgacgtgatcagagctcactgcagcttcaacaccccagggctcgagcagttgtcccacttcagcctcccaaatagctgggactacaggtctacaccaccactcccggctaattttttaatattttgtaatgacagggtctccatatgttgcccaggctggtctcaaactcctggcctcaagcagtcttcctgcctcgggctcccaacatgctggcattacaggtatgagccaccgcgcccagcccatctcacttctgaaaatgactcagtgccatgaacccttcatccctagtggcctttgggggtgggaggtcttcaaagtacagccgtctctttctacctaatgtgtgtctgcaacatcgaacttgttcatcataagtacgtattacttctgtaaccaggaaaagttacaagaagaaggggccaggcacagtggctcatgcccgtaattctcacattttgggaggtcgaggcaggagtattgcttgagcccaaaagttcaagaccagctttgggcaacacagtgagacctcatctctaaaaaaaagttcttttaattagctgggcatggtggtgtgctgcgtgcctgtagtcccagctacttggaaggctaaggtaggaggaggattcctttagcctggaggtcaaggctgcaataagccatgttcatgacactgcactccagcctgggtgatagagtgagaacttgtctcaaaggaaagaaaaaaaaaataagaaaatgttgggttctcagcacttccagcccacccccatccatatacattccagcacattgttggggccatttgcaagctctgagatgagattctgcacaagtcagcagtgcagagactcccagggaaggcctgaggccgccaagagcaactctgcagggtctgctccaagaggcagaggtgggccccaccgtccttggcaaaatggagattggtctgagggttccatgaggcaggcttgcaggagcaagggagtgatagaaagccatgtgaggggacgagagggaggacaccctcccctgcagaagtcaggaaggtctttgagcttgttctgagaggaaaacccattctctgggtagaggaatgaagactcagaggagactggggttcgctttgtgtgatactgatatggttactgaaaggctagcccagtcccaggctacgtgaacagactt

SEQ ID NO: 43904 - DNA, 531 bp, Homo Sapiens
gtggttccgggtaggagctaggtgaccctcggctgctgcagggatctgcagcgactgcagccatgggggcccacctggtccggcgctacctgggcgatgcctcggtggagcccgaccccctgcagatgccaaccttcccgccagactacggcttccccgaacgcaaggagcgcgagatggtggccacacagcaggagatgatggacgcgcagctgaggctccagctgcgggactactgcgcccaccacctcatccggctgctcaagtgcaagcgtgacagcttccccaacttcctggcctgcaagcaggagcggcacgactgggactactgcgagcaccgcgactatgtgatgcgcatgaaggagtttgagcgggagcggaggctgctccagcggaagaagcggcgggagaagaaggcggcagagttggccaaaggccagggacccggggaagtggaccccaaggtggccctgtagggggtgcaccccccaccctatggaccagtcaaataaaagccttcaggcccctcaa

SEQ ID NO: 43905 - DNA, 2160 bp, Homo Sapiens
agttacccctttgcaacagaacgaggccggcattttctaaagcgtccttgaggagtccagttcctaaaagattatttcagagtccactgttgtgggctgacttgaatgctctcaaaattcgtaagttgaagccctgacccccaggacctcagaacgtgactgtgcttggacacagggactttccagaggtgattaaggtgaagtgaggtcactggatggccctcctcctatctgactggtgtcctgatggggacgcggacacccacacaggaacggacccggggagaacaacacatcgtctctgcgccagggagagaggcgtccggggaacccagccgtgcccacgcatttatctccgccttccggctcagaattgtgaggaaacccgcttctgttgtgcaagtcccgggtctgtggtgctcggccatggcgcccccagaactgcatccccaccttctgctctgagccacccatcccctctggaagggctgagcttctctccctttccaccttctgttctgagccacccgtcccctccagaagggctgagcttctctctctttcactgcctatgctctgggaaactttcagaatccccaggctgtttctggaatagtctgggatggtcattttcggtcctcacagaaccgggggtttggaaagtaggtgaagccatatgggttgcagagaatctggcccagcccctcactagtccctgtgcttgttagttattctttaattacttggatatcaactctgatttaaaacatcaatttaacatacagataatgctgggactgcagcttcgccaggtggccttcctctcccggtctcgggaggcgtcacccccatcttgtccccccaagatcaagcgaaaagggcaaagttatcttttttttttgcaaaattcaaacctttccctccttcccaggtctgggtcacttgcgaccctcctctcaggctgcttctgacaggcccaagtcacagccaacttcaggggagctgtgttggatccctccaaactccgggaatgatgtgacctccccggcgctcaccctgggcctctaggttagactcagcccagaccctggctcacagggaagcagagcccatggctggcctccacccgctcagacgcccgcacacaggccaggggagggcttgggggcagctctgggagggtccctgtttgcgctgtgggtgtccaaggctgggtgtgcagagctgaggttgccacacacctgagggactctcgcataaggatggcgcagggctggaagctggactgagacagtgaatgagacagcgctgccggctctctccgcgccgtggactggctcctaggcagtctcacgagcaagtgtgctgttgctcgtgcacgtgtgttttaactgagatgtgagctggcgcgttttctccacccggctccatctgctgggtccctccacattgctgcgcgtgtgcctccagtgccatggggtccccactgtgggcagccctgcattttgcccaactgcctcccaaaccatggaaccccagtgacctccaacttgccgccatgacgagccactctcattcatatcctcaaacacggtgctctgagcccgaatgagggtttctttagagagatatctggggaccaaactgtagggacagagctcccgtctaaggtgggcctgtggtgaggtctccccagtggtacactttaatcccacagcagggcttgcaggccgccctgctccatccccaccaacactgggcaggatctagcctccaaacctttgccagtctaatagtataaaatgatagctcggtgctattttggttttgcatttccatggtgaacaatgagtttgagagtttttgttcaaaagtcctttgggagttcgagaccagactgggccaccaggagttcaagaccagcccgggcaattcagtgagatgttcatctctacaaaaaataagaaagataaaaaattagccaggcatgtttgtgtgtgcctgtggtcccagctcctcaggaggctgaggtgggaggatggcttgaccccgggaggtggaggctgcagtgagttgtgatcgtgtcagtgcacggctagcctgggcaacagagtgagaccccgtttctaaaataaaaataaaaaacaaaagagaaaagtc

SEQ ID NO: 43906 - DNA, 255 bp, Homo Sapiens
agacaagagggacagggaggcttcgcggaaccctacgcccacccgacgcgttcgcccgtccgtttttatttttatttttattttggtttttttgttgttgttctcttcttttgttttttttctttagagacggggtctagctatgttggccaggctggtctcgagtccccgggctcaagcgatcctcccgcctcagcctccggaaaagtgggactacaggcgcgcatcgccgcacccggccaatccctgttttaa

SEQ ID NO: 43907 - DNA, 459 bp, Homo Sapiens
aaggaaaaggccaaagttgttgagcccctggactatgagaatgttattgcccaaagaaaaacccagatttacagcgaccccctccgagatctgcttatgttcccaatggaagatatatctatctcggtgataggtcgtcaacgcagaacggtgcagtctactgtaccagaagatgctgaaaagagggcccagagtttatttgttaaagagtgtattaaaacctatagcacagattggcacgtggtaaactacaagtatgaggacttctctggggactttcgaatgttgccatgtaaatctttgagaccagaaaagattcctaatcatgtatttgagatagatgaagactgtgagaaagatgaggactcatcttctttatgttctcagaagggtggtgtgataaaacaaggctggttgcataaagcaaatgtaaatagtaccatcacagtaaccatgaag

SEQ ID NO: 43908 - DNA, 477 bp, Homo Sapiens
atgacccacagaacacccaaggtcaaaaagagtccaaagttcagaaagaaaagttatctgagtagactgatgctcgcaaacaggcctccgttctctgcagcgaagagcctcataaattccccttcacaaggggctttttcatccttaggagacctgagtcctcaagaaaacccttttctggaagtatctgctccttcagaacattttatagaaaccactaatataaaagacacaactgcaagaaatgccttggaagaaaatgtttttatggaaaacactaacatgccagaagtcaccatctctgaaaacacaaactacaatcatcctcctgaggcagattccgctgggactgcattcaacttagggccaactgttaaacaaactgagacaaaatgggaatacaacaacgtgggcactgacctgtcccccgagcccaaaagcttcaattacccattgctcagtttgaaattcagctaa

SEQ ID NO: 43909 - DNA, 726 bp, Homo Sapiens
cagtcccagctgctagtgtcgctgttgctgctactgacccgtgtccagcctgggacagacgtggagcacatcagctatgtgccccagctctcaaacgacaccttggcggggaggctcaccctgtccaccttcacgctggagcagcctctaggccagttcagcagccacaacatctctgacttggataccatctggctggtggtggccctcagcaacgccacccagagcttcacggccccacggacaaaccaggacatccctgctcctgccaacttctcccagaggggctactatctcacactgagggccaaccgggtgctgtaccagaccagaggccagctccatgtcctccgcgtcggcaatgatacccactgccaaccaacaaaaattggctgcaaccatcccctaccaggacccggcccctacagggtgaagttcctggtgatgaatgacgaaggacccgtggctgaaacaaagtggtccagcgacactcgcctgcagcaagcccaggcacttcgggctgtccccggcccccagagcccgggcaccgtggtcatcatcgccatcctgtctatcctcctggccgtcctcctcacggtcctcctggctgtgctcatatacacctgctgcaggagcacttccctatcaggcccagaggaggcagggagtgtgagaagatacaccacgcacctcgcgttcagcactcctgccgagggggcttcctga

SEQ ID NO: 43910 - DNA, 1929 bp, Homo Sapiens
gtggccgcgatgctgctgctgctgctcagcgcggcgcgggccaaggaggaggacatgggcacggtggtcgccatccacctggggacaacctacccctgtgtcggcgtgttcaagaacggccgcatggagatcatcgccaacgatcagggcaaccgcatcatgccgtcctatgtggccttcactcctgaaggggaatgtctgatcggcgatgcagctaagaaccagctcacctccaaccccaagaacacggtctttgacgccaagcggctcatcggccgcaggtggcacgacccgtctgtgcagcaggacatcgagttcctgccgttcaaggtggttgaaaagaacactaaatcatacattcaaattgatgttggaggtgggcaaacaaagacatttgctcctaaagaaatttctgcaatggttctcactaaaatgaaagaaaacgctgaggcttatttgggaaaggttacccatgcagttgttactgcaccagcctatttcaatgatgcccaatgccaagcaaccaaggacgctggaactattgctgacctaaatgttatgaggatcatcaataagcctacagcagctgctattgcttatggcctggataagagggagggggagaagaacatcctggtgtttgacctgggtggtggaacctttgatgtgtctcttctcaccattgacaatggtgtcttcaaagttgtggccactaatggagatacttatctgggtggagaagactttgaccagcgtgtcatggaacacttcatcaaactgtacaaaaagaagactggcaaagatgtcaggaaagacaatagagctgtgcagaaactctggcgcaaggtagaaaaggccaaacgggccctgtcttctcaacatcaagcaagcgtaattgaaattgagtccttctatgaaggagaagacttttctgagaccctgactcaggccaaatttgaagagctcaacgatctgttccagtctactatgaagcctagccagagaagtgttaaagtgttggaagactctgatttgaagaagtctgacattgatgaaactgttcttgttggtggctttactcaaattccaaagattcagcaactggttaaagagttcttcaatggcaaggaactatcccgcggcataagcccatatgaagctgtagcatatggtgctgctgtccaggctggtgtgctctctggtgatcaagatacaggtgacttggtgctgcttgatatatgtccccttacacttggtattgaaactgtgggaggtgtcatgaccaaactgattccaaggaacacagtggtgccaaccaagaagtctcagatattttctacagcttttgataatcaaccgacaatcaaggtctatgaaggtaaacaacccctgacaaaagacaatcatcttctgggtacatttgatctgactggaattcctcctgctccttgtggggtcccacagattgaagtcacctttgagatggatgtgagtgatattcttcaagtgacagctaaagacaagggtacaaggtacaaaaataagatcacaattaccaacgaccagaatcacctgacacctgaagatattgaaaggatggttaatgatgctgagaagtttgctgaggaagacaaaaagctcaaggagtgcactgatactagaaatgagttggaaagctatgcctattctctaaagaatcagattggagataaagaaaagctgggaggtaaactttcctctgaagataaggagaccatggaaaaaactgtagaagaaaagactgaatggctggaaagccaccaagatgctgacactgaagacttcaaagctaagaagaaggaactggaagaaattgttcaaccaattatcagcaaactctatggaagcgcaggccctcccccaactggggaagaggatacagcagaaaaa

SEQ ID NO: 43911 - DNA, 1506 bp, Homo Sapiens
atggttctctggggtccagtgctgggagctctgctggtggtcattgctggatacctgtgcctgccagggatgctccgacaacgcaggccatgggagccccctctggacaagggtaccgtgccctggcttggccatgccatggctttccggaagaatatgtttgaatttctgaagcgcatgaggaccaagcatggggatgtgttcacagtgcagctagggggccagtacttcaccttcgtcatggaccccctctcctttggctccatcctcaaggacacacagagaaaactagactttgggcaatatgcaaaaaaactggtgctgaaggtatttggataccgttcagtgcaaggggaccatgagatgatacactcagccagcaccaagcatctgaggggggatggcttgaaggatcttaatgagaccatgctggacagcctgtcctttgtaatgctgacgtccaaaggctggagtctggatgccagttgctggcatgaggacagcctctttcgcttctgctattacatcttgttcacagctggctacctgagcttgttcggctacacgaaggacaaggagcaggacctgctacaggcaggagagttattcatggagttccgcaagtttgaccttcttttcccaaggtttgtctactccctgctgtggccccgggagtggctagaagtgggccgactccagcgtctctttcacaagatgctctccgtgagccacagccaggagaaggagggcatcagcaactggctgggcaacatgcttcagtttctgagggagcagggggtaccctcagctatgcaggacaagttcaacttcatgatgctctgggcctcccaggggaacacggggcctacctctttctgggccctcttgtacctcctgaagcacccagaagctattcgggctgtgagggaggaagctacccaggtcctgggtgaggccaggctggagaccaagcagtcctttgccttcaaactcggtgccctgcaacacaccccagttctagacagcgtggtggaggagacgctgcggctgagggctgcacccaccctcctcaggttggttcatgaagactataccctgaagatgtccagtgggcaggagtatctgttccgccatggagacatcctggccctctttccctacctctcagtgcacatggaccctgacatccaccctgagcccaccgtcttcaagtacgatcgcttcctcaaccctaatggcagccggaaagtggacttcttcaagacaggcaagaagatccaccactacaccatgccctggggttcgggcgtttccatctgccctgggaggttctttgcactcagtgaggtgaagctctttatcctgcttatggtcacacactttgacttagagttggtggaccctgacacaccactaccccatgttgacccgcagcgctggggttttggcaccatgcagcccagccacgatgtgcgcttccgctaccgcctgcatcctacagagtga

SEQ ID NO: 43912 - DNA, 1395 bp, Homo Sapiens
atgaccctgagcactgagatgtccgatgcctctggcctcgccgaggaaacagacatcgacgtggtgggggagggcgaggacgaagaagacgaggaagaggaggacgacgacgagggcggcggtggcgggccccggctggctgtccccgcgcagcggcggcggcggcggcgctcgtacgccggggaggacgagctggaggatctggaggaggaggaggacgacgatgacatcctgctggccccgcctgctgggggctccccggcgcccccgggcccggccccggcggcgggggcaggagccggtgggggcggcggcggcggcggcgcgggcggcggcgggagcgcgggtagcggcgccaagaacccgctggtgaagccgccctactcgtatatcgcgctcatcactatggccatcctgcagagccccaagaagcggctgacgctgagcgagatctgtgagttcatcagcggccgcttcccctactaccgggagaagttccccgcctggcagaacagcatccgccacaacctctcgctcaacgactgcttcgtcaagatcccccgcgagcccggcaacccgggcaagggcaactactggacgctggacccggagtccgccgacatgttcgacaacggcagcttcctgcgccggaggaagcgcttcaagcggcagccgctgctcccacccaacgccgcggccgccgagtctctgctgctgcgcggcgcgggagccgcagggggcgcgggcgacccggcagccgccgccgcgctcttcccgcccgcgcccccgccgcccccgcatgcctacggctacggcccctacggctgcggctacggcctgcagctgccgccttacgcgccgccctcggccctcttcgccgccgcagcggccgccgccgccgccgccttccacccgcactcgcccccgccgcccccgccaccgcacggcgcggccgccgagctggcccggaccgccttcggctaccggccgcacccgctcggcgccgccctacccggccccctgccggcctccgcggccaaggcgggcggcccgggcgcctcagcgctggcgcgctcgcccttctccatcgagagcatcatcgggggcagcttgggcccggccgccgctgccgccgccgccgcgcaggccgccgccgccgctcaggcctcgccctcgccctcgccggtggcggcgccgccagctcccggatccagcggaggaggctgcgcggcgcaggcggccgtgggcccggcggccgcgctcacccgatccctcgtggccgccgcggccgccgccgcctcctcagtctcctcgtccgccgccttggggactctgcaccaagggactgccctgtccagtgtcgagaactttactgctaggatttccaattgttaa

SEQ ID NO: 43913 - DNA, 609 bp, Homo Sapiens
caggagtacaccatgacggtgttcctgcaccagagctggcgggacagcaggctctcctacaaccacaccaacgagaccctgggtctggacagccgcttcgtggacaagctgtggctgcccgacaccttcatcgtgaacgccaagtcggcctggttccacgacgtgacggtggagaacaagctcatccggctgcagcccgacggcgtgatcctgtacagcatccgaatcacctccactgtggcctgcgacatggacctggccaaataccccatggacgagcaggagtgcatgctggacctggagagcttctctcttctgagccctggtgggccccgtagctgccaagccctgcagcccctgagtcccatggttgggctgggctgggcagggatgggggcactgacggtggctgtcctggcagctggccagttcccacggctcagcctgcacttccacctgcggaggaaccgcggcgtgtacatcatccaatcctacatgccctccgtcctgctggtcgccatgtcctgggtctccttctggatcagccaggcggcggtgcccgccagggtgtctctaggcatcaccacggtgctgacgatgaccacgctc

SEQ ID NO: 43914 - DNA, 780 bp, Homo Sapiens
atggagcgtaaaataaacagaagagaaaaagaaaaggagtatgaagggaaacacaacagcctggaagatactgatcaaggaaagaactgcaaatccacactgatgaccctcaacgttggtggatatttatacattactcaaaaacaaacactgaccaagtacccagacactttccttgaaggtatagtaaatggaaaaatcctctgcccgtttgatgctgatggtcattatttcatagacagggatggtctcctcttcaggcatgtcctaaacttcctacgaaatggagaacttctattgcccgaagggtttcgagaaaatcaacttcttgcacaagaagcagaattctttcagctcaagggactggcagaggaagtgaaatccaggtgggagaaagaacagctaacacccagagagactactttcttggaaataacagataaccacgatcgttcacaaggattaagaatcttctgtaatgctcctgatttcatatcaaaaataaagtctcgcattgttctggtgtccaaaagcaggctggatggatttccagaggagttttcaatatcgtcaaatatcatccaatttaaatacttcataaagtctgaaaatggcactcgacttgtactaaaggaagacaacacctttgtctgtaccttggaaactcttaagtttgaggctatcatgatggctttaaagtgtggctttagactgctgaccagcctggattgttccaaagggtcaattgttcacagcgatgcacttcattttatcaagtaa

SEQ ID NO: 43915 - DNA, 405 bp, Homo Sapiens
atgccatttacattagcaccacaagaatacacaacacttagatataatctaacaacatatgtacaagatttatgtgaggaaaagtgcaaaactctaatgaaagaaattagagatgatctaaataaatggagagatattcaacattcatggataggaagactcaatattgtcaagatgtcagttcttcccaacttgatgtatatattcaatacaatactaatcaaaatcctacagagttattttgtggatattgacaaactagttctaaagtttatatgtagagacaaaagacccagaatagccaacgcagtactgaaggagaagaacaaagccagaggactggcactacttaacgtcaagacttaccgtaaagcgacagtaatcacgacagtgtggtatttgtga

SEQ ID NO: 43916 - DNA, 384 bp, Homo Sapiens
atgccaacatctatgctattttcaatacagtatcaatgttctaatgctgtagacagaaatcctccttccattaataataaacacttcaaaggccaaatacagtttccctcacgcctccatttcagcttaaagttttactccccctcaactcccactctttcaggacataactattttcttgacaccagattccgttttaatttcttcttaattgtccataccgcgttctatttggaaagcaatcttaacgtggcccagcctttatttccatttgctttggtgccaatgaactggaatttcagccaaatctccgccctaaaggttcactttgagccacttaactttgctgcttctccatttctgataagtatatctgatggataa

SEQ ID NO: 43917 - DNA, 708 bp, Homo Sapiens
tatcttttcagtagtgaactaaaggccaacaaagatgatcactttaaggtggataatgatgaaaatgagcaccagttatctttaagaacggtgagtttagcagctggtgcaaaggacgaattgcacgttgttgaagcagaggccatgaattacgaagggattccaattaaagtaacgctgacaactttgacaatgcctgtacatccaatggtttcccttgggggctttgaaataacaccaccagtgctcttacggttgaagtggggttcagggccagtgcatattagtggacagcacttagtagctggggaggaaaatgcagagtcagaagatgaagaggaggaggatttgaaactcttaagtatatctggaaagccttctccccctggaggtggtagcaagtttccacagaaaaaagtaaaacttgctaccaaaaatgcacaaaattcaaatcagaatggaaaagactcaaaaccagcatcgacaccaagatcaaagaacaaaaatcctaaaaaacgggaaagaactcctaaaacaccaaaagaaccaagtgctgtagaggacattaaagcaaaaatgcaagcaagtatagaaaaagtgtcccttcccaaagtggaagccaagttcatgatttatgtgaagaattgcttccggatgactgaggaggaggctgttcaagatctctggcagtggaggaagtctctttaa

SEQ ID NO: 43918 - DNA, 207 bp, Homo Sapiens
atgtcctccggggctagcgcgagcgccctgcagctcttggtagagcagctcaagttggaggctggcgtggagaggatcaaggtctctcaggcagctgcagagcttcaacagtactgtatgcagaatgcctgcaaggatgccctgctggtgggtgttccagctggaagtaaccccttccgggagcctagatcctgtgctttactctga

SEQ ID NO: 43919 - DNA, 252 bp, Homo Sapiens
atgtatggaaacattttgtgccctactctccataccccgtgtactcaaattctctactgtatgaattatgctttaagtagaattcagtgccaaggagaacttggtgaaataaattattttaattttttttttatcctttacaaagccatggattttatttggttgatgtgtgctctgtacacaagccatttcaataggatggagctgttaattattttccaaagagtaatagacatgcaaaagtttcaataa

SEQ ID NO: 43920 - DNA, 382 bp, Homo Sapiens
ccagcttgaagaggagaaaaggaaggttgaggaccttcagttccgggttgaagaagaatcaattaccaaaggtgatcttgagcaaaagagccagatttctgaagatcctgagaatacgcagaccaaactggagcatgcccgcattaaggagcttgaacagagcctgctctttgaaaagaccaaagctgacaaactccagagggagttagaagacactagggtggctacagtttcagaaaagtcacgtataatggaactggagaaagacctagcattgagagtacaggaagtagctgagctccgaagaaggctagagtccaataagcctgctggggatgtggacatgtcactttcccttttgcaagagataagctctttgcaa

SEQ ID NO: 43921 - DNA, 396 bp, Homo Sapiens
atggccaaggaaggcattgctgctggaggtgtaatggacattaatactgctttacaagaggtgctgaagaccaccctcatccacgatggcctagcacgtggaattcacgaagctgccaaacccttagacaagggccaagcccatctttatgtgcttgcatccaactgtgatgagactgtgtatgtcaagttggtggaagccatttgtgctaaacaccaaatcaacttcattaaggttgatgacaacaagaaagtaggggaatgggtaggtctctgtaaaactgacagagaggggaaaccccgtaaagtggttggttgcagttgtgtagtagttaaggactatggcaaggaatctcaggccaaggatgtcgaagagtacttcaaatgcaagaaatga

SEQ ID NO: 43922 - DNA, 480 bp, Homo Sapiens
gggtattcgccctatgaaatactgttcggcaagccatccccaatcataagtcaaattaagggtaatctccgtgaactaggggaattaactttaaggaggcaaatgcaggctttagggatagccatggtccatggctgggtacaggaaagaatgcccataagcctgatagatccaatacacccctttaaacccagggactctctttgggtcaaaaacccaaccactctgggacccatatgggatgggctccatactgtaatcttgtctattcccactgttgttaaagttgcaggaattgtgccttggatccatccatccagtcagctgaaaccagcagcccaggacaagtggaccagccaacaggacctagaccatgcaacccagctgatcctacgatggaaccaaggtgccagtgagatgacaacagccctgctctggtcactccggaagctgaccagtccacacacggctgaagcttga

SEQ ID NO: 43923 - DNA, 596 bp, Homo Sapiens
ggactgttgaagacaggtctccacacacagctccagcagccacatttgcaaccttggccatctgtccagaacctgctcccacctcaggcccaggccaaccgtgcactgctgcaatgggctctgagctggagacggcgatggagaccctcatcaacgtgttccacgcccactcgggcaaagagggggacaagtacaagctgagcaagaaggagctgaaagagctgctgcagacggagctctctggcttcctggatgcccagaaggatgtggatgctgtggacaaggtgatgaaggagctagacgagaatggagacggggaggtggacttccaggagtatgtggtgcttgtggctgctctcacagtggcctgtaacaatttcttctgggagaacagttgagcagacagccacattgggcagcgcccttcctctccaccctcccagacctgcctcttccccctgcttccacctcaccccacttatccctctccataaccccacccttgcccaccccacccccacccccaccaagggcgcaagagtagcggtccaagcctgcaactcatctttcattaaaggcttctctctcaccagcca

SEQ ID NO: 43924 - DNA, 306 bp, Homo Sapiens
atggctctgcgctaccctatggccatgggcctcaacaagggccacaaggtgaccaagaacgtgagcaatcccaggcacagctgccaccgcaggtgcctgaccaaacacaccaagtttgtgcaggacatgatccgagaggtgtgtggctttgccccttacgagtgtcacaccatggagttacagaaggtctccaaggccatggagttactgaagacctccaagatgcatatccatgccaagaggaagcgggaggagctgagcaatgtcctggctgccatgaagaaagccactgccaagaaagactga

SEQ ID NO: 43925 - DNA, 507 bp, Homo Sapiens
gcagcttcatcagccttgagcagtctgggccacgtgtacacagccattggagactaccccaatgcactggccagtcacaaacagtgtgttcttcttgccaagcaatccaaagatgaactttctgaagcccgagaacttggcaacatgggagctgtgtatattgccatgggtgactttgagaatgctgtgcagtgccatgagcagcatctgaagatagccaaggacctggggaacaagcgagaagaggcccgggcttatagcaacctgggcagtgcctatcactaccggaggaactttgacaaggccatgtcttaccataactatgtcctggagctggcacaggagttgatggagaaggctattgagatgcgggcctatgctggactaggccatgctgccaggtgcatgcaggatttggagagagctaaacaataccatgagcagcagctgggcattgctgaggatctcaaggaccgggctgcagaggggcgagcatcctccaatcta

SEQ ID NO: 43926 - DNA, 306 bp, Homo Sapiens
aagaaggccaaggggaggaaggtggctccagaccctgctgttgggaagaagcaggaggccaagaaaggtgtgaatctttggacaggacatccagcctcaggcatgggacaggacatccagcctaaaagagacctcaccccctttatcaaatggcccggctgtatcagtttgcagtggcaaagagctatcctctataacccgctaaaagtgcctcctgtgattaaccagttcacccaggccttggactgccaaacagctacacaactgcttaagctagcccacgggtacagaccagaggtgaagcaa

SEQ ID NO: 43927 - DNA, 375 bp, Homo Sapiens
atgaatgacaacttctaccccagtgtgacatgggcagtgcctgtgagtgacagcaatgtgccactgctcacaagaatcaagagagaccaaagtttcacgacctggctggtggccatgaacaccaccacaaaggagaagatcattctgcagaccatcaagtggaggatgagggtggacattgaagtggaccctcttcagctcttggggcagcgggcccggctggtgggcaggactcagcaggagcagccccggatcctgagccggatggaacccatcccccctaatgcactagtgaaacccaatgccaatgatgcccaggtcctcatgtggaggcccaagcgggggccacctctggttgtgatccctcctaagtag

SEQ ID NO: 43928 - DNA, 900 bp, Homo Sapiens
atgacacgagaacaatacatactagcaacccaacagaataacctgccaaggactgagaatgcacaactttacccagtgggaatttatggatggcgaaagaggtgcttatacttctttgtccttctgctgttggttaccatgatagttaacttagccatgacaatatggatattgaaagttatgaatttcactgtggatggtatgggaaatctgagagtcaccaagaagggaatccgacttgaaggtatatctgagtttctacttccattgtatgtgaaagaaattcattctcgaaaggatagtccgctggtcttacagtctgacaggaatgtcacagtgaatgcaagaaatcacatggggcagttaaccggacagctgaccataggagctgatgctgtggaagctcagtgtaaaagatttgaagtgagagccagtgaagatggcagggtgctgttttctgcagatgaagatgagattaccattggggctgaaaagctgaaagttacaggcactgaaggagccgtatttgggcactctgtggagacgccgcacatcagagcagagccatcccaagatctcaggcttgaatcacccaccagatccttgatcatggaagctccccgtggggtccaggtgagtgctgctgcaggagacttcaaggccacctgcaggaaggagctccatctgcaatctacagaaggggagatatttttaaatgcagagacaatcaagctgggaaatctaccaactggctccttctcatcttcttcacccagctcctcaagttctcgacagacagtgtatgaactctgcgtctgccccaatggcaaactttacctttctccagcaggagtaggttccacttgtcagtccagtagcaacatctgcctgtggagctga

SEQ ID NO: 43929 - DNA, 456 bp, Homo Sapiens
atgagccatgttctatttagtggtagaatgtttgctgggttagcccaggacttcagatggagtgcttcctcctttttaataccttgtgactgctgtgttggcaagcagagggttaaatgctgcaggaggacatgggagagtttttgctttgagggtccactggagcaagagaagcttgagagtctgtctctgagatcccagaacagacatgaagatatggtaccgattcccttggtgctaaaaggaactccaggggaatttcaggaaacccctccttttctcgtctttattctcaccccgtccccccgccacctctctccccaagttcacactcaggagggaggaatcttttaccttttccgttctgggcagcaggtagggaatgttatcagtgttgggactgggcacgggaccaagccttcctggtgcctggactgcaaccaagctgagagctga

SEQ ID NO: 43930 - DNA, 357 bp, Homo Sapiens
tttatttatctcatttttaggcgactgagtcaaagaccaacaccagaagaactagaacaacgcaatatattgcaacctaaaaatgaagctgatcgtcaggcagaaaaacgagaaattaaacgtcggctcactagaaagctcagtcaaaggccaactgtcgctgaactccttgccaggaagattctgaggtttaatgaatatgtagaggtaacagatgctcaagattatgaccggcgagccgacaaaccttggaccaaactgacccctgctgacaaggctgccataagaaaagaattaaatgaatttaaaagctccgagatggaggttcatgaagagagcaaacattttacacggtaa

SEQ ID NO: 43931 - DNA, 345 bp, Homo Sapiens
atggcggcggcagctgctgctggacatagcccggggtctggacctggggactccccagaagggcccgagggggaggctccggagcgtcggcggaaggcacacgggatgctttactatggcttctcggaaggggaggcggcgggacgccccgcggggcccgaacccctggacacgactgatctgaacggggtgcacttcgacccggaagtttacctaggcaagctgcgtcgagagtgccctctggcccagctggacagtgagacagacatggtgcggcagatccgggctctagacagcgatatgcagaccctggtctatgagaactacaacaagttcatctcagcc

SEQ ID NO: 43932 - DNA, 1044 bp, Homo Sapiens
atgggatcctgggtgcagctcatcacaagcgtcggggtgcagcaaaaccatccaggctggacagtggctggacagttccaagaaaagaaacgcttcactgaagaagtcattgaatacttccagaagaaagttagcccagtgcatctgaaaatcctgctgactagcgatgaagcctggaagagatttgtgcgtgtggctgaattgcccagggaagaggcagatgctctctatgaagctctgaagaatcttacaccatatgtggctattgaggacaaagacatgcagcaaaaagaacagcagtttagggagtggtttttgaaatttcctcaaatcagatggaagattcaggagtccatagaaaggcttcgtgtcattgcaaatgagattgaaaaggtccacagaggctgcgtcatcgccaatgtggtgtctggctccactggcatcctgtctgtcattggcgttatgttggcaccatttacagcagggctgagcctgagcattactgcagctggggtagggctgggaatagcatctgccacggctgggatcgcctccagcatcgtggagaacacatacacaaggtcagcagaactcacagccagcaggctgactgcaaccagcactgaccaattggaggcattaagggacattctgcgtgacatcacacccaatgtgctttcttttgcacttgattttgacgaagccacaaaaatgattgcgaatgatgtccatacactcaggagatctaaagccactgttggacgccctttgattgcttggcgatatgtacctataaatgttgttgagacactgagaacacgtggggcccccacccggatagtgagaaaagtagcccggaacctgggcaaggccacttcaggtgtccttgttgtgctggatgtagtcaaccttgtgcaagactcactggacttgcacaagggggcaaaatccgagtctgctgagtcgctgaggcagtgggctcaggagctggaggagaatctcaatgagctcacccatatccatcagagtctaaaagcaggctag

SEQ ID NO: 43933 - DNA, 585 bp, Homo Sapiens
aagcagctcaaacctgctttgggactccctcccacaaaactggctccggatcagggaacactaccaaaccaacagcagtcaaatcaggtctttccttctttaagtctgataccattaacacagatgctcacactggggccagatctgcatctgttaaatcctgctgcaggaatgacacctggtacccagacccacccattgaccctgggagggttgaatgtacaacagcaactgcacccacatgtgttaccaatttttgtcacacaacttggagcccaggtaaaaattatgcttaatattgtcttgattttaaatcaccttgctccacaaatcttcacgagcctcatcatccattccttgttcccgggaggcatcctgcccaccagtcaggcaggggctaatccagatgtccaggatggaagccttccagcaggaggagcaggtgtaaatcctgccacccagggaaccccagcaggccgcctcccaactcccagtggcacagatgacgactttgcagtgaccacccctgcaggcatccaaaggagcacacatgccatcgaggaagccaccacagaatcagcaaat

SEQ ID NO: 43934 - DNA, 1005 bp, Homo Sapiens
ttagggtatcttgcttttgacagtcttgttgatttctctttggaggtctgggcagtgaattctgcaggaaaagcccccagtagctggacatggtgcagaaccgggccagccccaccagaaggtctcagagcccccacgttccatgtgatctcttctacccaagcagtggtcaacatcagtgcccctgggaagcccaacgggatcgtcagtctctacaggctgttctccagcagcgcccatggggctgagacagtgctatccgaaggcatggccacccagcagactctccatggccttcaagccttcactaactactctattggagtagaggcctgcacctgcttcaactgttgcagcaaaggaccgacagctgaactgagaacccatcctgccccaccctcaggactgtcctctccacaaatcgggacgctggcctcaaggacggcctccttccggtggagtccccccatgttccccaatggtgtcattcacagccaaatagaaacaaagtacacggggctggggcagaaagccagccttgggggtctccagccctacaccacatacaagctgagagtggtggcacacaacgaggtgggcagtacggcttccgagtggatcagtttcaccacccaaaaagaattgcctcagtaccgagccccattttcggtggacagcaatttgtctgtggtgtgtgtgaactggagtgacaccttcctcctgaacggccaactgaaggagtacgtgttaaccgacggagggcgacgcgtgtacagcggcttggacaccaccctctacataccgagaacggcggacaaaaccttctttttccaggtcatctgcacgactgacgaaggaagtgttaagacgccgttgatccaatatgatacctctactggacttggcttggtcctaacaactcctgggaaaaagaagggatcgcggagcaaaagcacagagttctacagcgagctgtggttcatagtgttaatggcgatgctgggc

SEQ ID NO: 43935 - DNA, 3500 bp, Homo Sapiens
atgtcactgaaaaacgagccacgggtaaatacctctgcactgcagaaaattgctgctgacatgagtaatatcatagaaaatctggacacgcgggaactccactttgagggagaggaggtagactacgacgtgtctcccagcgatcccaagatacaagaagtgtatatccctttctctgctatttataacactcaaggatttaaggagcctaatatacagacgtatctctccggctgtccaataaaagcacaagttctggaagtggaacgcttcacatctacaacaagggtaccaagtattaatctttacactattgaattaacacatggggaatttaaatggcaagttaagaggaaattcaagcattttcaagaatttcacagagagctgctcaagtacaaagcctttatccgcatccccattcccactagaagacacacgtttaggaggcaaaacgtcagagaggagcctcgagagatgcccagtttgccccgttcatctgaaaacatgataagagaagaacaattccttggtagaagaaaacaactggaagattacttgacaaagatactaaaaatgcccatgtatagaaactatcatgccacaacagagtttcttgatataagccagctgtctttcatccatgatttgggaccaaagggcatagaaggtatgataatgaaaagatctggaggacacagaataccaggcttgaattgctgtggtcagggaagagcctgctacagatggtcaaaaagatggttaatagtgaaagattcctttttattgtatatgaaaccagacagcggtgccattgccttcgtcctgctggtagacaaagaattcaaaattaaggtggggaagaaggagacagaaacgaaatatggaatccgaattgataatctttcaaggacacttattttaaaatgcaacagctatagacatgctcggtggtggggaggggctatagaagaattcatccagaaacatggcaccaactttctcaaagatcatcgatttgggtcatatgctgctatccaagagaatgctttagctaaatggtatgttaatgccaaaggatattttgaagatgtggcaaatgcaatggaagaggcaaatgaagagatttttatcacagactggtggctgagtccagaaatcttcctgaaacgcccagtggttgagggaaatcgttggaggttggactgcattcttaaacgaaaagcacaacaaggagtgaggatcttcataatgctctacaaagaggtggaactcgctcttggcatcaatagtgaatacaccaagaggactttgatgcgtctacatcccaacataaaggtgatgagacacccggatcatgtgtcatccaccgtctatttgtgggctcaccatgagaagcttgtcatcattgaccaatcggtggcctttgtgggagggattgacctggcctatggaaggtgggacgacaatgagcacagactcacagacgtgggcagtgtgaagcgggtcacttcaggaccgtctctgggttccctcccacctgccgcaatggagtctatggaatccttaagactcaaagataaaaatgagcctgttcaaaacctacccatccagaagagtattgatgatgtggattcaaaactgaaaggaataggaaagccaagaaagttctccaaatttagtctctacaagcagctccacaggcaccacctgcacgacgcagatagcatcagcagcattgacagcacctccagttattttaatcactatagaagtcatcacaatttaatccatggtttaaaaccccacttcaaactctttcacccgtccagtgagtctgagcaaggactcactagacctcatgctgataccgggtccatccgtagtttacagacaggtgtgggagagctgcatggggaaaccagattctggcatggaaaggactactgcaatttcgtcttcaaagactgggttcaacttgataaaccttttgctgatttcattgacaggtactccacgccccggatgccctggcatgacattgcctctgcagtccacgggaaggcggctcgtgatgtggcacgtcacttcatccagcgctggaacttcacaaaaattatgaaatcaaaatatcggtccctttcttatccttttctgcttccaaagtctcaaacaacagcccatgagttgagatatcaagtgcctgggtctgtccatgctaacgtacagttgctccgctctgctgctgattggtctgctggtataaagtaccatgaagagtccatccacgccgcttacgtccatgtgatagagaacagcaggcactatatctatatcgaaaaccagtttttcataagctgtgctgatgacaaagttgtgttcaacaagataggcgatgccattgcccagaggatcctgaaagctcacagggaaaaccagaaataccgggtatatgtcgtgataccacttctgccagggttcgaaggagacatttcaaccggcggaggaaatgctctacaggcaatcatgcacttcaactacagaaccatgtgcagaggagaaaattccatccttggacagttaaaagcagagcttggtaatcagtggataaattacatatcattctgtggtcttagaacacatgcagagctcgaaggaaacctagtaactgagcttatctatgtccacagcaagttgttaattgctgatgataacactgttattattggctctgccaacataaatgaccgcagcatgctgggaaagcgtgacagtgaaatggctgtcattgtgcaagatacagagactgttccttcagtaatggatggaaaagagtaccaagctggccggtttgcccgaggacttcggctacagtgctttagggttgtccttggctatcttgatgacccaagtgaggacattcaggatccagtgagtgacaaattcttcaaggaggtgtgggtttcaacagcagctcgaaatgctacaatttatgacaaggttttccggtgccttcccaatgatgaagtacacaatttaattcagctgagagactttataaacaagcccgtattagctaaggaagatcccattcgagctgaggaggaactgaagaagatccgtggatttttggtgcaattccccttttatttcttgtctgaagaaagcctactgccttctgttgggaccaaagaggccatagtgcccatggaggtttggacttaagagatattcattggcagctcaaagacttccaccctggagaccacactgcacacagtgacttcctggggatgtcatagccaaagccaggcctgacgcattctcgtatccaacccaaggaccttttggaatgactggggagggctgcagtcacattgatgtaaggactgtaaacatcagcaagactttataattccttctgcctaacttgtaaaaagggggctgcattcttgttggtagcatgtactctgttgagtaaaacacatattcaaattccg

SEQ ID NO: 43936 - DNA, 1293 bp, Homo Sapiens
cctgacgtggcggagctgtggacaggagggacagtagcctgggagtcagctctggagggtggcctggggcctgtggacagtgaactgtggcccactgttagggtggcttctctccctcctcctcccatagcccctttgccagagatgaagggcaaggacagtcccctgcagccggggacttccaccttcccaaccccaggaccaggctcatgggacctgcagactgtggcagtgtgggggaccttcctccccacaaccctgactggcctcgggcacacgcctgagcctgccctgaacccaggacccaagggtcagcctgagtccctcagccctgaggtgcccctgagctctaggctgctgtccatgccagcttgggacagccccgccaacagccacagagcccctgagacccagccactgcctcccagcctggctgaagcggggccccccacggacccgttggttgtcaggaacgccgacaagtgggaaactggagcgaggcaagtgtgctccaccacctgtggcctgggtgccctctggaggccggtgtgctgtagctccagccgggatgaggactgcgaccccgctggccggccccagcctgcccgccgctgccacctgtggccctgtgccacctggcactcaggcaactggagtaagtgctcccacagctgtggcagaggttcctcagtgtgggacatgcagcatgtggacacatgggccctctggccactgtggcccttccattgtcagcctggacctgccaagctgcctgtgcactggccctgcggggcccagccctgcctcagctggtacatgtcttcctggagggagtgctccgaggcctgtggcggtggtgagcagcagcgtctggtgacctgcccagagccagacctctgcgaggaggcactgagacccaacaccacccggccctgcaacacccacccctgcacacagtgggtggtggggccctggggccagtgctcaggcccctgtggtggtggcatccagcacacactggtcaagtgtgtcaacacccagacggggctacccgaggaagacagtgaccagtgtggccacgaggcctggcctagctcccggctgtgtggcaccgaggattgtgagcccgtcgagcctccccgctgtgagcgggaccgcctgtccttcgggttctgtgagacactgcgcctactgggccgctgccagctgcccaccgtccgcacccagtgctgccgctcgtgctctccgcccagccacggctccccctcccgaggccatcagcgggtcacccgc

SEQ ID NO: 43937 - DNA, 600 bp, Homo Sapiens
atgtccggcaaaggcaggatcaggccgtgccacgcggccgccggcctcaccccagtgccctccacgctgggcggcaaggagggcggccgcgagcccacccggacccccgagcggcaggggcagcccgtcgtgccaccaggcgtcagcaggcttcagtcagaatggaaacagccatgcccttcgcgaatcccgtcgcggcctctgggaaccgagctcctcgtcttccttcctggagggcctccttggaacccaaattcgaaagacagccgcatctacaattttaacacggtggcctggagagcattgcctctgatctcagccgaacagaatgccctgttcagccccaaaaggggaaatggcattggtgatccaccctggattctgataggctggaaaagcccctctggtcttcctgggacagaagcggccttaggagcaggttatcggtgtgggctgagattcggggacccgctggtctgctgtggcgttgggccacagtcagaggaccatcaagtccggggtgtcatggacccggggtcctggcctgctgtctggaccccagtcttgcctccccaacccaggacggaggacctttcttga

SEQ ID NO: 43938 - DNA, 507 bp, Homo Sapiens
caggctggatatcctcagtccttctgtgaccatcatgtggcctggcaggactccacctgcagttcttcacatttcagagggtctgggcagcatccacatgacagcactgggatccaggcatccacgagagaagaccaagctttgtttaaagaggaggtagatgcagaggtagaatgtgacctgagcaatatggaaatcactgaggatctctgccagtactttgcagaaaccgggaggcacagagaagaacaagggtggcggcagcagctggatgcagaatgcttggacagctatgtgaatgccgaccacgacctttgctacaacacccactggtgggtggagcccccgactgagcggcccagcaagcggtgccaggctgagatgaagcgcttgtatgggaacagcactgccaagctccaggccatggaggcttcggtgcagctgagctttgacaagcactgtgaccaaaagcagcccttctggctggtcatgcctgtgaaattctga

SEQ ID NO: 43939 - DNA, 957 bp, Homo Sapiens
atggaatgggaaaaccaaaccattctggtggaattttttctgaagggacattctgttcacccaaggcttgagttactcttttttgtgctaatcttcataatgtatgtggtcatccttctggggaatggtactctcattttaatcagcatcttggaccctcaccttcacacccctatgtacttctttctggggaacctctccttcttggacatctgctacaccaccacctctattccctccacactagtgagcttcctttcagaaagaaagaccatttccttttctggctgtgcagtgcagatgttccttggcttggccatggggacaacagagtgtgtgcttctgggcatgatggcctttgaccgctatgtggctatctgcaaccctctgagatatcccatcatcatgagcaagaatgcctatgtacccatggctgttgggtcctggtttgcagggattgtcaactctgcagtacaaactacatttgtagtacaattgcctttctgcaggaagaatgtcatcaatcatttctcatgtgaaattctagctgtcatgaagttggcctgtgctgacatctcaggcaatgagttcctcatgcttgtggccacaatattgttcacattgatgccactgctcttgatagttatctcttactcattaatcatttccagcatcctcaagattcactcctctgaggggagaagcaaagctttctctacctgctcagcccatctgactgtggtcataatattctatgggaccatcctcttcatgtatatgaagcccaagtctaaagagacacttaattcagatgacttggatgctaccgacaaaattatatccatgttctatggggtgatgactcccatgatgaatcctttaatctacagtcttagaaacaaggatgtgaaagaggcagtaaaacacctaccgaacagaaggttctttagcaagtga

SEQ ID NO: 43940 - DNA, 789 bp, Homo Sapiens
atggccttgggattaaagtgctcccgcatggtccaccctgcctttcgcaattatcttgcagcctctatcagacccgtttcagaagttacactgaagaaagtgtatgaaagacaacatggccataggcaatacgtggcctattcagctgtaccagtccaccattttgctaccaagaaagccaaagccaaagggaaaggaaagtcccaaaccagagtgaatattagtgctgcctttgttgaggatataatcaacttggaagaggtgaatgaagaaatgaagtctgtgatagaagcacgcaaggataatttcaataagactctcaatatagggacctcaccaggatcccttgacaagattgctgtggtaaccgctgatggaaaacttgctttaaaccagattaggcagatctccgtgaagttgccacagctgattttggtgaatatggccagcttcccagagttcacagttgcagctatcaaggctataagagaaagtggaatgaatctgaacccagaagtggaagggacactaattcgggtacccattccccaagtaatcagagagcacagagaaatgctggtgaaactggccaaacagaacaccaacaaggccacatactctttacggaaggtttgtaccaacgcaatgaacaagctgaagaaatccaaggatacagtctcggagggcaccattaggctaacagagaaacagatcagccaaatggccgatgacacagtggcagaactgtacaggcatctggcagtgaagaccaaagaactccttggatga

SEQ ID NO: 43941 - DNA, 495 bp, Homo Sapiens
atgaggcctcagccaagaggaggttcgggaagaaaggaaaacacaggtgaggagagagaagggcgggcagagaggtaccacgccattagtgctgatggggagaggcggctccagcccggcactgctgtccttacgaggcatgtttcctttttattcggaggaagagaagcagaggaacacgtcatggagacggaccgagttgaaggagccagggatggtgacaagcggaaggaagtgtgttttgtccccatccagggaagcttttgtttcatgagacttacttgcgcacgtctggtagctgccctggacattcatggactttcgttttcactcagattttgtggttcacgtgacacaaagcatgaggacatcactgggcgagagggccaggtcaccccactgccgaggggcacgccccagctgtgcaccgctagagtgggcttgtccagtcctcggacacggggacagggtgtgcccatctcatgtaagacatga

SEQ ID NO: 43942 - DNA, 3857 bp, Homo Sapiens
ccgcggtcggcggcagcgctctcctaagctctcgcggctgcgcttcggtcccggacccgggccacccacggggtagtgggtgctcctcggccccggacattgcaagccccagaaggcaagactaactcggtgttgctcctcccggcgctgacttcgaggcccggctatggacggcgagagcgaggtggatttttctagcaacagcataacccctttgtggcggaggcggtcgattcctcagccccaccaggttctgggccggagcaagccgaggccccagtcctaccagagccccaacgggttactaattacggatttcccggtggaggacggagggacgctcctcgcagcgcagattcccgcccaggtgcccaccgcctcggacagcaggacggtacataggagccccctgcttctgggcgcccagcggagagcggtggccaatggtgggacggcatccccggagtacagggctgcctctcctcgacttcgacggcccaagtcacccaagctccccaaagcggtgcctggcggctccccgaaatccccagcaaatggcgcggtgaccttgcctgcgccgccgccgccgccggttctgcgccccccgcggactcctaacgcgcccgccccctgcacccccgaggaggaccttactgggttgactgccagcccggtgccttcgcccactgcaaatggccttgccgctaataacgactctcctgggtcaggttcgcagtccggccggaaggcaaaggaccccgaacgggggctctttcctgggccccagaaaagttcttcggaacaaaaactccccctccaaaggctgccctcccaggagaacgagctcctcgagaatccttccgtggttttgagtacaaacagccccgccgccctcaaagtggggaagcagcagatcattccgaagagtctggcctcggaaattaaaataagtaaatccaacaatcaaaatgtggagccccacaagagactcctcaaggtgcgcagcatggtggagggcctaggaggacccctgggtcacgcaggggaggagagtgaggtcgataacgacgtggatagcccagggtctctgcggagaggcttgcggtccacgtcttatcgcagggcagtggtcagtggctttgattttgacagtcctaccagctcgaagaagaagaacagaatgtcccagcctgttctgaaagtggtgatggaagacaaggagaagttttccagtctgggaaggataaagaaaaaaatgctgaaaggacaaggaacatttgatggggaagaaaatgctgtcctgtatcaaaactacaaggaaaaggcccttgacattgattctgatgaagagtcagagcccaaagaacagaagtcagatgaaaaaattgtgattcaccataagccattgagatccacatggagccaactctctgcggtgaaaagaaagggattatctcagacagtaagccaggaggaaagaaagagacaagaggctatctttgaagtcatatcctctgaacattcatatttactcagcttggagatcttgatacgaatgtttaaaaattctaaagaactgagtgatacaatgactaaaaccgagaggcaccatcttttctccaatattacagatgtctgtgaggcaagcaaaaagttctttatagagttggaagcaagacatcagaataatatcttcatagatgacataagtgacattgtggaaaaacacacagcatccacatttgacccatatgtgaaatactgcacaaatgaagtctaccaacaacgaacactacaaaaattgttagctaccaatccatcctttaaggaagtattgtcaaggattgagtcccatgaagactgtaggaacttacccatgatctcttttctcattctccccatgcagagggtgacccgccttcccctgctgatggatactatctgtcaaaaaacacctaaggactctccgaagtatgaagtctgcaaaagagccttgaaggaagttagcaagttggttcgactatgcaatgagggcgcccggaagatggaaaggactgagatgatgtacacaattaactcccagctggaatttaaaattaagccttttcctttagtctcctcttcccggtggttggtaaaaagaggtgaattgacagcctatgttgaagacactgtgcttttctcaagaaggacatccaaacagcaagtctacttctttctctttaacgatgtgctcattatcaccaagaagaagagtgaagaaagttacaacgtcaatgattattccttaagagatcagctattggtggaatcttgtgacaatgaagagcttaattcttctccagggaagaacagctccacaatgctctattcaagacagagctctgccagtcacctctttactctgacagtccttagtaaccacgcgaatgagaaagtggagatgctactaggagctgagacgcagagcgagcgagcccgctggataactgccctgggacacagcagcgggaagccgcctgcagaccgaacctcactgacccaggtggaaatcgttaggtcatttactgctaagcagccagatgaactctccctgcaggtggctgacgtcgtcctcatctatcaacgtgtcagcgatggctggtatgagggggaacgactacgagatggagaaagaggctggtttcctatggaatgtgccaaggagataacatgtcaagctacaattgataagaatgtggagagaatgggacgcttgctaggactggagaccaacgtgtagtctctcagatggtcttttgttactgcaagatttgcacgacacttaccgggctggttggttctgggctagttttattgttaattttgtcacagcctatttaattaaaagaacgaaaacacttgcctttaagcttgccaggttgttctgctctctcatgagaagagcttggatacagtgagtttgcacagctcagtttttacctaaccacacacttgcagacctcctgaggtacacagaatagctgagcagttcacttcagggatcaggtcatctctgctcctcctagtttcaccatgttctggcaataaaaaacacatattatatcctggttttctctatccttgcattactaaggtgactgtctctctttatacatccttgtatggttctcccagtattagcaagattgtatatctgtaaagaatgtccagttttgtaaatatttccctgcctttttttttctttttttacatctgattttaatgcttcgttaacttcaaaaggaactggtagagttcagaaggtgagctgttgtttttctaaacctcttcccaggaaggggacattgacacttgaatttttgtcacctttttcctcattagaaggaaagtagaaagccttactttaggatttttaaaaaaaaatccatctcaccccatattgttcttaaataagtatagactaattaacctaagctacctttaacaacgtagaatttagatgggttcatatatgtgagaaaaacctgaatataggacaggggtcctacttttttccccacctctgtcgcccaggctagagtatagtggtgtgatcttggcccactgcaacctctgcttcctaggttcaagtgattctcctgcctcagcctcccaagtagctgggattgtaagagtatgccaccacgcccagctactttttgtatttttagtagagacagggtttcatcatgttggccaggatggtctcttaactcctgccctcaagtgatccaccagagaggagatcctcggcctccccaagtgctgggattataggcatgagccaccgtgcccagcctactttctaattaatt

SEQ ID NO: 43943 - DNA, 1126 bp, Homo Sapiens
gcccgagggctgccggctgccggccgagggcggccccgccaccgaccaggtgatggcccagccagggtccggctgcaaagcgaccacccgctgtcttgaagggaccgcgccgcccgccatggctcagtctgacgccgaggccctggcaggagctctggacaaggacgagggtcaggcctccccatgtacgcccagcacgccatctgtctgctcaccgccctctgccgcctcctccgtgccgtctgcaggcaagaacatctgctccagctgcggcctcgagatcctggaccgatatctgctcaaggtcaacaacctcatctggcacgtgcggtgcctcgagtgctccgtgtgtcgcacgtcgctgaggcagcagaacagctgctacatcaagaacaaggagatcttctgcaagatggactacttcagccgattcgggaccaagtgtgcccggtgcggccgacagatctacgccagcgactgggtgcggagagctcgcggcaacgcctaccacctggcctgcttcgcctgcttctcgtgcaagcgccagctgtccactggtgaggagttcggcctggtcgaggagaaggtgctctgccgcatccactacgacaccatgattgagaacctcaagagggccgccgagaacgggaacggcctcacgttggagggggcagtgccctcggaacaggacagtcaacccaagccggccaagcgcgcgcggacgtccttcaccgcggaacagctgcaggttatgcaggcgcagttcgcgcaggacaacaaccccgacgctcagacgctgcagaagctggcggacatgacgggcctcagccggagagtcatccaggtgtggtttcaaaactgccgggcgcgtcataaaaagcacacgccgcaacacccagtgccgccctcgggggcgcccccgtcccgccttccctccgccctgtccgacgacatccactacaccccgttcagcagccccgagcgggcgcgcatggtcaccctgcacggctacattgagagtcaggtacagtgcgggcaggtgcactgccggctgccttacaccgcaccccccgtccacctcaaagccgatatggatgggccgctctccaaccggggtgagaaggta

SEQ ID NO: 43944 - DNA, 2615 bp, Homo Sapiens
gtacaaatcaaagtggaggaaaaagaagacgagactgaggaaagctcaagtgaagaggaagaggaggtggaagataagctacctcgaagagagagcttgagaccaaagaggaaacggaccagagatgttatcaatgaggatgacccagaacctgaaccagaggatgaagaaacaaggaaggcaagagaaaaagagaggaggaggaggctaaagagaggagcagaagaagaagaaattgatgaagaggaattggaaagattgaaggcagagttagatgagaaaagacaaataattgctactgtcaaatgcaaaccatggaagatggagaagaaaattgaagttctcaaggaggcaaaaaaatttgtgagtgaaaatgaaggggctcttgggaaaggaaaaggaaaacggtggtttgcatttaagatgatgatggccaagaaatgggcaaaattcctccgtgattttgagaacttcaaagctgcgtgtgtcccatgggaaaataaaatcaaggctattgaaagtcagtttggctcctcagtggcctcatacttcctcttcttgagatggatgtatggagtcaatatggttctctttatcctgacatttagcctcatcatgttgccagagtacctctggggtttgccatatggcagtttacctaggaaaaccgttcccagagccgaagaggcatcggcagcaaactttggtgtgttgtacgacttcaatggtttggcacaatattccgttctcttttatggctattatgacaataaacgaacaattggatggatgaatttcaggttgccgctctcctattttctagtggggattatgtgcattggatacagctttctggttgtcctcaaagcaatgaccaaaaacattggtgatgatggaggtggagatgacaacactttcaatttcagctggaaggtctttaccagctgggactacctgatcggcaatcctgaaacagcagacaacaaatttaattctatcacaatgaactttaaggaagctatcacagaagaaaaagcagcccaagtagaagaaaacgtccacttgatcagattcctgaggtttctggctaacttcttcgtgtttctaacacttggagggagtggatacctcatcttttgggctgtgaagcgatcccaggaatttgcacagcaagatcctgacacccttgggtggtgggaaaaaaatgaaatgaacatggttatgtccctcctagggatgttctgtccaacattgtttgacttatttgctgaattagaagactaccatcctctcatcgctttgaaatggctactgggacgcatttttgctcttcttttaggcaatttatacgtatttattcttgcattaatggatgagattaacaacaagattgaagaggagaagctagtaaaggccaatattaccctttgggaagccaatatgatcaaggcctacaatgcatcattctctgaaaatagcactggaccacccttttttgttcaccctgcagatgtacctcgaggaccttgctgggaaacaatggtgggacaggagtttgtgaggctgacagtctctgatgttctgaccacctacgtcacaatcctcattggggactttctaagggcatgttttgtgaggttttgcaattattgctggtgctgggacttggagtatggatatccttcatacaccgaattcgacatcagtggcaacgtcctcgctctgatcttcaaccaaggcatgatctggatgggctccttctttgctcccagcctcccaggcatcaatatccttcgactccatacatccatgtacttccagtgctgggccgttatgtgctgcaatgttcctgaggccagggtcttcaaagcttccagatcaaataacttctacctgggcatgctactgctcatcctcttcctgtccacaatgcctgtcttgtacatgatcgtgtccctcccaccatcttttgattgtggtccattcagtggcaaaaatagaatgtttgaagtcattggagagaccctggagcacgatttcccaagctggatggcgaagatcttgagacagctttcaaaccctgggctggtcattgctgtcattttggtgatggttttggccatctattatctcaatgctactgccaagggccagaaggcagcgaatctggatctcaaaaagaagatgaaaatgcaagctttggagaacaaaatgcgaaacaagaaaatggcagctgcacgagcagctgcagctgctggtcgccagtaataagtatcctgagagcccagaaaaggtacactttgccttgctgtttaaaagtaatgcaatatgtgaacgcccagagaacaagcactgtggaactgctattttcctgttctacccttgatggattttcaaggtcatgctggccaattaaggcatcatcagtcctacctgagcaacaagaatctaaactttattccaagtcagaaactgtttctgcagagccactctctcccctgctccatttcgtgactttttttttttttttaacaaattgagtttagaagtgagtgtaatccagcaatacagtttactggtttagttggtgggttaattaaaaaaaatttgctcat

SEQ ID NO: 43945 - DNA, 3668 bp, Homo Sapiens
gccagtttctgcagtggaggtcgcgactgagggacgggacagagaagtcgcgaaagtgggccagaggttctgcgacaccacctcgggtgagctgcgccaggcccgggatagggactgttgtgttcgaatgcccgccccggtcggccgccgctccccgcctagtccacggagctcaatggcggcagtcgcgctgagggactcggctcagggtatgacctttgaggatgtggccatttatttctcccaagaagagtgggagctccttgatgagtctcagaggttcctgtactgcgatgtgatgctggagaactttgcacatgtaacatccctgggttattgccatggaatggagaatgaggcgatagcttctgagcagagtgtatctatacaggtcaggacttctaagggcaatacacccacccagaaaactcacctcagtgagattaagatgtgtgtcccagtcttgaaagacattttgcctgcggctgagcaccaaaccacatcccctgtgcaaaagtcatacttgggtagcacaagcatgagaggcttctgcttcagtgctgaccttcaccagcatcaaaagcattacaatgaagaagagccctggaaaaggaaggtggatgaggctacatttgtgaccggctgcagattccatgtgttgaattatttcacctgtggggaggccttcccagcccccacggacctactccaacacgaagccactcccagtggtgaggagccacacagtagcagcagcaagcatatacaggcatttttcaatgcaaaaagttattacaagtggggtgaatacagaaaagcttcaagccacaaacacacacttgttcagcatcagagtgtctgttctgaaggagggctttatgagtgtagcaaatgtgagaaagccttcacttgcaagaacacacttgttcagcaccagcaaattcacactggacaaaagatgtttgagtgtagtgaatgtgaggaatcctttagcaaaaagtgccacctaatcttacacaagataattcacactggagaaaggccttatgaatgcagtgatcgtgagaaagcctttatccataaatctgaattcattcaccaccagagacgtcacactggaggagtgcgtcatgagtgtggtgaatgtaggaaaacctttagctacaaatctaacctcattgaacaccagagagttcacactggagaaaggccttatgaatgtggcgagtgcgggaaatcctttagacaaagctctagcctttttcgacaccagagagttcactctggagaaaggccttatcagtgctgtgagtgtgggaaatcctttagacaaatcttcaatctcattcgacatagaagagttcacactggagaaatgccttatcagtgcagtgattgtgggaaatcttttagctgcaaatcggaactcattcaacaccagagaattcacagtggagaaagaccttatgaatgcagagaatgtgggaaatcctttagacaattctctaacctcattcgacaccgcagcattcacactggtgataggccttatgagtgcagtgaatgtgagaaatcctttagccgcaaatttatcctgattcaacaccaaagagttcacactggagaaagaccttatgaatgcagtgaatgtggaaaatcctttacccgcaaatctgacctcattcaacaccggagaattcatactggcacaagaccttatgagtgcagtgaatgtggcaaatcttttagacagcgctctggcctcattcagcaccggagacttcatactggagaaaggccttatgaatgtagtgaatgtggaaagtcttttagccaaagtgctagcctcattcaacaccagagagttcacactggagaaaggccttatgaatgtagtgaatgtgggaaatcctttagccagagctctagcctcattcaacaccagagaggtcacactggagaaagaccttatgagtgcagtcaatgtgggaaaccctttacccacaaatcagaccttattcagcaccaaagagttcacactggagaaaggccttatgaatgcagtgaatgtgggaaatcctttagccgcaaatctaacctcattcgacatcggagagttcacactgaagaaaggccttaaatgtgaagggaatgtgctatttctttattcagtataatagcactggaggagactgtggtagccatcttcgtaaatttaaactttgagcacccacagtggggtattcttcataagtttcaggtatgtgggaagctctgaggaggttcattgtaatttctaatctgccgaggcctatagcctgatttatgtcactgccaatttctgaggctgaagccatttcacatttcacccctaccacctggcaggtgcacaccatgtgcatgagtcacttccccacagtgctcagagaagcaaacctctgtactctcccatttgcttggggaaattattaatagcccaagcatgtagggtcttcatgtcttttctctgactttagagtatacacctgacccagttgtggtccagagaatctgagttgtgctgtcagctttctaaggattacttttttaaggaacattgtcggtctcacatgatgcttgtaatgaatttttccacattctgattcaccagcctggaaactgcttggtgcacattgctttaatttataatgtttttataaaggttttaaaaaaatttacgcacctttaatcttgggtgttctattcattgcatagaatgacttgtaagcagaatagtgatgtcagcatgaaggggtgaatagattttgtggagatctcaaactttctgtactcagaagggacaatgtgatggcagaagacagctctttgttctgtattgctctaattggcctgctgcccaaggcctcaaagtaaagactgccaggctttgtgttcctgtattgtggcctggtgccatttttgtcaggtcagaggtcaccatgaaaaggaggcagttgtgacaatccccagtgcttctgtgaacgtgaattttgttcagttgtccacaggagatccacataattcctagcactggtgaggggaatctgttgcccaggtcctgcaaaggagccaggtgccatggcatataagtcagtgtagactggtgccatttgttgtcagactataggtgtggaggtgaaattacaggttcaacagtaattgggacagaaactccaggtaaatggggagtggagaagactgcagtaaattagatggaatgactcttctaaaagttcatctacaaattttccagtgaatatggttgtgtaggatcagtgcatacagaaattctcaggatcttctgtttactatcgctgagatcattatcagaaaatagtctggccgggcatggtgtaatcctaacactttgggaggccaaggcgggcggattgcctgagctcaggagttcaagaccagcctgggcaacatggtgaaatcccatgtctactaaaatacaaaaaattagccaggcgtggcagcatgcgcctatagtcccagccacttgggaggctgaggcaggagaatcgcttgaacccagaaggcggaagttgcagtgagctgagattgcaccactgcactccagcccaggcaacagagtgagactccgtctccaaaaaaaaaaaagaaaa

SEQ ID NO: 43946 - DNA, 1041 bp, Homo Sapiens
atgccctcgcccctggccctacgcccctacctccggagcgagttttccccatcggtggacgcgcggccctgcagcagtccctcagagctacctgcgaagctgcttctgggggccactcttcctcgggccccgcggctgccgcgccggctggcctggtgctccattgactgggagcaggtgtgcttgctgcagaggctgggagctggagggtttggctcggtgtacaaggcgacttaccgcggtgttcctgtggccataaagcaagtgaacaagtgcaccaagaaccgactagcatctcggcggagtttctgggctgagctcaacgtagcaaggctgcgccacgataacatcgtgcgcgtggtggctgccagcacgcgcacgcccgcagggtccaatagcctagggaccatcatcatggagttcggtggcaacgtcactttacaccaagtcatctatggcgccgccggccaccctgagggggacgcaggggagcctcactgccgcactggaggacagttaagtttgggaaagtgtctcaagtactcactagatgttgtgaacggcctgctcttcctccactcgcaaagcattgtgcacttggacctgaagcccgcgaacatcttgatcagtgagcaggatgtctgtaaaattagtgacttcggttgctctgagaagttggaagatctgctgtgcttccagacaccctcttaccctctaggaggcacatacacccaccgcgccccggagctcctgaaaggagagggcgtgacgcctaaagccgacatttattcctttgccatcactctctggcaaatgactaccaagcaggcgccgtattcgggggagcggcagcacatactgtacgcggtggtggcctacgacctgcgcccgtccctctccgctgccgtcttcgaggactcgctccccgggcagcgccttggggacgtcatccagcgctgctggagacccagcgcggcgcagaggccgagcgcgcggctgcttttggtggatctcacctctttgaaagctgaactcggctga

SEQ ID NO: 43947 - DNA, 3071 bp, Homo Sapiens
atggcagaccagagacagcgctcactgtctacctctggggagtcattgtaccacgtccttgggttggacaagaacgcaacctcagatgacattaaaaagtcctatcggaagcttgccttgaaatatcaccccgacaagaaccccgacaacccggaggccgcggacaagtttaaggagatcaacaacgcgcacgccatcctcacggacgccacaaaaaggaacatctacgacaagtacggctcgctgggtctctacgtggccgagcagtttggggaagagaacgtgaacacctacttcgtgctgtccagctggtgggccaaggccctgtttgtcttctgcggcctcctcacgtgctgctactgctgctgctgtctgtgctgctgcttcaactgctgctgcgggaagtgtaagcccaaggcgcctgaaggcgaggagacggagttctacgtgtcccccgaggatctggaggcacagctgcagtctgacgagagggaggccacagacacgccgatcgtcatacagccggcatccgccaccgagaccacccagctcacagccgactcccaccccagctaccacactgacgggttcaactaaatccaggaggagctgtggtcagaggaggagccggcgcctggccacgccaaccttagaatcatgaactgtagtcacagagatgggaaggcagcctcctgcctgccctggccttgctggggcccctcctgcctccacgcccacccagcgtcgacccttgacccacgaagtgcgtagcatgcagtatttaaagcagtgtagctacggtcttctgtttttttcccttttttaatagcatgtatggggttctgttccatgtctgtgttgtggacattccgcggcatgaccgcgtgaactgcacggtggagctgcctcagggctgtcggtcaggttggtccagtgaggggtgactgcagccggtcaggtgggcgaggagaaggggggctgcccctttcctacctgtgcttgaggggccggaggcaggtgctgcctggcagagctgtgttaccgtcttggcctcggggtctggtccacactctgtgctcccagccttgaggctgcagtaggactctgatctcacctgccagaagagaggcggggccgcgtcctcctggcgtcaccggcgtcactgtcattccttggtgtctgtgctgggcatggttggcttgggggtctgtggtttcctgggccttgtggcagggtttctcccgtgggagaatttggtgtggaaagcataggaggccccttccgaggttgacaccgtgtcctccgcggtgtttctcgcctggtcgtctcgtcgtgtggacgctgccgttctggttctcggaggtgtgtccttcgccgtgttggggttatttgtctgtgttcctgcacttttcccgggctctgagctggattgatggggccagtctcccccctcccatcttgaggtcgttctccacattccttccagcacacctgtcctttccatagccctttttggacctttagaaccacagatgataggaccagcccaatgagccacagtcagagagtagattgtgcatgtgtgagcacccagctactggggacgggggctctcccacgacccctcctcctgtgtttgccagagctcccatctgccccactcgcctttgccccgtcatcgatgattcaggcagagccagattcgttaggtccctggaggaaggactgactggaccagagggaccctctggctcaggagggttgggtccctgggaggccggcagccaggccacagaatccacacgtggaccattgtgggtccctgggaggccggcagccaggccacggaatccacacgtggaccattgtgggtcccttgggaggccagcagccagactacggaatccacatgtggaccatgggaagtcagtctcttgcgtgtcctagaccttgtgggtggcgccctgcataggggagcagggggaacgggtctgatgtccctgtgctggctgagggctcagagctgcccgcactccgtagctcatgggatgtgctgggcctgcctttggcgccatgctgcagactccagtgggcctggtttctgcagaatgtccatggtggccgctgcagagttgcagaggtccctgtagagataaagctgaggaggaggctgtgtgtgatggctctggctcggaccaaccagatgagcctcctgaagcccccttccctgcctgcctgctgacccgtggccccagctcactcattgccctcagcagccacccgaggctgtgcagaagggtaggttcaggttgaccaggaagctgccaaaagggacatggatatgaggatacatctggacgtgcttaggaacagggtgctggttgagggcccccagctgacccctactgcagatccgcatgtggaccatgagccggctgccagcactaggtcctgggcagctttgtttgtcccacttttctttgtttcttctcactaaaatgatcacgaagacctttgacaagaggagagatatgcactgtgatattaaattagaaataatttatcaaaatcagacctctcctaaaagaataagaaattcattgtttggcccatcctgaaaggtgaggtggcgagacagtggggtgcctccgtgccgcttcgtgcagcagcaagttcagcctgagatgctggctgtactcagcctttgcaatttttgtagatgtagcttaggacgtgagttatttttccgcagactggccaagagccaggttctaagcttggacctaaggtagaaagctgcccatcgggggccctagctcagccccaccaggccctctgttgggcctgcacacagctctgtggctagaacactccaaggcccttcggtacccatcagagtgggccccttgccaggtggcttttcagttacagagtccagtggaccattttgtagaaccatgcagctccctgcggaaggtggggtagggtgggaaagaggagcaggtctggaggtttgtggaacccagtcccctgcagaatctgtaaaacctaataaatcatggttgtggcca

SEQ ID NO: 43948 - DNA, 540 bp, Homo Sapiens
atggttcgctattcacttgacccggagaaccccacaaaatcatgcaaatcaagaggttccaatcttcgtgttcactttaagaacactcgtgaaactgctcaggccatcaagggtatgtatatacaaaaaggcacgaagtatctgaaagatgtcactttacagaaacagtgcataccattccgacattacaatggtggagttggcaggtgtgcgcaggcaaagcacctgtttgggccacaaggtcggtggcccaaaaagagtgctgaatttttgctgcacgtgcttaaaaacacagagagtaatgctgaacttaagggtgattctctggtcattgagcatatccaagtgaacaaagcacctaagatgcaccaacggacttacagagctcatggaaacccatacatgagctcttcctgccacattgagatgatctttactgaaaaggaacagattgttcctaaaccagaagaggaggttgcccagaagaaaaagatatcccagaagaaactgaagaaacaaaaacttatggcacgggaataa

SEQ ID NO: 43949 - DNA, 664 bp, Homo Sapiens
agtgtaagaggaaaagaagtgtgatggccaagagttcacagaggaagcaacgtgactgtgtaaaccaatgcaaatcaaagcctggcttgagcacctcaatccctttgagaatgtccagttacacattcaagaggccagtaacgagaattacaccccatcctggcaatgaggtcagataccatcaatgggaggagagcttggagaagcctcagcaggtctgctggcagaggagactgcagggactccaggcttacagcagtgcaggagaactttcaagcactttggatcttgccaataccttgcaaaaacttgtccctagttacacaggtggatctctgctggaggatcttgccagtggtctggagcactcctgccccatgccccaccttgcctgctcttcagatgcggtggagataattcctgcagagggagtgggtatctcgcagctcctctgcaaacaatttctggttactgaggaagatatcaggaaacaggaagggaaagtgaagacagtcagagagagactcgcaatagcactgattgcggatggactcgctaatgaggcagagaaagtgagagaccaagaaggccgtcctgaaaaacgctaagaaaaaaagggaagatagtgcagatgaaataaagtgtaatcctttattaacatctc

SEQ ID NO: 43950 - DNA, 744 bp, Homo Sapiens
gagcccgtagttacagtgtcctctaatttgaaatccatacaagtctatatcaggtgcagctggcttaaggccatttttaaaactaaaactcaacacctcacagattataatagaaaaagaaatggcctcagtttgatctcgttcagaatgacccagattttctgctttgggtgcagctgtttagttcagagttatattacagagaattattttctgaatcttactagaatgttcaaaactaatataattgaagtatcaagatacgtagaacacctcagagatttttcttcaggaacttccacaaactttatccttgtatctttatttggtattcatactactagtagcaaaatacaggttttttgttttgttttgttttgttttggcttcatagagtatctcaaattgaaacttttctgcacaaagaataaaattaaggattttaaactcaaattggcacctactgaattaaaatacataaaatcatttaaatataattcagcatatgggaacattgcactaatatggaaatcactgccagagacagtctattttcttttaatttgttactacttagtcacaccacattattccagtttggaattacttattaaggagaattggaaatacatatgcccatgcttaaattttatagctttaatttgtgttatttctttattgacgggaagaggtacatctttttttccttaccaaatatggattaattgcctcaaatttgtataa

SEQ ID NO: 43951 - DNA, 1263 bp, Homo Sapiens
gcagtggtgtgatctcaggtcactgcaacctccgcctcccaggttcaagctattctcctgcctcagcctcccaagtagctaggattacaggcgcccgccaccatgccccggctatttttgtatttttagtagagatgggttttcaccatggtggccaggctggtctcgaactcctggactcaagtgatccgcccacctcggccccccaaattgctgggattacaggcgtgagccaccacacctggccctaaatctgtctttagactaaaatattctgttgccctggaactcccagggagcaacagcacacagtgtggaaattcccggctcaccagaggcagaaccgtcctgttgtgacctgtagctccactacgagcgccatctaattcagtattagtattgatctgaacatttcggtgggtgcttctctgtatgccttgccgtaggaaagtaattaagacagaaaagttatcaaggattcacaccaaagaccatttgccaaggactatttttaaattgtatcctcaagtgagattagcatctcagcaaacttcagccattgaacagcagagaaacactaaaataaaacctcgttaccttctccctgggagaaccactgttagcaaatatgaaatcatggaacatcagaaaaagaggaaagaacagatgcttcaactttctcacaaaatgtccataactgaaaattcagaatgatacttcttcctaccatgactgcatagggcttcatttcccaggcgtggaggttggtattatcaataataatgggggatatgccattcctcattgcttttcttgctgcaacacaatgttacataacagtgaacaacatgcaacaatcagagggaaggtgagcgtaatctctattcgtcatttttattacaggatgccctcatctcctcatcacacaacttcagagcccactatcaatcaataattttctttctctggaatctaaggaggttatgctctggtgttctgttttgggggaaaaattggcagaactttcggttaaactccttccataaaatttattcattctgcagcagctacaatctatgtgcacatcagggtttcccaggagtttgggaaggaatttgtcacctcttttttggttccattcatgagcttcctccaggaagtcaggattgaactcataggcaccatcttccctgaagaaaaaatcatccgtgctgaaaatcagggccctgggaaagtcatgctgcaattgtctggaaagtggag

SEQ ID NO: 43952 - DNA, 3294 bp, Homo Sapiens
atgatggatatttacgtatgtttgaaacgaccatcctggatggtggacaataaaagaatgaggactgcttcaaatttccagtggctgttatcaacatttattcttctatatctaatgaatcaagtaaatagccagaaaaagggggctcctcatgatttgaagtgtgtaactaacaatttgcaagtgtggaactgttcttggaaagcaccctctggaacaggccgtggtactgattatgaagtttgcattgaaaacaggtcccgttcttgttatcagttggagaaaaccagtattaaaattccagctctttcacatggtgattatgaaataacaataaattctctacatgattttggaagttctacaagtaaattcacactaaatgaacaaaacgtttccttaattccagatactccagagatcttgaatttgtctgctgatttctcaacctctacattatacctaaagtggaacgacaggggttcagtttttccacaccgctcaaatgttatctgggaaattaaagttctacgtaaagagagtatggagctcgtaaaattagtgacccacaacacaactctgaatggcaaagatacacttcatcactggagttgggcctcagatatgcccttggaatgtgccattcattttgtggaaattagatgctacattgacaatcttcatttttctggtctcgaagagtggagtgactggagccctgtgaagaacatttcttggatacctgattctcagactaaggtttttcctcaagataaagtgatacttgtaggctcagacataacattttgttgtgtgagtcaagaaaaagtgttatcagcactgattggccatacaaactgccccttgatccatcttgatggggaaaatgttgcaatcaagattcgtaatatttctgtttctgcaagtagtggaacaaatgtagtttttacaaccgaagataacatatttggaaccgttatttttgctggatatccaccagatactcctcaacaactgaattgtgagacacatgatttaaaagaaattatatgtagttggaatccaggaagggtgacagcgttggtgggcccacgtgctacaagctacactttagttgaaagtttttcaggaaaatatgttagacttaaaagagctgaagcacctacaaacgaaagctatcaattattatttcaaatgcttccaaatcaagaaatatataattttactttgaatgctcacaatccgctgggtcgatcacaatcaacaattttagttaatataactgaaaaagtttatccccatactcctacttcattcaaagtgaaggatattaattcaacagctgttaaactttcttggcatttaccaggcaactttgcaaagattaattttttatgtgaaattgaaattaagaaatctaattcagtacaagagcagcggaatgtcacaatcaaaggagtagaaaattcaagttatcttgttgctctggacaagttaaatccatacactctatatacttttcggattcgttgttctactgaaactttctggaaatggagcaaatggagcaataaaaaacaacatttaacaacagaagccagtccttcaaaggggcctgatacttggagagagtggagttctgatggaaaaaatttaataatctattggaagcctttacccattaatgaagctaatggaaaaatactttcctacaatgtatcgtgttcatcagatgaggaaacacagtccctttctgaaatccctgatcctcagcacaaagcagagatacgacttgataagaatgactacatcatcagcgtagtggctaaaaattctgtgggctcatcaccaccttccaaaatagcgagtatggaaattccaaatgatgatctcaaaatagaacaagttgttgggatgggaaaggggattctcctcacctggcattacgaccccaacatgacttgcgactacgtcattaagtggtgtaactcgtctcggtcggaaccatgccttatggactggagaaaagttccctcaaacagcactgaaactgtaatagaatctgatgagtttcgaccaggtataagatataattttttcctgtatggatgcagaaatcaaggatatcaattattacgctccatgattggatatatagaagaattggctcccattgttgcaccaaattttactgttgaggatacttctgcagattcgatattagtaaaatgggaagacattcctgtggaagaacttagaggctttttaagaggatatttgttttactttggaaaaggagaaagagacacatctaagatgagggttttagaatcaggtcgttctgacataaaagttaagaatattactgacatatcccagaagacactgagaattgctgatcttcaaggtaaaacaagttaccacctggtcttgcgagcctatacagatggtggagtgggcccggagaagagtatgtatgtggtgacaaaggaaaattctgtgggattaattattgccattctcatcccagtggcagtggctgtcattgttggagtggtgacaagtatcctttgctatcggaaacgagaatggattaaagaaaccttctaccctgatattccaaatccagaaaactgtaaagcattacagtttcaaaagagtgtctgtgagggaagcagtgctcttaaaacattggaaatgaatccttgtaccccaaataatgttgaggttctggaaactcgatcagcatttcctaaaatagaagatacagaaataatttccccagtagctgagcgtcctgaagatcgctctgatgcagagcctgaaaaccatgtggttgtgtcctattgtccacccatcattgaggaagaaataccaaacccagccgcagatgaagctggagggactgcacaggttatttacattgatgttcagtcgatgtatcagcctcaagcaaaaccagaagaagaacaagaaaatgaccctgtaggaggggcaggctataagccacagatgcacctccccattaattctactgtggaagatatagctgcagaagaggacttagataaaactgcgggttacagacctcaggccaatgtaaatacatggaatttagtgtctccagactctcctagatccatagacagcaacagtgagattgtctcatttggaagtccatgctccattaattcccgacaatttttgattcctcctaaagatgaagactctcctaaatctaatggaggagggtggtcctttacaaacttttttcagaacaaaccaaacgattaa

SEQ ID NO: 43953 - DNA, 501 bp, Homo Sapiens
atgttctttggcaatggcttcccttctagtaaagtctacgtctacagcaatggctgcatgcgctatacctaccagcaaaggcagggctgcagggagaagcggagtgacggcagcttgcgggtgttcgtgcagctgatacccatcctcatcctcatgtcagctctcagccagctcatggtctccagtccaccctacagtctgagcccaagactgtttgtgggccaccacaggcgagtcactgaccacctgagtgtcatctactatgtggcaggcattttctccgaggagtacacaggctccagcctccaaacagtcaaaccgaatgtgaaagatgattatatcgccaacctctggaacaactgctggacggagaagcagcagatgaaaggcttgctgtaccgaggccgctactttggtgacacagatatgtaccacaaagcacagaagatgggcagcccctgcagccagctgtcacaggatcaggcctccctgcatggataa

SEQ ID NO: 43954 - DNA, 3585 bp, Homo Sapiens
taactagcctagaatgttctgtttcctcttaagtctctacacacacattttgatatttcatttctagaatggtagactatacatgttagcaatcgtgggaatcactttttatgtaataacatacttgagtgtatggcatacagtgtgattgggaataaagatggagaaactgttctttacaatattccatgatgatctgcaggggctttttttgtttgttttttaaaatcattaaggcatttctctttaagattgctttattttatttaggactttatcttatctttatgtttctttttttcacagtccatatttttctcccctttctctttctctccctgcctcccaccatgcacacacgcacacacacacacacacacacttcctccaagcatattgatttattgaaaatcaaggtgacttctggtgttggagataagcaggcccacacttgttggtgtggttctttgcatgaactgcctccttttcctgacactaaggcacagctgagtggagggaagaagatagcagtgacttctcctatcctctaggtcattggcttcacattagaagcaccagaggagttttaaaaattatcattctcagattcacaccccatcccaaataaatcaggatgtgagtatcttgtgttgagatacacatatctgtactttttaaagattcttaagtgattccagtgtgctgcaaagtctgcgctgcgaagtctgggagacactctaggttttttgtttgtttttataatgaaacagtagttttttttttttttttgaagtttaacagctattaatggtggcatagtaccttgtaggtagtttttcaatcctcaccctccttctaacccctaccctcaagtaggaccctgtgtgtattgttccctttcttctatccatgtgtactcagtgtttacttcctacttataagtggaaacgtgatatttggttttctgttcctacattaatttgattaggataatggcctccagctgcatccatgttgtgcaatggacatgattttttttaatggctatatagaatcccatgatgtatatgtactgcatttgctttatccagtctaccattggtgggtatataggttgattcaatgtctttgctaatatgaatggtgctgtgaggaacatacaaatacatgtttctttttggtagaacgatttatattcctttgagtatatacccagtagtgggattgctgggttgaatagtagttctgttttaagttctttgagaaatctccaaattgatttccacagtggctgaactaatttacattcccactagaagtgtataagctttactctgtaaccttgccaacatgttattttctgactttttaataataaccatcctgactggtgtgagatggtatctcattgtggttttgatttgcatttctctaataatttgtcatgctgagcatttttttttatatgcttgttggctacttgtatgtcttcttttgagaagtgtctgttcatgtcctttgcccattttttaatggggttgtttgctttttgttgttgagttttgtttaaattccttatagattctggatattagaattttgtcagatgaatagtttgcaaatattttcacccattctgtaggatgtctgtttactctgttgatagtttctttagctgtgcaggagctctttagtttcattaggtcccatttgtgtatttttggttttgttgcatttgcttttggagacattgtcatgaactctttgccaaggtctatgtccagaatggtatttcctaggttttcttctagggttgttgtagttttaggtcttacattgaagtgtttaatccatattgagttgatttttgtgtatggtataagaaggggtccagcttcaatctgctgcatatggctagcctgttaacccagcaccatttattgaacaggcagtcctttctgcattgcttgttgttgtcgactttgtcaaatatcagatggttgtaggtgtgcagctttatttttgggttctgtaacctgtaccattggtctatgtgtctgtttttgtatcagtaccatgctgttttggctactgtagccttgtagtatagtttgaagtcaggtagcctgctgcctctggctttattctttttgcttaggattgcactggctttgggggcttttttttggttccatatgaattttaaaatattttttctaattctgtgaaaaaatgatgttggtagtttgataggagtagcatggtcaccttttagaactggcagtttatctccttgactataagagaaaagtgacctgaagtacattgtcttctcaatttttgtataaaagaagcatttgtactcttcctccagttcatcatgataaaacatgatgattactgctatatctggaaactctgcaatcatccataaggtagcttttatctagatagactgaaattggaaggttgtctgtaaataatatatgtttgacatctgatgtcattcttaaaagaataaatgccagagcatcaagaatagtcccaatccatggaacaatacagaattctaacggtgggaagtctgtataagcaatgccatccatataccatattttaattctgttatagagggattacctctaaatatgtcagatggaaaaatttcttcctctcaatataggccagatacaagcagcttacttactcacacagcttcatagtccatggcagcctcccaagtcattcatttttaagtagttgcatctatttgagtcatgatgtgaacattacccagcaaactgagtcacaaattaatttacatatttgagaagttgttgtattcggtatattgcaatagaaatatcatagaaacttggtattcttgtttcactcagattcagaattcactaaagtatgacgagttattattgctattattatccctaggaataagttaatattaattgattgcatttgtgttttacataatatttatatgtgggaacattataccataactagaagatagaatgcaatgagaaacataattgtagaatatgaaaattcaccagctgtaggattcaaaatggttaaaattcaaaaagataaaaggaaaatgcttggttaaatatactgggattttctaagcttacagtattagaaaagccatatagtttttgttatgtacaaataatttagcttacacaatctttagaaatctttgggttctgggatttaaaaataaaaggaaaccaacaagaagaaaagttaaagttactgattcgacttagtttttatactacatagtacccacctctccaaatgcaatatttcatgtaagctggaattaagtatttattaatgttcaagaaactaggcagtcatatgatcgtggcttattatagcttactcctaaatttagaagtgttcccagattgaaaaatggtaaaaagattagagaacaaatgcacagtttttagttttttccttgttttagatttattatattttttgaaactagattttattatcctaatcatactgtattgaaccttttaagagaataaaataagattgtgttag

SEQ ID NO: 43955 - DNA, 1490 bp, Homo Sapiens
gttgttgaaagtatggaacaggatcgtattccagaagtgcatgtcccaccatcttcagctgtgtctggagtcaaagaatggtttggattgggaggagaacaagctgaagagaaggcttttgaatcagttattgaacctgtacaagaaagctcatttcggagtagaaaaatagcagtggaagatgagaatgacctagaggaattaaataatggtgagcctcaaacagaacatcagcaagaatctgaatcagaaattgattcagtgccaaagacacagtctgaactagcatctgagtcagagcacattcccaaacctcaatccactggttggtttggtggaggatttacaagttatttaggttttggagatgaggatacagggcttgaattaatagctgaagaaagcaatccaccactacaagattttcccaattccatatcatctgataaagaagccacagttccatgtacagaaatattaacagaaaaaaaagacacaatcactaatgatagcttgagtctcaagccaagttggtttgattttggttttgctatactaggctttgcatatgccaaggaagataaaattatgttagatgacaggaaaaatgaagaagatggtggggcagatgaacatgaacatcctctaacaagtgaattagaccctgaaaaagaacaagaaatagaaacgataaaaattatagaaacagaagatcaaatagacaagaaaccagtctcagaaaaaacagacgaatctgatactataccatatttgaaaaagttcttgtataattttgacaacccttggaacttccagaacattccaaaggaaacagaattgccatttcccaaacagatactggatcaaaataatgtaattgaaaatgaagaaactggagaattttccattgataattatcccacagataatacaaaagttatgatattcaaaagttcatacagtctgtcagatatggtctctaacatagagttacctacgagaattcacgaagaagtatattttgaaccctcatcttctaaagatagtgatgaaaattcgaaaccatcagtagacaccgaagggcctgctctggtggagatagacagatctgtggaaaataccctgctaaatagtcagatggtttcaactgataactctttgtcttctcaaaattatatttctcagaaagaagatgcttctgagtttcagattctgaaatacttattccaaattgatgtttatgatttcatgaattctgcattttcaccaattgtaattcttacagaaagggtaagtttgccttttaaaccttttgcaataattttacctattttgctaaatataagagtggctacaaaatatgtttgaatgaatcctccctgtttaatgtttatataatgtttctctttccatgacatcttacctgtaagatttctctttatatgaatgttttgtcaaatggatattgatttttaaaaacatttccctaa

SEQ ID NO: 43956 - DNA, 435 bp, Homo Sapiens
agtccagcgtctctccccctggctcccggctgtgcgctgaggctttgtcccctgtcctttggcgaaggagtggagtttgaccccttaccaccaaaggaagtaaggtacacctccttggtcaagtacgactccgagaggcacttcatcgacgacgtgcagctgcccctgggcctggcggtggcctcctgcagccagacggtcacctgtgtccccaatggcacgtggcgcaactacaaggccgaggtgcgcttcgagccacgccacaggcccacccgcttcctcagtaccaccatcgtgtaccccaagtaccccaaggccgtctacaccaccaccctggattacaactgccgcaagacgctgaggaggtttctgtccagcgtggagctcgaagccgcggagctcccgggcagcgacgacctctctgatgaatgctga

SEQ ID NO: 43957 - DNA, 1567 bp, Homo Sapiens
cctgggagacagggatttctccaggctgctggacatcaccccagcctccagcctgagctttgtcctggacaccacgggcagcatgggtgaggagatcaacgctgccaaaatccaggctcgccaccttgtggagcagcggagaggcagccccatggagcctgtccactatgtcctggtgccttttcatgacccagggttcggccctgtctttacaaccagtgaccctgacagcttctggcaacagcttaatgagatccatgccttggggggtggagacgagcctgagatgtgcctgtcagccctgcagctggccctgctgcacacacctccactctcagatatctttgtcttcacggatgcctcccccaaggatgcctttctcaccaaccaggtggaatccctgactcaggagcggcgctgccgggtaacattcctggtgactgaagatacatcaagggttcagggtcgagctcggcgtgagatcttgtcccctctgcgttttgagccatacaaagcagtggccctggcctcaggaggagaggtgatcttcaccaaagaccagcacattcgagacgtggcagccattgttggggagagcatggctgccctggtgactcttcccctggaccctcctgttgtggtgcctgggcagccacttgtgttcagcgtggatgggctgctccagaagatcacagtccggatccacggagacatcagcagcttctggatcaagaaccctgcaggggtctcccagggccaggaggaaggcgggggtcctctaggtcacactcgccgctttgggcagttctggatggtgaccatggatgaccctccacagacaggaacctgggagatccaggtcacagctgaggacacccctggggtgagagtgcaagcccagacctccctggacttcctcttccactttgggatccccatggaggatggaccccaccctggcctctaccccctgactcagccagttgcaggtcttcagacccagctgctggtagaagtgacagggttgggttccagagccaatcctggggatcctcagccgcatttctcccacgtcatccttcgaggggtcccagagggtgccgaactaggccaggtgcccttggagcccgtgggacctccggagcgaggtctcctcgcagcctcgctgtcgcccacgctgctgtcaacccctagacccttctccctggagctgattggccaggacgcagcggggcggcgcctgcacagggctgcccctcagcctagcactgtagtccctgtccttctggagcttagtggcccctcgggtttcttggccccgggcagcaaagtcccgctcagtctccgcatcgccagcttctcgggccctcaggatcttgaccttaggactttcgtcaaccccagcttctccctcacctccaacctctccagggctcacctggaactgaatgagctggggccgcctgtggctggaggtcccagattcagcggccccggattccgtggtgatggtgactgtgactgcagggggacgagaagccaacccagtacccccgactcatgcttt

SEQ ID NO: 43958 - DNA, 189 bp, Homo Sapiens
atgatcagccagggctcccttccaggccagggccccaacactatagcaaaagggctgatagtaaaccaaacctcaaaaggaccaagacaacagagagcatggaaagaaatggtgcagataaaagtgggagagggaagcaaaatcaggaaatttaagaacacaagctacggtattatgttaacaccataa

SEQ ID NO: 43959 - DNA, 936 bp, Homo Sapiens
atgggtagaagaaataacacaaatgtgcctgacttcatccttacgggactgtcagattctgaagaggtccagatggccctctttatactatttctcctgatatacctaattactatgctgggcaatgtggggatgatattgataatccgcctggacctccagcttcacactcccatgtattttttccttactcacttgtcatttattgacctcagttactcaactgtcatcacacctaaaaccttagcgaacttactgacttccaactatatttccttcatgggctgctttgcccagatgttcttttttgtcttcttgggagctgctgaatgttttcttctctcatcaatggcctatgatcgctacgtagctatctgcagtcctctacgttacccagttattatgtccaaaaggctgtgttgcgctcttgtcactgggccctatgtgattagctttatcaactcctttgtcaatgtggtttggatgagcagactgcatttctgcgactcaaatgtagttcgtcactttttctgcgacacgtctccaattttagctctgtcctgcatggacacatacgacattgaaatcatgatacacattttagctggttccaccctgatggtgtcccttatcacaatatctgcatcctatgtgtccattctctctaccatcctgaaaattaattccacttcaggaaagcagaaagctttgtctacttgtgcctctcatctcttgggagtcaccatcttttatggaactatgatttttacttatttaaaaccaagaaagtcttattctttgggaagggatcaagtggcttctgttttttatactattgtgattcccatgctgaatccactcatttatagtcttagaaacaaagaagttaaaaatgctctcattagagtcatgcagagaagacaggactccaggtaa

SEQ ID NO: 43960 - DNA, 741 bp, Homo Sapiens
atggtttggcgttttcaaaagcatataggcaaagggagttctcaagagagaccgatcagaaaggatttcttaactggcactgctggcagagacggagaccgcggctggggcaagtggtgggggacggcactgaacttccctaaggaccccaagggttcagccgagggatcggcacccactccgctcacagagggctccctccctacagtagggaacgcacccgaaactcagccgacaaggcgcaggggagcagggcaaagacattgcaaccagaagcccaaggccggccgacactttcagaccctggggcagcccctggtaggcaccccgccgagcccgcaggatgcggctccaaggcagggttcgcccgggccggggccagcgcggaccacagctgtatggcgcccggcgccctcaggagctgcagcggagcacggccagaagccgcagaccccgagcgcctctctgcagccgccgttcccgcccccgcccccaccaggggacccgacacctccgtctccactccccccagcccacgttcccccaactcttctcaccctgcaggagccggtgaccggcgaaggtacttctttccgcgtggagggactgtgcgcgtcccgcctggctgtgggtaggggtctgggagctctggccgctaacacttctgctccagccgctgggagtcctctggctgccgctgccgccgccgccgccgccgtctccagcagcaagtttccataa

SEQ ID NO: 43961 - DNA, 348 bp, Homo Sapiens
atggtgcactgtggccagggccaaaaagtgcagaaggtgaatatacccatcaaccttaccttcatcttcagatacttgcaaaatagatctcggattcaggtatggctctatgagcaagtgaatatgctgatagagggccgtgtcattgggtctcaatgtgttggacaggctgaactcctgggttcaagtgatcctcccacgttggcctcccaaaatgctgggattacagaagacaggaatcaaatgaaaacacttggtagacaggacttgaatgatgattgggagattcctgatgggcagattacagtgggacaaagaattggatctggatcatttggaacagtctac

SEQ ID NO: 43962 - DNA, 333 bp, Homo Sapiens
gaggcagggttggagttggagcaggaagctgagggtcttgtcatgcccgcccttccttccacgtggctccaccaggctgccctctgggaaaggaggccctggaatgcccgcagcttcacagcaggaagagagcacggtccacgttgcccacaggttcctgctcaaatccagagtgagcctgcaggacagccagaaagcccacccaaggtgcctcagcctggagctcacccaggacgcagagcaggtgcaggtgcaggtgcaggtgcagacggcagacggacgcatcaggggcgtggtgtgaataacgccccgcttgagaagctcagggctgga

SEQ ID NO: 43963 - DNA, 1620 bp, Homo Sapiens
ctaacgacgcggcgcccaccgagagctgggggagcccagggcggggagggcgcggccggagcgagcgccgcccgggaaacccgagccccgccagaacccctggcagccacagagctcaggcttcaacgctggcccgacaccagggccaggccagaaatcagcctgggagaagctgggtccggctccgaggctggtgggcacggccccacccggctttgttcttcgcggcgctgaggcggttagtttagcctcccacccaccagacaaaggtgcgggaaatgggaccggtttgacttgttcaggcacatggtcaccctgcacgtcaggggccggctcacccctgatattagcaaccccaagcgtcttggcgcagggagggatccccgtcagccaggtccccacgcagctccaggcagcgccagcgtccaccagggagcaggggcagcagagcccttctccccagacacccttgtgtcttcggaaaatgccaggtccccccccagctgctgttctcgtctttggaggacccggctttactggtgccacatgcctgctgcgggctgtgccatggagggcggcacctgcctcttctcacgtggcagctctggcaccgggaacttcagagaccccagctgggctgagccaccccgggctgaggccttgtgggtcgcctcaaattcaagcctcatgggcccggcctcccgccctaacggtcgctgaagtgtcctgctctcatacgaacttgtgtctaaaactgtggtctttgcttttctcccaaacccgcctccccgcgctgcctacctcaggcctgggggctcccccgacttgttctctattcccccagcccctcactgcctgggggctcccccgactcactctctaggcccccagccccacactgcctgggggctcccccgaccctctctctattctcccagccccgcactgcctgggggctcccccgaccctctctctattctcccagccctgcactgcctggggactcgcctgactcgctctctattcccccagccccacactgcatctcgggagcagttccaggccgacctctgctctccacggccgggaggtgtccaggtgtggacagagccccggctctccatcagggcacccagccgccccacgctcagccctgcgtggcttctcccgtccttcctgggcatcccctgagggtgtggccctgttgctgggccccctcctgcccccttgccctgccagttcctagagcctaggctgagggcagggccattgctgtgaacaaactggacaggctccgcgggagctcagagctgccccgtgtctgagggcgcggctgtgtggagtggggtcccctcggccaggcgggaaaggccctggatcgtgtgtgtgaccctggtactgggcaacccctgggacaggcaagtccgtggagacagaacggggcggtggctgcagcctgggagctcggcctccctcggggtgacggaatgttctggaccttgatataggtggtggatactcagccctgtgagtgcaataaatgccaccaaattctcacttcaaaattattttatgctatgtgaattctgctccaattaaaacacaaactctcttgcaaaa

SEQ ID NO: 43964 - DNA, 1363 bp, Homo Sapiens
acagaaacctttccattgccatactgagaaactgcagcaggcagtgtgcctacaggtctacaaagaaacttcagatcatcttcttgagggaaagaagctgaagtgctacataagatgcttgtgcttcataactctcagaagctgcagattctgtataaatccttagaaaagagcatccctgaatccataaaggtatatggcgccattttcaacataaaagataaaaaccctttcaacatggaggtgctggtagatgcctggccagattaccagatcgtcattacccggcctcagaaacaggagatgaaagatgaccaggatcattataccaacacttaccacatcttcaccaaagctcctgacaaattagaggaagtcctgtcatactccaatgtaatcagctgggagcaaactttgcagatccaaggttgccaagagggcttggatgaagcaataagaaaggttgcaacttcaaaatcagtgcaggtagattacatgaaaaccatcctctttataccggaattaccaaagaaacacaagacctcaagtaatgacaagatggagttatttgaagtggatgatgataacaaggaaggaaacttttcaaacatgttcttagatgcttcacatgcaggtcttgtgaatgaacactgggcctttgggaaaaatgagaggagcttgaaatatattgaacgctgcctccaggattttctaggatttggtgtgctgggtccagagggccagcttgtctcttggattgtgatggaacagtcctgtgagttgagaatgggttatactgtccccaaatacagacaccaaggcaacatgttgcaaattggttatcatcttgaaaagtatctttctcagaaagaaatcccattttatttccatgtggcagataataatgagaaaagcctacaggcactgaacaatttggggtttaagatttgtccttgtggctggcatcagtggaaatgcacccccaagaaatattgttgattgattccactgtccatttcaaatctttcttatcagtaaaaaaacattaattcaaacacaagcattgtgatctacattagcacaaaatgcaactgattatctaggatctgtgtattacttaagctcacccttaacagttttaccttccttctcctctgtattcttacagaaaattagaagctcaattttatggtctcataatttcctttatgacagacatctcagaattaaaatcacccaaagccaatcattagtgccaagataaccctttaacggcaacactttcttaaatgaagactatttctttcatgaaaaaattcacttttatgactttcttgttaaaataaaaagtctgcttttaaaa

SEQ ID NO: 43965 - DNA, 396 bp, Homo Sapiens
atggtgaccccctgtcccaccagcccctcgagccccgccgcccgagcggggaggcgggacaacgaccagaaccttcgcgccccggtgaagaagagcaggcgtccgcgcctccggaggaagcagccgctgcatcccctgaacccgtgcccgctcccgggagactccggcatttgcgacctgttcgagtcccccagctccggctcagacggcgcagagagcccctctgcggcgcggggtggtagccccctgcccggcccggcccagcccgtggcgcagctagatctacagaccttccgcgactacggccagagctgctacgccttccgcaaggcgcaggagagccacttccacccgcgggaggcgctggcacggcagccacaagtgaggtgctggtag

SEQ ID NO: 43966 - DNA, 807 bp, Homo Sapiens
atggggcctttgagcccctacgcttgggctttttcccacactgtggagtgtattttcattttcaataaatcacttcatgccttccttgctttgtgcgttttgtccaattctttgttaaagacgtcaaggacctggacacctacaactggtaacgtatattttggccagccaggaggaagaagtaagcccaaagtttgggattcatttttctctctttcctttctgctccatacaagagctttctcttttcatttccaacttggaacacttggtgggcagcacctaaacgtggaggcaactgcaggtttctggctgtggcctgtgaaactaatgggtttccgtgcagagaaggctgactgccacctcctggtttgcttaaggaacctgggtctttttcatttttttttcctttatttctcagtctttaagtcgctgtttataattgccctgcccagaagggggaatgacttttttttttcttttctgcacgtggtccccgatccctatgtgtggcgcagttcagagcaaactcgcacatgttttaagggacttaaaccttcttatgctaaattcttcccttaccgtactcaactggctacggaacaaaaaggcccacccggcatccagttctcattgcagttcatggctatttttataaagcttatagtgtgctctggaggtgcccacctaaggtcagagacatctgacactgagatcggatccacaggaggatactctgtgggtcctgcggacctcaaccttcccaaaggggacgttcttggcagaggttctgaggtctggtactaa

SEQ ID NO: 43967 - DNA, 1001 bp, Homo Sapiens
agttgcaggcgagcaggcgaggaatcgccgtggcgtcttggtgttctccacgctggttcgcaggtgaagagatggcgtttgtgaagagtggctggttgctgcgacagagtactattttgaagcgctggaagaagaactggtttgatctgtggtcggatggtcacctgatctattatgatgaccagactcggcagaatatcgaggataaggtccacatgccaatggactgcatcaacatccgcacggggcaggaatgtcgggatactcagcccccggatggaaagtcaaaagactgcatgctccagattgtttgtcgagatgggaaaacaattagtctttgtgcagaaagcacagatgattgcttggcctggaaatttacactccaagattctaggacaaacacagcgtatgtgggctctgcagtcatgaccgatgagacatccgtggtttcctcacctccaccatacacggcctatgctgcaccggcccctgaggagctgcacagtaaaggtcccaaaatacacaccaccacgagtgcaaaaacccaggcggttctcccaacgcgatgtttttttcccagcgaatctccgataagaaggtctgtgcagatttctgtgctcctacctgcagtaaatattcgtagacgtataaagctaacttttccccagcctgcccgtccgagggcaccaaggagcctttgcctttggcaaacatggtttgcagggaagagggcgcccagcctccccacagccgccaccgctccggctctcccgagctgcccctcgcccccggccccctcccaggcgctccctccctctctcgctggctggcgctctcctagcagcgctcccctccctcccgagcaggcgctggctccgcgctctttccagctgtcaaagcatcaggcccggccgcggccccatcgccctggaactcctcccgtgccggcttggcctggggtgccgccgccgcctcccgcaaggccgcccgctctccggtag

SEQ ID NO: 43968 - DNA, 251 bp, Homo Sapiens
acttgcttacaaggaagcctgtggacaggcgagtgggtggaaccgactccagcctggaaaacctgccctcccatcccccttagcgccttcttggccttccggcctgattttcttcgacagcagttctggccagggcaaggagctgtggtgggggcagtataagccagggactcccttcccacagatgaggcctagggctgcaaaagggcccctgatgtggtcaaggctttatgggtctctccacctcaaag

SEQ ID NO: 43969 - DNA, 1651 bp, Homo Sapiens
gccttgacagcggctttcaacccccacctcagcccagcaattcggcagtttggagcatgtgaacaccttgagccttgatgagttccagtatgtggtatattatgcagagcattcagagcaaatactctctctccgagcgcttaatccgaacaattgctgccatccgttccttcccacatgataatgtagaggacctcatcagagggggagcagatgtgaactgcactcatggcacactgaagcccttgcactgtgcctgtatggtgtcagatgctgactgtgtggagttacttctggaaaaaggagccgaggtgaatgccctggatgggtataaccgaacagccctccactatgcagcagagaaagatgaggcttgtgtggaggtcctattggagtatggtgcaaaccccaatgctttggatggcaacagagataccccacttcactgggcagcctttaagaacaatgctgagtgtgtgcgggctctcctagagagcggggcctctgtcaatgccctggattacaacaatgatacaccgctcagctgggctgccatgaagggaaatcttgagagtgtcagcatccttctggattatggcgcagaggtcagagtcatcaacctaataggccagacacccatctcccgcctggtggctctgctagtcaggggacttggaacagagaaagaggactcttgctttgagctcctccacagagctgttggacactttgaattgaggaaaaatggcaccatgccacgagaggtggccagagacccgcagctatgtgaaaaactgactgttctgtgctcagctccaggaactctaaaaacactcgctcgctatgccgtgcgccgtagcctgggactccagtatctccccgatgcagtgaagggccttccactgccagcttctttgaaggaatacctgttacttttagaatagccggagaagatgtttgcaccatcgtgcaggcagctctgggtgaggttgtccctgcagtactccttgtcacagaaaacagaaaaacagttgttcctgttgtgtggtttatagatttcgaagcaacatgtcacaacaataacctccatagcacctccccttcccaaaccaaacaacccaacaaaaaaaatccctcacttttgttttctgtttattgcttacctggctttttatattgcattttgcaaaagaagaggtctccctcaatcctcccctttagggaaggagtcaacagtgtaactaaatttctctaggaagatggaaagtacttaaataatgtgtgtgtggttttcctttggggacgtggttaacggtccagaagaatcccttctagaaagcattttaggccagccatggtggctcacgtctgtaatcccaggactttgggaggctgaggcaggtggatcacctgaggtcaggagttcgagcccagcctgaccaatatgatgaaaccccgtctctactaaaaatacaaaaattagctgggcatggtggcatgcgcctgtaatcccagctactcaggaggctgagacagaagaatcgcttgaacctgtgaggcagaggttgcagtgagccaagatcgcgccattgcactccagcctggacaacaagagcaaaactgtctcaaaaaaaaaaaaaaaaaaaaaaaa

SEQ ID NO: 43970 - DNA, 561 bp, Homo Sapiens
tttccgcaggtcctctctgatgacatgaagaagctgaaggcccgaatgcaccaggccatagaaagattttatgataaaatgcaaaatgcagaatcaggacgtggacaggtgatgtcgagcctggcagagctggaggacgacttcaaagagggctacctggagacagtggcggcttattatgaggagcagcacccagagctcactcctctacttgaaaaagaaagagatggattacggtgccgaggcaacagatcccctgtcccggatgttgaggatcccgcaaccgaggagcctggggagagcttttgtgacaaggtcatgagatggttccaggccatgctgcagcggctgcagacctggtggcacggggttctggcctgggtgaaggagaaggtggtggccctggtccatgcagtgcaggccctctggaaacagttccagagtttctgctgctctctgtcagagctcttcatgtcctctttccagtcctacggagccccacggggggacaaggaggagctgacaccccagaagtgctctgaaccccaatcctcaaaatga

SEQ ID NO: 43971 - DNA, 267 bp, Homo Sapiens
atgtccctgcaggctgattttgacatggtcacagaagatgtgaggaagctgaaaacaagaccagatgatgaagaactgaaagaactttatgggctttacaaacaagctgtaattggaaacattaatattgagtgttcagaaatgctagaattaaaaggcaaggccaaatgggaagcacagaacccccaaaaaggattgtcagaggaagatatgatgcgtgcctttatttctaaagccgaagagctgatagaaaaatatggaatttag

SEQ ID NO: 43972 - DNA, 1164 bp, Homo Sapiens
cgcgggccccccaaagtcccggccgggccgagggtcggcggccgccggcgggccgggcccgcgcacagcgcccgcatgtacaacatgatggagacggagctgaagccgccgggcccgcagcaaacttcggggggcggcggcggcaactccaccgcggcggcggccggcggcaaccagaaaaacagcccggaccgcgtcaagcggcccatgaatgccttcatggtgtggtcccgcgggcagcggcgcaagatggcccaggagaaccccaagatgcacaactcggagatcagcaagcgcctgggcgccgagtggaaacttttgtcggagacggagaagcggccgttcatcgacgaggctaagcggctgcgagcgctgcacatgaaggagcacccggattataaataccggccccggcggaaaaccaagacgctcatgaagaaggataagtacacgctgcccggcgggctgctggcccccggcggcaatagcatggcgagcggggtcggggtgggcgccggcctgggcgcgggcgtgaaccagcgcatggacagttacgcgcacatgaacggctggagcaacggcagctacagcatgatgcaggaccagctgggctacccgcagcacccgggcctcaatgcgcacggcgcagcgcagatgcagcccatgcaccgctacgacgtgagcgccctgcagtacaactccatgaccagctcgcagacctacatgaacggctcgcccacctacagcatgtcctactcgcagcagggcacccctggcatggctcttggctccatgggttcggtggtcaagtccgaggccagctccagcccccctgtggttacctcttcctcccactccagggcgccctgccaggccggggacctccgggacatgatcagcatgtatctccccggcgccgaggtgccggaacccgccgcccccagcagacttcacatgtcccagcactaccagagcggcccggtgcccggcacggccattaacggcacactgcccctctcacacatgtgagggccggacagcgaactggaggggggagaaattttcaaagaaaaacgagggaaatgggaggggtgcaaaagaggagagtaagaaacagcatggagaaaacccggtacgctcaaaaagaaaaaggaaaaaaaaaaa

SEQ ID NO: 43973 - DNA, 582 bp, Homo Sapiens
tggatgcccgtcagcaagctgggctgcctggtcaagcacatgaagatcacttccctggaggagatctgtctcttctccctgcccatcacggaatctgagatcattgattttttcctggggggcctctctcgaggcgttttgaagattatgccggtgcagaagcagaccggagccggccagcgaaccaggttcaaggcgtttgtggccattgcgggctacaacggtcacgtcggtctgggtgttaagtgctccaaggaggtggccactgccatccacagggccatcatcctggccctccattgtccccatgcgcagaggttactaggggaacaagatggcaagccctacaccatccgttgcaaggtgacgggctgctgcggctccgtgctcgtgcgcctcatccgcgtgcccagaggcaccggtatcgtctcggcgcctgtgcccaagaagttgctcatgatggctggtatcgatgactgctacacctcagccaggggctgcactgccactctgagcaacttcgccaaggccacctttgatgccatctctaagacctacagctacctgacccctgacctctgg

SEQ ID NO: 43974 - DNA, 153 bp, Homo Sapiens
tactgcaactatcctctgaagaagggcacctgtaattcatatttgaccagattctactacaacactttgacatttttatgtgagccctttgtcttcagtggctgtggaggcaacagaaacaactttaaacagaaatatttctgtgaaaaaatg

SEQ ID NO: 43975 - DNA, 180 bp, Homo Sapiens
ggacggcgaaggagactcgtttggaccccgagccaaagcgaggccttgcgagcctgctttgagcggaacccgttcccgggcaacgccaccagtgaacggctagcccaggccatcggcattccagagcccatggtccagatttggtttcagaacgagaggtcacgccagctgaggcagcac

SEQ ID NO: 43976 - DNA, 345 bp, Homo Sapiens
tctggaactccaacctcaagtgatcctctggcttcagcctcccaaagtgctgggattacaggtgggagccatggtgcccaggtcagaaggttaaattgtttcagtaaaaagtcattctgttgtggaaatgttacaaatgcattgctaaaagggagagaaacatccaggcgtaaacacttattgtcagggatcccttatcctggtggaataagcataaactttggagtcagaattaatttgcattctcttttacttattatgagtcaggggacaagtttcttagcttctctaagcctcagcttcttcctttgcaataataacacttggctgacagtgttatcatga

SEQ ID NO: 43977 - DNA, 366 bp, Homo Sapiens
atggcggcctccgcgcacggctctgtctgggggccgttgcggcttggcatccccggcctgtgctgccgccggccgcctctgggtctgtacgcgcgcatgcggcggctgcccgggccggaggtgtctgggcggagcgtggctgcggccagcggaccgggcgcctggggcactgaccactactgcctggagctgctgcggaaacgggattatgaaggttatttatgctccctgctgctccctgcagaatcccgaagctctgtttttgcactgagggcctttaatgtggaactggctcaggctggattactcttgctgctgtcttgctgtactgtatgccactgggatctgaacactaaacattgctaa

SEQ ID NO: 43978 - DNA, 2328 bp, Homo Sapiens
atggcatccgcggggcacattatcaccttgctcctgtggggttacttactggagctttggacaggaggtcatacagctgatactacccacccccggttacgcctgtcacataaagagctcttgaatctgaacagaacatcaatatttcatagcccttttggatttcttgatctccatacaatgctgctggatgaatatcaagagaggctcttcgtgggaggcagggaccttgtatattccctcagcttggagagaatcagtgacggctataaagagatacactggccgagtacagctctaaaaatggaagaatgcataatgaagggaaaagatgcgggtgaatgtgcaaattatgttcgggttttgcatcactataacaggacacaccttctgacctgtggtactggagcttttgatccagtttgtgccttcatcagagttggatatcatttggaggatcctctgtttcacctggaatcacccagatctgagagaggaaggggcagatgtccttttgaccccagctcctccttcatctccactttaattggtagtgaattgtttgctggactctacagtgactactggagcagagacgctgcgatcttccgcagcatggggcgactggcccatatccgcactgagcatgacgatgagcgtctgttgaaagaaccaaaatttgtaggttcatacatgattcctgacaatgaagacagagatgacaacaaagtatatttcttttttactgagaaggcactggaggcagaaaacaatgctcacgcaatttacaccagggtcgggcgactctgtgtgaatgatgtaggagggcagagaatactggtgaataagtggagcactttcctaaaagcgagactcgtttgctcagtaccaggaatgaatggaattgacacatattttgatgaattagaggacgtttttttgctacctaccagagatcataagaatccagtgatatttggactctttaacactaccagtaatatttttcgagggcatgctatatgtgtctatcacatgtctagcattcgggcagccttcaacggaccatatgcacataaggaaggacctgaataccactggtcagtctatgaaggaaaagtcccttatccaaggcctggttcttgtgccagcaaagtaaatggagggagatacggaaccaccaaggactatcctgatgatgccatccgatttgcaagaagtcatccactaatgtaccaggccataaaacctgcccataaaaaaccaatattggtaaaaacagatggaaaatataacctgaaacaaatagcagtagatcgagtggaagctgaggatggccaatatgacgtcttgtttattgggacagataatggaattgtgctgaaagtaatcacaatttacaaccaagaaatggaatcaatggaagaagtaattctagaagaacttcagatattcaaggatccagttcctattatttctatggagatttcttcaaagcggcaacagctgtatattggatctgcttctgctgtggctcaagtcagattccatcactgtgacatgtatggaagtgcttgtgctgactgctgcctggctcgagacccttactgtgcctgggatggcatatcctgctcccggtattacccaacaggcacacatgcaaaaaggcgtttccggagacaagatgttcgacatggaaatgcagctcagcagtgctttggacaacagtttgttggggatgctttggataagactgaagaacatctggcttatggcatagagaacaacagtactttgctggaatgtaccccacgatctttacaagcgaaagttatctggtttgtacagaaaggacgtgagacaagaaaagaggaggtgaagacagatgacagagtggttaagatggaccttggtttactcttcctaaggttacacaaatcagatgctgggacctatttttgccagacagtagagcatagctttgtccatacggtccgtaaaatcaccttggaggtagtggaagaggagaaagtcgaggatatgtttaacaaggacgatgaggaggacaggcatcacaggatgccttgtcctgctcagagtagcatctcgcagggagcaaaaccatggtacaaggaattcttgcagctgatcggttatagcaacttccagagagtggaagaatactgcgagaaagtatggtgcacagatagaaagaggaaaaagcttaaaatgtcaccctccaagtggaagtatgccaaccctcaggaaaagaagctccgttccaaacctgagcattaccgcctgcccaggcacacgctggactcctga

SEQ ID NO: 43979 - DNA, 2510 bp, Homo Sapiens
atgaagttcgccgagcacctctccgcgcacatcactcccgagtggaggaagcaatacatccagtatgaggctttcaaggatatgctgtattcagctcaggaccaggcaccttctgtggaagttacagatgaggacacagtaaagaggtattttgccaagtttgaagagaagtttttccaaacctgtgaaaaagaacttgccaaaatcaacacattttattcagagaagctcgcagaggctcagcgcaggtttgctacacttcagaatgagcttcagtcatcactggatgcacagaaagaaagcactggtgttactacgctgcgacaacgcagaaagccagtcttccacttgtcccatgaggaacgtgtccaacatagaaatattaaagaccttaaactggccttcagtgagttctacctcagtctaatcctgctgcagaactatcagaatctgaattttacagggtttcgaaaaatcctgaaaaagcatgacaagatcctggaaacatctcgtggagcagattggcgagtggctcacgtagaggtggccccattttatacatgcaagaaaatcaaccagcttatctctgaaactgaggctgtagtgaccaatgaacttgaagatggtgacagacaaaaggctatgaagcgtttacgtgtcccccctttgggagctgctcagcctgcaccagcatggactacttttagagttggcctattttgtggaatattcattgtactgaatattacccttgtgcttgccgctgtatttaaacttgaaacagatagaagtatatggcccttgataagaatctatcggggtggctttcttctgattgaattcctttttctactgggcatcaacacgtatggttggagacaggctggagtaaaccatgtactcatctttgaacttaatccgagaagcaatttgtctcatcaacatctctttgagattgctggattcctcgggatattgtggtgcctgagccttctggcatgcttctttgctccaattagtgtcatccccacatatgtgtatccacttgccctttatggatttatggttttcttccttatcaaccccaccaaaactttctactataaatcccggttttggctgcttaaactgctgtttcgagtatttacagcccccttccataaggtaggctttgctgatttctggctggcggatcagctgaacagcctgtcagtgatactgatggacctggaatatatgatctgcttctacagtttggagctcaaatgggatgaaagtaagggcctgttgccaaataattcagaagaacgaggtcactcggacactatggtgttcttttacctgtggattgtcttttatatcatcagttcctgctataccctcatctgggatctcaagatggactggggtctcttcgataagaatgctggagagaacactttcctccgggaagagattgtatacccccaaaaagcctactactactgtgccataatagaggatgtgattctgcgctttgcttggactatccaaatctcgattacctctacaactttgttgcctcattctggggacatcattgctactgtctttgccccacttgaggttttccggcgatttgtgtggaacttcttccgcctggagaatgaacatctgaataactgtggtgaattccgtgctgtgcgggacatctctgtggcccccctgaacgcagatgatcagactctcctagaacagatgatggaccaggatgatggggtacgaaaccgccagaagaatcggtcatggaagtacaaccagagcatatccctgcgccggcctcgcctcgcttctcaatccaaggctcgtgacactaaggtattgatagaagacacagatgatgaagctaacacttgaattttctgaagtctagcttaacatctttggttttcctactctacaatcctttcctcgaccaacgcaacctctagtacctttccagccgaaaacaggagaaaacacataacacattttccgagctcttccggatcggatcctatggactccaaacaagctcactgtgtttcttttcttttcttctggtttaattttaattttctattttcaaaacaaatatttacttcatttgccaatcagaggatgttttaagaaacaaaacatagtatcttatggattgtttacaatcacaaggacatagatacctatcaggatgaagaacaggcattgcaaggaccctctgatgggacggtactgagatatctcggcttccgctcagcccggttttgactggttgaaaccggacattggtttttaaattttttgtcagtttatgtggagaatttttttctttccttcatacccagcgcaaaggcactggccgcacttgcaggaaaagtgcaacttaaagcagtaccttcattcatgaagctactttttaatttgatgtaacttttcttattttgggaagggttgctgggtgggtgggaaatatgatgtatttgttacacata

SEQ ID NO: 43980 - DNA, 1452 bp, Homo Sapiens
atcactcctagctgctcagcaaaccactgaggttcctgggaaaaaaaaaaaaatatctcaagggtgtgttaacttgggacactcgttaactgggggaccttcttgaggcttttttccttctttttaaaaatcatctttgattattcttcttttctagtaaaataatatttagaaaaaataatgtcagagcacagcagaaattcagatcaagaagaacttctcgatgaggagattaatgaagatgaaatcttggccaacttgtctgctgaagaactgaaagaactgcagtcggaaatggaagtcatggcccctgaccccagccttcccgtgggaatgattcagaaagatcaaactgacaagccaccgacaggaaacttcaatcataaatctcttgttgattatatgtattgggaaaaggcatccaggcgcatgctggaagaggaacgagttcctgtcacctttgtgaaatccgagtatttaaaagaaaagctcaataatgaaatagttgcaaataaaagagaatcaaagggcagcagcaatatccaagaaacagatgaagaagatgaagaagaagaagatgatgatgatgacgacgaaggagaagatgatggtgaagagagtgaagaaacgaacagagaagaggaaggcaaagcaaaggaacaaattagaaattgtgagaacaactgccagcaggtaactgacaaagcattcaaagaacagagagacagaccagaggcccaagaacaaagtgagaaaaaaatatcgaaattagatcctaagaagttagctctagacaccagctttttgaaggtaagtacaaggccttcaggaaaccagacagacctggatgggagcttgaggagagttaggaaaaatgatcctgacatgaaggaactcaacctgaacaacattgaaaacatccccaaagaaatgttactggactttgtcaatgcaatgaagaaaaacaagcacatcaaaacattcagtttagccaatgtgggtgcagatgagaatgtagcatttgccttggctaacatgttgcgtgaaaatagaagcatcaccactctcaacatcgagtccaatttcatcacaggtaaagggattgtggccatcatgaggtgtctccagtttaatgagacgctaactgagcttcggtttcacaatcagaggcacatgttgggtcaccatgctgaaatggaaatagccaggcttttgaaggcaaacaacactctcctgaagatgggctaccattttgagcttccgggtcccagaatggtggtcactaatctgctcaccaggaatcaggataaacaaaggcagaaacgacaggaagagcaaaaacagcagcaactcaaggaacagaagaagctgatagccatgttagagaatgggttggggctgccccctgggatgtgggagctgttgggaggacccaagccagattccagaatg

SEQ ID NO: 43981 - DNA, 354 bp, Homo Sapiens
atgctgcgtatagtggaaccttatgttacctttggatttccaaatccgaagtctgtctggcaactcattttgaaacatggagaatccgaggtcaagaataagaccatccctctgacagacaacacagtgattgaggagcacctggggaagtttggcatcatttgcttggaagacctcattcatgaaattgcctccccagggaagcatttccaggagatgccatggttcttgcaccctttccacctctcagtggcctgtcatgctaccaaaaatagagtgggcttcctcaaggagatgggcacacctggctatcggggtgaacgcatcaatcagcttatccgccagctgaactag

SEQ ID NO: 43982 - DNA, 2362 bp, Homo Sapiens
cacaccccatctgggggaaggacaggagctggacagggcaagagctatctcccttggctggagaagaccgggaaaaagggagtactggagccaggaaggaagaagagggagggccagtgctggtaaaggagaagttgggcctgaagaagttagtcctcactcaggagcagaagaccatgttgttggattggaatgactccatccctgagagtgtgcacctcaaagctggggagcgaatttcccagaaaagtgctgagaatggtagaggaggccgtgtgctaaaaccagtccgccccctgctgctccctagggcagcaggagagcccctgccaacccagagaggggcccaggagaagatggggacccctgcggaacaagctcaaggggagcgaaacgtgcctccacccaagtccccactgcggctcatagccaatgccatccgaaggtctctagagcccctcctttccaactctgaaggcgggaagaaggcctgggccaagcaagaatccaaaactttgcccgcacaggcctgcactcgctcattcagccttcggaaaaccaattccaataaagacggggaccagcattcccctgggagaaaccagtcctcagcctttagccctcctgaccctgccctccgcacccacagtttgcccaatcggccatccaaggtctttcctgcacttaggtccccaccctgcagcaagattgaagatgtccccacactcctcgagaaagtgagtttgcaagagaacttcccagatgcttctaagcctccaaagaaaagaatctcacttttttcctccctcagactcaaagacaaatcttttgagagtttcctccaagaatccagacaaagaaaggacatcagggacctctttggcagccccaagaggaaggtgctgcctgaagatagtgcgcaggccctggagaagctgctgcagcctttcaaaagcacctccctgcgccaggcagctcctcctcctcctcctcctcctcctcctcctcctcctcctcctacagcgggaggtgcagactccaagaactttcccctcagagcacaggtaacagaggcttcctcttctgcctcttcaacctcctcctcctctgcagatgaagaatttgatccccagctttccttgcagttaaaggagaagaagacacttagaagaagaaagaagctagaaaaagcaatgaagcagttggttaagcaagaagaattgaaaagactctataaggctcaggccatccagaggcagctggaggaggtggaggagcggcagagggcttctgagatccagggtgtgaggctggagaaggcgttgcgaggagaagcagattcaggcacacaggatgaagcacagcttttgcaggaatggtttaagctggttctggagaagaataaattaatgcgatatgagtcggagctcctaatcatggcccaggaactggaattagaagatcatcaaagcagactggagcagaaactgagagagaaaatgctcaaggaggagagccagaaagatgagaaggatctaaacgaagagcaagaagtattcaccgagctgatgcaagtgattgagcaaagggacaaactcgtcgattccttagaggaacaacgcatcagagaaaaagccgaggaccagcactttgaaagcttcgtattctccagaggctgtcagctgagcaggacttgaggaggcccgtagtccctctccctggctgcacgttgggaccggatcaggccaagtgcaccacacaccctcatgggtctttctgcaggatttatcatccctggaacttgttataccttactgcattttttaaaattaaaattctcttgcacgcatggcagcttcccaaggttcttccagagattcaaatgaagaaaacccaaagactctttggcaattggcagtcaacttcagccaggctctcagactggaggtgttgttggcagatgaccagcattgttttccctagaaagtgacacaaagacttgactttcctgctacttttatcattttccttcccaattcattgagttacatactttaagatttttgagaagctgccttttcattaatatatccatatttgccttttttgtatggatgaccagtttccaaatgtcagaaagaagcagccgcagtttaaagattaggttaatatttaaattgtgtttccagagaaagaggagaaaccttgagattactgattacataaagcaaataactcatatagcaggtgttaattcaatccagggtgaatttaatttaccaggtgcatttataagccttaatataatatacataagcaatgagagcttaatagaacatttgagccttaattttattttaag

SEQ ID NO: 43983 - DNA, 321 bp, Homo Sapiens
cccagtgactgtgggggccactacacagatgaatatggcaggatcttcaactacgctgggccgaaaactgaatgcgtctggatcatcgagttgaaccccggggagatagtcacggtggccattccagacctcaaaggattcgcatgtggcaaagaatacgtggaagtgctggatggacctccagggtctgagtccttggacaggatttgtaaagccttcagtacattctattactcttcttccaacatcatcaccatcaagtactccagagaacccagtcatccacccaccttctttgaaatatattactttgttgacgct

SEQ ID NO: 43984 - DNA, 351 bp, Homo Sapiens
atggacatgagggtccccgctcagctcctggggctcctgctgctctggctcccaggtgccagatgtgtcatctggatgacccagtctccatccttactctctgcatctacaggagacagagtcaccatcagttgtcggatgagtcagggcattagcagttatttagcctggtatcagcaaaaaccagggaaagcccctgagctcctgatctatgctgcatccactttgcaaagtggggtcccatcaaggttcagtggcagtggatctgggacagatttcactctcaccatcagttgcctgcagtctgaagattttgcaacttattactgtcaacagtattatagtttccct

SEQ ID NO: 43985 - DNA, 1260 bp, Homo Sapiens
caattagcggcccaacgccccttccgcgcctcatccgggttcccgggacgggaaagtggcgtggtaaccaggcaactactgatcaatcccctccccggctgatttgcgcatcaggaggaggactgagcttatctgactccagagctttcaggagggaagaaagatgtcagatgaagatgatctagaagactctgagccagaccaggatgattctgagaaagaagaggacgagaaggagacagaggagggggaggactacagaaaagagggggaagagttccctgaggaatggctgcccacccccctcacggaggacatgatgaaggaagggctttctctgctctgtaagacaggcaatgggctggctcatgcttatgtcaagctggaggttaaagagagggacctgacagacatctacttgctgcgctcctacatccatctgcgctatgtggatatttctgagaaccacctgacagacctgtctccactcaactacctcacccacctgctctggctcaaggctgatggcaatcggctgcgaagtgcccagatgaatgaactgccctacctgcagattgctagttttgcttataaccagattactgacactgaaggcatctctcatcctcgtcttgaaaccctgaatctcaaagggaacagcatccacatggtgacaggtctggaccccgagaagttgatcagcctgcacacagtggagcttcgggggaaccagctggaaagcaccctgggaatcaatcttcctaagctgaagaacctctacctggcccaaaacatgctgaagaaggtggaaggcttggaggatctgagcaatctcaccaccttgcatcttcgagacaaccagattgacaccctgagtggcttctccagagaaatgaaatcattgcagtacctcaacctgaggagatcaaagacgctggccttcagacctgatcagactcccaggggcagccaccacatgtatgacagagaacagaggatgcctgtttttgccccaaagctggaaattcatcacaacctgaggcccaggatctgctctgtgccggtcctctgggcagtgtggggtgcagaatggggtgcctaggcctgagcgttgcctggagcctaggccgggggccgccctcgggcaggcgtgggtgagagccaagaccgcgtgggccgcggggtgctggtaggagtggttggagagacttgcgaaggcggctggggtgttcggatttccaataaagaaacagagtgatg

SEQ ID NO: 43986 - DNA, 687 bp, Homo Sapiens
atggaacttggacttggaggcctctccacgctgtcccactgcccctggcctaggcagcaggctccacttggtctctccgcgcagcctgccctgtggcccaccctggccgctctggctctgctgagcagcgtcgcagaggcctccctgggctccgcgccccgcagccctgccccccgcgaaggccccccgcctgtcctggcgtcccccgccggccacctgccggggggacgcacggcccgctggtgcagtggaagagcccggcggccgccgccgcagccttctcggcccgcgcccccgccgcctgcacccccatctgctcttccccgcgggggccgcgcggcgcgggctgggggcccgggcagccgcgctcgggcagcgggggcgcggggctgccgcctgcgctcgcagctggtgccggtgcgcgcgctcggcctgggccaccgctccgacgagctggtgcgtttccgcttctgcagcggctcctgccgccgcgcgcgctctccacacgacctcagcctggccagcctactgggcgccggggccctgcgaccgcccccgggctcccggcccgtcagccagccctgctgccgacccacgcgctacgaagcggtctccttcatggacgtcaacagcacctggagaaccgtggaccgcctctccgccaccgcctgcggctgcctgggctga

SEQ ID NO: 43987 - DNA, 423 bp, Homo Sapiens
caggaattgagtgatctacagcgcgatccacctgctcactgttcagctggacctgtgggagatgacttgttccactggcaagccactattatggggcctcctgatagcgcatatcaaggtggagtcttctttctcactgtacattttccgacagattatccttttaaaccaccaaagattgctttcacaacaaaaatttaccatccaaacataaacagtaatggaagtatttgtctcgatattctgaggtcacaatggtcaccagctctgactgtatcaaaagttttattgtccatatgttctctactttgtgatcctaatccagatgaccccttagtaccagatattgcacaaatctataaatcagacaaagaaaaatacaacagacatgcaagagaatggactcagaaatatgcaatgtaa

SEQ ID NO: 43988 - DNA, 633 bp, Homo Sapiens
ttccaccacgggcaggctgagattgaggccctggccaccctcaaggtgtgggagttgtgtcacacctatggcaagccagagggccccagagatgcctggagggctgtggcccgggatttctgggacaccgtgggcgaggaggaaggaggtggagctggcagtggtggtggcagcgaggagggaacccgaggggtggaggtggaggacctccaggcccacatctgcaagctcatggggattctgcagcaggtgaagctgcagaacagcagcaaggactgggagctgcaggcgctgcaggaccgcatggtctgcatggagaggatcatccccctggcccaggatcatgaggatgagaatgaagaaggtgcccccagtgaccacatgccctcagcctggtccccctcaccaccactgtcaagctgggagtgggtgtcgcggctcatagaggaggaccctgccttccatcgaggtcacctttgctggcttaagcaggagcagctacagctgcagggactgcagcgctgtgagggctggagcgggggtgctgcacaggcccccaacccgctttgtaacccctcacgatgcaagctgcgcttccccttcaagagcaatgcccagcactggagtcctggc

SEQ ID NO: 43989 - DNA, 227 bp, Homo Sapiens
agaacccaatttacccctcaccagattgcattctcacccctatctggccttattgctgctcacaccctctgtcccacaatcaaatcacaagacgatggaggagtggcacctcacaacttgaagcacctgtttggctgggcacagaatttgaggataaaattccaagatgatggaggagttctcccttataacataaagcacctgctcagctgggaacgtaattcgag

SEQ ID NO: 43990 - DNA, 1239 bp, Homo Sapiens
agacgttcgcacacctgggtgccagcgccccagaggtcccgggacagcccgaggcgccgcgcccgccgccccgagctccccaagccttcgagagcggcgcacactcccggtctccactcgctcttccaacacccgctcgttttggcggcagctcgtgtcccagagaccgagttgccccagagaccgagacgccgccgctgcgaaggaccaatgagagccccgctgctaccgccggcgccggtggtgctgtcgctcttgatactcggctcaggccattatgctgctggattggacctcaatgacacctactctgggaagcgtgaaccattttctggggaccacagtgctgatggatttgaggttacctcaagaagtgagatgtcttcagggagtgagatttcccctgtgagtgaaatgccttctagtagtgaaccgtcctcgggagccgactatgactactcagaagagtatgataacgaaccacaaatacctggctatattgtcgatgattcagtcagagttgaacaggtagttaagcccccccaaaacaagacggaaagtgaaaatacttcagataaacccaaaagaaagaaaaagggaggcaaaaatggaaaaaatagaagaaacagaaagaagaaaaatccatgtaatgcagaatttcaaaatttctgcattcacggagaatgcaaatatatagagcacctggaagcagtaacatgcaaatgtcagcaagaatatttcggtgaacggtgtggggaaaagtccatgaaaactcacagcatgattgacagtagtttatcaaaaattgcattagcagccatagctgcctttatgtctgctgtgatcctcacagctgttgctgttattacagtccagcttagaagacaatacgtcaggaaatatgaaggagaagctgaggaacgaaagaaacttcgacaagagaatggaaatgtacatgctatagcataactgaagataaaattacaggatatcacattggagtcactgccaagtcatagccataaatgatgagtcggtcctctttccagtggatcataagacaatggaccctttttgttatgatggttttaaactttcaattgtcactttttatgctatttctgtatataaaggtgcacgaaggtaaaaagtattttttcaagttgtaaataatttatttaatatttaatggaagtgtatttattttacagctcattaaacttttttaaccaaacagat

SEQ ID NO: 43991 - DNA, 2509 bp, Homo Sapiens
gtctcaaatttgcagggagggacggggtggggggtggggggaccccggttgtgcagtttgatattgagggagcccccacctactcgctggggctgcgtaatctggacgtttccaaactgaagcgaaggcgtcgggagactaggcctcagagaaccatggctactgccaagggaatcgccataggcatcgacctgggcaccacctactcctgtgtgggggtgttccagcacggcaaggtggagatcatcgccaacgaccagggcaaccgcaccacccccagctacgtggccttcacagacaccgagcggctcattggggatgcggccaagaaccaggtagcaatgaatccccagaacactgtttttgatgctaaacgtctgatcggcaggaaatttaatgatcctgttgtacaagcagatatgaaactttggccttttcaagtgattaatgaaggaggcaagcccaaagtccttgtgtcctacaaaggggagaataaagctttctaccctgaggaaatctcttcgatggtattgactaagttgaaggagactgctgaggcctttttgggccaccctgtcaccaatgcagtgattaccgtgccagcctatttcaatgactctcaacgtcaggctactaaggatgcaggtgtgattgctggacttaatgtgctaagaatcatcaatgagcccacggctgctgccattgcctatggtttagataaaggaggtcaaggagaacgacatgtcctgatttttgatctgggtggaggcacatttgatgtgtcaattctgaccatagatgatgggatttttgaggtaaaggccactgctggggacactcacctgggtggggaggactttgacaacaggcttgtgagccacttcgtggaggagttcaagaggaaacacaaaaaggacatcagccagaacaagcgagccgtgaggcggctgcgcaccgcctgcgagagggccaagaggaccctgtcgtccagcacccaggccaacctagaaattgattcactttatgaaggcattgacttctatacatccatcaccagagctcgatttgaagagttgtgtgcagacctgtttaggggtaccctggagcctgtagaaaaagcgcttcgggatgccaagatggataaggctaaaatccatgacattgttttagtagggggctccacccgcatccccaaggtgcagcggctgcttcaggactacttcaatggacgtgatctcaacaagagcatcaaccctgatgaggccgtagcatatggggctgcggtacaagcagccatcctgatgggggacaagtctgagaaggtacaggacctgctgctgctggacgtggctcccctgtccctggggctggagacggctgggggcgtgatgactgccctgataaagcgcaactccaccatccccaccaagcagacacagattttcaccacctactctgacaaccaacccggggtgctgatccaggtgtatgagggcgagagggccatgacaaaggacaacaacctgctggggcggtttgacctgactggaatccctccagcacccaggggagttcctcagatcgaggtgacgtttgacattgatgccaatggtattctcaatgtcacagccacggacaagagcaccggcaaggtgaacaagatcaccatcaccaatgacaagggccgcctgagcaaggaggagattgagcgcatggttctggatgctgagaaatataaagctgaagatgaggtccagagggagaaaattgctgcaaagaatgccttagaatcctatgcttttaacatgaagagtgttgtgagtgatgaaggtttgaagggcaagattagtgagtctgataaaaataaaatattggataaatgcaacgagctcctttcgtggctggaggtcaatcaactggcagagaaagatgagtttgatcataagagaaaggaattggagcagatgtgtaaccctatcatcacaaaactctaccaaggaggatgcactgggcctgcctgcggaacagggtatgtgcctggaaggcctgccacaggccccacaattgaagaagtagattaattctttttagaactgaagcatcctaggatgcctctacatgtatttcattcccctcatcttcaaacatcattattattcttgaccagacctgaatctaagttaccatcccttggaaattctggagaaggagtctcatgcaccacctatcacactccctcacatcctgtttctgactttggaatggactcaggaaaactaggcccctctttaaaccgtgtgatgtatttgaatgtctgttatttccagccaccctaacattcttcttcctgtgtggatgcttatttgtcaatcagtaaatttgttcgtaaagaaaattacttctggtatttaggctgtgaatgtaccttgaaggggagagttcatggagagagcatgtgttctctgattgtgaggtcactgtgaatgattaaattggtaagggtaaagta

SEQ ID NO: 43992 - DNA, 1662 bp, Homo Sapiens
atttgaagatagattgcctgaagatatggctagattttacttggctgagatggtgatagcaattgactcagttcatcagctacattatgtacacagagacattaaacctgacaatatactgatggatatgaatggacatattcggttagcagattttggttcttgtctgaagctgatggaagatggaacggttcagtcctcagtggctgtaggaactccagattatatctctcctgaaatccttcaagccatggaagatggaaaagggagatatggacctgaatgtgactggtggtctttgggggtctgtatgtatgaaatgctttacggagaaacaccattttatgcagaatcgctggtggagacatacggaaaaatcatgaaccacaaagagaggtttcagtttccagcccaagtgactgatgtgtctgaaaatgctaaggatcttattcgaaggctcatttgtagcagagaacatcgacttggtcaaaatggaatagaagactttaagaaacacccatttttcagtggaattgattgggataatattcggaactgtgaagcaccttatattccagaagttagtagcccaacagatacatcgaattttgatgtagatgatgattgtttaaaaaattctgtaaaggaaacgatgcccccaccaacacatactgcattttctggccaccatctgccatttgttggttttacatatactagtagctgtgtactttctgatcggagctgtttaagagttacggctggtcccacctcactggatcttgatgttaatgttcagaggactctagacaacaacttagcaactgaagcttatgaaagaagaattaagcgccttgagcaagaaaaacttgaactcagtagaaaacttcaagagtcaacacagactgtccaagctctgcagtattcaactgttgatggtccactaacagcaagcaaagatttagaaataaaaaacttaaaagaagaaattgaaaaactaagaaaacaagtaacagaatcaagtcatttggaacagcaacttgaagaagctaatgctgtgaggcaagaactagatgatgcttttagacaaatcaaggcttatgaaaaacaaatcaaaacgttacaacaagaaagagaagatctaaataaggaactagtccaggctagtgagcgattaaaaaaccaatccaaagagctgaaagacgcacactgtcagaggaaactggccatgcaggaattcatggagatcaatgagcggctaacagaattgcacacccaaaaacagaaacttgctcgccatgtccgagataaggaagaagaggtggacctggtgatgcaaaaagttgaaagcttaaggcaagaactgcgcagaacagaaagagccaaaaaagagctggaagttcatacagaagctctagctgctgaagcatctaaagacaggaagctacgtgaacagagtgagcactattctaagcaactggaaaatgaattggagggactgaagcaaaaacaaattagttactcaccaggagtatgcagcatagaacatcagcaagagataaccaaactaaagactgatttggaaaagaaaagtatcttttatgaagaagaattatctaaaagagaaggaatacatgcaaatgaaataaaaaatcttaagaa

SEQ ID NO: 43993 - DNA, 1454 bp, Homo Sapiens
tctggccgcaaggtggttggcgctgtacgtctatgagtacctgctgcacatcggtgcccagaagtcagcccagaccttcctgtctgagatccgatgggagaagaacatcacgctgggggagccccccgggttcctgcactcctggtggtgcgtcttctgggacctgtactgcgcagcgcctgaccgaagagaggcctgcgagcactccggcgaggccaaggccttccaggactatagcgctgcagccgcccccagccctgtgatggggagtatggccccaggtgacgcaatggccgcaggccccacggcagctggcttcttccagggcccccccggctcccagccatccccccacaaccccaatgcccccgtgatggggcctcacggtcagcccttcatgtcaccgcgcttcccagggggtccccggcccaccctgcggatgctaagtcagcctcccgcaggcctccccggctcccatcccctcctccctggcgccatgaagccctccccacgagcccaggggcatccgagcatgggcggcccaatgcggagggtgacgcctcctcgcggcatggccagcgtggggccccagagctatggaggcggcatgcgacccccacccaactcccttgccggcccaggcctgcctgccatgaacatgggcccaggagttcgtggcccgtgggccagccccagtggaaactcgatcccctactcctcctcatcccctggcagctacacgggacccccaggaggaggtgggccccctggaacacctcatcatgcctagccctggagattctaccaactccagtgaaaacatgtacactatcatgaaccccatcgggccgggtgccggcagggctaatttcccgctcggccctggcccggagggccccatggccgccatgagcgcgatggagcctcaccacgtaagcggatccctgggctcgggcgacatggacgggttgccgaagagctcccccggcgccgtggccggcctgagcaacgccccgggcaccccgcgggacgacggcgagatggcggccgccgggaccttcctgcacctgtttccaagcgaaagcgtactcgccagggatgaccatgagtgtgtgatggggcggcagccccgggcctctgcgggcctaggcttctgcccagcctccctgctcagggtgaggggctgaggtcacaccttgggcacctggactcctggccagtcaaggcttgcccagctgggaggccccacacgaaagattcttaccattttattagaaacgcaaggacctcagagacgttcttttctgtatggaccctttctgccatttgtattttgtcccagagagaaaggctctttggggggcccctctccccaggacgtcagggggtggggcccatcgataaatggaagctggttttggttttttggtaaaaaaaaaaaaaaaaaaaaaaaa

SEQ ID NO: 43994 - DNA, 3221 bp, Homo Sapiens
gactgcccgtacaacctggccaacaaccgccaggtgcgcatgctggccgacctgagcctggtgggctgctacaacctgtccttcatccccgagggcaagcgggcccagctgctgctcgagagcgccaagaagaacctgcggggcatggccttcttcggcctgaccgagttccagcgcaagacgcagtacctgttcgagcggacgttcaacctcaagttcatccggcccttcatgcagtacaacagcacgcgggcgggcggcgtggaggtggatgaggacaccatccggcgcatcgaggagctcaacgacctggacatgcagctgtatgactacgccaaggacctcttccagcagcactaccagtacaagcggcagctggagcgcagggagcagcgcctgaggagccgcgaggagcgtctgctgcaccgggccaaggaggcgctgccgcgggaggacgccgacgagccgggccgcgtgcccaccgaggactacatgagccacatcattgagaagtggtagtggcggtggtggccacggggaggcctcttggggtgtgtgggggataaaacaggacagacgacaggtccacccaagactgtcaagggatgagcatcccaaacctgctccacagaggtagctgcgtcctgaaaaaaaacacagcagggacatagtggggctgggcagggatggggcttgagaaatcaacaggtgcagcccagtgggtcagaggaaagcgtgctcgaaggatgccatggtcagggcagagcctccagagcaggtgttgtgcctggagctgctctcctggcctccttggatttatcgcaaaaactgaaggtttgcgtgagagacgaggacagcggaaagtggacctgccaggccgggagtgtgtccctcaccaactatgcacacagcactcgctcttagctcctctgtccgggctactaggagtgagaccagcttctggcaactgccccagctccaggccatcccatagctcctcctcttctggctgcccccaatgccccgaggcctggggagcccccagctcacccatctgtagctccctcaaagtcagggcccaccccatctgaggcagagaagactcgagtccagcccccaggaagcctgctcccctctctggcccatggtcctgcttcatgctttgggtcaggaggccaaagctgatgttcaggccccacccactccctacagtcctcagaccaaggagggtttgggtagtaggcccgagctgcatttccggccttccgtgggccaactggcagcccaggagtggggaggctttggccaggcatgctgccacttgtgcgtgagtccgcggctggcccttggaggtgaccatccaggcaggcctggctcagactggaagggctggggaccgagggctcccctgcctctgttctcctttctgacccactgggatttgctagcaggctgccccagccccatcaccgaaacacatactcaagagctcaaataccactgctcccaccagcgtacggattaagttcatcaggcttccatcggctggagcatgggaccatagcccctgcccaggagccataccctcggaccacagtggctctgtatggccaggaactgggactcgagctttcagattctcaactagccttggcaaaacagctgtaggcggcctccctgacaacagacactcagccctccccaccctggctctccttgcatttccccatgctccccaccccctggcaaaaggctggccatgctctgttcccagcagccgcgcaggtttccccactggctgcaatggccctactaaaagccacgttgcatatccgttgtaagcacgtgccctgtgccctgtccccattccttatgccctaggaggccaagctggtgtctctaggagggcccacacgggcaccctggatcccccagagagcagattggtgtgctcaggccgcaggctgactcagagctagggcagtgggctctgcaggccacctggctggggttggtgggggtcctctctcctgccccagcttccactcagccaccacagttgccccaccatggggtggagacgtgggtcaccaccggcttgggagcaagcgccttctgcagcacaggaagccgaagctggggtcagatgaggttgctacccctggaggtctggcataagggccccaccctcaggtctcctacactggccccattttactttggggtccaaggacaggatggtcaacagggcagggtggacagcgtgccagcgccgcgcagggccacctccctgggtggatgcatcacactaaggaagcgagtgccaaggggatttagtggtgtggttctttcaaagggaggtcagggtaaatgggaatctgctcggacactcaacatgggggtgggtgcactccttggaggaggaggaacatgttcaggggatcgtgaggtcttgcacaagccacgtggggcaccttggcttcccggcaggaggtggacacccagccagaggcctggctcaaggtgacctcaccttcaccatgggcttcctgggtgcgcgggcctgagcgcaggttgttttgtacatattggaatatgtgttaacttatgccccgcatcccaactcacacggaagcacgggtcttgtctcagtctcttcgctgcatttggaaagcagtctcctctcgggccagcgccgggctgaggtgtccagaggcggcggcagctggcagtgccctcagcccccaagtgtccagcctggcacttcccattcaggccacctgctttgggtcaacagttcctttgccagcagcatctcctaaattgtaaggactctgtccacccggggtcctcccagggctgtgaggacggaaacaggcaggcagtggagctaacagcttagtcaccaggacccccagacctgcaaacgtcccctcctggaaggggaagccaggaacagcagaactgcccacaaaacaaggctgtgaacttttcgggaactggaactgtttaacttgaacccaggattgtttaaagctttatttatttatagattcttcttaaaaaaaaaagtgttgaagaaattttttggttattcatacaaaaaaatgagttgatgatggaaaagcaagtcataatcatctaattgtttttgtctaggtcaagaatgaatgttagctgataaaataaaccctgacaaggaaaaaaaaaaaaaaaaagaa

SEQ ID NO: 43995 - DNA, 1179 bp, Homo Sapiens
gcggctggtagggatgccgaccctaccgaggagcagatggcagaaacaaagagcaacgacgaggagcagttcgagtgccaggaactgctcgagtgccaggtgcaggtgggggcgcccaaggaggaggaggaggaccccggcctggtggccgagggcaaggccgctgccggctggatgttcgatttcctctgcctctctctttgcggagctttccgcgagggccgctccgaggacttccgccggacccgcaacagcgcagaggctattattcatgggctatccagtctaacagcttaccagttgagaacaatatacatatgtcagtttttgacaagaattgcagcaggaaaaacccttgaggcacagttcgaaaatgatgaacgaattacacccttggaatcagccctgatgatttggggttcaattgaaaaggaacatgaccaacttcacgaagaaatacagaatttaattaaaattcaggctacagctgtttgtatggaaaatggcaactttaaagaagcagaagaagtctttgaaagaatatttggtgatccaaattttcatatgcctctcaaaaacaaattgcttatgataatctctcaggaagatacatttcattccttttttcaacacttcaggtacaaccacatgagggagaaaattaagagttatgtgaattatgtgttaagtgaaaaatcatcaacctttctaatgaaggcagcagcaaaagtagtagaaagtaaaagaacaagcacagtaacttctcaagataaacctaatggtaatgatgttgaaatggaaactgaagctaatttggatacaagaaaaagtctcacaagaatcttttcttatctaagttgcaacatggaacccagcaacaagaccttaataagaaataaaagagtaggaactcttcaaagtacaaaaaagaaaaaagaaagcagaagagccactgaaagcagaatacctgtttcaaagagtcaaccggtaactcctgaaaaatatcgagctagaaaaagacaggcatggctttgggaagaagacaagaatctgagatctggcgtgaggaaatacggagagggaaactggtctaaaatactattgcattataaattcaacagctggacaaatgtcatgttaaaagacagatggaggaccatgaagaaactaaaattgatt

SEQ ID NO: 43996 - DNA, 375 bp, Homo Sapiens
atgtcctctcatgttgaaatggacaaagaagcttcatttggcctgtttcataagtgcactaatcccaatcaggttggctttgccattacctttcaaaggtcccaccccttaattctagtgcattggagactcggtttcaacaggcacattttgcagggggtccagcagggaacagatattcagactgtagcagaagagttctggagtcttacgactgggcctcattgtttaagtgagtctctgcttttggactatgaacttcacatgtgtttctctgtttttatcttcccctttagggatgactggagtaggctggagttgggaatttcccttccagcaggtcatttaggatctggttatatgagagcaggttag

SEQ ID NO: 43997 - DNA, 5402 bp, Homo Sapiens
atgctgctcgggtgggcgtccctgctgctgtgcgcgttccgcctgcccctggccgcggtcggccccgccgcgacacctgcccaggataaagccgggcagcctccgactgctgcagcagccgcccagccccgccggcggcagggggaggaggtgcaggagcgagccgagcctcccggccacccgcaccccctggcgcagcggcgcaggagcaaggggctggtgcagaacatcgaccaactctactccggcggcggcaaggtgggctacctcgtctacgcgggcggccggaggttcctcttggacctggagcgagatggttcggtgggcattgctggcttcgtgcccgcaggaggcgggacgagtgcgccctggcgccaccggagccactgcttctatcggggcacagtggacggtagtccccgctctctggctgtctttgacctctgtgggggtctcgacggcttcttcgcggtcaagcacgcgcgctacaccctaaagccactgctgcgcggaccctgggcggaggaagaaaaggggcgcgtgtacggggatgggtccgcacggatcctgcacgtctacacccgcgagggcttcagcttcgaggccctgccgccgcgcgccagctgcgaaacccccgcgtccacaccggaggcccacgagcatgctccggcgcacagcaacccgagcggacgcgcagcactggcctcgcagctcttggaccagtccgctctctcgcccgctgggggctcaggaccgcagacgtggtggcggcggcggcgccgctccatctcccgggcccgccaggtggagctgcttctggtggctgacgcgtccatggcgcggttgtatggccggggcctgcagcattacctgctgaccctggcctccatcgccaataggctgtacagccatgctagcatcgagaaccacatccgcctggccgtggtgaaggtggtggtgctaggcgacaaggacaagagcctggaagtgagcaagaacgctgccaccacactcaagaacttttgcaagtggcagcaccaacacaaccagctgggagatgaccatgaggagcactacgatgcagctatcctgtttactcgggaggatttatgtgggcatcattcatgtgacaccctgggaatggcagacgttgggaccatatgttctccagagcgcagctgtgctgtgattgaagacgatggcctccacgcagccttcactgtggctcacgaaatcggacatttacttggcctctcccatgacgattccaaattctgtgaagagacctttggttccacagaagataagcgcttaatgtcttccatccttaccagcattgatgcatctaagccctggtccaaatgcacttcagccaccatcacagaattcctggatgatggccatggtaactgtttgctggacctaccacgaaagcagatcctgggccccgaagaactcccaggacagacctacgatgccacccagcagtgcaacctgacattcgggcctgagtactccgtgtgtcccggcatggatgtctgtgctcgcctgtggtgtgctgtggtacgccagggccagatggtctgtctgaccaagaagctgcctgcggtggaagggacgccttgtggaaaggggagaatctgcctgcagggcaaatgtgtggacaaaaccaagaaaaaatattattcaacgtcaagccatggcaactggggatcttggggatcctggggccagtgttctcgctcatgtggaggaggagtgcagtttgcctatcgtcactgtaataaccctgctcccagaaacaacggacgctactgcacagggaagagggccatctaccgctcctgcagtctcatgccctgcccacccaatggtaaatcatttcgtcatgaacagtgtgaggccaaaaatggctatcagtctgatgcaaaaggagtcaaaacttttgtggaatgggttcccaaatatgcaggtgtcctgccagcggatgtgtgcaagctgacctgcagagccaagggcactggctactatgtggtattttctccaaaggtgaccgatggcactgaatgtaggctgtacagtaattccgtctgcgtccgggggaagtgtgtgagaactggctgtgacggcatcattggctcaaagctgcagtatgacaagtgcggagtatgtggaggagacaactccagctgtacaaagattgttggaacctttaataagaaaagtaagggttacactgacgtggtgaggattcctgaaggggcaacccacataaaagttcgacagttcaaagccaaagaccagactagattcactgcctatttagccctgaaaaagaaaaacggtgagtaccttatcaatggaaagtacatgatctccacttcagagactatcattgacatcaatggaacagtcatgaactatagcggttggagccacagggatgacttcctgcatggcatgggctactctgccacgaaggaaattctaatagtgcagattcttgcaacagaccccactaaaccattagatgtccgttatagcttttttgttcccaagaagtccactccaaaagtaaactctgtcactagtcatggcagcaataaagtgggatcacacacttcgcagccgcagtgggtcacgggcccatggctcgcctgctctaggacctgtgacacaggttggcacaccagaacggtgcagtgccaggatggaaaccggaagttagcaaaaggatgtcctctctcccaaaggccttctgcgtttaagcaatgcttgttgaagaaatgttagcctgtggttatgatcttatgcacaaagataactggaggattcagcactgatgcagtcgtggtgaacaggaggtctacctaacgcacagaaagtcatgcttcagtgacattgtcaacaggagtccaattatgggcagaatctgctctctgtgaccaaaagaggatgtgcactgcttcacgtgacagtggtgaccttgcaatatagaaaaacttgggagttattgaacatcccctgggcttacaagaaacactgatgaatgtaaaatcaggggacatttgaagatggcagaactgtctcccccttgtcacctacctctgatagaatgtctttaatggtatcataatcattttcacccataatacacagtagcttcttcttactgtttgtaaatacattctcccttggtatgtcactttatatcccctggttctattaaaatatccatatatatttctataaaaaaagtgtttgaccaaagtaggtctgcagctatttcaacttccttccgtttccagaaagagctgtggatattttactggaaattaagaacttgctgctgttttaataagatgtagtatattttctgactacaggagataaaatttcagtcaaaaaaccattttgacagcaagtatcttctgagaaattttgaaaagtaaatagatctcagtgtatctagtcacttaaatacatacacgggttcatttacttaaacctttgactgcctgtatttttttcaggtagctagccaaattaatgcataatttcagatgtagaagtagggtttgcgtgtgtgtgtgtgatcatactcaagagtctaaaaactagtttccttgtgttggaaatttaaaaggaaaaaaatcgtatttcactgtgttttcaatttatattttcacaactactttctctctccagagctttcatctgatatctcacaatgtatgatatacgtacaaaacacacagcaagttttctatcatgtccaacacattcaacactggtatacctcctaccagcaagcctttaaaatgcatttgtgtttgcttatttgttttgttcaagggttcagtaagacctacaatgttttgtatttcttgacttattttattagaaacattaaagatcacttggtagttagccacattgagaagtggttatcattgttaatgtggttaatgccaaaaagtggttaatattaataagactgtttccacaccataggcaataatttcttaatttaaaaaatctaagtatattcctattgtactaaatatttttcccaactggaaagcacttgattgtacccgtaagtgtttgagtgatgacatgtgatgattttcagaaagttgttgtttttgtttccatagcctgtttaagtaggttgtaagtttgaatagttagacatggaaattattttataagcacacacctaaagatatctttttagatgataaaatgtacacccccccatcaccaacctcacaacttagaaaatctaagttgtttgatttctttgggatttcttttgttgtgaaacactgcaaagccaatttttctttataaaaattcatagtaatcctgccaaatgtgcctattgttaaagatttgcatgtgaagatcttagggaaccactgtttgagttctacaagctcatgagagtttatttttattataagatgtttttaatataaaagaattatgtaactgatcactatattacatcatttcagtgggccaggaaaatagatgtcttgctgttttcagtattttcttaagaaattgcttttaaaacaaataattgttttacaaaaccaataattatcctttgaattttcatagactgactttgcttttgacgtagaaattttttttctcaataaattatcactttgagaaatgaggcctgtacaaggctgataacctatatgtgatggagatcacccaatgccaagggcagaaagcaaacctagttaaataggtgagaaaaaaaataataatcccagtgccatttgtctgtgcaaagagaattaggagagaggttaatgttacttttttccattttggaaataattttaatcaagtaactcaaatgtgacaaaatttatttttattttttgtggttatattcccaacaacattaaaaaatactcgaggcataaatgtagttgtctcctactctgcttctcttactatactcatacatttttaatatggtttatcaatgattcatgtttccctcaaatagtgatggtttacacctgtcatggaaacaatcctagagagctcagagcaattaaaccactattccatgcttttaagtagttttctccacctttttcttatgagtctcactagattgactgaggaatgtatgtctaaattcctggagaagatgatatggattggaaactgaaattcagagaaatggagtgttcaatagataccacgaattgtgaacaaagggaaaattctatacaactcaatctaagtcagtccactttgacttcgtactgtctttcacctttccattgttgcatcttgaattttttaaaatgtctagaattcaggatgctaggggctacttctttaaaaaaaaaaaaaaaaaagaa

SEQ ID NO: 43998 - DNA, 3578 bp, Homo Sapiens
aagcccaaaacgaaaagagccaagagattccttgagaagagagaaccgaaactcaatgaaaatattaaaaatgccatgctgattaaagggggaaatgcaaatgcaacagtgacaaaagtacttaaagatgtgtatgcactgaaaaaaccatacggtgtactatataaaaagaaaaatattacaagaccttttgaggatcagacatcactggaattcttttcaaagaagtcagattgttctttattcatgtttggctcccataataagaagcggccaaataatctagtaataggtcgtatgtatgactaccatgtgctggatatgattgaattaggtattgagaattttgtctctctaaaagacattaagaacagtaaatgtcctgagggaacaaaacccatgctgatatttgctggcgatgatttcgatgtaacagaagattatagaagactaaaaagtcttcttattgatttcttcagaggccccacagtatcaaatatccgcctggctggattagagtatgttctgcacttcactgcactgaatgggaagatttactttcgaagctataagttgctgttgaagaaatctggttgcagaacaccacggattgaattggaagagatgggaccctcattggatctggttctgaggaggacacacctggcatcggatgacctttataaattatctatgaaaatgccaaaagctctcaagccaaagaagaagaaaaatatttcccatgatacttttggtacaacttatggaaggattcatatgcagaagcaagacctaagcaaactacaaaccaggaaaatgaaggggttgaagaagcgacctgcagaaaggataacagaagaccacgagaaaaagtcaaaaagaattaaaaaaaattgatggaacttagccagccactactgtttcattgtgttctacttaagagaattatcaagcgtcaatccattcagagtttcttataagatcttattatatatttttataacatgataattttacgatatattattatgaacagtaatatactagtattaagtgtaaagtaagccttttatttgagacattacaccctggtgtgccattttctcttgtgatatcccctgccctccacaaattcttctttctcattgggtggatggatgggtgaggagggatctccataaccattgggatttttttgaatttctggccttagctaaagaaagccacagaaagccggacccgcaggagctgtgtaaacaatctcagtatgaattacctggaaagttaacctcctctcccaacatggatctacattctgatttttattttctacttttattttgcctgaaatcctactcgttgacatttgagattttaagctttgtggctgaaaatatatagatctctgagagggatgtctgctatctgattattgataaattacactactgttgattgttttaagagactctactactaagtagagcccaccccgcttctctgagacgaaacctgtgttttttggttggtttgtttttaagagatggggtcttgttctgtcacctagggtggagtgcagtggcacaatcacagctcactgcagccctgaactcctgggctcaagtaatcctcctgcctgagcctcttacgtagctgggattacaggcatgagccactgagccctactttttttttttaaagcaatgaggtcttgctgtgttgcccaggctggactcaaattcctgggctcaagtgatcctcccacttcaccttcctgagcagccggaactacagatgttggtccactgcacctggcagaaaagaagttttgataggggcagaaatgaaaaaggagaaaacaggtgagttttaaggtgcagggcactttagggtactgggtagccctaggtagctaaaggttgcatgaaggccctgggcgtttgcagatggtgtagaagccagccaaagcctaactacttgttttgaaagtttcttgaagacaggccttgtgcctaggaaaacagaagctttcttcttccttctactagtattgcatacttgtttttctggaatagggtgttaagttccttgattcagtccttgacaaggaatctcctttatacaagtgccagtaatgttgtaaaggtacagacatacgcaaatcataatttgttacatgaagtaccagtgctttcttttttgttgttttttgagacagagtctcgctctgtcgctcaggctggagtgcagtggcgcgatttcagttcactgcaacctccacctcccaggttcaagcattcttctgcctcagcctcccgagtagctgggattacaggcacccaccaccacgcctggctgattttttgtagagacagggtttcacttcaattccatgttagagagctccgtgcctgtgtatacatgcctttatgtaagcttgctcagctacagatcaacaatgctggcactaagcaaaagttcgagcctcagctttaccttctaccctttcccttctcttttgaatccattccttagctttccctagtcctctccggatagctgttactctcctcttgccagaaaaatgaaggagctggtatcatttatactttttgtttgattatacgtttaaccaaagaccatacagtctcgtacctgaatcagacatttgcactttatatctaaatgagaagaaggggctcagataagtcgtttgctgccatctggaggtagatggacaatagctgagaaggggagccatgaaaagaacatcaggagtgatggacgcatagtccttccccaaagcctcgctcatcactggtaggaggcaaagcagtgggtcctcctcaccagccgcttacgggaccctgccatgcctggacccctctatcaggaagacctaccccagcactactggaaaatcagccaatcttaacccaaagatggccatgatttctgtatgtgagacgtcttaagggtgtttttgtttgttttaatcagccctcttgtttgagatttggcaatacatttctgttttctaggtaatttctgtgtctgatggtagaggatctaataagtattggaatgcttcctatttgctgatagaagtaccaaatagtattattgaagtctaacaaagactttttgttgagaacaccttgtagtgttgtactatctggaactcttgagctgccatttatatcactttttgtggagagcacatcttgattttcagttgtccttactttagaatacaacacacataaattggagactatgtattcatttcaatggaggtggtaaattgcctgttttaagttttacttaatgttgggttttggtagatgaggaaagcattttggttatttgttttgttttaaataccaaatttcttatattttttctggaatattaatactattaccaagctattatttcatggaatttgggtttctttttttttgtttttttaaaattaagtgctgtttgttttcttggttattgaacataatccaaagtagagatgttattactcaattcaagaaaagaaagggctaataaaacttaacttcaagtca

SEQ ID NO: 43999 - DNA, 2038 bp, Homo Sapiens
atggatagcacaaaggagaagtgtgacagttacaaagatgatcttctgcttaggatgggacttaatgataataaagcaggaatggaaggattagataaagagaaaattaacaaaattataatggaagccacgaaggggtccagattttatggaaatgagctcaagaaagaaaagcaagtcaaccaacgaattgaaaatatgatgcaacaaaaagctcaaatcaccagccaacagctaagaaaagcacaattacaggttgacagatttgcaatggaattagaacaaagccgaaatttgagcaataccatagtgcacattgacatggatgctttctatgcagctgtagaaatgagggacaatccagaattgaaggataaacccattgctgtaggatcaatgagtatgctgtctacttcaaattaccatgcaaggagatttggtgttcgtgcagccatgccaggatttattgctaagaggctgtgcccacaacttataatagtgccccccaactttgacaaataccgagctgtgagtaaagaggttaaggaaatacttgctgattatgatcccaattttatggccatgagtcttgatgaagcctacttgaatataacaaagcacttagaagaaagacaaaattggcctgaggataaaagaaggtatttcatcaaaatgggaagctctgtagaaaatgataatccaggaaaggaagttaataaactgagtgagcatgaacgatccatctctccactactttttgaagagagtccttctgatgtgcagcccccaggagatcctttccaagtgaactttgaagaacaaaacaatcctcaaatactccaaaactcagttgtttttggaacatcagcccaggaagtggtaaaggaaattcgtttcagaattgagcagaaaacaacactgacagccagtgcaggtgttcggatatctagttttcccaatgaagaggacaggaaacaccaacaaaggagcattattggctttttacaggctggaaaccaagccctgtcagccactgagtgtacattagagaaaactgacaaagataagtttgtaaaacctctagaaatgtctcataagaagagtttctttgataaaaaacgatcagaaaggaaatggagtcaccaagatacatttaaatgtgaagccgtgaataaacaaagtttccagacatcacaaccattccaagttttaaagaagaagatgaatgagaatttggaaatatcagagaattcagatgactgtcagatacttacctgtcctgtttgctttagggctcaagggtgcatcagtctggaagccttgaataaacatgtagatgaatgtcttgatggaccttcaatcagtgaaaactttaaaatgttctcgtgttcacatgtttctgctaccaaagttaacaagaaagaaaatgttcctgcttcttcactttgtgagaagcaagattatgaagcccatccaaaaattaaagaaatatcttcagtagattgtatagctttagtagatactatagataactcatctaaagcagaaagcatagatgctttaagtaataagcatagcaaggaagaatgttctagtctcccaagcaagtcttttaatattgaacactgtcatcagaattcttcttctactgtttcattggaaaacgaagatgttggatcatttagacaagaataccgccagccttacttatgtgaagtgaaaacaggccaagctctagtttgtcctgtttgtaacgtagaacaaaagacttcagatctaaccctgttcaatgtgcatgtggatgtttgcttaaataaaagttttatccaagaattaagaaaggataaatttaacccagttaatcaacccaaagaaagctccagaagtactggtagctcaagtggagtacagaaggctgtaacaagaacaaaaaggccaggattgatgacaaagtactcaacatcaaagaaaataaaaccaaacaatcccaaacatacccttgatatattttttaagtaaacattgaacattttatcat

SEQ ID NO: 44000 - DNA, 1519 bp, Homo Sapiens
gagcggcccgggctacacgttaaaaacactaaggggagcgcgcgaagctgaacttggcgctcgatgggggccgttagccgccctagagcgcgcggagccgcagaggcgtagctggactacaacgcagtgcatctcgggaggccaactcgactggactgggtgagaggacagaggtggctcgatgggcggcccgaaggccggggatcatggcgggaaggcgggcccagacaggttcagccccgccccgacccgccgctccccaccccccggcctcgcgtgccttcccgcagcactgccgtccccgggatgctgagcgcccaccgtctccccgcagccccctcatgcccggctgcgagctgcccgtgggcacctgcccggacatgtgcccggccgccgagcgcgcccagcgcgaaagggagcaccgcctgcaccgcttggaggtggtgccgggttgccgccaggacccgccccgcgcggatccgcagcgcgcggtgaaggagtacagccgacccgccgccggcaagccccggcccccgcccagccagttgcgtccgccctccgtgctgctggccaccgtgcgctacctggccggtgaggtggcggagagcgccgacatcgcccgcgccgaggtggccagcttcgtggcagaccgcttgcgagctgtgctcctggacctggcgctgcagggagcgggcgacgccgaggcagctgtggtgctggaggcggcgctggccacgctgctgaccgtagtggcgcggctcgggcccgacgcggcgcggggacccgcggacccggtgctgctgcaggcccaggtgcaggagggcttcggctcgctgcggcgctgctacgcgcggggcgccgggccgcacccccgccaacccgccttccagggcctctttctgctctataacctgggctcggtggaagccctgcatgaggttctacagctgcctgctgccctgcgcgcctgcccgcccctccgcaaggccttggcggtagatgctgccttccgagagggcaatgctgcccgcctgttccgtctgctccagaccctgccctacctgccaagttgcgctgtgcagtgccatgtgggccatgcccgccgggaagccctggcccgcttcgctcgtgcctttagcacccccaagggccagaccttgcctctgggcttcatggtcaacctcttggccctggatggactcagggaagcacgggacctgtgccaggcccacgggctgcccttggacggagaggagagagttgtgttcctgaggggtcgctacgtggaggaagggctaccgcctgccagtacgtgcaaggtgttagtggagagcaaacttcgaggacgtaccctggaggaggtggtcatggcagaggaggaagatgagggcacggacagacctgggtccccagcctgaggagggagcgtgagcctcccagagccccaggactgggccagagcacttaggtttctttttccatggtttccaggtaataaaaggaacttgttttgttggta

SEQ ID NO: 44001 - DNA, 411 bp, Homo Sapiens
atggcacgaacaaagcaaacagctcgcaagtccaccggcggcaaagcgccgcgcaagcagctggccaccaaggcggctcgcaagagcgctccggccaccggtggcgtcaagaagccccaccgctaccgccccggcaccgtggccctgcgcgagatccgccgctaccagaagtcgaccgagctgctaatccggaagctaccttttcagcgcttggtacgggagatcgcacaggactttaagaccgatctgcgcttccagagctcggcggtgatggcgctgcaggaggcttgcgaggcctacctggtggggctatttgaggataccaacctgtgcgccattcacgccaaacgcgtcactattatgcctaaagacatccagcttgcgcgccgcatccgaggggagagggcataa

SEQ ID NO: 44002 - DNA, 306 bp, Homo Sapiens
ccagcagcaactgtagctcatagcccaagaatttgtgaagtttgggcttgcaacttggatgaagagatgaagaaaattcgtcaagttatccgaaaatatcattacgttgctatggtcaccgagtttccaggtgtggttgcaagaactattagagaattgaggagcaatcctgactatcagtatcaactattgcagtgtaatgtagacttcttaaagataattcagctaggactgacatttatgaatgagcaaggtgaataccctccaggaacttcaacttggcagcttaattttaaatttaatttg

SEQ ID NO: 44003 - DNA, 966 bp, Homo Sapiens
atgatgttccgagaccaggtgggcatcctcgctggctggttcaaaggctggaatgagtgtgagcagacagtggccctcctgtcacttctgaaacgggtcacccgtacccaggcccgcttcctgcagctctgcctggagcactcactggcggactgcaatgacatccacctgctggagtcggaggccaacagtgctgccatcgtcagccagtggcagcaggagtccaaagagaaggtggtgtccctcctgctgtcccaccttcccctgcttcagccaggcaacacagaggccaagtcggagtacatgaggctactgcagaaagtgctggcctactcaatcgagagcaatgctttcatcgaggagagtcgccagctgctttcctatgccctcatccacccagccaccacactggaggaccgcaacgcactggccctctggctgagccacctggaagagcggttggctagtggcttccgctcccggccagagccctcctaccattcacgtcaaggctcagatgagtgggggggccctgcagagctaggccctggggaggcagggccaggctggcaggacaagccaccccgggaaaatggacacgtgcccttccacccatccagctcagtgccgccagccatcaacagtattgggagcaatgcaaacacaggtctcccctgccaaatccaccctagcccactgaagcgctccatgtcactcatccctacaagcccccaggtccctggtgagtggccgagtccagaggagcttggggcccgggctgcttttaccacgcccgatcacgcacctctctcgccccagagcagcgtggcctcctctggcagtgagcagacagaggagcagggctccagccggaacaccttccaggaggatggcagtggcatgaaagatgtgccctcatggctcaagagcctccgtttgcacaagtatgcagccctcttctcacag

SEQ ID NO: 44004 - DNA, 1200 bp, Homo Sapiens
atggcggctccgagcccgagcggcggcggcggctccgggggcggcagcggcagcggcacccccggccccgtagggtccccggcgccaggccacccggccgtcagcagcatgcagggtaaacgcaaagcactgaagttgaattttgcaaatccacctttcaaatctacagcaaggtttactctgaatcccaatcctacaggagttcaaaacccacacatagagagactgagaacacacagcattgagtcatcaggaaaactgaagatctcccctgaacaacactgggatttcactgcagaggacttgaaagaccttggagaaattggacgaggagcttatggttctgtcaacaaaatggtccacaaaccaagtgggcaaataatggcagttaaaagaattcggtcaacagtggatgaaaaagaacaaaaacaacttcttatggatttggatgtagtaatgcggagtagtgattgcccatacattgttcagttttatggtgcactcttcagagagggtgactgttggatctgtatggaactcatgtctacctcgtttgataagttttacaaatatgtatatagtgtattagatgatgttattccagaagaaattttaggcaaaatcactttagcaactgtgaaagcactaaaccacttaaaagaaaacttgaaaattattcacagagatatcaaaccttccaatattcttctggacagaagtggaaatattaagctctgtgacttcggcatcagtggacagcttgtggactctattgccaagacaagagatgctggctgtaggccatacatggcacctgaaagaatagacccaagcgcatcacgacaaggatatgatgtccgctctgatgtctggagtttggggatcacattgtatgagttggccacaggccgatttccttatccaaagtggaatagtgtatttgatcaactaacacaagtcgtgaaaggagatcctccgcagctgagtaattctgaggaaagggaattctccccgagtttcatcaactttgtcaacttgtgccttacgaaggatgaatccaaaaggccaaagtataaagagcttctgaaacatccctttattttgatgtatgaagaacgtgccgttgaggtcgcatgctatgtttgtaaaatcctggatcaaatgccagctactcccagctctcccatgtatgtcgattga

SEQ ID NO: 44005 - DNA, 1929 bp, Homo Sapiens
gcccaagagagcaaaccttggtttgctgaaaatcagcagataaggcaattgaaagggaagaagaacaacgactatcgtctattccacaagatgagtaacagccaccctcttcgcccctttactgcagtgggggaaattgatcatgtgcacattttgtctgaacatattggtgccttgttgattggggaagaatatggcgacgtcacattcgtggtggaaaagaaacgttttcctgcccacagggtaattttagcagccaggtgccaatattttcgagcattattatatggtggaatgcgagagtctcagcctgaagcagaaattcctctccaagacaccactgcagaagcattcacaatgctactcaaatatatctacactgggcgggcaacgctgacagatgagaaggaggaggtgctgctggactttttgagcctggctcataaatatggatttccagagctagaggattctacctctgagtatctctgcaccatacttaacattcagaatgtctgcatgacttttgatgttgccagtctctactcacttcccaagttaacttgtatgtgctgcatgtttatggataggaatgctcaggaagtcctctcaagtgaaggtttcctctccctttctaagacagcacttttaaacatcgtgttaagagactcatttgcagctcccgaaaaagatattttcctagccttattaaactggtgtaagcacaattcaaaggagaatcatgctgaaatcatgcaggctgtgcgtttacctctcatgagcctcacagagcttctgaatgttgtgaggccttcaggactgctgtctcctgatgccatcctggatgccattaaagtgcgatctgagagccgggatatggacctcaattatagaggcatgctcataccagaagaaaacattgcaactatgaagtatggagcccaagttgtaaagggggagctgaaatcagccttattagatggtgatactcaaaattatgatttggatcatggattttcaaggcacccaattgatgatgactgccgttccggcatcgagattaagctaggtcagccatccattatcaatcacatacggatactcttgtgggaccgagatagccggtcttactcatacttcattgaagtgtcaatggatgaacttgattgggtcagagtgatagatcattcacaatatctgtgtcgttcttggcagaaattatattttccagcccgtgtctgcaggtatattcgaattgttgggactcacaacacagtgaacaagatttttcacattgtggcttttgaatgtatgtttacaaacaaaaccttcactcttgagaaggggctgatagttcccatggagaatgttgcaacaattgctgattgtgccagtgtgattgaaggagtcagtcggagccgaaatgccttgctgaatggggacactaagaattatgactgggattctggctacacatgtcaccagctaggaagtggtgcgattgtggttcagttggcacaaccgtacatgattgggtcaatacggttactactttgggattgtgatgatcgaagctatagctactacgttgaggtttctaccaaccagcaacagtggaccatggttgctgacagaactaaagtctcctgcaagtcctggcagtcagtaacttttgaaaggcagcctgcctccttcatccgtatcgttgggacacacaacacagcaaatgaggtgttccactgtgtccactttgagtgtccagagcagcagagcagccagaaggaggaaaatagtgaggaatcggggacaggggacaccagcctggccggtcagcagctcgactcccatgcgctgcgggcgcctagtggcagctcactaccctccagcccaggctccaactcacgctcccccaaccggcagcaccaataa

SEQ ID NO: 44006 - DNA, 1303 bp, Homo Sapiens
gtgggacgcgcgcggctgtgagcctgcgggacatgccccccgcgccggctccttgctggcggccatgaagaggcagaacgtgcggactctgtccctcatcgtctgcaccttcacctacctgctggtgggcgccgccgtgttcgacgccctcgagtcggaccacgagatgcgcgaggaggagaaactcaaagccgaggagatccggatcaaggggaagtacaacatcagcagcgaggactaccggcagctggagctggtgatcctgcagtcggaaccgcaccgcgccggcgtccagtggaaattcgccggctccttctactttgcgatcacggtcatcaccaccataggttatgggcacgctgcacctggcaccgatgcgggcaaggccttctgcatgttctacgccgtgctgggcatcccgctgacactggtcatgttccagagcctgggcgagcgcatgaacaccttcgtgcgctacctgctgaagcgcattaagaagtgctgtggcatgcgcaacactgacgtgtctatggagaacatggtgactgtgggcttcttctcctgcatggggacgctgtgcatcggggcggccgccttctcccagtgtgaggagtggagcttcttccacgcctactactactgcttcatcacgttgactaccattgggttcggggactacgtggccctgcagaccaagggtgccctgcagaagaagccgctctacgtggcctttagctttatgtatatcctggtggggctgacggtcatcggggccttcctcaacctggtcgtcctcaggttcttgaccatgaacagtgaggatgagcggcgggatgctgaagagagggcatccctcgccggaaaccgcaacagcatggtcattcacatccctgaggagccgcggcccagccggcccaggtacaaggcggacgtcccggacctgcagtctgtgtgctcctgcacctgctaccgctcgcaggactatggcggccgctcggtggcaccgcagaactccttcagcgccaagcttgccccccactacttccactccatctcttacaagatcgaggagatctcaccaagcacattaaaaaacagcctcttcccatcgcctattagctccatctctcctgggttacacagctttaccgaccaccagaggctgatgaaacgccggaagtccgtttaggggaactaactgcacattcaagagaggcgtccgtggatgctgggtctcactgccaaagccgaacacggcttcgggatttctgccttctcaagtggacctctgctgtgctgggcg

SEQ ID NO: 44007 - DNA, 789 bp, Homo Sapiens
ctggtcatctacagccgctccttcctggagtacaacagctggcatgtgctcagctccgtcaacatctgctgctccaagctggtgaagtgccggctgcagaagggcaaggtgaccattgcagagttcatctggctggccacacgcagccaaatggaggccactgagccacaggatatggtggtctatgaccagagcacacgggacgccagtgtgctggccgcagaccgcttcctctccatcctgctgagcaagctggacagctgcttcgacagcaaagacgttctgaacaaggatctgacgacacagaatggaataagctacgtcctcaatgccagcaactcctgccccaagcctgacttcatctgcgagagccgcttcatgcgggtccccatcaacgacaactactgtgaaaagctgctgccctggctggacaagtctatggagttcatctgtaaaggcaagctgtccagctgccaagtcatcgtccactgtctggtcggtatctcccactctgccaccatcgccatcgcctacatcatgaagaccatgggcatatcctccgacgacacctacaggttcatgaaggataggcgccagtccatctcgcccaacttcaacttcctgggccagctgctggaatcaagcgctgcagctgccagatggagttcgaggagggcatcctggaggggcgcactcgcggcgaggagctggccgccatgggcaagcaggcgagcttctcgggcagcgtggaggtcatcgagatgtcctgacccctccgctgcccttagc

SEQ ID NO: 44008 - DNA, 513 bp, Homo Sapiens
atggcggcagcggagcatcgtcattcttcaggattgccctactggccctacctcacagctgaaactttaaaaaacaggatgggccaccagccacctcctccaactcaacaacattctataactgataactccctgagcctcaagacacctcccgagtgtctgctcactccccttccaccctcagcggatgataatctcaagacacctcccgagtgtgtgctcactccccttccaccctcagcggatgataatctcaagacacctcccgagtgtgtgctcactccccttccaccctcagcggatgataatctcaagacacctcctgagtgtctgctcactccccttccaccctcagcggatgataatctcaagacacctcccgagtgtctactcactccccttccaccctcagctctaccctcagctccaccctcagcggatgataatctcaagacacgtgccgagtgttgctccatccccttccaccctcagcggatgataatctcaagacac

SEQ ID NO: 44009 - DNA, 438 bp, Homo Sapiens
atggctgccaaagtgtttgcgtccatcggcaagtttggcctggccttagctgttgcaggaggcgtggtgaactctgctttatataatgtggatgctgggcacagagctgtcatctttgaccgattccatggagtacaggacattgtggtaggggaagggactcactgtctcatcccctgggtacagaaaccaattatctttgactgccgttctcgaccacgtaaagtgccagtcatcgccggcagcaaagacttacagaatgtcaacatcacactgcgcatcctcttctgggccgttgctagccagtttcgcatcttcaccagcatcggagaggactatgatgagcgtgtgctgctgtccatcacgaccggcatcctcaagtcagcgatgactcgctttgatgctggagagctaatcacccagagagagctggtctcc

SEQ ID NO: 44010 - DNA, 294 bp, Homo Sapiens
tttgagatgccttgcgagtaccacctgtttgtagaggagtttcgcaaaaacccaggaatcacctggatcatgaagcctgtagcccggtctcaagggaaaggcatcttcctcttccgtaggctgaaggacatcgtggactggaggaaggacacaagaagctctgacgaccagaaagatgatattcccgtggagaactatgtggctcagcgttacattgaaaatccttacctgataggaggccgcaagtttgacctgcgtgtctatgtgctggtgatgtcggtgagtaacaaaggt

SEQ ID NO: 44011 - DNA, 885 bp, Homo Sapiens
cattacgacaaagccaaggagctggaccccagcaacatgacttacattaccaatcaagcagcggtatactttgaaaagggcgactacaataagtgttgggagctttgtgagaagtccattgaagtggggagagaaaacagagaagactatctacagattgccaaagtgtgtgctcgaattggcaactcctacttcaaagaagaaaagtacaaggatgccatccatttctataacaagtctctggcagagcaccgaactccagatgtgctcaagaaatgccagcaggcagagaaaatcctgaaggagcaagaacggctggcctacataaaccccgacctggctttagaagagaagaacaaaggcaacgagtgttttcagaaaggggactatccccacgccatgaagcattatacggaagccatcaaaaggaacccgaaagatgccaaattatacagcaatcgagctgcctgttacaccaaactcctgttccagctggcactcaaggactgtgaagaatgtatccagctagaaccgaccttcatcaagggttatacacggaaagccgttgccctggaagcgatgaaggactacaccaaagtcatggatgtgtaccggaaggcgctagacccggactccagctgtaaggaggcggcagacggctaccagcgctgtatgatggcgcagtacaaccggcaccacagccccgaagatgtgaagcgacgagccatggccgaccccgaggtgcagcagatcatgagtgacatagccatgcaccttatcctggagcagatgcagaaggaccccgcactcagcgaacacttaaagaatcctgtaatcgcaaagaagatccagaagctgatggatgtgggtctgattgcaattcga

SEQ ID NO: 44012 - DNA, 2062 bp, Homo Sapiens
gagacagagtctcgctctgtagcccaggctagagtgcagtggcgcaacctcggttcactgcaacctctgcctcctaggttcaaatcattctcctgcctcagtctcccaagtagctgatattacaggcgcccgccaccacacccggctttttgtatttgtaatagagacggggtttcaccatgttggccaggctggtcttgaactcttggtctcaagtaatctacccacctcagcctcccaaagtgctgggattacaggcatgggccaccatgcctggctaaacacacacttcttatcttgcagttctgcagtccagaagtcaacgatcagtttcactgggctaaagttgagttgcccatagggctagttctttctagaggctctaagagagaattcatttcattagtttttccagcttctagggctgcattccttggctcctggctccttcaaagccagcagtgcagcatcttcagatctctctgaccctcctacctccctctttcacttataaggacactacaagtacatagcgcccacccgaataatccaagatagtctccccatctcatgatcattaatttaatcacacctgcaaagtccattttgtggtgtcaggtaaaagattcacaagttccagggattcagaccgggatatctttggaggccattattctgcctaccatagggtctcagagatcctcctcattgcttccctctcccacccaacctaggggagtgggggtgtgcaatggtatttctgacccagacaggccaagcaggggagtcagaaaggggcccttgcctggtgttgcacagaagagggagaggatgttctgtgcctgagggtagaccaggaaggctgcctggaggagggagctgtatcctaaaggatgctcaggagctggcattgaggccagtggcatagcctgcacaaatacaggaggacctggggaggccaggggtggggctgggggtattgggtggggctggccgcattctccgtcttaaccagctcgctcctaggtgcttttgtggcttctgcactctaccagcttggagccaggggcctcattctctcttgcagtaaaatgaggctgatgactgagcctaggagttgctgggcatctggtctgctgattaccaccttggtgcccaatgtctgcctgcctatccactgctttcaaacaaagaggctgcctgacaccacccagggggacgcctcccacccttgcccagcctcagccaatctcctctttctcttcttcagagctggagttgtgccctcctatcctctctctgcccaccccatcactgctgtacaccctgccccttggcacttcggccccggacttgctcctcctggcaggcctgggtgcttgtgaagccgggtgccagagggcccagcacggcacggcctttgattctgttttctgtaaatcgacgacaataaattctctttttccttcatccacaagtgtttactgagcgccttctgtgtaccaggccgcaccagggtgcggagcaaagaccaacctcagggagcagatgaggtccaggcggctgaaccaaccgaaccatggttctggtagcactgcctcccccgccaccctcagggggccctgctccccaagcccttcccaaatcctgccgtccagctctcctccccaccttgcaggagggacgccagggcccggttttcgggttccgccattctttcctcaatgagggtcggagaggtccctgcccacgccagacccgtccccggccgtcgcggcaccctcttgtgatcaggcggagggaccaagggccaagagcggggcttcgccggacgctgggagcgtcactgtccagactgacagatggggaaactgaggctgaccagctgggcagggcgtgcatacgaatctgggtcctggaagcgttctgcaagatcccttctcacctcaaccgcacgtgctggcatccttgggtttccctccttccccagatcacagccgcacttctctcctccgccctcatagtcacggccctgccttctccctcctcttgccccgggcgg

SEQ ID NO: 44013 - DNA, 570 bp, Homo Sapiens
ctttctagccagaaaaccggagggaatcttgacaggcacacagcatccaaaccaacagcacttctgcagccggggcccggctggcagaggggtgctgcctgctgcctgcaaatcctgccagagtcaagggtttgctttcctactggtcttcctttggctagaaaagtgacaaaactgagctgggtggggtataagttacaggggcgagagcttcagtggcctgtttatcgggaggagttggagctggagcggctcctgtggcggcggcggcccggggaccgtgatctccggcgcacgggggacctgcgcctcggggagcgggaccttccactgaaactacaaattgtttaccttctcctcatccgtgggggagacctgcgccacataggcggtggtggcaacattctcctgggagggctgaatctcctggggggtggcctaggccagggggccagcacggcggtggcagtgatctcctggccatcaatttgtcctggtcacccacctccatccatgtgcttcagcgccttctcggcttcatctggattctcaaactctacgtacgcatag

SEQ ID NO: 44014 - DNA, 1485 bp, Homo Sapiens
atgcacaccctgtggttccgggaacacaacaggatggccacggagctgtccgccctgaacccccactgggagggaaacacggtttaccaggaagccaggaagatcgtgggcgcggagctgcagcacatcacctacagccactggctgcctaaggtcctgggggaccctggcactaggatgctgaggggttaccgaggctacaaccccaacgtgaatgcaggcatcattaactcttttgctactgcagcctttagatttggccacacattaatcaatcctattctttaccgactgaatgccaccttaggtgaaatttccgaaggccaccttccgttccataaagcgctcttttcaccgtccagaataatcaaggaaggtgggatagacccggttctccgggggctgtttggcgtggctgctaaatggcgggcaccctcctaccttctcagtcctgagctgacccagaggctcttctccgcggcttattctgcggccgtggattcggctgccaccatcattcaaaggggtagagaccacgggatcccaccatatgttgacttcagagttttctgtaatttgacttcagttaagaactttgaggatcttcaaaatgaaattaaagattcagagattagacaaaaactgagaaagttgtacggctctccaggtgacattgacctctggcccgcccttatggttgaagacctgattcctggtacaagagtgggaccaacacttatgtgcctgtttgttacccagtttcagcggctaagagatggagataggttctggtatgaaaaccctggagtatttaccccggcacaactcactcagctgaagcaggcgtccctgagccgggtgctttgtgacaatggtgacagcattcagcaagtgcaggctgatgtctttgtaaaggcagaatacccacaggattacctgaactgcagcgagatcccgaaggtggacctgcgagtgtggcaagactgctgtgcagactgtaggagtagaggacagttcagagcagtgacgcaagagtctcaaaagaaacgctcagctcaatacagctatcctgttgataaggatatggagttaagtcatctaagaagtaggcaacaagataaaatatatgtgggtgaagatgctagaaatgtgacagttctggcaaaaacaaagttctcccaagatttcagcacgtttgcagcggaaattcaggaaaccatcacagcactcagagagcagataaacaagctggaggcacgcctgaggcaggcagggtgtacagatgttagaggggttccaaggaaggccgaggagcgctggatgaaagaagactgcactcactgcatttgtgagagtggccaggtcacctgtgtggtggagatttgtcccccggctccctgtcccagtcctgaattggtgaaaggaacctgctgtccagtttgcagagaccgaggaatgccaagtgattccccagagaagcgctaa

SEQ ID NO: 44015 - DNA, 1059 bp, Homo Sapiens
atggagagagaccacagaaacccagacgagcaggcgaggcaatttttaattcttaagaaccaaaccccaattgaggaaagaggcgatctctttggaaaagcacttaatctgaacacagactttgtttctttaagacaagtaccttataaatatgacttatatgaaaaaactttgaaatataattcagacttgcttaatagtaatagaagctatgcaggaaagcagactgatgagtgtaatgaatttggaaaagcacttctctacctgaagcaagagaaaacccacagtggagtagaatattctgaatacaataaaagtggaaaagccctcagccataaagcagccatttttaaacatcagaaaataaaaaacttggttcaacctttcatttgtacttactgtgacaaggctttctcctttaagtcactcctcattagtcataagagaatacatactggagaaaagccatatgaatgcaatgtatgtaagaaaaccttctcccataaggccaacctcatcaaacatcagagaattcacactggggagaaacctttcgagtgtccggaatgtggaaaagctttcacccaccagtcaaacctcattgtacaccagagagcacatatggagaagaagccctatgagtgcagtgaatgtggaaagacatttgcccaaaagtttgaactcaccacacaccagagaattcatacaggagagcgaccctatgagtgtaacgaatgtgcaaaaaccttctttaagaagtcaaaccttatcatacatcagaagattcacacgggggagaaacgctatgagtgcagtgaatgtggaaaatcctttatccagaactcacagctcatcatacacatgagaactcatacaggagagaaaccctatgaatgtactgagtgcggcaaaactttcagccagaggtcaactcttagattacacttgcgaatccacacaggagagaaaccatatgagtgttccgaatgtgggaaggcctttagcaggaagtcccgactcagtgtccatcagagagttcacatcggggagaaaccctga

SEQ ID NO: 44016 - DNA, 528 bp, Homo Sapiens
caggtctacgccatcctagttagccatccacctacccccaacgaccacttcactcccacccctgtctcctacacagccggcttctaccgcatacccgtgctggggctgaccacccgcatgtccatctactcggacaaggtaggagcccgtctgcagacgtgccgaggaggtggtgtgattgctttagcgccgtcattttcaaccgtttataatcttcttctgtgtctgcatattttctctgtgcacattattcatcagagtaaaaaaaggaactatgaaaacctcgaccaactgtcctatgacaacaagcgcggacccaaggcagagaaggtgctgcagtttgacccagggaccaagaacgtgacggccctgctgatggaggcgaaagagctggaggcccgggtcatcatcctttctgccagcgaggacgatgctgccactgtataccgcgcagccgcgatgctgaacatgacgggctccgggtacgtgtggctggtcggcgagcgcgagatctcggggaacgccctg

SEQ ID NO: 44017 - DNA, 168 bp, Homo Sapiens
tataagtgtgaagaatgtggcaaaagctttattctgtcctctcatcttactacacataagataattcatactggagagaaaccctacaaatgtaaagaatgtggcaaagcttttaaccagtcctcaacccttatgaaacataagataattcatactggagagaaaccc

SEQ ID NO: 44018 - DNA, 675 bp, Homo Sapiens
atggaatcaaaagcttgggaatcaaataatgaagatcttttatcaagtagtggtgtcacatctaatggaggttcttcaagttcattttttgtgtcatctattcgtggtacaataattgaaaacacatcttcagctgggactttgacacaggttccttttttccctaaatatgaagtggaacttgattctcctagaaaaatcatcccatctcctggaaaggaacactttgaacgtgttttggaagaatattcacatcaagtcaaagatttacagagaagactaaatgaaagcaatgaattgcatgagaaacaaaagttttatttgaggcagtcagtcattgatttgcaaacaaaacttcaggagatgcaaatggagagagatgctatggctgacatcagacgaagggagagtcagtcccaggaggatttaagaaatcagcttcaaaatacagttcatgaacttgaagctgccaaatgccttaaagaggacatgctgaaagacagcaacacacagatagagcaactacgaaaaatgatgcttagtcatgagggagtgcttcaagaaatccggtcaatcctagttgactttgaagaagcctcaggcaaatatgtgaacatgacagcatgtctactctgcacttccgcagcttgggctcagctattagtaaaatactaa

SEQ ID NO: 44019 - DNA, 1401 bp, Homo Sapiens
gctgactggggtggttgggaccgttagctcggcaggctggcaggctccggggcgctactccattggcggccgggatggagactatgcgagcgcagcggctgcagcctggtgtgggcaccagcgggaggggcactctccgagcgctgcggcccggagtgactggggccgcggctgccaccgccacaccccctgcgggccccccgcctgccccgccgcctcccgcaccgcccccgccgccgctgctcctgtctggggccccaggactacccctgccccccggcgccgccggcagcccggcagtgctgcgagaggccgtggaggccgtggtgaggagcttcgccaagcacacgcagggctatggccgagtgaatgtggtggaggcacttcaggaattctggcagatgaagcagtcccgtggtgctgacttaaagaatggggctctagtggtttatgagatggttccctccaacagccctccttatgtctgctatgtcaccctgcctgggggaagctgctttgggagtttccagttttgccccacaaaagctgaggcccggaggagtgctgcaaagattgcgctaatgaattctgtgtttaatgaacatccttcccgaagaatcactgatgagttcatcgagaagagtgtctctgaggccctggcatcttttaatggcaacagggaggaagctgacaacccaaatacagggattggtgccttccgattcatgctggaatccaacaagggcaaatcaatgttggagttccaggagctaatgacagtttttcaactgctacactggaatggcagccttaaggccatgagggaacgacaatgctctcggcaggaggtgttggctcattattcgcaccgggccctggatgatgatattcgccaccaaatggccttggactgggtgagccgggagcagagtgtgccgggggcactgtctagagagctggcctctactgagcgggagctggatgaagcccgactggcaggcaaggagctgcgcttccacaaggagaagaaagatattcttgtgctggctgctgggcagttgggcaatatgcattcttccaactgctaggcatccacccacataactccccaggctttccacagcctttttttatgtctcctttctaagatttaggatgattttttgtacatactttctcatttttatactttaaaaaatatatatgtgtataaattctacacctagattcctatttgctaagagatcccttttcttactaccagtttttggatgtagttttatttgaaacatcttcagtccactttacaacaaagagcagcttgtctttgcagctttgttagctcttaaacttccagattaactgtgtagccatttcagtagcactaaaagattaactcta

SEQ ID NO: 44020 - DNA, 780 bp, Homo Sapiens
cacctccttggccggtacatggcatcccagcttcattccctgtggatgggcggctacctgttctctggccagttgtctcctgtcctgataagagccggccagaagtgccccaacccgaagcgcctctgcctgcacgtggccgacctgagcacggtgcccatcaccagcctgtgcagcgccctggggaccctggagctgcacagctgcgagatctccatggcctggctcctcaggcagctggaccccaccatgctgcccctgttcgaatgcatcatgctggactgcgtccctgccttcagagacgagcaccagcagggcctgtcacgcttccaggtcctgcgctttctggtgggcggcacctaccgtgtaagggagttgcggctggatgccagcctgcaggagctcagctacctgcaggggcttgaggtgctgggccgcaacctctctgacagcaccctgctggccatcagccgctacccgcgagccgtgcgcaagatcaggctgaccttaaggggcctctctgcccctggcctggctgtcctggagggaatgccagccctggagagtctgtgccagcagggtcttctcaacaccctagaaattccctctttcacggaaatcctctcctcctgcctcaccatgtccaagttcagagtccttgagctgcagtggcaggggtgggagagtcaggaggccaataggaccatgtgtaaggggctgcttcactgtatggtcattgtcagggcttgccccaaagagtccatggactggtgggtgtga

SEQ ID NO: 44021 - DNA, 1645 bp, Homo Sapiens
ggcaccctggcgcccggctggcggctggtgaagggcttcctgaaccagccagtggacgtggagttgtaccagggtgggacatgtgtcgcgagcagagcagccgcgagcgcgagtgcggccagacggaccagtggggctacttcgaggcccagcccgtgctggtggcgcgggcactcatggtcacctcgctggccgccacggtcctggggcttctgctggcgtcgctgggcgtgcgctgctggcaggacgagcccaacttcgtgctggcagggctctcgggcgtcgtgctcttcgtcgctggcctcctcggcctcatcccggtgtcctggtacaaccacttcttgggggaccgcgacgtgctgcccgccccggccagcccggtcacggtgcaggtcagctacagcctggtcctgggctacctgggcagctgcctcctgctgctgggcggcttctcgctggcgctcagcttcgcgccctggtgcgacgagcgttgtcgccgccgccgcaagggaccctccgccgggcctcgccgcagcagcgtcagcaccatccaagtggagtggcccgagcccgacctggcgcccgccatcaagtactacagcgacggccagcaccgaccgccgcctgcccagcaccgcaagcccaagcccaagcccaaggtcggcttccccatgccgcggccgcggcccaaggcctacaccaactcggtggacgtcctcgacggggaggggtgggagtcccaggacgctccctcgtgcagcacccacccctgcgacagctcgctgccctgcgactccgacctctagacgcttgtagagcctggggggcgccgggtggcaaaggactcacccccgcacaggcccgcctggcttcgagttggaacccggacacttgcccctcactggtgtggatggaaatctgcctttcgtgggaccaaacaggactccttggacgattagttcaggttgggtttggttttcttcttaaagagtttagttttcctctccagagggatcagggtcctcttagggagtgacgggcttttcatatatttttgctgaagaatatatggaaagggtggcatttgcgtcacgtggaccagggacagtgctgaaatcagcagtgctcagaaacaatttaacatgttgaaacgacaatattctaaaatactgatgaatcttgcatcaatataattattgggttttttttctttttcctgctgtataactccttgccatgcaaactctcaagaggccaatatattcctggccatgtttgaatgagcctcttaaaataaacttagagccatgcaaatgccagcagcttaatggatttcatggaatgaaataccgtgattaactcatagctacatatcattgcataaatgggatttatcttttttctcacttatttttgcggtgaaagtcgagggcatgcaagagtttctcttccagaagccaagaggagaacaaaggtcctaatgctgtactattccaccctttggacgcctcatccaggacgcagaggactctaggtttaacattttgtacaaaatggaacctgttaatcatattaaagcacatatgtatatatcttttatttataaataaaattttaaaacaatagtttcagtatagccacaaaa

SEQ ID NO: 44022 - DNA, 890 bp, Homo Sapiens
ctgggccacaggcatgaactaagagtgctgaagacctaggagaaccactggtcaggtcagctcccagctccacagggagtaagaaggagctgcaggcacagcaggctgaaagtccaccaagggctgaggccacaaggcctctggggcagccacagttttcatgatcacatcatacaggactgagaagcagataacaagagtgacgctcacagggctgggctgacgctaacaggaggcagtgtgtggctcgaagattcttgaacccacagcagcagctgcggccaccccatcctgcccacagctccagccctgagacgacgaggaggagagtcgactttgcctcttgcccaagggaccatgcccaggtgccggtggctctccctgatcctcctcaccattcccctggccctggtggccaggaaagacccaaaaaagaatgagacaggggtgctgaggaaattaaaacccgtcaatgcctcaaatgccaacgtgaagcagtgtctgtggtttgccatgcaagaatacaacaaagagagcgaggacaagtatgtcttcctggtggtcaagacactgcaagcccagcttcaggtcacaaatcttctggaataccttattgatgtagaaattgcccgcagcgattgcagaaagcctttaagcactaatgaaatctgcgccattcaagaaaactccaagctgaaaaggaaattaagctgcagctttttggtaggagcacttccctggaatggtgaattcactgtgatggagaaaaagtgtgaagatgcttaatggtgttttgaggcatccctccaacctctgtgactactttatccatgaaaatgaagcaatggcaggtgggaggctcttcccaatgtgctttcttcatgcatgcc

SEQ ID NO: 44023 - DNA, 840 bp, Homo Sapiens
tctttctcgctgctcagtcacatctttctcttccttccaccccgagggaccatgtcgaggctcagctggggataccgcgagcacaacggtcctattcactggaaggaatttttccctattgctgatggtgatcagcaatctccaattgagattaaaaccaaagaagtgaaatatgactcttccctccgaccacttagtatcaagtatgacccaagctcagctaaaatcatcagcaacagcggccattccttcaatgttgactttgatgacacagagaacaaatcagttctgcgtggtggtcctctcactggaagctacaggttacggcaggttcaccttcactgggggtccgctgatgaccacggctccgagcacatagtagatggagtgagctatgctgcagagctccatgttgttcactggaattcagacaaataccccagctttgttgaggcagctcatgaaccagatggactggctgtcttgggagtgtttttacagattggtgaacctaattcccaactgcaaaagattactgacactttggattccattaaagaaaagggtaaacaaactcgattcacaaattttgacctattgtctctgcttccaccatcctgggactactggacatatcctggttctcttacagttccacctcttcttgagagtgtcacatggattgttttaaagcaacctataaacatcagctctcaacagctggccaaatttcgcagtctcctgtgcacagcggagggtgaagcagcagcttttctggtgagcaatcaccgcccaccacagcctctaaagggccgcaaagtgagagcctctttccattaa

SEQ ID NO: 44024 - DNA, 996 bp, Homo Sapiens
atgactgcaaagatggaaacgaccttctatgacgatgccctcaacgcctcgttcctcccgtccgagagcggaccttatggctacagtaaccccaagatcctgaaacagagcatgaccctgaacctggccgacccagtggggagcctgaagccgcacctccgcgccaagaactcggacctcctcacctcgcccgacgtggggctgctcaagctggcgtcgcccgagctggagcgcctgataatccagtccagcaacgggcacatcaccaccacgccgacccccacccagttcctgtgccccaagaacgtgacagatgagcaggagggcttcgccgagggcttcgtgcgcgccctggccgaactgcacagccagaacacgctgcccagcgtcacgtcggcggcgcagccggtcaacggggcaggcatggtggctcccgcggtagcctcggtggcagggggcagcggcagcggcggcttcagcgccagcctgcacagcgagccgccggtctacgcaaacctcagcaacttcaacccaggcgcgctgagcagcggcggcggggcgccctcctacggcgcggccggcctggcctttcccgcgcaaccccagcagcagcagcagccgccgcaccacctgccccagcagatgcccgtgcagcacccgcggctgcaggccctgaaggaggagcctcagacagtgcccgagatgcccggcgagacaccgcccctgtcccccatcgacatggagtcccaggagcggatcaaggcggagaggaagcgcatgaggaaccgcatcgctgcctccaagtgccgaaaaaggaagctggagagaatcgcccggctggaggaaaaagtgaaaaccttgaaagctcagaactcggagctggcgtccacggccaacatgctcagggaacaggtggcacagcttaaacagaaagtcatgaaccacgttaacagtgggtgccaactcatgctaacgcagcagttgcaaacattttga

SEQ ID NO: 44025 - DNA, 2448 bp, Homo Sapiens
atggaggacggcttctccagctacagcagcctgtacgacacgtcctcgctgctccagttctgcaacgatgacagcgcttctgctgcaagtagcatggaggtgacagaccgcattgcttcactggagcagagagtccagatgcaagaagacgacatccagctgctcaaatcagctctagctgatgtggttcggcggctgaacattactgaggaacagcaggccgtgcttaacaggaaaggacctaccaaagcaagaccactgatgcagaccctgcctttaagaaccacggtcaacaatggcactgtgttaccaaagaaacctactggctctctaccatccccctccggggtcaggaaagaaactgctgtgccagcaaccaaaagtaacatcaagaggaccagctcttctgaacgagtgtctcctgggggtcgaagggaaagcaatggggattccagaggaaaccggaatcgcacaggctccaccagcagctcttccagtggcaaaaagaacagtgaaagcaaacccaaggagcctgtattcagtgcagaagaaggctatgtaaaaatgtttcttcgtggacgccctgttaccatgtacatgcccaaagatcaagtggattcttacagcttggaagcaaaagtagaacttccaaccaagagactcaagctggaatgggtctatgggtacaggggtcgagactgccgtaacaacctgtacttgcttccgacgggagagaccgtctacttcatcgcatccgtggtggtgttatacaacgtggaggagcaactgcagaggcattacgctggccacaacgatgacgtgaagtgcctagcagttcatcctgatcggatcacgatagcaacaggacaagttgcgggcacatcgaaggatggaaaacaattgcccccacatgtgcgcatctgggattctgtgacattgaatactctccacgtcattggaataggtttttttgaccgagcagtcacctgtattgcattctcaaaatctaatggaggaaccaatctctgtgctgtggatgactccaacgaccatgtgctctctgtatgggactggcagaaagaagaaaaactagcagatgtgaagtgctctaatgaagctgtgtttgctgcggatttccaccccacggacaccaacatcatagttacttgtggaaaatcacatctctacttttggacactagaaggaagctcccttaataagaagcaaggattattcgagaaacaagaaaagccaaagtttgtcctctgtgtgactttctctgaaaacggtgacaccattactggagattcaagtggcaacatcttagtatggggaaaaggtacaaatcgaataagctatgcagttcagggggcccatgagggtggcatttttgcactttgtatgttaagagatggcacactggtgtcgggaggtgggaaagaccgaaagctcatttcttggagcggaaactatcaaaaacttcgtaaaacggagattccagaacagtttggtccaatacggacagtggccgaggggaaaggcgatgtgatcttgattggcacaactcgaaactttgtcctgcagggcactctgtcaggggacttcacacccattactcagggtcacactgatgagctctggggactggccatccatgcctcaaaatctcagttcttgacctgtgggcatgacaagcatgccactctctgggacgctgtgggtcaccgtcccgtctgggacaaaataatagaggatccagctcagtcttctggttttcatccttcagggtctgtggttgcagtcggaacactcactgggaggtggtttgtgtttgacacagaaacaaaagacttggtcaccgttcacacagatggaaacgaacagctctctgtaatgcgatactcaccagatgggaatttcttagccataggctcacatgacaactgcatctatatatatggcgttagtgacaacgggaggaagtacacgcgagtgggcaagtgctcgggtcattccagcttcattactcacctggactggtctgtaaactcacagttcctcgtgtcaaattccggagactacgaaatcctctactgggttccctctgcctgtaagcaagtcgtaagtgtggaaactacaagagacattgaatgggctacctatacctgcactttgggattccatgtttttggagtgtggccagaaggctcggacggaaccgacatcaatgccgtctgtcgggcccatgagaagaaactcctgtcaacaggcgacgactttggcaaagtgcacctcttctcatacccctgctcgcagttcagggctccaagccacatctacggcgggcacagcagccatgtcaccaatgtcgatttcctctgtgaagacagccacctcatctccacgggcgggaaagacacaagcatcatgcagtggcgcgtcatttag

SEQ ID NO: 44026 - DNA, 1431 bp, Homo Sapiens
caggctgcgcttccctggtcaggcacggcacgtctggccggccgccaggatgcaggccccgcacaaggagcacctgtacaagttgctggtgattggcgacctgggcgtggggaagaccagtatcatcaagcgctacgtgcaccagaacttctcttcgcactaccgggccacaatcggcgtggacttcgcgctcaaggtgctccactgggacccggagactgtggtgcgcctgcagctctgggatatcgcaggtcaagaaagatttggaaacatgacgagggtctattaccgagaagctatgggtgcatttattgtcttcgatgtcaccaggccagccacatttgaagcagtggcaaagtggaaaaatgatttggactccaagttaagtctccctaatggcaaaccggtttcagtggttttgttggccaacaaatgtgaccaggggaaggatgtgctcatgaacaatggcctcaagatggaccagttctgcaaggagcacggtttcgtaggatggtttgaaacatcagcaaaggaaaatataaacattgatgaagcctccagatgcctggtgaaacacatacttgcaaatgagtgtgacctaatggagtctattgagccggacgtcgtgaagccccatctcacatcaaccaaggttgccagctgctctggctgtgccaaatcctagtaggcacctttgctggtgtctggtaggaatgacctcattgttccacaaattgtgcctctatttttaccattttgggtaaacgtcaggatagagataccacatgtggcaagccaaagatctatgcctctgttttttcagtgagagagaaatagcaaatgttctttctatgctttcctcaccatcatcacagtgtttacaaacttttgaaaatatttagtctgttacaaacttctgtcatgtagctgaccaaaatcctgcagggccacagtcggcactgttatttgcttcttttaatcagcaaaggcctcaagtcttaaaataaaaggggagaagaacaaactagctgtcaagtcaaggactggctttcaccttgccctggtgtctttttccagatttcagtatattctctgatggcctgacaggcctattaagtagatgtgatattttctcccaagatgacctccattctcggcagacctaagagttgcctctgagttagctctttggaatcgtgaacacaggtgtgctatattgtccttgtcctaactgtcacttgccatggcctgaatgttggcttaactgaatattgtatgaaaagacatgcctccatatgtgcctttctgttagctttctctgactcaagctgtggggctcctctatacatgctatacatgtaatatatattatatatatttttgcaagtgaacaataaaacattaaaagatgctgtttccctatttatgaaa

SEQ ID NO: 44027 - DNA, 1229 bp, Homo Sapiens
ctcgaaggcagcggcgcacctggtcccgggaaccgcagtagccgcctgctgccgcgccttggtcctcgatggaggccagcgccaggcccccgttggcggtgggctccgccgctgcgagccccttggagtctcgaggaggatcggccaccatgatgggaagcaccggggtttcttagcgcctggaagctggctgggagcgcttgggctccttcccaggacccgacgttcctaggactgagttgagtaacagcacctggagactggaactttggagggctccttagagttgtgagttcacagcactgaagttccttggctcttggaagctggagtgtttaaattccccaggctgggcgctgaggcttctctgctctgccccgtgtgccagatgtccgaaagctgggagttcggagcgcccgggttccttggccctaggagctgggaatacgagagtttctctgggtgggacgtggggcccttggctccaggaggttgagtgcccccagatggcggaggtctgcaggaggctaggttctggtggcgcagatcccggacgcctggatccgggaggcggggacccgggctgcctgggtcttggacactgagggctgggatgccagaatctgggggccgggaagcggacctccggaaacaggggacccaggctcttaggtccgggagggtgggatgcgggcccctgtgtacggaaggcggtggtctggtgtccgggagtagcggttaccagccagagaaagcctcccgggcgtgccgcgtggctctgagcccgtttagcggaagctgccagggataagggtagggggcggggcttgagaaggcggggaccgaccctcgggcgccgattggctgcagagcgttcggagactggacgagtaggggcggggctgatacccgagatgggccaggtcccccatagaaggcagattaataatacccatctccaggagccgggcccagagacgacggggcggggccaggaaggggcggggccttgggagggtgctgtttcccgccaaaggaactgggttgtgggttggagcccttaaaccacaggggttcgttccctggtgcgagggtcgctagaaagctccggtggtcctcggtgattcatttgcaactcaactcagctttggaactcctcagccctgagtttggtctttagtcgcctctgagaactttaattcctcgaatataaagtgcaggtgttaaaa

SEQ ID NO: 44028 - DNA, 378 bp, Homo Sapiens
atgccgtcggagaagaccttcaagcagcggcgcaccttcgaacaaagagtagaagatgtccgacttattcgagagcagcatccaaccaaaatcccggtgataatagaacgatacaagggtgagaagcagcttcctgttctggataaaacaaagttccttgtacctgaccatgtcaacatgagtgagctcatcaagataattagaaggcgcttacagctcaatgctaatcaggccttcttcctgttggtgaacggacacagcatggtcagcgtctccacaccaatctcagaggtgtatgagagtgagaaagatgaagatggattcctgtacatggtctgtgcctcccaggagacgttcgggatgaaattgtcagtgtaa

SEQ ID NO: 44029 - DNA, 397 bp, Homo Sapiens
ccacgccgtccgggtgggcctagcagtcgctccatttatcgcttgagatctccagccttaccgcggctcgaaatggaccccaactgctcctgcaccactggtgtctcctgcgcctgcaccggctcctgcacgtgcaaagagtgcaaatgcacctcctgcaagaagagctgctgctcctgctgccccgtgggctgtgccaagtgtgcccacggctgtgtctgcaaagggacgttggagaactgcagctgctgtgcctgatgtgggaacagctcttctcccagatgttaatagaacaagctgcacaacctggattttttttcaatacgatactgagccatttgctgcatttctttttatattaaatatgtgagtgacaataaaacaattttgacttgaa

SEQ ID NO: 44030 - DNA, 1760 bp, Homo Sapiens
aaacactctcacctgccagcatgacaagctccagcatcagtggagaacccaccagcttgtatagccaagcagagtcaacacacacaacagcgttccctgccagcaccaccacctcaggcctcagtcaggaatcaacaactttccacagtaagccaggctcaactgagacaacactgtcccctggcagcatcacaacttcatcttttgctcaagaatttaccacccctcatagccaaccaggctcagctctgtcaacagtgtcacctgccagcaccacagtgccaggccttagtgaggaatctaccaccttctacagcagcccaggctcaactgaaaccacagcgttttctcacagcaacacaatgtccattcatagtcaacaatctacacccttccctgacagcccaggcttcactcacacagtgttacctgccaccctcacaaccacagacattggtcaggaatcaacagccttccacagcagctcagacgcaactggaacaacacccttacctgcccgctccacagcctcagaccttgttggagaacctacaactttctacatcagcccatcccctacttacacaacactctttcctgcgagttccagcacatcaggcctcactgaggaatctaccaccttccacaccagtccaagcttcacttctacaattgtgtctactgaaagcctggaaaccttagcaccagggttgtgccaggaaggacaaatttggaatggaaaacaatgcgtctgtccccaaggctacgttggttaccagtgcttgtcccctctggaatccttccctgtagaaaccccggaaaaactcaacgccactttaggtatgacagtgaaagtgacttacagaaatttcacagaaaagatgaatgacgcatcctcccaggaataccagaacttcagtaccctcttcaagaatcggatggatgtcgttttgaagggcgacaatcttcctcagtatagaggggtgaacattcggagattgctcaacggtagcatcgtggtcaagaacgatgtcatcctggaggcagactacactttagagtatgaggaactgtttgaaaacctggcagagattgtaaaggccaagattatgaatgaaactagaacaactcttcttgatcctgattcctgcagaaaggccatactgtgctatagtgaagaggacactttcgtggattcatcggtgactccgggctttgacttccaggagcaatgcacccagaaggctgccgaaggatatacccagttctactatgtggatgtcttggatgggaagctggcctgtgtgaacaagtgcaccaaaggaacgaagtcgcaaatgaactgtaacctgggcacatgtcagctgcaacgcagtggcccccgctgcctgtgcccaaatacgaacacacactggtactggggagagacctgtgaattcaacatcgccaagagcctcgtgtatgggatcgtgggggctgtgatggcggtgctgctgctcgcattgatcatcctaatcatcttattcagcctatcccagagaaaacggcacagggaacagtatgatgtgcctcaagagtggcgaaaggaaggcacccctggcatcttccagaagacggccatctgggaagaccagaatctgagggagagcagattcggccttgagaacgcctacaacaacttccggcccaccctggagactgttgactctggcacagagctccacatccagaggccggagatggtagcatccactgtgtga

SEQ ID NO: 44031 - DNA, 609 bp, Homo Sapiens
atggctgaatatttagcttcgatattcgggactgagaaggacaaggttaactgctctttttactttaagatcggggtctgccggcacggggaccggtgctcccggcttcacaacaagccgacattcagccaggaggtgttcacagaactgcaggagaagtatggggagattgaagagatgaatgtgtgcgacaaccttggggaccacctcgtgggcaacgtctatgtcaagttccggagggaggaggatggagagcgggccgtggctgaactcagtaaccgctggttcaacgggcaggctgtgcacgggaatgtacccgaggtggcttctgcaacttcatgcatctgcggcccatttcccagaacctccagaggcagctctatgggcggggacccaggcgcaggtcacccccgaggttccatactggccaccatccccgagagaggaaccatcggtgttcccctgatcactggcatggccgcttctgaggccctggcccccttacccttcacccccaacagggacagatgttcctggcaggacctctcctcaaagcccccttcactctcctgccccatccttcccaggctcccgggctccataatgtaa

SEQ ID NO: 44032 - DNA, 607 bp, Homo Sapiens
gcgcacatagcgacttggtgggcgcgtccagtgatgactgggggatcccggcaagtaacatgactaaaaagaagcgggagaatctgggcgtcgctctagagatcgatgggctagaggagaagctgtcccagtgtcggagagacctggaggccgtgaactccagactccacagccgggagctgagcccagaggccaggaggtccctggagaaggagaaaaacagcctaatgaacaaagcctccaactacgagaaggaactgaagtttcttcggcaagagaaccggaagaacatgctgctctctgtggccatctttatcctcctgacgctcgtctatgcctactggaccatgtgagcctggcacttccccacaaccagcacaggcttccacttggccccttgatcaggatcaagcaggcacttcaagcctcaataggaccaaggtgctggggtgttcccctcccaacctagtgttcaagcatggcttcctggcggcccaggccttgcctccctggcctgctggggggttccgggtctccagaaggacatggtgctggtccctcccttagcccaagggagaggcaataaagaacacaaagctgttcccgt

SEQ ID NO: 44033 - DNA, 585 bp, Homo Sapiens
atgtccttcccacactttggacacccgtaccgcggcgcttcccagtttctggcgtcggcaagttccagcaccacatgctgcgaatctacccaacgctctgtctcagatgtggcatcaggctccaccccagcgcccgctctctgctgcgcaccctacgatagtcgactgctgggcagtgcgcgaccggagctgggcgccgccttgggcatctatggagcaccctatgcggccgctgcagctgcccagagctaccctggctacctgccctatagcccagagcccccctcactgtatggggcactgaatccacagtatgaatttaaggaggctgcagggagttttacatccagcctggcacaaccaggagcctattatccctatgagcggactctggggcagtaccaatatgaacggtatggcgcagtggaattgagtggcgccggtcgccgaaagaacgcgacccgggagaccaccagtacactcaaggcctggctcaacgagcaccgcaaaaacccctaccccactaagggtgagaagatcatgctggccatcatcaccaagatgaccctcacccaggtgtccacc

SEQ ID NO: 44034 - DNA, 483 bp, Homo Sapiens
tctgtgacactgcatacagatgtaggtgatattaaaattgaagtcttctgtgagaggacacccaaaacatgtgagaatttcttggctctttgtgccagtaattactacaatggctgtatatttcataggaatatcaagggtttcatggttcaaacaggagatccaacaggaactggaagaggaggcaacagtatttggggcaagaagtttgaggatgaatacagtgaatatcttaagcacaatgttagaggtgttgtatctatggctaataatggcccgaacaccaatggatctcagttcttcatcacctatggcaaacagccacatttggacatgaaatacaccgtatttggaaaggtaatagatggtctggaaactctagatgagttggagaagttgccagtaaatgagaagacataccgacctcttaatgatgtacacattaaggacataactattcatgccaacccatttgctcagtag

SEQ ID NO: 44035 - DNA, 3530 bp, Homo Sapiens
ctggaagccgagaggagaggacagctggttgtgggagagttcccccgcctcagactcctggttttttccaggagacacactgagctgagactcacttttctcttcctgaatttgaaccaccgtttccatcgtctcgtagtccgacgcctggggcgatggatccgtttacggagaaactgctggagcgaacccgtgccaggcgagagaatcttcagagaaaaatggctgagaggcccacagcagctccaaggtctatgactcatgctaagcgagctagacagccactttcagaagcaagtaaccagcagcccctctctggtggtgaagagaaatcttgtacaaaaccatcgccatcaaaaaaacgctgttctgacaacactgaagtagaagtttctaacttggaaaataaacaaccagttgagtcgacatctgcaaaatcttgttctccaagtcctgtgtctcctcaggtgcagccacaagcagcagataccatcagtgattctgttgctgtcccggcatcactgctgggcatgaggagagggctgaactcaagattggaagcaactgcagcctcctcagttaaaacacgtatgcaaaaacttgcagagcaacggcgccgttgggataatgatgatatgacagatgacattcctgaaagctcactcttctcaccaatgccatcagaggaaaaggctgcttcccctcccagacctctgctttcaaatgcctcggcaactccagttggcagaaggggccgtctggccaatcttgctgcaactatttgctcctgggaagatgatgtaaatcactcatttgcaaaacaaaacagtgtacaagaacagcctggtaccgcttgtttatccaaattttcctctgcaagtggagcatctgctaggatcaatagcagcagtgttaagcaggaagctacattctgttcccaaagggatggcgatgcctctttgaataaagccctatcctcaagtgctgatgatgcgtctttggttaatgcctcaatttccagctctgtgaaagctacttctccagtgaaatctactacatctatcactgatgctaaaagttgtgagggacaaaatcctgagctacttccaaaaactcctattagtcctctgaaaacgggggtatcgaaaccaattgtgaagtcaactttatcccagacagttccatccaagggagaattaagtagagaaatttgtctgcaatctcaatctaaagacaaatctacgacaccaggaggaacaggaattaagcctttcctggaacgctttggagagcgttgtcaagaacatagcaaagaaagtccagctcgtagcacaccccacagaacccccattattactccaaatacaaaggccatccaagaaagattattcaagcaagacacatcttcatctactacccatttagcacaacagctcaagcaggaacgtcaaaaagaactagcatgtcttcgtggccgatttgacaagggcaatatatggagtgcagaaaaaggcggaaactcaaaaagcaaacaactagaaaccaaacaggaaactcactgtcagagcactcccctcaaaaaacaccaaggtgtttcaaaaactcagtcacttccagtaacagaaaaggtgaccgaaaaccagataccagccaaaaattctagtacagaacctaaaggtttcactgaatgcgaaatgacgaaatctagccctttgaaaataacattgtttttagaagaggacaaatccttaaaagtaacatcagacccaaaggttgagcagaaaattgaagtgatacgtgaaattgagatgagtgtggatgatgatgatatcaatagttcgaaagtaattaatgacctcttcagtgatgtcctagaggaaggtgaactagatatggagaagagccaagaggagatggatcaagcattagcagaaagcagcgaagaacaggaagatgcactgaatatctcctcaatgtctttacttgcaccattggcacaaacagttggtgtggtaagtccagagagtttagtgtccacacctagactggaattgaaagacaccagcagaagtgatgaaagtccaaaaccaggaaaattccaaagaactcgtgtccctcgagctgaatctggtgatagccttggttctgaagatcgtgatcttctttacagcattgatgcatatagatctcaaagattcaaagaaacagaacgtccatcaataaagcaggtgattgttcggaaggaagatgttacttcaaaactggatgaaaaaaataatgcctttccttgtcaagttaatatcaaacagaaaatgcaggaactcaataacgaaataaatatgcaacagacagtgatctatcaagctagccaggctcttaactgctgtgttgatgaagaacatggaaaagggtccctagaagaagctgaagcagaaagacttcttctaattgcaactgggaagagaacacttttgattgatgaattgaataaattgaagaacgaaggacctcagaggaagaataaggctagtccccaaagtgaatttatgccatccaaaggatcagttactttgtcagaaatccgcttgcctctaaaagcagattttgtctgcagtacggttcagaaaccagatgcagcaaattactattacttaattatactaaaagcaggagctgaaaatatggtagccacaccattagcaagtacttcaaactctcttaacggtgatgctctgacattcactactacatttactctgcaagatgtatccaatgactttgaaataaatattgaagtttacagcttggtgcaaaagaaagatccctcaggccttgataagaagaaaaaaacatccaagtccaaggctattactccaaagcgactcctcacatctataaccacaaaaagcaacattcattcttcagtcatggccagtccaggaggtcttagtgctgtgcgaaccagcaacttcgcccttgttggatcttacacattatcattgtcttcagtaggaaatactaagtttgttctggacaaggtcccctttttatcttctttggaaggtcatatttatttaaaaataaaatgtcaagtgaattccagtgttgaagaaagaggttttctaaccatatttgaagatgttagtggttttggtgcctggcatcgaagatggtgtgttctttctggaaactgtatatcttattggacttatccagatgatgagaaacgcaagaatcccataggaaggataaatctggctaattgtaccagtcgtcagatagaaccagccaacagagaattttgtgcaagacgcaacacttttgaattaattactgtccgaccacaaagagaagatgaccgagagactcttgtcagccaatgcagggacacactctgtgttaccaagaactggctgtctgcagatactaaagaagagcgggatctctggatgcaaaaactcaatcaagttcttgttgatattcgcctctggcaacctgatgcttgctacaaacctattggaaagccttaa

SEQ ID NO: 44036 - DNA, 1471 bp, Homo Sapiens
ggatggctctgaagtggacttcagttcttctgctgatacatctcggttgttactttagctctgggagttgtggaaaggtgctggtgtggaccggtgaatacagccattggatgaatatgaagacaatcctgaaagagcttgttcagagaggtcatgaggtgactgtactggcatcttcagcttccattctttttgatcccaatgacgcattcactcttaaactcgaagtttatcctacatctttaactaaaactgaatttgagaatatcatcatgcaacaggttaagagatggtcagacattcaaaaagatagcttttgatttttaacaaaaagaagtgggatcagttttacagtgaagtattaggaagacccactaccttatttgagacaatggggaaagctgacatatggcttatgcgaaactcctggaattttcagtttcctcatccattcttaccaaacgttgattttgttggaggatttcactgcaaacctgccaaacccctacctaaggaaatggaggagtttgtacagagctctggagaaaatggtgttgtggtgttttctctggggtcaatggtcagtaacatgacagcagaaagggccaacgtaattgcaacagcccttgccaagatcccacaaaaggttctgtggagatttgatgggaataaaccagatgctttaggtctcaatactcggctgtacaagtggataccccagaatgaccttctaggtcatccaaaaaccagagcttttataactcatggtggagcaagtggcatctatgaggcaatctatcatgggatccctatggtgggcattccattgttttgggatcaacctgataacattgctcacatgaaggccaagggagcagctgttagactggacttccacacaatgtcgagtacagacctgctgaatgcactgaagacagtaattaatgatcctttatataaagagaatgttatgaaattatcaagaattcaacgtgatcaaccagtgaagcccctggatcgagcagtcttctggattgaatttgtcatgcgccacaaaggagccaaacaccttcgagttgcagcccgtgacctcacctggttccagtaccactctttggatgtgattgggtttctgctggcctgtgtggcaactgtgacatttatcatcacaaagtgttgtctgttttgtttctggaagtttactagaaaagtgaagaaggaaaaaagggattagttatgtccgacatttgaagctggaaaacctgatagatgggatgacttcagtttattccagcaagaaagactgtgatgcaagatttctttcttcctacgacaaaaaaaaatctttttgaaatctaccttgtcaagtgaaaatttgtttttcagagatttaccacccaagtaatggttagaaatattttgtggcaatgaggaaaacactagggaaaataaaaaataatataaagccata

SEQ ID NO: 44037 - DNA, 150 bp, Homo Sapiens
cagtgctataataaaaccatggtgctgatttatgatgaacgtggagatgtaccacctagatttctcttcaaggaaggacttgtttcctctgctgatggaattcctgtcaacagagacctttcaggtgccagtgacttggagaaggcctga

SEQ ID NO: 44038 - DNA, 552 bp, Homo Sapiens
atggtgcgcgcgtctcgggctccgggccgggcagctggcggcgggcgcgctcccgacacagccgacgcctgccgagcgcgcagtggcgagaacctagctctcctggtcgcgcaccccggacggactgggcggacagactccacggtgcgcgggttccacgagttcgagtctctcctctgcaggcccacgaacctgaacagaacgcgagccggggccgcgggcgcgccggcctcctttcagtgcgcccgcctcgcctccagacgtgccgtctcgccagctgcctcagcagcgctcggactcagcgggactctgccccgactcggtgccggagcttctgtcctttgcgctccgccccctagggacaagacctccccagagcgctttccgaaacagacacagcgctgctcacacacacacacacacacacacacacacacaatgccccgcgcggtgcccgctcgcccgcccacccgccctcggtttcgatgcgcccggagcgatcctccttccctctcctcgggggagggtgggtcacttcgcggcgctcggtga

SEQ ID NO: 44039 - DNA, 706 bp, Homo Sapiens
gctaaatttcttcatactcaactttcagattctttaatctccagctcagcttcaacaattcaacgctgttctttctgaaaaagtacacatcgtgccttctctacttcgctcttggaacataatttctcatggcaggtgtttaagaccactctgtggaggttaatttctgggaccttagggataatatgcctttcgttgatgtctacgttgggaattttgttgaaaaattgcttttactaaactgagtattgagccagcatttactccaggacccaacatagaactccagaaaggcaggattttatgagctccagtcaacaattttactggattggactctcttacagtgaggagcacaccgcctggttgtgggagaatggctctgcactctcccagtatctatttccatcatttgaaacttttaatacaaagaactgcatagcgtataatccaaatggaaatgctttagatgaatcctgtgaagataaaaatcgttatatctgtaagcaacagctcatttaaatgtttcttggggcagagaaggtggagagtaaagacccaacattactaacaatgatacagttgcatgttatattattactaattgtctacttctggagtctataaaatgtttttaaacagtgtcatatacaattgtcatgtatgtgaaacaatgtgttttaaaattgatgaaattcgttcacct

SEQ ID NO: 44040 - DNA, 5177 bp, Homo Sapiens
gctgtacgagcggaacctggactagaggaactttcctcaggactcagggcacacagcccctcggccactactgtctgcgagcccgaggcgcaggggagcgccagcggctgcaggtacgctgcgcacccgcactggggcctgggcggtgcagcggcggcgggagggtcctgggaaccgcagccgccgaggccagtgtgtgagccggccggccgcggcaagccgcatcccccggccgcccctcgcagccccttgctccccggcagccgccgccgccctcaggcagcccagccgggcgctcgcgccaggacttccccgccgcccgcctcggcccggaacatggctgcgcgccctgctgccaccctcgcctggtcgctactgctcctctcctcagccctgctccgcgaaggctgccgagcgcgcttcgtcgccgagcgggactcggaggacgacggagaggagccggtggttttcccggagtcgcccctgcagagccccacggtgctcgtggcggtcctcgcccgcaacgcggcgcacacgctgccgcacttcctcggctgcctggagcggctggactaccccaagagcaggatggccatctgggcagccactgatcacaatgtggataatacaacagaaatattcagggagtggttgaaaaatgtacagagactctatcactatgtggagtggaggcctatggatgaaccagagtcttaccctgatgaaattggaccaaagcactggccaacctcccggtttgcccatgtgatgaaactacgacaggcagcccttcgaactgcgagggaaaaatggtcagactacattctgttcatagatgttgacaatttcctgactaatccacagaccctcaatctactgattgcagaaaacaaaactattgtggcccccatgctggagtctcggggcctgtattctaatttctggtgcggaatcacccctaaggcaaaaaacacaacccacctatttgctcttttacagggcttctataagaggaccccagactacgttcagattcgagaatggaagaggacaggctgcttccccgtccccatggtccactccaccttcctaattgacctcaggaaggaggcctcggacaagctgactttctaccccccacaccaggactacacctggacctttgatgacatcattgtctttgccttctccagcaggcaagcaggcatccagatgtacctctgcaacagagagcactatggctacctgcccatccccctgaagccccatcagacactgcaggaagacatcgagaacctcatccatgtgcagattgaagcaatgattgaccgtcctccaatggaaccctcccagtatgtctcagttgtccctaaatatccagacaagatgggatttgatgagattttcatgataaacctcaaacgcagaaaggacaggcgggaccggatgctgcgcacactgtatgaacaggagattgaggtcaagattgtcgaggctgtggatggaaaggcactcaacacaagccagctgaaggcactgaatattgaaatgctgcctggctatcgagatccctattcctccaggcctctaacaaggggtgaaatcggctgctttctcagccactactcagtctggaaagaggtaattgatcgagagctagagaagactcttgtaattgaagacgatgtgcgttttgagcatcagtttaagaagaagctgatgaagctgatggataacattgaccaggctcagctggactgggaactgatttatattggtaggaagaggatgcaagtaaaggagccagagaaagcagtgcccaatgtggcaaacctggtcgaagccgactattcctactggaccctgggctacgtcatctctctggaaggagcacagaagctggttggagccaatccttttgggaagatgctgccagtggatgagtttctgccagtcatgtacaacaagcatcccgtagccgagtacaaggagtattatgaatccagggacctgaaagccttctctgcagaacccttgctcatctaccctacgcactacacaggccagccggggtacctgagtgacacggagacctccaccatctgggacaatgagacagtggccaccgactgggataggacacatgcctggaagtcccggaagcaaagccgcatctacagcaatgccaagaacacagaggccctgccaccgccaacctccctggacactgtgccttcaagggatgagctatgaaggctccctgggagtgtggcccacatcagttcaacatcctctggtttttctaaagggctattcatctgtttgctccagttttctgttttgttttgttcttagtggtcacagtcatctaaccaaagtgatctagtgtgatagatcgaaattaacatatttttgaccatggaaggaaataaggaaattcaacccaaatttcccaagacggctgaaagacaggttttttggaaactgttaagataaactgtaatccagacacctaattcttcagttcactactcatgtgatactgattcccacattaaggttgaacaacatggctcagagtcttgttcaagagaaagtgatcaccgagctgtcacatcagcaaatatgtagtcaaggcagccaggccaactagaccacacttattggtctagtttgtccgttttatatgacattgaaaacttgtgtgtgcaacttttgggggacaggaatcacttaaaatcatatttatttggctttttatttaaaggattctgtcacaagtcttattgaaaagtagattttttaaaaaaaaaaaatcttagtccctgttatccagtaggggtgggtatttgggtccgactgagacttggcctgtgaccatcatggcagttggagttctcatatagaggtgaccagtttgccatgtggatataatttagtagatatttgacagtttgtgtaggtatttgagggaaaaaactcaatgtttggcttttttattatggccactcgagtcaggatgctctatttataaagataaatgtaatatataaagggtgaggactggctgtgcatcctgccctgtcccgggtttgcgcgctgctacagagcttcacgctctccgctccaccccttagcctgggaacccaccgcaggtgtgagttctgtgagtcactgctaagagacagagcacattttcaggccagcaactatccttgccagagttttttcattatattttgaattatttattttacaaaatgggcgaagatattgtctttaggataaggcagagaaacagatgttgcagacttccacggcacccgggggagtggtgggtgtggacacattggttcggcaatctgattctcctgaatttcccagccaggctcttgtggggaggcctgtggatggggggatttgaactatttggaaacaaatgattctctatctcaggtgagaaacctggtcagaaacaaagggctggtcacctgatttaggccagcaaccagggaagctcttagaatcccaggcggacaccctttctcaaaagatatcccctaagagtcctttctgctttcttcacagattgattttatgtaaaatgcagagttggactacacgatttcttcccactccacaatctgtcatcctagtatagatcatggtggtttccctcaagtttatgttctcatgccctcaatctgtaaatttttgtctccagaaaaaccctcccaggcatcccataccagcaccgttcctcatcactgtccatgcaccatgcagccatatggggggccgtgcacaccccaaaccctgagcttcacacttaaactcatggggagggcccttcagagcagagtccacaggcgggtggtgctacatacacaagcttagtgtacgagtgtaagatacactttaagccagacacctaattcttcagttcactgcccatgtgatactgattgccacattaaggttgaacagcatggctcagagtctagagaaagtgatcaccaagctgtctcatcaccaaataggtagtcaaggcagcctcatctccccaggtgaggggcgggtccccactttaggacaagaggcagcttgccttccaccagacgccagcctcggccttccttcccgactcactgtgggtacccttctacactgaccagcaagctaggccgctggaggaaagggaactcacccaactctaaattgtgccgcttagacttagctgtcagtgtgacttcctttcccacccacccccagaaaaacagaaagagcatctggggagcgagtgaaaattccttaggtgattcctaagatttccttgggtatctggtttttgttttcatatttgagtgtgtgcatgtgtgcatgactttaatgacttttttaatggggtgggaggtggctggggtgctggggttgaaggaagtttgggttgatttttgtggtgttttgtttaatagagaattttttttttcctgttcccctgtcagctggtctgacagatttaagaactctcattcttaaaagactttggacttaaattctagcattttagactaggactgttctactgtgaagaaagttctgtctcctttagcccggtttgtttctccctgctcaggtctagaatcccaagcagtgttcttttctggtgaacactgtgagccgcagatgtgactttttttttaaagtcatctcttcagcaatccagaggttccttgacctcattatttgtcctatctctcccttatagtcctaagccaagacatttgacctttgacatttgacctttgcagtgtcatgtgagggcgtcagtatagaggcctttgcatctgggcctggcacccgctctctgcctctggaggctaaaccctgtctggatttctcttgggatctaacgtgggatcttctggacagacaaccgtgacatcagcagtgctggtgctgctgtgtgtggactgaacacctgcactttgcagaggacacgctgcatgggccccgcttgcggttcattcaggcctgctgcaggagctctgagaacaagaaagagtggacacccgttcccctgcatcatctgtcttgcgtgctatttcagagtggggaagtgataaactatttgccttctggagctctttgtgaaaaattaaaaaaaaacttagctc

SEQ ID NO: 44041 - DNA, 1893 bp, Homo Sapiens
ttttaagtgtacctatgtgctgccccttaaaacattcatggcatctggcaaatagacccttgtaggctggcctggcatattcagatgttgccgcatcatcacagagaaggtcaaatgaagatgtaaccattgctgctcatgtgtcttctctaagcaacaaggggagcgggatgtaagagagaagttgctaatgatactgtacaaaggatggattaaataatgaagtcaatttcattgatagaaaatgcaaattttaagattctcagtgtattctcagcctcgggagcatttattttttactttcctgctaaaaatccactggggaggtataaaattcactccaaagaagtttgcctgggccaaaagcctccaggttccttctgagaacaaaatactaatgtttttttttttttggctgcttgggagagactttcagcattctttcacgatatccagatatgtcccttcagcacacacactcaactttctcatctggttcgtttcatcctcccgaaagaacggtgctctcccactcttactctatttcaaagagctactctgtctcaaccacagcagccctgccaagaaaaggcaagatgaaaggctagagcatgtgctaccttgagatttcaagaagtgtcctacctcagctgaagatggagaaacggggagtggagaggggatcagcccagggtaccatgtgatgactaatatgccactcattaagggcttttacctcggctgtccacatccagtcatgcatttggggccaggcatgcctgcgaaatgattgacattcctgtaggtgccccatagaggtgtggcattgagaaattatgtctggaaaatacagccagtgtagtgaccagctgagttaccatataccctgatgattccccttctgtaacagaaggtgacaacaactttgtgaactttctatatctttatctgatgccccaagtggcatcatctttatgtacatgccttagttgagaatatgagactgctctaatctttgtgaatgccttcacacttcagctgaggatgtcaccttctctgtcactccccatcctgcaacctctgcctttgctctgtctaccccagcaattttcatagtgttatccaggtactgtgctaaaaggtcagctcttctgtaaaatgccatgcttcgcagcttcaaaaagcaaaattctgtatttcatggagggagggaagggtcattctcttctaagaaaaatagactggacaggcgaatgcatgcatgcatgtgtttagagttgcttctcagaagacaaagagatgatagcaactattaaaatatgaatgaatgaatgagtgaatgagttgaaggcctagctcgggctgataaagcttttgccttagtagaggttttatgtcaacaccttcaggagggaagcccttatttctgggttgaactccccttccatgatattatgctagcaattgccatcacttagttcctggcgaaggcagaaaaagaaaacaaaaaatcagcattgtcattgacaaaactggatgctgaagataaagtaaaattgtcttttcccttgtcccacatttttgggattaaagccagaattgaataggaaatacagtactatttctgaagttgatagccgatctttaagaagaccctgtctttaaaatgaaactagcaggcaaacacctaaataatcgaaaattaccaaagaacaacaacgaaacaagaaaacctaaagatttttacttcctattcttattcctttccttattactgtgacaccccttgcattgctcagttgcctgtgtgtcaaaataacttgtggacgttggaaattatttgaaaatgtattgtgtggaatgtaataaaatgatgatatttttatacaaaca

SEQ ID NO: 44042 - DNA, 2428 bp, Homo Sapiens
atgcttacaaggaactgtttatccctgcttctctgggttctgtttgatggaggtctcctaacaccactacaaccacagccacagcagactttagccacagagccaagagaaaatgttatccatctgccaggacaacggtcacatttccaacgtgttaaacgtggctgggtatggaatcaattttttgtgctggaagaatacgtgggctccgagcctcagtatgtgggaaagctccattccgacttagacaagggagagggcactgtgaaatacaccctctcaggagatggcgctggcaccgtttttaccattgatgaaaccacaggggacattcatgcaataaggagcctagatagagaagagaaacctttctacactcttcgtgctcaggctgtggacatagaaaccagaaagcccctggagcctgaatcagaattcatcatcaaagtgcaggatattaatgataatgagccaaagtttttggatggaccttatgttgctactgttccagaaatgtctcctgtgggtgcatatgtactccaggtcaaggccacagatgcagatgacccgacctatggaaacagtgccagagtcgtttacagcattcttcagggacaaccttatttctctattgatcccaagacaggtgttattagaacagctttgccaaacatggacagagaagtcaaagaacaatatcaagtactcatccaagccaaggatatgggaggacagcttggaggattagccggaacaacaatagtcaacatcactctcaccgatgtcaatgacaatccacctcgattccccaaaagcatcttccacttgaaagttcctgagtcttcccctattggttcagctattggaagaataagagctgtggatcctgattttggacaaaatgcagaaattgaatacaatattgttccaggagatgggggaaatttgtttgacatcgtcacagatgaggatacacaagagggagtcatcaaattgaaaaagcctttagattttgaaacaaagaaggcatacactttcaaagttgaggcttccaaccttcaccttgaccaccggtttcactcggcgggccctttcaaagacacagctacggtgaagatcagcgtgctggacgtagatgagccaccggttttcagcaagccgctctacaccatggaggtttatgaagacactccggtagggaccatcattggcgctgtcactgctcaagacctggatgtaggcagcagtgctgttaggtacttcatagattggaagagtgatggggacagctactttacaatagatggaaatgaaggaaccatcgccactaatgaattactagacagagaaagcactgcgcagtataatttctccataattgcgagtaaagttagtaaccctttattgaccagcaaagtcaatatactgattaatgtcttagatgtaaatgaatttcctccagaaatatctgtgccatatgagacagccgtgtgtgaaaatgccaagccaggacagataattcagatagtcagtgctgcagaccgagatctttcacctgctgggcaacaattctcctttagattatcacctgaggctgctatcaaaccaaattttacagttcgtgacttcagaaacaacacagcggggattgaaacccgaagaaatggatacagccgcaggcagcaagagttgtatttcctccctgttgtaatagaagacagcagctaccctgtccagagcagcacaaacacaatgactattcgagtctgtagatgtgactctgatggcaccatcctgtcttgtaatgtggaagcaatttttctacctgtaggacttagcactggggcgttgattgcaattctactatgcattgttatactcttagccatagttgtactgtatgtagcactgcgaaggcagaagaaaaaagacaccctgatgacctctaaagaagacatcagagacaacgtcatccattacgatgatgaaggaggtggggaggaagatacccaggctttcgacatcggggctctgagaaacccaaaagtgattgaggagaacaaaattcgcagggatataaaaccagactctctctgtttacctcgtcagagaccacccatggaagataacacagacataagggatttcattcatcaaaggctacaggaaaatgatgtggatccaactgccccaccatacgattcactggccacatatgcctacgaagggagtgggtccgtggcagagtccctcagctctatagactctctcaccacagaagccgaccaggactatgactatctgacagactggggaccccgctttaaagtcttggcagacatgtttggcgaagaagagagttataaccctgataaagtcacttaagggagtcgtggaggctaaaatacaaccgagaggggagattttt

SEQ ID NO: 44043 - DNA, 1512 bp, Homo Sapiens
atgctctcccagctagccatgctgcagggcagcctcctccttgtggttgccaccatgtctgtggctcaacagacaaggcaggaggcggataggggctgcgagacacttgtagtccagcacggccactgtagctacaccttcttgctgcccaagtctgagccctgccctccggggcctgaggtctccagggactccaacaccctccagagagaatcactggccaacccactgcacctggggaagttgcccacccagcaggtgaaacagctggagcaggcactgcagaacaacacgcagtggctgaagaagctagagagggccatcaagacgatcttgaggtcgaagctggagcaggtccagcagcaaatggcccagaatcagacggcccccatgctagagctgggcaccagcctcctgaaccagaccactgcccagatccgcaagctgaccgacatggaggctcagctcctgaaccagacatcaagaatggatgcccagatgccagagacctttctgtccaccaacaagctggagaaccagctgctgctacagaggcagaagctccagcagcttcagggccaaaacagcgcgctcgagaagcggttgcaggccctggagaccaagcagcaggaggagctggccagcatcctcagcaagaaggcgaagctgctgaacacgctgagccgccagagcgccgccctcaccaacatcgagcgcggcctgcgcggtgtcaggcacaactccagcctcctgcaggaccagcagcacagcctgcgccagctgctggtgttgttgcggcacctggtgcaagaaagggctaacgcctcggccccggccttcataatggcaggtgagcaggtgttccaggactgtgcagagatccagcgctctggggccagtgccagtggtgtctacaccatccaggtgtccaatgcaacgaagcccaggaaggtgttctgtgacctgcagagcagtggaggcaggtggaccctcatccagcgccgtgagaatggcaccgtgaattttcagcggaactggaaggattacaaacagggcttcggagacccagctggggagcactggctgggcaatgaagtggtgcaccagctcaccagaagggcagcctactctctgcgtgtggagctgcaagactgggaaggccacgaggcctatgcccagtacgaacatttccacctgggcagtgagaaccagctatacaggctttctgtggtcgggtacagcggctcagcagggcgccagagcagcctggtcctgcagaacaccagctttagcacccttgactcagacaacgaccactgtctctgcaagtgtgcccaagtgatgtctggagggtggtggtttgacgcctgtggcctgtcaaacctcaacggcgtctactaccacgctcccgacaacaagtacaagatggacggcatccgctggcactacttcaagggccccagctactcactgcgtgcctctcgcatgatgatacggcctttggacatctaa

SEQ ID NO: 44044 - DNA, 909 bp, Homo Sapiens
atcaaagaaagtgcatcacagacaagggatgttctcaaacagcattttaatgatttaaagggaacccttggaaagctcctggatgagcgattggtgacccttttgcaagaggtggacaccattgaacaggagaccattaaaccactagatgactgccagaagctcatagaacacggagtcaacactgcagaggacttagtccgagaaggtgaaatcgccatgcttggtggtgtgggagaagagaatgagaaactgtggagctttaccaaaaaggcctcgcacattcagttggacagcttaccagaagtacctttactggttgatgtgccttgtttatctgctcagttggatgactcaattcttaacatagtgaaagaccacatttttaagcatggaacagtagcatctcgcccaccagtacagatagaagaactaatagagaaacctggaggcatcattgtacgatggtgtaaggtggatgatgactttacagcccaagattacaggctccagtttcgtaaatgtacttcaaatcattttgaggatgtatatgtaggttctgaaactgaattcatagtattgcacatagaccccaacgttgattaccagttcagagtctgcgcccgaggagatggccgacaggagtggagtccttggagtgtcccccagataggtcattccacattggtgcctcatgagtggacagctggttttgaggggtacagtctgagcagtcgaagaaatatagcacttcggaacgattctgaatcatcgggtgttctctactccagagctccgacttatttctgtgggcagacattaacattcaggcagtgcagtttttgtcaatggaaaagaaatgacaaatcagttacccgcagttacttctgggtccactgtcacgtttga

SEQ ID NO: 44045 - DNA, 1758 bp, Homo Sapiens
gctctgactgcgctcccctcccccaccagtgggaccagtactcaagagagctctggagtgctcctgaagagaaattccatggggactgtacctgaccctctgagatcagctaaaacttccctgattgcagcttccggaaaagaagacgatctaggagagccacaggctgcctcacctcggcatcgaccagctctcctgtgtaagaatgccaatggcttttcaggtgcccctgcagaaccagacctcagccccagggcagctgccgaagccctgatgcaggtttgtgagcatgagaccacccaaccagatatgtcttctcctggtgtgttcaatgaagtgcagaaagcacctgccacattcaactctcccggcaatccccagctgccagggagcagccagcccgcagcatcagccccgagttctgcagcaggaagggatcttatacacacaccattgacaatgcccgccaatcagcacacctgccagtccatcccaggtgatcagcccaatgccatcacctcatccatgcctgaagattccctgatgagatcacagagaacctcaaatagagagcaacctgagaaaccaagttgtcctgtgggaggcgtcctcagtagcagcaaagatcaggtgtcctgtgagtttccttctccagaaacaatccagggaacagtgcagactccagtgacagcagccagggtggtcagtcactcatcctctcctgtaggtggacctgaaggggaaaggcagggagccatctgtgactctgaaatgaggtcctgtaaacctctaactagagaatctggatgttcagagaacaagcagccctctgtcactgcctcgggcccccaaggcacaacttctgtgacacctcaaccaacccccctcactagcgaaccttcggcatgtcccccaggtccagagaaggtgccgctgccagcacagcgtcagatgtcaaggttcaaagaagccagtacgatgaccaaccaagctgaaagtgaaatcaaggaagttcccagcagggcttggcaagatgcggaggtgcaggcagtggcgagtgtcgagagcagatccgtctccaccagccccagtatcctcactgcatttctgaaggaaagccgtgctcctgagcattttgaacaagagcagctgcgtgtcatttgccacagcagtgggagccacacactggagctctctgacagcacgctagccccccaggagtccagccagtgccctggcatcatgccacaggtgcacattcaggcagctgcagctgagtctacagctttccaacgggaaaataaacttgcgagcctaccaggtggggtccttaaaacctcatcaatcaatttggtctccagtaatgcccagcatacgtgtaaagaagatgggaggttagcaggaatgactccagtgagggaagagtcaactgctaaaaagctcgcaggtactaattctagctccctgaaagctaccgccattgaccagatttctatcagtgcatgcagtcaagctgaaacaagttatggattggggaaatttgaaaccaggccatctgagtttgcagagaaaacgacaaacggccacaaaacagacccagattgcaaactatctgactcttgtggctctatcagcaaagctgatcattctgggagcttggatcccactaataaaggagatgcaagggaaaagaagcctgcatctcctcaggtagtaaaagaaaaagagtctactggcactgatacctcggatgccaaa

SEQ ID NO: 44046 - DNA, 1206 bp, Homo Sapiens
atgcagagagaggagatccggacggtgaaaaggggcggaggcgcgagcggccgggtccctgggctgcgctccggcgacggccgcccgagacgggtgtcgaggacagggatcgcggaggatgtggatcccctccctggcctgcccaggcgcgcgcgtccctccgtctcggggtacgcagcccggccgggcgcactcgccgtttccgggccggcggggcagccaccgggacaagggccacagcgcccccgccgcccggccaaggacgcgcagcccgcgcctccgccccgccccgccggcgcgacccgcacgggcgcgccccccgcagaggggcgtcggcacaaagccgccccacacaatggcccggcccggcgcagcccgccctgcaacccggctccgcgcagctgcactcacatctgggcaacgagggcctgtggtccacgggcacccagatcttctgcactcggctctgcgtcagttccaacggcatcttcgcggctggacggcccgcctcccggggccgagatcccgacgctggcaggagagcggccgccgacccccggaacaaaggaggagaggggggcgtgcgccggcgcgcggccgggcgtttcctgcgctgccaggggaaacgtgctttgggctaagttccggaccctcgcctgtgcggggctcgacgtgtgctgcgagggtagcgaggctggggatggcacggccggctcgtccgctcggaaagctctgggatgctcgggcgcagtgacagccgcgctctcgccaccaggccctgctgctcgcctcctctccggcttggctgggatgccccgcgcaccgccggcttttaaagagtccgggctggccgcagacgcgtacgtcagcctcggggcgggccgcattccttgggtcccagcccccttccacgtggggaggagggtgggcgagccgggaagcagcctgcgagctccccctgcgggcgacggcggtgcaccagctcccgccgccctgccccgggcctggagcgcgcccagccctgctgaagggtcctggctgctgttatcccctcgtcccgttgtcccctcgggacgtctggcacagcttccccgactaattccggcccctcacctcaactgtgctggccgggaggagagcagagacgcagtcctgcccagtgtagaccgtggaccccgcagccgaatcccttgggaagctgcttaa

SEQ ID NO: 44047 - DNA, 354 bp, Homo Sapiens
atccgtgctcagctcacagagcagatgaaatgcctggaccagcagtgtgagcttcgggtgcaactgttgcaggacctccaggacttcttccgaaagaaggcagagattgagatggactactcccgcaacctggagaagctggcagaacgcttcctggccaagacatgcagcaccaaggaccagcaattcaagaaggatcagaatgttctctctccagtcaactgctggaatctcctcttaaaccaggtgaagcgggaaagcagggaccataccaccctgagtgacatctacctgaataatatcattcctcgatttgtacaagtcagcgaggactcaggaagactctttaaaaag

SEQ ID NO: 44048 - DNA, 1828 bp, Homo Sapiens
agcagtcctctgaagcttgaggagcctctagaactatgagcccgaggccttcccctctcccagagcgcagaggctttgaaggctacctctgggaagccgctcaccgtcggaagctgcgggagctgaaactgcgccatcgtcactgtcggcggccatgacaccgctcgtctcccgcctgagtcgtctgtgggccatcatgaggaagccacgagcagccgtgggaagtggtcacaggaagcaggcagccagccaggaagggaggcagaagcatgctaagaacaacagtcaggccaagccttctgcctgtgatgggatgattgctgagtgtcctggggccccagcaggcctggccaggcagccggaagaggtggtattgcaggcctctgtctcctcataccatctattcagagacgtagctgaagtcacagccttccgagggagcctgctaagctggtacgaccaagagaaacgggacctaccatggagaagacgggcagaagatgagatggacctggacaggcgggcatatgctgtgtgggtctcagaggtcatgctgcagcagacccaggttgccactgtgatcaactactataccggatggatgcagaagtggcctacactgcaggacctggccagtgcttccctggaggaggtgaatcaactctgggctggcctgggctactattctcgtggccggcggctgcaggagggagctcggaaggtggtagaggagctagggggccacatgccacgtacagcagagaccctgcagcagctcctgcctggcgtggggcgctacacagctggggccattgcctctatcgcctttggccaggcaaccggtgtggtggatggcaacgtagcacgggtgctgtgccgtgtccgagccattggtgctgatcccagcagcacccttgtttcccagcagctctggggtctagcccagcagctggtggacccagcccggccaggagatttcaaccaagcagccatggagctaggggccacagtgtgtaccccacagcgcccactgtgcagccagtgccctgtggagagcctgtgccgggcacgccagagagtggagcaggaacagctcttagcctcagggagcctgtcgggcagtcctgacgtggaggagtgtgctcccaacactggacagtgccacctgtgcctgcctccctcggagccctgggaccagaccctgggagtggtcaacttccccagaaaggccagccgcaagccccccagggaggagagctctgccacctgtgttctggaacagcctggggcccttggggcccaaattctgctggtgcagaggcccaactcaggtctgctggcaggactgtgggagttcccgtccgtgacctgggagccctcagagcagcttcagcgcaaggccctgctgcaggaactacagcgttgggctgggcccctcccagccacgcacctccggcaccttggggaggttgtccacaccttctctcacatcaagctgacatatcaagtatatgggctggccttggaagggcagaccccagtgaccaccgtaccaccaggtgctcgctggctgacgcaggaggaatttcacaccgcagctgtttccaccgccatgaaaaaggcactacctttgttgtctttgttgtacttccttgttttccgtgtgtatcagggccaacagccagggacctgtatgggttccaaaaggtcccaggtgtcctctccgtgcagtcggaaaaagccccgcatgggccagcaagtcctggataatttctttcggtctcacatctccactgatgcacacagcctcaacagtgcagcccagtga

SEQ ID NO: 44049 - DNA, 321 bp, Homo Sapiens
atggagaaggctaaactttttcttcccacatgctcacttccttgcttgttcgctagctgctgcatctggcccctcaagggtaaagtcaaggggaaaaggagattgagaggaaggacagtctgtgaattgggtctcaccgtgtttcccaggctgaagtacagtgttgtgatatcagttcattgcaacttctgtcttctgagctcaagcaatcctcttgcctcagcctctcaagtagctgggactgactacaggcatgaaccaccacacctggctaattttttttgtatttttgtcgaaaagacagtttcgccatgttgtaca

SEQ ID NO: 44050 - DNA, 1519 bp, Homo Sapiens
ccagtctccgcgcctccacccagctcaggaacccgcgaaccctctcttgaccactatgagcctcccgtccagccgcgcggcccgtgtcccgggtccttcgggctccttgtgcgcgctgctcgcgctgctgctcctgctgacgccgccggggcccctcgccagcgctggtcctgtctctgctgtgctgacagagctgcgttgcacttgtttacgcgttacgctgagagtaaaccccaaaacgattggtaaactgcaggtgttccccgcaggcccgcagtgctccaaggtggaagtggtagcctccctgaagaacgggaagcaagtttgtctggacccggaagccccttttctaaagaaagtcatccagaaaattttggacagtggaaacaagaaaaactgagtaacaaaaaagaccatgcatcataaaattgcccagtcttcagcggagcagttttctggagatccctggacccagtaagaataagaaggaagggttggtttttttccattttctacatggattccctactttgaagagtgtgggggaaagcctacgcttctccctgaagtttacagctcagctaatgaagtactaatatagtatttccactatttactgttattttacctgataagttattgaaccctttggcaattgaccatattgtgagcaaagaatcactggttattagtctttcaatgaatattgaattgaagataactattgtatttctatcatacattccttaaagtcttaccgaaaaggctgtggatttcgtatggaaataatgttttattagtgtgctgttgagggaggtatcctgttgttcttactcactcttctcataaaataggaaatattttagttctgtttcttggggaatatgttactctttaccctaggatgctatttaagttgtactgtattagaacactgggtgtgtcataccgttatctgtgcagaatatatttccttattcagaatttctaaaaatttaagttctgtaagggctaatatattctcttcctatggttttagacgtttgatgtcttcttagtatggcataatgtcatgatttactcattaaactttgattttgtatgctattttttcactataggatgactataattctggtcactaaatatacactttagatagatgaagaagcccaaaaacagataaattcctgattgctaatttacatagaaatgtattctcttggttttttaaataaaagcaaaattaacaatgatctgtgctctgaaagttttgaaaatatatttgaacaatttgaatataaattcatcatttagtcctcaaaatatatatagcattgctaagattttcagatatctattgtggatcttttaaaggttttgaccattttgttatgaggaattatacatgtatcacattcactatattaaaattgcacttttattttttcctgtgtgtcatgttggtttttggtacttgtattgtcatttggagaaacaataaaagatttctaaacca

SEQ ID NO: 44051 - DNA, 2472 bp, Homo Sapiens
atgaatgaacacttatcaagcctaattaaaaaaaaacgtaaatgtatgcagcccaaagattttaattttaaaacaccagaaaatgataagagatttcagaagaaatttgagaaaatggctaaagagctacaaaggcaaaaaacaaatctagatgatgatgtacctattctcttatttgaatctaatggttcattaatatatactcccacaattgaaattaatagtaggcaccacagcgcaatggagaagagattacaagagatgaaggagaaaagggaaaatctttcccccacctcttcccaaatgattcagcagtctcatgataatccaagtaactctctgtgtgaagcacctttgaacatttcacgtgatactttgtgttcagatgaatactttgctggtggcttacactcatcttttgatgatctttgtggaaactcaggatgtggaaatcaggaaaggaagttggaaggatccattaatgacattaaaagtgatgtgtgtatttcttcacttgtattgaaagcaaataatattcattcatcaccatctttcactcacctcgataaatcaagtcctcagaaatttctgagtaatctttcaaaggaagaaataaacttgcaaagaaatattgcaggtaaagtagtcacccctgaccaaaagcaggctgcaggtatgtctcaggagacgtttgaagagaagtatcgtttgtctcctaccttatcttcaacaaaaggccaccttttgatacattcaagacccaggagttcctcagtaaagagaaaaagagtatcacatggctcccattcacctccgaaggaaaaatgcaagagaaagaggagcaccaggagatctatcatgccgaggctgcagctgtgcaggtcggaagacaggctgcagcacgtggcgggacctgccctggaggctcttagctgtggggagtcttcatatgatgactatttttcacctgataatcttaaggaaaggtattcagagaatcttcctcctgaatctcagctgccatcaagccctgctcagttgagctgcagaagtctttctaagaaggagagaacaagcatatttgaaatgtctgatttttcctgcgttggcaaaaaaaccagaacagttgacattaccaatttcacagcaaaaaccatctccagtcctcggaaaactggaaatggtgaaggccgtgcaacttcgagttgcgtgacttctgcccctgaagaagccctaaggtgttgtagacaggctgggaaagaagacgcatgcccagagggaaatggcttttcttacaccattgaggaccctgctcttccaaaaggacatgatgatgatttaactcctttggaaggaagccttgaagaaatgaaagaagcggttggtctgaaaagcacacagaacaaaggtaccacttccaaaatatcaaactcctctgaaggcgaagcccagagtgaacatgagccatgttttatagttgactgtaacatggagacgtctacagaagagaaggaaaacttacccggaggatacagtggaagtgttaaaaatagaccaacaaggcatgatgttttagatgactcatgtgacggctttaaggacctcatcaaacctcatgaggaattgaagaaaagtgggagaggcaaaaagccaacaagaacattagtcatgacaagcatgccatctgaaaagcagaatgtcgtcatccaggttgtggataaattgaaaggcttttcaattgcaccagacgtctgtgagaccacgactcacgtgctttccgggaagccacttcgcaccctgaatgtgctgctgggaattgcgcgtggctgctgggttctctcttatgattgggtgctatggtctttagaattgggtcactggatttctgaggagccgttcgaactgtctcaccacttccctgcagctcccctgtgccgaagcgagtgccacttgtctgcagggccgtaccgcggaaccctctttgccgaccagccagcgatgtttgtctcgcctgccagcagccccccagtggccaagctctgtgaactagtccacctgtgcggaggccgggtcagccaagtcccccgccaggccagcatcgtcatcgggccctacagcggaaagaagaaagccacagtcaagtatctgtctgagaaatgggtcttagattccatcacccagcacaaggtctgtgcccctgaaaactacctattgtcacaatgacagtgacctcactggcctgtggtgactgcacacagctcgcaaaactgtctttggatgttcaaatgagaaacaaaactgtgaagagaaggaactggcgtatacaagatgacttctgatatcatgtttgccatgtgttgtggttcttaagaactcataggtgactttctgatgactgaatgtctgtttcagagacgcttcgggcctttttatttttattttattttttattttttgagacggagtcctgcc

SEQ ID NO: 44052 - DNA, 2166 bp, Homo Sapiens
agtgcagattctgggaaagtgaactccacggaagactcagaaaccaagttctaattcagttgccatgaaaacttaaggtgagaggattgtcaaccagtgaaaaatacggaggaaaacactaacagaatatgatgaagaagccaagacttgggctgcttgcattacattaaccgaggtttacccgcagcgaggctgcctccaaagcatccggagtttgcaaccatcactgtccaccccgcgagctgcgatagtgcgagaactacaattcccgtggggctgtgcgggagcatcgcgagagttacattaactgtggcggcgggaaggcggagcctgcagctggctgggcggttaggagggcccggggccgagacgatggctgaccacaaccctgacagcgactccacgccgcgcacgctgctgcgacgcgtgctggatacagcggacccgcgcaccccgcggcgaccccggagtgctcgggctggagcccggagagccctgcttgaaacggcttcccccaggaagttgagtggccaaacaaggacgatagccagagggcgttcccatggagccaggtctgttggcagatcggcccatattcaggccagtgggcacttggaggaacagacacctcggacgctgctgaagaacatcctactaactgccccagaatcttccatcctgatgcctgagtcggtagtgaagccagtgccagcaccgcaggcggtccaaccctccagacaagagagcagttgcggcagcctggagctgcaacttcctgagctcgagccccccacaaccctggctccaggtctgctggcccctggcaggaggaaacagaggctgagactgtcagtgtttcagcagggagtggaccaggggctgtctctctcccaagagcctcaagggaatgctgatgcctcttccctcaccagatccctcaacctgacctttgccacacctcttcagccacagtcagtgcagaggcctggcttggcccgcagacctccagcccgccgagctgtagacgtgggtgcctttttgcgggatctgcgagatacttccctggctcctccaaacattgtgttggaggacacccagccgttctctcagcccatggttggctcccccaacgtgtatcactccctgccctgcacgcctcacactggggctgaagacgctgagcaggctgccggtcgcaagacacagagcagtgggcctgggctgcagaagaatagccctgggaaaccagcccagtttctggcaggagaggcagaggaggtcaatgcctttgctctgggcttcctgagcaccagcagtggtgtctctggagaagatgaagtagagcccttacacgatggagttgaagaggcagagaaaaagatggaagaagaaggtgtgagtgtgagtgaaatggaggcaacaggagcacaaggacccagcagggtagaagaggctgagggacacacagaggtgacagaagcagagggatcccaggggactgctgaggctgacgggccaggagcatcttcaggggatgaggatgcctctggcagggcagcaagtccagagtcggcctccagcacccctgagtctctccaggccaggcgacatcatcagtttcttgagccagccccagcgcctggtgctgcagtcttatcttcagagcctgcagagcctctgttggtcaggcatccccctaggccccggaccaccggccccaggccccggcaagatccccacaaggctggactgagccactatgtgaaactctttagcttctatgccaagatgcccatggagaggaaggctcttgagatggtggagaagtgcctagataaatatttccagcatctttgtgatgatctggaggtatttgctgctcatgctggccgcaagactgtgaagccagaggacctggagctgctgatgcggcggcagggcctggtcactgaccaagtctcactgcacgtgctagtggagcggcacctgcccctggagtaccggcagctgctcatcccctgtgcatacagtggcaactctgtcttccctgcccagtagtggccaggcttcaacactttccctgtccccacctggggactcttgcccccacatatttctccaggtctcctccccacccccccagcatcaataaagtgtcataaacag

SEQ ID NO: 44053 - DNA, 678 bp, Homo Sapiens
atggcaacccatgccttagaaatcgctgggctgtttcttggtggtgttggaatggtgggcacagtggctgtcactgtcatgcctcagtggagagtgtcggccttcattgaaaacaacatcgtggtttttgaaaacttctgggaaggactgtggatgaattgcgtgaggcaggctaacatcaggatgcagtgcaaaatctatgattccctgctggctctttctccggacctacaggcagccagaggactgatgtgtgctgcttccgtgatgtccttcttggctttcatgatggccatccttggcatgaaatgcaccaggtgcacgggggacaatgagaaggtgaaggctcacattctgctgacggctggaatcatcttcatcatcacgggcatggtggtgctcatccctgtgagctgggttgccaatgccatcatcagagatttctataactcaatagtgaatgttgcccaaaaacgtgagcttggagaagctctctacttaggatggaccacggcactggtgctgattgttggaggagctctgttctgctgcgttttttgttgcaacgaaaagagcagtagctacagatactcgataccttcccatcgcacaacccaaaaaagttatcacaccggaaagaagtcaccgagcgtctactccagaagtcagtatgtgtag

SEQ ID NO: 44054 - DNA, 360 bp, Homo Sapiens
atggtgcaccacctgagcgagggccttggatgtcttatggtggaagcagctgccatgattataacaatacatgagatagatacggcagaagtcaggaaagttgctcaaggagctatggcgatttttattcttgtggtcatgagaacattggcagaaaagaccaaaggaatccaccttctctggatagggtgcactctgctcctcttgaagcatatggtagttcaagttatgtgccatctacaggagatggtggggaaagtcaatctgaaaaaggcgactaaagcggattttaaagcaaagaggtgctgtttcagagaaactaggcaacaacatcattctgcaacaaccagccgtggttga

SEQ ID NO: 44055 - DNA, 1253 bp, Homo Sapiens
gggtagaggcggcggcggcggcggcggcggcggcggcggcgggctcggaggcagcggttgggctcgcggcgagcggacggggtcgagtcagtgccgtttgcgccagttggaatcgaagcctcttaaaatggcagatgatttggacttcgagacaggagatgcaggggcctcagccaccttcccaatgcagtgctcagcattacgtaagaatggctttgtggtgctcaaaggctggccatgtaagatcgtggagatgtctgcttcgaagactggcaagcacggccacgccaaggtccatctggttggtattgacatctttactgggaagaaatatgaagatatctgcccgtcaactcataatatggatgtccccaacatcaaaaggaatgacttccagctgattggcatccaggatgggtacctatcactgctccaggacagcggggaggtaccagaggaccttcgtctccctgagggagaccttggcaaggagattgagcagaagtacgactgtggagaagagatcctgatcacgctgctgtctgccatgacagaggaggcagctgttgcaatcaaggccatggcaaaataactggctcccaaggtggcagtggtggcagcagtgatcctccgaacctgcagaggccccctcccccagcctggcctggctctggcctggtcctaggttggactcctcctacacaatttatttgacgttttattttggttttccccaccccctcaatctgtcagggagcccctgcccttcacctagctcccttggccaggagcgagcgaagccatggtcttggtgaagctgccctcctcttctcccctcacactacagccctggtgggggagaagggggtgggtgctgcttgtggtttagtcttttttttttttaaattcaatctggaatcagaaagcggtggattctggcaaatggtccttgtgccctccccactcatccttggtctggtcccctgttgcccatagccctttaccctgagcaccacccaacagactggggaccagccccctcgcctgcctgtgtctctccccaaacccctttagatggggagggaagaagaggagaggggaggggacctgccccctcctcaggcatctgggaagggcctgcccccatgggctttacccttccctgcgggctctctccccgacacatttgttaaaatcaaacctgaataacactacaagtttaatatgaaaaaaaaaaaaaaaagaaagaaaga

SEQ ID NO: 44056 - DNA, 1806 bp, Homo Sapiens
agaaaaatgaagatgaaagcaactgactgtgacaatctgctgtgtacacaatctaagtgtatttttctttcttttctcttttcctcctggggtctccagtttaccgtggtttctgggcagtcctgatgctcctgggggtagttgctgtagtcatcgcaagctttttgatcatctgtgcagcccccttcgccagccattttctctacaaagctgggggaggctcatatattgctgcaggcatcctattttcattggtggtgatgctgtatgtcatctgggtccaggcagtggctgacatggaaagctaccgaaacatgaaaatgaaggactgcctggatttcaccccttctgttctgtatggctggtcatttttcctggccccagctgggatatttttttctttgctagctggattactatttctggttgttggatggcatattcagatacatcactaaatcaactgttgccacaagtattttcttgagagattttaaaacaaggaatactttttttccattttgtttcattgatcccagcataaagttagtagatataactttttagttgctattcaaattaatcattttactaaaattttcttcagtaagaaggtcctagaatctctccagacaccagcaagcctctatcttgtctaagtgctgtcaaggacctagttctttagggaataggtaaacaggtctccctttcattgaacatgttagagttcatgcaggtcgcaaaggcctgataatagcttaataccatgacatggggaaaatctcgatagatttggcttaaagtctccttggcattcacttctgctaattaaaaaaaatccttgaagaataattaagaatgggcaaggttgtcagagaatttattttgtttcttgcccacacagataatatccacatacacattcactggctcttgtgagcaaatgaatttaaaaatagacagcagttgttctaattagtgggagccatgtactcaccagttaaaatgggccacaacaaacaagactgagagcatgtacttatcttgctttttcaccaacagtggtttggttacctagttttattcacttaattgtgcatgcttacataaactttaaactacatttaaaactagcaaatctgcataccaaattatgtataacgtagattgaatttttatgaacttaaagtgagttaattgtataatgtaatattgtttaaaatatgtaaaaaccaagcatttccgcttggtccataattctatttgatattttaaaattctcatttaaaaattatattgctatcattcagcatgtgaaaatttattgataaaatgtgattttaatattttttagatataaactttcaacgtacttccatatgaggattataatagccctgctttattaaagaccataaaatattaactttccccaagatgttatgggttccagttcttctgatcatttgattcctttaattactgtccctcaatttcttcatctttacaatagatatattaacatttacagatcgactatttcctttaacctcctagaagaaagtttttgtggggaaagatgattctgtattattcagtagcatagacattttgcatatcaaagatgttcatttggcactaatgttgattgaaatcaaatccatctgagatgcctagctcgtatttgcattctggaagcctccatcgcaggggagctcggcagggtatgtgagctttgttggaggtgcggtgtttcattctgcagctgttgtgaggacagagaggcatggcccacaggcaaaaaaa

SEQ ID NO: 44057 - DNA, 456 bp, Homo Sapiens
ttggacttcactttcgtgtgccccgagatcatcgcattcagcgaccatgctgagggcttccgaaagtgcaaagtgctggggacctcggtgggctcattcacccacctggcttggatcaacatcccccggaaggagggaggctttgagtccctggacacccctctgcttgctgacgtgaccaagttgtctgagaattacggcgtgttgaaaacagacgagggcattgtctgcaggggcttggacctctttatcatccatggcaaggatgtccttccccagatcgctgttaatgattggcctgtgggacactttgtggatgaggccctgcggctggtccaggccttccagtacacagacgagcacccggaaatttgtcctgctggctggaagcctggcagtgacatgatcaagcccagcgtgaatgacagcaaggaatatttctccaaacacaactag

SEQ ID NO: 44058 - DNA, 3261 bp, Homo Sapiens
atgaaaaaatttaagagaaggctatccctcacactccgaggaagtcagactattgatgaatcattgtctgaattggctgaacaaatgactattgaagaaaacagcagcaaggataatgagcctattgtgaagaatggcaggcctccaacgtctcacagtatgcattccttcctccaccagtacacaggatctttcaagaagcccccattgcggagaccacacagtgttattggagggagccttggctccttcatggcaatgcccagaaatggaagcagattagatattgttcatgaaaatctaaaaatgggatcagatggtgagagtgaccaagcttctgggacatcatctgatgaagtccagtcacctacaggtgtttgtctcagaaatcgtatacatagacggatctcaatggaggatttaaataagcggttatcactgcctgcagacatcagaatacctgatggatatcttgaaaagttgcagataaacagtccaccatttgaccaaccaatgagtcgaaggtctcgtagagcttccttatcagaaattggctttggaaaaatggaaacctacatcaaattggaaaagcttggagagggtacatatgcaacagtatataaaggaagaagtaaattgacagagaatttggtggcattaaaagagatccgattggaacatgaagaaggtgcaccctgcacagctataagagaagtttcactattaaaggatttaaaacatgcaaatatagtaaccttacatgacattgttcacacagataaatccttgactttggtgtttgagtatctggataaagacctgaaacagtacatggatgactgtggaaacatcatgagtatgcacaacgtaaagctgtttctgtaccaaattctacgtggtttggcatattgccatagaagaaaggtattgcatcgagacttgaaaccacagaacctcctcattaatgagaaaggagaattaaagctagcagattttggactagcccgagccaagtcagttcccacaaagacctactcaaatgaagttgtcacactatggtaccggccacctgatgtgcttcttggttcctcggagtactcaacacagattgacatgtggggtgttggttgcattttctttgaaatggcttctggaagacctttatttccaggatcaaccgtggaagatgaactgcacttaattttccgactgctaggaactccatctcaggaaacttggccaggtatttcttcaaatgaggagttcaagaactacaactttccaaaatataaaccacagcctctaattaaccacgcacccaggttagactctgaaggaattgagttgataacaaaatttcttcagtatgaatctaagaaaagggtttcagctgaagaggccatgaaacatgtgtactttcgaagtctgggaccaagaatacatgctttaccagaaagtgtatcaatattcagtttgaaagagattcagttgcaaaaggacccgggttttcgaaattcttcttatccagagacaggacatgggaagaacagaagacagagcatgctcttttaagtctgataacatggtttcaagcccagcccccagcctttcttaccaatcaaggactcagaactgaaggcaattatttcttttggtggacttggaatctccgtttgtctacactgtcctcttcacagtggagtctttttatttcagacctacagattgtttttatatttgttgtcacagtgtgacaattttttgtacagtcggttttaaggtcttctctgccattagagccagtaggttacagctattgatgtaactatagctgcaatttttgtgcaggactgagaaacacagtgcattatttattgcggaatcattgctgctaaataactactgtctgtttatttaacacaacaattgaatgcctgaagaagttgcagtggctttattatatgtgaatgcatctgtttctcctcacgaattgttttactgctgcattttttgtttttaaaattaaactgcagtgtttcctggaatgtaaatttagctttgcttaatagtaaaataagtgagccatcttgaacactttaagtttatactatataatttcttaatgaacattggcaaatagagtagctaagagattgacaagcacattacgtttagataagcatgtgatgcagaagttgattcaagcaagtgaatccctgacattttgaggatctcacattagacaccaacaaattaaagctccaaaattatttattttttatgtgttcctcactttagaaacgtctactgcatattactggatatttgtatactaatacacttacctattttacattgtgttttaaatttagttaaaacttaaccgtagaagtctgttcaaacgcgaaaggtcttgctttgtttgttttaaatacatttattttattagaaaggatgatatttcattggggaatagtttctttcatttgggggctatgtgtttcaataacattcacttggaatcagctgaaagctgtaatatgtctttgaaatgagccatgataaattacaaacaagagaaatgagaacttacaggattgcttgaaattattgtgggtattatctgtttaccagagatactaaatattagttttaattatgcatctctttgaacatcataaacacactttggtgttggtaacagtattttaagcatttttgttcacttttaaggactatttgtttagtgcatcttacaaactataaatcttaattggtatattttgaaatggtcgtgtaaatttttgccttatatatcatgaaaatagtcataacttaatttcttttcctgaaattcactgtaaaacattcaggggtcctaccatttctgttcaggaaatcttgtagtttattgttgttatttaacagtattaagtggatttttgtatatttcattttaactttatttgtgaatagtgattgtggcatgtttggggtgttattttaatatttcacgatactaaaattttaattttaaaaaattctggaagaaacagattcatgtgtaatggtgaatattggaccactactgcttttcacatttgtaaattggttttatgttaaaccttgtagcctaacaaactgctgttctttctaactgacagacatgtattaatattgtactttgaaggttataaatatgtggaaattccttcattttgttttgaaatttataataacaaaatctccatgttgttaaaa

SEQ ID NO: 44059 - DNA, 438 bp, Homo Sapiens
ataattttatatgtcaaggaggagatgaaaaaaaacaacatcccagaaccagttgtcatcgaaatagtctggtcaaatgtaatgagcgctgtggaatggaacaaaagagaggagattgtagcagagcaagccatcaaacacttgaagcaacacagccctctacttgctgcctttactactcaaagtcagtctgagctgaccctgttactgaagattcaggagtattgctatgacaacattcatttcatgaaagccttccggaaaatagtggtgttttataaagctgtagtcctgagcaaagagcccattttgaagtggtataaaggtacacatgttgcaaaggggaagagtgttttccttgagcaaatgaaaaagtttggagagtggctcaaaaatgctgaagaagaatctgaatctgaagctgaagaaggtgactga

SEQ ID NO: 44060 - DNA, 531 bp, Homo Sapiens
aacaacttcagcacagaaataaacaccacttccattttagtaggacctcttgtttccaatctggaaataacccatacctcaaacctcacctgtgtaaaatttagtaatactatagacacgaccaaatcccaatgcatcaggtgggtaactcctcccacacgaatagtctgcctacccttaggaatattttttgtctttggtagcttagcctatcgttgtctgaatggcttttcagaacctatgtgcttcctctcattcttagtgccccctatgaccatttacactgaacaatatttatacaattatgtcatacctaagccccacaacaaaacagtactcattcttccttttgttatcagagcaggagtgctaggtgggctaagtactggcattggcggtatcacaacctctactcagttctactacaaactatctcaagaactaaagggtgacatggaacaggtcaccgactccctggtcaccttgcaagatcaacttaattccctagcagcggtagtccttcaaaattga

SEQ ID NO: 44061 - DNA, 1288 bp, Homo Sapiens
ggcgtccagctgcacttcccacttctgactctgtgcctgctgttccctgctgggaagaagaaaagccagtgatgctggcttgaggctgtagtgggaggcccagcggattgtgagaagccagcccgggcagtgagtgtggatggcttggcaggtgagcctgctggagctggaggaccggcttcagtgtcccatctgcctggaggtcttcaaggagtccctaatgctacagtgcggccactcctactgcaagggctgcctggtttccctgtcctaccacctggacaccaaggtgcgctgccccatgtgctggcaggtggtggacggcagcagctccttgcccaacgtctccctggcctgggtgatcgaagccctgaggctccctggggacccagagcccaaggtctgcgtgcaccaccggaacccgctcagccttttctgcgagaaggaccaggagctcatctgtggcctctgcggtctgctgggctcccaccaacaccacccggtcacgcccgtctccaccgtctgcagccgcatgaaggaggagctcgcagccctcttctctgagctgaagcaggagcagaagaaggtggatgagctcatcgccaaactggtgaaaaaccggacccgaatcgtcaatgagtcggatgtcttcagctgggtgatccgccgcgagttccaggagctgcgccacccggtggacgaggagaaggcccgctgcctggaggggatagggggtcacacccgtggcctggtggcctccctggacatgcagctggagcaggcccagggaacccgggagcggctggcccaagccgagtgtgtgctggaacagttcggcaatgaggaccaccatgagttcatctggttccactccatggcctccaggtaataaccttggagagagctcagccagggtctggtggctgcgggcacgggcatctcagctccactggttcctccattcagcttaaccagcgcctcccaagcagctgcctatagctggctctataactgagcctggggaagatagaggaaagtcacatccctgccttcaagggtctcgcagacaggtggggaggcagatggtgaactgtgggtacctagaacagcagaagttcactcaagctacagaaatactagaggagggtagctcatgcctgcaatcccagtactttgggaggccaaggcaggagtattgctggaggccgggagttcgagaccagcctggccaatgtagtaacacccccgtctctacaaaaaatacaaaaataaaaaaattagttgggca

SEQ ID NO: 44062 - DNA, 674 bp, Homo Sapiens
atggcgtcggtggtgttggcgctgaggacccggacagccgttacatccttgctaagccccactccggctacagctcttgctgtcagatacgcatccaagaagtcgggtggtagctccaaaaacctcggtggaaagtcatcaggcagacgccaaggcattaagaaaatggaaggtcactatgttcatgctgggaacatcattgcaacacagcgccatttccgctggcacccaggtgcccatgtgggtgttgggaagaataaatgtctgtatgccctggaagaggggatagtccgctacactaaggaggtctacgtgcctcatcccagaaacacggaggctgtggatctgatcaccaggctgcccaagggtgctgtgctctacaagacttttgtccacgtggttcctgccaagcctgagggcaccttcaaactggtagctatgctttgatgtcctgttgaggccatcggacagagactggagcccaggtgacaggagatggtgataccagaagtcaagggttggggtggcgacacggcctcccgaggaagaggtctgcttgatggtgactctgcaggagactctgaagtgactgctgggaaaccctttgggagacctgacctggggccaaaaataaagtgagccagcgtcatgaacgcatgctatttagggacaca

SEQ ID NO: 44063 - DNA, 1281 bp, Homo Sapiens
atggggaacctgtgtggctgcattcaaggtgactcgaagaagccttccaaaaagcgtgtgaaaaggaagccctactctactaccaaggtagcctcatcttctctgatagagaatataagaagatatgctgtgcacaccaaccagtgtaggagacctcatggctcccgggtaaagaagaagaggtacccacaagaagatgacttccatcatacagtcttcagcaatcttgaaagattggacaagcttcagcccactcttgaagcctctgaggagtctctagttcacaaggacagaggagatggagagaggccagtcaacgcgagggtggtgcaggtggcccctctgaggcttgaatctactccccatgaggacaccgtacatgacatcactaaccaggacgccacacacgacatcgctaacgaggatactgtccacggcatcgctaacgaggccgccgacaagggcatcgccaacgaggacgccgcccagggcatcgccaacgaggacgccgcccacggaatcgccagcgaggatgccgcccagggcatcgccaacgaggtcgccgcccagggcatcgccaacgaggacgccgcccagggcatcgccaacgaggacgccgcccagggcatcgccaaggaggacgccgcccacgggatcgccaaggaggacgccgcccagggcatcgccaacgaggacgccgtccacggcatcgccaacgaggacgccacccatggcatcgccaacgaggacgctgcccacggcattgctaacgaggatgccgtgcacggcatcgctaatgaggactccgtatacgacatcgctaatgagggtgccgtatatgacatcgctaatgacaccgtacaaggcgctaacgaggacgctgtacacgacatcgctaatgaggacaccatacaaggcatcggtaatgaggacgctgtatacgacatcgctaacgaggacaccatacaagccgtcgctaacaaggacactgtacacaacatcgctaatgacggcaccgtacaagacatcaccaatgagggcgctttatacgacattgctaatgatatgtacaagccatcgctaatgaggacactgtatatgacattgctaacgaggacactgtacaaggcattgctaacgaggacgctgtacacaacatcgctaatgaggacaccatataagacatcaccaatgaggatgctctatatgacatcgctaatgacacccacaaggcatgctaacaaggacgctgtagacgacattgcttataaggacaccgta

SEQ ID NO: 44064 - DNA, 375 bp, Homo Sapiens
gcgtgtgaggagacgattgaaaaacccaaaaagaagaaaaagcaaaagccccaggagattcatcaggagaatggaatggaagacccatctatctctttctccaaacccaagaaaaagaaatctttttccaaggaggagttgatgagtagcgatcttgaagagaccgctggcagcaccagtcttcccaagaggaagaagtcttcacccaaggaggaaacagttaatgacaccgaagagtcaggccacagaagtggctccaagaaaacgaggaaattctccaaagaggagctggtcagcagtgggcctgaagaggcggctggcaagagcagctccaagaagaagaaaaagttccataaagcatcccaggaagattag

SEQ ID NO: 44065 - DNA, 551 bp, Homo Sapiens
atgattcaacacgcgttcctcttggaaaaagcaaggactacatcaatgctagttatattagaatagtcaattgtggagaagagtatttttatatcgctactcaaggaccactgctgagcaccatagatgacttttggcaaatggtgttggaaaataattcaaatgttattgccatgataaccagagagatagaaggtggaattatcaaatgctaccattactggcccatttctctgaagaagccattggaattgaaacacttccgtgtattcctggagaactaccagatacttcaatatttcatcattcgaatgtttcaagttgtggagaagtccacgggaactagtcactctgtaaaacagttgcagttcaccaagtggccagaccatggcactcctgcctcagcagatagcttcataaaatatattcgttatgcaaggaagagccaccttacaggacccatggttgttcactgcagtgccggcataggccggacaggggtgttcctatgtgtggatgtcgtgttctgtgccatcgtaaagaactgttca

SEQ ID NO: 44066 - DNA, 567 bp, Homo Sapiens
gtgattaaacgcctacaaaaggaaatccaggaactgaaggatgaactggccatggtcactggggagcagaggacagaggcactcacagaagcagagctccttcagctggaaaaactaataacatcctttttggaagaccaggattcagacagtagattagaggttggcgcggatatgcgtaaagttcatcactgttttcatcatttaaagaaactattgaatgacaagaagatccttgaaaacaatacagtctcctctgaaagcaaagaccaagattgtcaagaaccattaaaagaagaagaatatagaaagctacgagatattctgaaacagagagataacgaaatcaatatcctggtcaacatgttaaaaaaagaaaagaagaaagctcaggaggctctccacttggctggcatggatagacgtgaattcagacagtcccagagcccacccttccgcctaggaaacccagaagaaggtcaaagaatgcgactatcctcagctccctcacaggcccaggacttcagcattttggggaaaagatccagtttgctccacaagaaaata

SEQ ID NO: 44067 - DNA, 928 bp, Homo Sapiens
caccggcagcaccatgtcgctcacggtcgtcagcatggcgtgtgttgggttcttcttgctgcagggggcctggccacatgagggagtccacagaaaaccttccctcctggcccacccaggtcgcctggtgaaatcagaagagacagtcatcctgcaatgttggtcagatgtcatgtttgaacacttccttctgcacagagaggggatgtttaacgacactttgcgcctcattggagaacaccatgatggggtctccaaggccaacttctccatcagtcgcatgaagcaagacctggcagggacctacagatgctacggttctgttactcactccccctatcagttgtcagctcccagtgaccctctggacatcgtgatcataggtctatatgagaaaccttctctctcagcccagccgggccccacggttctggcaggagagaatgtgaccttgtcctgcagctcccggagctcctatgacatgtaccatctatccagggaaggggaggcccatgaacgtaggctccctgcagggaccaaggtcaacggaacattccaggccaactttcctctgggccctgccacccatggagggacctacagatgcttcggctctttccgtgactctccatacgagtggtcaaagtcaagtgacccactgcttgtttctgtcacaggaaacccttcaaatagttggccttcacccactgaaccaagctccgaaaccggtaaccccagacacctacatgttctgattgggacctcagtggtcaaaatccctttcaccatcctcctcttctttctccttcatcgctggtgctccgacaaaaaaaatgctgctgtaatggaccaagagcctgcagggaacagaacagtgaacagcgaggattctgatgaacaagaccatcaggaggtgtcatacgcataa

SEQ ID NO: 44068 - DNA, 1269 bp, Homo Sapiens
cgcgagagagcgagcgccaccgccgcgggccccgcagccgttctgcctgctgtcaccgctgcctccatcgccgacactagcgctccagctgcagccaaggccgctacgaaagcgcaggaagccctcgaggagcggctgcctgggggcgcaaggctcagggcgcacacctgggtttagaagatcatgaccacatggatcatctaactaaatggtacatggggacacaatggtcctttagagaatacatctgaattgctggctaatttcttgatttgccactcaacgcaggacatcgcttgttcgtagctatcagaaccctcctgaattttccccaccatgctatctttattagctggaactcctgtcctaaaacggtccttctgttgatcctgtcagtcttacttttgaaagaagatgtccgtgggagtgcacagtccagtgagaggagggtggtggctcacatgctgggtgacatcattattggagctctcttttctgttcatcaccagcctactgtggacgaagttcatgagaggaagtgtggggcagtccgtgaacagtatggcattcagagagtggaggccatgctgcataccctggaaaggatcaattcagaccccacactcttgcccaacatcacactgggctgtgagataagggattcctgctggcattcggctgtggccctagagcagagcattgagttcataagagattccctcatttcttcggaagaggaagagggcttggtgtgctctgtggatggctcctcctcttccttctgctccaagaagcccatagtaggggtcattgggcctggttccagttctgtagccattcaggtccagaatttgctccagcttttcaacatacctcagattgcttactcagcaaccatcatggatctgagtgacaagactctgttcaaatatttcatgagggttgtgccttcagatgctcagcaggcaaggtccatggtggacatagtgaagaggtacaactggacctatgtatcagccgtacacacagaaggtagaggggcaaagaaggaagagatgcgtaagagggatcagacattgatgttatcttttatgaggtgtgtgttcttgagatttgaagaaattagatggaatgattctttagtatatgatgccctggaaaatgaaaacatccaagtgctctctctctgtttccccagcagtgctgtaattcaaataaatacctttctttctcctatagctttaataaaccatttgaatgttacataaa

SEQ ID NO: 44069 - DNA, 2056 bp, Homo Sapiens
atggctgtaggaaacaacactcaacgaagttattccatcatcccgtgttttatatttgttgagcttgtcatcatggctgggacagtgctgcttgcctactacttcgaatgcactgacacttttcaggtgcatatccaaggattcttctgtcaggacggagacttaatgaagccttacccagggacagaggaagaaagcttcatcacccctctggtgctctattgtgtgctggctgccaccccaactgctattatttttattggtgagatatccatgtatttcataaaatcaacaagagaatccctgattgctcaggagaaaacaattctgaccggagaatgctgttacctgaaccccttacttcgaaggatcataagattcacaggggtgtttgcatttggactttttgctactgacatttttgtaaacgccggacaagtggtcactgggcacttaacgccatacttcctgactgtgtgcaagccaaactacaccagtgcagactgccaagcgcaccaccagtttataaacaatgggaacatttgtactggggacctggaagtgatagaaaaggctcggagatcctttccctccaaacacgctgctctgagcatttactccgccttatatgccacgatgtatattacaagcacaatcaagacgaagagcagtcgactggccaagccggtgctgtgcctcggaactctctgcacagccttcctgacaggcctcaaccgggtctctgagtatcggaaccactgctcggacgtgattgctggtttcatcctgggcactgcagtggccctgtttctgggaatgtgtgtggttcataactttaaaggaacgcaaggatctccttccaaacccaagcctgaggatccccgtggagtacccctaatggctttcccaaggatagaaagccctctggaaaccttaagtgcacagaatcactctgcgtccatgaccgaagttacctgagacgactgatgtgtcacaagctgttttttaaaatcatcttccaattctatacttcaaaacacacagttgctcaatgtcaaactgtgatgacaaatattacgtttatctagttagaagctaatgttttgtacattttttgtatgaggaagtgatgtagcttgccctgattttttttttttttttttggtcagctttaatatatttatgccagaattttaaaaccaacaaaattttcttgttcaagcgtgcattgaagaaccacatttattcaatggttgacgttgttttgtgatatttgtacacaaattttcttttctcagttttataaacacagaatataacaattcactttaaacttttattaccacagttgctgcctcctccagaatttttgaattttaataaaaggcaaacttttgagctgcaggaaggacaatgttggttaataataaatctcaaagtcaattgtagaaaaaaaattgtcttcaaaaagaatgttgcactctgatctcttaacaaattgttacgttcaaagtttaaagtgatatattaacaaagtcacctagttatacaaacaattgtcagagaattctggatttggagggtattggggttatatgattctttcttagataatggcctctactaaataactcaagatctttctggaatgtcttctggcaggcaggtgccactgtcagcttttctccaaaaagcagccaacatcagcctcccctgtcaactcaacagttttgtatctcatattatatggactttatatgaaaatgaatattttacagtttgcacagtattattttacagaaaaggaatcagagaatctacaacatagggccccagaacaacagtttcactttgtggcttttaattattctagaattttaactgcatctcatttttctagcatggtgagaactaatatgtaactcctttgattgaaggagctcttttgtccgtacctatcagaatgttttcttgacacttccatgttggctcttctcagctttttttgtacatattttttttttctaaagagaagaaaaagttatcacaaaatgta

SEQ ID NO: 44070 - DNA, 471 bp, Homo Sapiens
atggtcaaccccaccaagttcttcaatgagccctggggccgcatctccatccagctgtttgcagacaagtttccaaagacagcagaaaatgtttgtgctctgagcattggagagaaaggatttggttataagggttcctgctttcacagaattattccggggtttatgtgtcacggtggtgacttcacacaccataatggcagtggtggcaagtacatctatggggagaaatttgatgatgagaacttcatcctgaagcagacaggttctggcatcttgtccaaggaaaatgctggacccaacacaaacggttcccagtttttcatctgcagtgccaagagtgagtggttggatggtgagcatgtgttctttggcaaggtgaaagaaggcatgaatattgtggaggccatggagggttttgggtccaggaatggcaagaccagcaagaagatcaccattgctgactgttga

SEQ ID NO: 44071 - DNA, 2281 bp, Homo Sapiens
ccttcatcccacttaccgcagctccagagccctgcgggaggactcagagtcagggacacagcagcgtccggcgagatgaaggcgctcggggctgtcctgcttgccctcttgctgtgcgggcggccagggagagggcagacacagcaggaggaagaggaagaggacgaggaccacgggccagatgactacgacgaggaagatgaggatgaggtggaagaggaggagaccaacaggctccctggtggcaggagcagagtgctgctgcggtgctacacctgcaagtccctgcccagggacgagcgctgcaacctgacgcagaactgctcacatggccagacctgcacaaccctcattgcccacgggaacaccgagtcaggcctcctgaccacccactccacgtggtgcacagacagctgccagcccatcaccaagacggtggaggggacccaggtgaccatgacctgctgccagtccagcctgtgcaatgtcccaccctggcaaagctcccgagtccaggacccaacaggcaagggggcaggcggcccccggggcagctccgaaactgtgggcgcagccctcctgctcaacctccttgccggccttggagcaatgggggccaggagaccctgacccacggcccctccccacccccacccggctcacccccggccctgccagcactctgtctggtaccttcccctcctgcccctgcaccagctttggagaatggatttggagtgtcttgggcgatccagccagcgcaggccccccggcccggttgcttcctcagttcccggctgtgtccttggtgtcctttctccaccacctgtgagcagcaagactgccgcacgtgggcgctgggtccagacctcggctgccacgccccaggacctgcagccctcatgggggctggggatccccatcagcacagccaggcagagatgatacccaccacacacctgggggcccccacacccagtcctcacccttaacttctgccatgggaattcctccatctgcagcggtcacacgggcccaccctgcccttccccaggtcggcctctccgctgtctggagggaaggggatttggagggaggctgtcgtcgcccccaggaaagacgggcctgggggaggcgggacagtgggagaggcgcgctgaggatgagagggcacagggaggtgggttggggtgaggccacatgcggaggggcggggcgggggggggctggggggacaggcaccaagtatgaagaggatggggccagcggggcctgtctggctctggcgtgagcaccgctatgggagaccctggcttggaaagtgaacttgcagccttggatggggaagggccagatgctgggtgggtgcctgtcaccttgaggtgaccatctagggcagtacctgctgggcttaggacagcgcctgaggctgggaatacctgtctctgctctagcagaggctaaagcaggctagagcagtggaggggtggagttgatgaaaggagaggagtagatgagatggaatttttccagcctcatcctggcctgccctctagactccagtccccaagccctcagcctagtgggtgtcatggatggatctgggggtgtcagacaggctaccctgtgccagggagggggcagaatgggcctgcagcttcctgcagaggaagcaggactgggtagcagagccgggaaggtgggtggcccattacaggggggtccccagggtgtcctctggcagggctgtgactgctgcaagctctgccttcaccagtagctggtgccaggacagagctctgggacagcaggcagaggccgagcctgggccacagctcagccactgacttgggtatcagtttccccttctgagaagtacagagtgagacttaaagaacccctagatccccaccagttcaacactccattaactgggaagcccagagtcctgtccggcctgccaagttcatcctggtggacagcgggaggcctccgctaactgttctcttcttttccttattaataaaacacacaatgcctagctggggggtcggaaggcaaatgccctagatggtggggtcacgtctttctccttctccttcctccttctgctggctgaagtgatgactggagctcagcaaccactttgcaccatgaggcagcactgagcacggtagggcagcctggtgagaggggcctagctcgctgccgacagaagtcactgcctacctcagggtccccttacctgggtgggaaataaatttctgctgtgttgaagcta

SEQ ID NO: 44072 - DNA, 4376 bp, Homo Sapiens
gtagataacatagatcatcagtagaaaacttcttgaagttgttcaagaaaaatttgaaagtagcaaaatagaaaataaagaattaacagcagatacagaggacagcatggaagtgttgtcttaggaaacagaacacagcagtgaaaaaacagacaaaatccgctcagatacaactgcagctgataatgttttccggcttcaatgtctttagagttgggatctcttttgtcataatgtgcattttttacatgccaacagtaaactctttaccagaactgagtcctcagaaatattttagtacattgcaaccaggaaaagcctctttagcttatttttgtcaagctgattccccaagaacatctgtatttcttgaagaactgaatgaggctgttagacctctgcaggactatggaatttcagttgccaaggttaattgtgtcaaagaagaaatatcaagatactgtggaaaagaaaaggatttgatgaaagcatatttattcaagggcaacatattgctcagagaattccctactgacaccttgtttgatgtgaatgccattgtcgcccatgttctctttgctcttctttttagtgaagtgaaatatattaccaacctggaagaccttcagaacatagaaaatgctctgaaaggaaaagcaaatattatattctcatatgtaagagccattggaataccagagcacagagcagtcatggaagccgcttttgtgtatgggactacataccaatttgtcttaaccacagaaattgcccttttggaaagtattggctctgaggatgtggaatatgcacatctctacttttttcattgtaaactagtcttggacttgacccagcaatgtagaagaacactaatggaacagccattgactacactgaacattcacctgtttattaagacaatgaaagcacctctgttgactgaagttgctgaagatcctcaacaagtttcaactgtccatctccaactgggcttaccactggtttttattgttagccaacaggctacttatgaagctgatagaagaactgcagaatgggttgcttggcgtcttctgggaaaagcaggagttctactcttgttaagggactctttggaagtgaacattcctcaagatgctaatgtggtcttcaaaagagcagaagagggagttccagtggaatttttggtattacatgatgttgatttaataatatctcatgtggaaaataatatgcacattgaggaaatacaagaagatgaagacaatgacatggaaggtccagatatagatgttcaggatgatgaagtggcagaaactgttttcagagataggaagagaaaattacctttggaacttacagtggaactaacagaagaaacatttaatgcaacagtgatggcttctgacagcatagtactcttctatgctggttggcaagcagtatccatggcatttttgcaatcctatattgatgtggcagttaaactgaaaggcacatctactatgcttcttactagaataaactgtgcagattggtctgatgtatgtactaagcaaaatgttactgaatttcctatcataaagatgtacaagaaaggcgagaacccagtatcttatgctggaatgttaggaaccgaagatctcctaaaatttatccagctcaacaggatttcatatccagtgaatataacatcgatccaagaagcagaagaatatttaagtggggaattatataaagacctcatcttgtattctagtgtgtcagtattgggactatttagtccaaccatgaaaacagcaaaagaagattttagtgaagcaggaaactacctaaaaggatatgttatcactggaatttattctgaagaagatgttttgctactgtcaaccaaatatgctgcaagtcttccagccctgctgcttgccagacacacagaaggcaaaatagagagcatcccactagctagcacacatgcacaagacatagttcaaataataacagatgcactactggaaatgtttccggaaatcactgtggaaaatcttcccagttatttcagacttcagaaaccattattgattttgttcagtgatggcactgtaaatcctcagtataaaaaagcaatattgacactggtaaagcagaaatacttggattcatttactccatgctggttaaatctaaagaatactccagtggggagaggaatcttgagggcatattttgatcctctgcctccccttcctcttcttgttttggtgaatctgcattcaggtggccaagtatttgcatttccttcagaccaggctataattgaagaaaaccttgtattgtggctgaagaaattagaagcaggactagaaaatcatatcacaattttacctgctcaagaatggaaacctcctcttccagcttatgattttctaagtatgatagatgccgcaacatctcaacgtggcactaggaaagttcccaagtgtatgaaagaaacagatgtgcaggagaatgataaggaacaacatgaagataaatcggcagtcagaaaagaaccgattgaaactctgagaataaagcattggaatagaagtaattggtttaaagaagcagaaaaatcatttagacgtgataaagagttaggatgctcaaaagtgaactaattttatagggctgtggtttccaaaatttttttggcatgatagacttaatttatttccttaaagaataatattaaatcatttcaagtttgcagactagtgccatccaatagaattataatataagtcacatattttatttaaaattttctagtaactacattaaacaaagtaaaagtgagcagggcaaaataattttgatattacttttcacccagtagtatacccaaaatagcgaaatatagaaattattaatgagatattttacatccttttttgtaccaagtcttctaaatgcagtacatattttatacttactgcatttcttacttccgagtagccatatttcaagtgttccttgccacatgtggcctgtgactactgtattggacagttcagtactagacaaaaactagcataattaacttagttctagccatgatttctatttggattaaaattaaactctaatcacagttaactccacagtgcattcatgcagctgacagttatatttgttttattggagtcatgatattaaaatcagcgtttgtcaacctcaggggatatttagcaattgtcgggagacatttttgatgtcatgactagggcagttattgacatttagtgagtagaggccagggatcctgctaaataacctgcattggacagcgccccacaacaaagaattatcctgcccgaaatggtagtcgtgccaaggctgagtaaccttgtgttaaaagtaacctgtggcagactaggtttccagaatttcctggttctgctcacgtatcatgtttgaaaaaattttggctattaaagatatgtattagatggtcttatcctgattattacctggatacaacttgatcttttctaatattttcagaaagtgatgggataaccctagaagaggactcagaatgatatttatattttaagtgagtcttaaaacctcctcttatttctacaagttatatggctaaatttcagattgaacagggattcagcattctgccatctcctcatggaaagagaggctccctcatctgaagcgtctctgaaatctacccttgcaagcttcagacaaatcagttgatctccctgagccacacggcctcattctgtgagggagggaaagattagccaaagagttaattttcattccaaatcacttagctgttagactgatctgtttgtagcagttgtttgtctcatttttgctctgtgcattttttgagacatttgttgagaatattctatttggtgctctactgtatttttctttttaatatctacttgatatcttgttctttaaattttcttcacatatggtttgcctgatacaactgatttttataactgaaatttaaggaatctaacagctaaaactcagtaagtgcatatatttccttataacatagacccgttgctactctcagcaccctctcctcaattttttttcctgtagcatgtgatgcctgattaaactcattttcatttgcttttatttctaatatgggaacaatgagagtgaactctaaatataggttgtagtaataaaacatcattagcctaattattagaaaatgctaattaagtaccagcacatagaaacatgaaattgcttagtcattgtacctttgtcagcaattttgacagtcattaatgtttgtcataattttaaataaagtgtctgggtttcagaataccttc

SEQ ID NO: 44073 - DNA, 1122 bp, Homo Sapiens
atggcaccacctagcccaagcaacagtacacctaacagcagtagtggaagcaatggaaatgaccagctgagcaaaaccaacctatacatccgaggattgcaaccaggcactactgaccaagatcttgtcaagctgtgtcagccatatggcaagattgtttccactaaggccgtactggacaagaccacaaacaaatgtaaaggctatggctttgtagattttgacagcccttcagcagcacagaaagctgtaacagcactgaaggccagtggtgtacaggcacagatggtaaagcaacaggaacaggaccccacaaatttatacatctcaaacctcccactgtcaatggatgagcaggaactggaggggatgctgaagccctttggccaggttatctccacccgtatccttcgagataccagtgggaccagcagaggtgttggctttgcaaggatggagtccacagagaagtgtgaagccatcatcacccactttaatggaaaatatattaagacaccccctggagtaccagccccatccgatcccttgctttgcaaatttgctgatggcgggccaaagaaacgacagaaccaaggaatatttgtgcaaaatggacgggcttggccaaggaatggagacatgggcatcatggccttgacctatgaccccaccacagctcttcagaatgggttttacccagccccttataacatcacccccaacaggatgcttgctcggtctgcactctccccatacctttcctctcctgtgtcttcgtatcagagagtgactcagacatctcctctacaagtacctaacccatcctggatgcaccaccattcatacctcatgcagccttcaggttcagttaccagggatggaccatcccatttctctccagcctgcctccatgatgggaccccttacccagcaactgggccatctctgcctcagcagcacaggcatgtatatgctgctgcagctatgcaaggagcttacatctcccagtacacccctgtgccttccagtgtttcagtcgaggagagcagcggccaacagaaccaagtggcagtggacacaccctcagagcatggggtctattctttccagttcaacaagtaa

SEQ ID NO: 44074 - DNA, 465 bp, Homo Sapiens
gggtctcactctgctgtccaagctggagtgtggtggtgccatcatgactcactgcagccttggcctcccaggctcaagcgatcctcctgcctcggcctccagagtctctgggactacaggcagagtctcactctttcgctgaggctggcttgcaatggcacgacctcagctcactacaacctctgccttctgagttcaagcgattctcctgcctcagcctcccaagtagctgggattacaggagaaaagactgcagaaccacacaaggctcacgctgcccagggagaacgtcatctcagttcccatatgagtcccgatgaaaatatgacagagaaattctgtcctggaccacgagcatcttttcatcttcgtatcctagcagccagcaggcacttggtgaagaggctgctcaacgaatatacagtgacggttttacgggacaagagttacctgaggaacaactaa

SEQ ID NO: 44075 - DNA, 2827 bp, Homo Sapiens
ttgcagtggctgcttggcttggcagtggtcgcttggcttggcgtggcagtgatcgcttggcttggcatttctggcttagcggtcctcctttcgcagattggaaaccgcgggctatcctgctgggaggttgtggccgaggcagtagctcgctactgatggtctcctggggtggagaaaagcggggaggggctgaggggtctccgaagccggcagtctacgccacgaggaaaaccggtagcgtcaggagccaggaggaccagtggtacttgggctacccgggggaccagtggtcctcgggcttctcctacagctggtggaaaaacagcgtcggcagcgagagcaagcacggtgagggcgccttagaccagccccagcacgatgtccgcctggaagatcttggcgagctccacagagctgcccggtcgggcgacgtccctggggtggagcacgtcttggttcctggagacactggcgtggacaagagggataggaagaagagcattcagcaactagttcctgaatataaggaaaaacagacacctgaaagtcttcctcaaaataacaatccagattggcatcctactaatttgacccttagtgatgagacttgtcagagatccaagaatctgaaagttgatgataaatgtccatctgtatcaccatcaatgcctgaaaatcagtcagcaaccaaagaactgggacagatgaacttaacagaacgagaaaagatggacactggggttgtacttctctcagggaatgatactctccatgacctgtgccaatcacagctaccagaaaacaaagagagcaaagaaggtaacaaagaagcatagagaattcagtcctagagtgcctctgcttggctgcatagagctatagttctgacttaaaaaaactttttctggtaaaatgtgctttgtgtttactcaccttttgcactgaacagaataccttttggcaggatatttgtgttcttcctttaaccaaagcaacatctagataacagagaattaggggaaagcaggattttctttaggaagtaggattatatttagaatatagggactaagtatgtttagggactaacataggattatatttaggataacttagtagagacctaaagattgctgactcaaacacaatgtggtttctttgctttatttttacagctctgaattcacagctgttagttataactatatgcactataatttaaaagacaccttcccacacctgcaatctcagcactttaggaggccgaggtgggtggatcacgaggtcagtagttcgagaccagcctggccaatatggtgaaaccccatctctactaaaaatacaaaaaaaactagccaggcatggtggtgaatgcctgtagtcccagctactcaggaggctgaagcaggagaatcgctggaacccagaaggtggaggttgcagtgagccgagattgcgccactgcactccaacccgggcaatagaggaagactccgtctcaaaaaacaaaaacaaaaacaaaaaaacaccttccaaaagcaaatattaagtgacttcctatcgtttctatgactttatgtattatagaattgactttccaagtcagtaattaatgagacttattgagaatttgctgcatagtatctccttggctgtgtccacatgagctaccaccttgcgttaataaatgtgttcgctagggatgttggttttggcattgacagtgttctatcaccaatgcaaataagaccagggaccactcttgagaacattaatgtccaagcatcttaaagttatacgtaaggctttcataatgtgattctgctcagctctccatctttagccctttcccccgtgtgccccttctctggccttactgaactgctggtcctgtcctgctgacccatccttcgactgcaggcaaacacatacactctttcaggcctctttctgccttttgttgctgcctgtcatgctctcactctttcctgtcccctaccccttctaattaggctagcctcactctttaagcctcagctcgggcaggatctctagaaaagtcatctctgacatgctttcttttcactctttaaatcctagtgcctagcacatagcaagactcaatacataattgctgagtaaaatagataatgactctttgtacaaagatgattttcaagattgttccctacagtcaaggagcagagggaatagacatgtaaagcaataattgacaattcgggtggtggagatgcagtagaaaaatcagtaaagttctagggcagccctaaggaaggagatacctagatacctgtttacctggggaaagatgaggatgagggtcaacttcacctagcagtctgttttttattttatgtattttatttatttatttttagcagtctgttttaaaagatgaaaatattaatacatttgtcagaataatacagggaaccatttcggatgttaggaagaggttgtacaccaataaaggtgtccacagtcattttggaaatcattaataaggtactattatgaaatggagaacagtatgcagcattgcctgataatattgctactgcattccaaaattttgttttgtttgtgatggctttgttcattgatgttgggtggatgaatctgtgagtgaatcttcaacatgattgtatttctttaacctggtggcatctagtgtctcccagaaagtggtttgttgaagttttggagaattagaattatttcttaaagaagtaagtattccactaaagatcaagcttcatttaaactctcaatttatgaaataaaatgaaatgtaatttaaaatcta

SEQ ID NO: 44076 - DNA, 1357 bp, Homo Sapiens
agtctaacttccgcgcatctacgagggccgggactgccgctacctttctggaaggcgccggccggccagtcaccggagggatcccgccagaggcggctccgcgtctccagcagcggggcagggacccgggcgccccgccctcgccagcgcccgcccccgcccgcccccggcccgccctctgtatctggcccctgggcagctgcccggggaggcggccagcgagctggggccgcgcaatgtcgcacggagccgggctcgtccgcaccacgtgcagcagcggcagcgcgctcggacccggggccggcgcggcccagcccagcgcgagccccttggaggggctgctggacctcagctacccccgcacccacgcggccctgctgaaagtggcgcaaatggtcaccctgctgattgccttcatctgtgtgcggagctccctgtggaccaactacagcgcctacagctactttgaagtggtcaccatttgcgacttgataatgatcctcgccttttacctggtccacctcttccgcttctaccgcgtgctcacctgtatcagctggcccctgtcggaacttctgcactatttaatcggtaccctgctcctcctcatcgcctccattgtggcagcttccaagagttacaaccagagcggactggtagccggagcgatctttggtttcatggccaccttcctctgcatggcaagcatatggctgtcctataagatctcgtgtgtaacccagtccacagatgcagccgtctgatgaggccacaacccctaggcccctcaggagctttgcagagaggaggacgtgtactccaggcgaggcctctggacctgtgttcctgtgccaaagtcctgtcaggctggtgggcaccaggaaaggcctgcaccctcttcctgctctcccaggaagccagctccctgagctcctgagccagccggaaactcttcctccagccttccggggagaacatccctcccattctgggaaaggaaagcagcctccagggaaatgttttctgccttcctgcttctagaaccacctcaggtactgatgaaccccacttagcacagctgaaggggtttgtgaatactcccgcctaaatcccttctacttcactcctcaggggagtgaagtgccttaagaaacaaagccctgtcctaatttatctagcttgtcagtccggtcttagagataccctctttcctgaagtgaggcgtgcctgtagaaacactatgtggtcagcctgtccccaaggagatcttgtgtctcctctccatctctgcctttgttaccagtgtgcatgtgtttgtgtgttttttaataaaatattgactcggccagttgcacaa

SEQ ID NO: 44077 - DNA, 1335 bp, Homo Sapiens
atgagtcttcttatgattagtgagaatgtaaaattggctcgtgaatatgcattgctgggaaactatgactctgcgatggtctattatcagggagttcttgaccaaatgaacaagtatctgtactcagtcaaagatacatacctccagcagaaatggcaacaggtttggcaggaaataaatgtggaagctaaacatgttaaagatatcatgaaaacactagagagctttaaactggacagcactcccttgaaagcggcacagcatgaccttccagcttctgagggagaagtctggtccatgcctgtacctgttgaacgaagaaacaaaataaatgaatcaaaagcgcttgtttttttctcttcatgtagaacaaatcctgctgcagtaacagaaccagagacaaataaatttgatagtaccggatatgataaagacttagtagaagctttggaaagagatataatttcccagaatcccaatgttcgatgggatgatatcgctgatttagtagaagctaaaaagttgcttaaggaagccgtagtgttaccaatgtggatgcccgaattctttaagggcattaggagaccatggaaaggagtactgatggtcggcccacctggcacggggaagacgctccttgctaaagcagtagctacagaatgcaagacaacattcttcaatgtctcttcatcaactttgacttccaaatacagaggagaatctgagaagcttgttcgtcttctgtttgaaatggctcgattttattctccagccaccatatttattgatgagatagactccatctgtagtcgccgagggacttctgaagaacatgaagcaagcagaagggtgaaagcggagctgctggttcagatggatggtgttggaggtacttctgaaaatgatgacccttccaaaatggttatggttctggcagctactaattttccctgggatatagatgaggctttaagacgacgccttgagaaacgaatctatattcctttgccgtcagcaaaaggcagggaggagctattacgaataagtctacgtgagttggaattggctgatgatgttgaccttgcaagtatagcagaaaacatggaaggttattcaggtgcggacattaccaacgtgtgcagggatgcgtccttgatggcaatgagaaggcgcattgaaggtttgactccagaggaaatccgaaatctttccaaagaagaaatgcacatgcctacaactatggaggatttcgagatggctttaaaaaaggtttctaagtcagtgtctgctgcagacattgaaagatacgagaaatggatatttgagtttggatca

SEQ ID NO: 44078 - DNA, 897 bp, Homo Sapiens
cggtggccatggcaggccagtctcctctacctaggcgggcacatctgtggagctgccctcatcgacagcaactgggtggcctctgctgctcactgcttccaaagatgcatcttccctccacgggccccgctgtccactaacccatctgattaccggatcctgcttgggtatgaccagcaaagccatcccacagagcacagcaagcagatgacagtgaataagatcatggtgcacgctgactataacgagttgcaccgcatggggagtgacatcaccctgctgcagctgcaccatcatgtggaattcagctcccacatcctccccgcctgccttccggaaccaaccacgtggctggcccctgacagctcctgctggatatctggttggggaatggtcaccgaggatgtcttcctgcctgagcccttccaacttcaggaggcagaggtcggtgtcatggacaacactgtctgcggatcctttttccagccccagtaccccggccagccaagcagcagtgactacaccatccacgaggacatgctgtgcgctggggacctcataacaggaaaggccatttgccgacgagactccaggggtcccctcgtctgcccattaaatggcacctggttcctgatggggctgtctagttggagcctcgactgctgctcacccgtcggtcccagggtcttcaccaggctcccctacttcaccaactggatcagccagaagaagagggagagcacccctccagatcccgccttggctcctcctcaggaaacacccccagccctggacagcatgacctctcagggcatcgtccacaagcccgggctctgcgcagcccttctggctgctcacatgttcctcctgctgctgattctcctggggagcctgtga

SEQ ID NO: 44079 - DNA, 897 bp, Homo Sapiens
ttcatcctgcttggaatcccaggcctggagagtttccagttgtggattgcctttccgttctgtgccacgtatgctgtggctgttgttggaaatatcactctcctccatgtaatcagaattgaccacaccctgcatgagcccatgtacctctttctggccatgctggccatcactgacctggtcctctcctcctccactcaacctaagatgttggccatattctggtttcatgctcatgagattcagtaccatgcctgcctcatccaggtgttcttcatccatgccttttcttctgtggagtctggggtgctcatggctatggccctggactgctacgtggctatctgcttcccactccgacactctagcatcctgaccccatcggtcgtgatcaaactggggaccatcgtgatgctgagagggctgctggggctcctaatgctgacaccaatggtagcacttcttataagactttcctactgccacagccaagtactccaccactcctactgctaccaccctgatgtgatgaagctctcatgcacagacaccagaatcaacagtgcagttgggctgactgccatgttctctactgttggtgtagacttacttctcatcctcctttcttatgttttgatcattaggactgtccttagcgttgcttccccagaagagaggaaggaaaccttcagtacatgtgtctcccacattgtggcttttgctatatattacattccattgatcagtctgtccattgttcacagatttgggaaacaagccccagcctatgtacatactatgattgctaacacctacctgctgatctcccctttgatgaaccctgtcatctacagtgtgaaaaccaaacagatacgtagagctgtgataaaaattctc

SEQ ID NO: 44080 - DNA, 866 bp, Homo Sapiens
atgtctggggatgcgaccaggaccctggggaaaggaagccagcccccagggccagtcccggaggggctgatccgcatctacagcatgaggttctgcccctattctcacaggacccgcctcgtcctcaaggccaaagacatcagacatgaagtggtcaacattaacctgagaaacaagcctgaatggtactatacaaagcacccttttggccacattcctgtcctggagaccagccaatgtcaactgatctatgaatctgttattgcttgtgagtacctggatgatgcttatccaggaaggaagctgtttccatatgacccttatgaacgagctcgccaaaagatgttattggagctattttgtaaggtcccacatttgaccaaggagtgcctggtagcgttgagatgtgggagagaatgcactaatctgaaggcagccctgcgtcaggaattcagcaacctggaagagattcttgagtatcagaacaccaccttctttggtggaacctgtatatccatgattgattacctcctctggccctggtttgagcggctggatgtgtatgggatactggactgtgtgagccacacgccagccctgcggctctggatatcagccatgaagtgggaccccacagtctgtgctcttctcatggataagagcattttccagggcttcttgaatctctattttcagaacaaccctaatgcctttgactttgggctgtgctgagtctcactgtccaccccttcgctgtccagaattccccagcttgttgggagtctacgtcacggcttgtcttgggaaccaatccgtctctctttcttttctttgaagttcccaataaaatgaaaacaggaaatgta

SEQ ID NO: 44081 - DNA, 1227 bp, Homo Sapiens
actgggccaaatcccggcactggacagaaccccaccaggactggtccaaatcccggcactggacagaaccccaccagaactggtccaaatcccggcactggacagaaccccaccaggactggtccaaatcccggcgctggacagaaccccaccaggactggtccaaatcccggcgctggacagaaccccaccaggactggtccaaatcccggcgctggacagaaccccaccaggactgggccaaatcccggcgctggacagaaccccaccaggactgggactgggccaaatcccggcactggacagaaccccaccaggactgggtcaaatcccggcactggacagaaccccaccaggactgggccaaatcccggcgctggacagaaccccaccaggactgggccaaatcccggcgctggacagaaccccaccaggactgggccaaatcccggcgctggacagaaccccaccaggactgggccaaatcccggcactggacagaaccccaccaggactgggtcaaatcccagcactggacagaaccccaccaggactggtctaaatcccggcactggacagcaccccaccaggactgggtcaaatcccgacactggacagaaccccaccaggactgggtcaaatcccagcactggacagaaccccaccaggactggtctaaatcccggcactggacagcaccccaccaggactgggtcaaatcccgacactggacagaaccccaccaggactgggccaaatcccggcgctggacagaaccccaccaggactgggccaaatcccggcgctggacagaaccccaccaggactgggccaaatcccggcactggacagaaccccaccaggactgggccaaatcccggcactggacagaaccccaccaggactgagtcaaatcccggcactggacagaaccccaccaggactgggccaaatcccggcactggacagaaccccaccaggactgggtcaaatcccggcactggacagaaccccaccaggactgggccaaatcccggcactggacagaaccccaccaggactgggccaaatcccggcactggacagaaccccaccaggactggtccaaatcccggcactggacagaaccccaccaggactggtccaaatcccggcactggacagaaccccaccaggactgggtcaaatcccggcactggacagaatcccaccaggactggtccaaat

SEQ ID NO: 44082 - DNA, 1923 bp, Homo Sapiens
gcggtcgggagagggcgcggcgcggggttcgcggctggcgcttgagttgtttgccggctcccgggccgccagacgctcggagggagcccggccggctcggactgggcggccgggagggagggcgccccgggtcacgacggcgcccgcaagccgagcgcggccgggacgtgcaccatggacccaaaggcgggcggcggcggcgaggaggacgactgcgtggactcgggcgccgagaccggagggtccgactacagccacctgtcctccacgagcaatggattctccacctggcggatgccatgttgcctgttcctttactgtacacacggtgacaaagaaaagggaagatggagcctccaggttgaacatacctggccctcaggtgagctttccgttgaagaggcgcaggaccctttcctggtcagcatccacataatcgcagacccaggggagtcccagcccctgcaggaggccatcgacaacgtcctggcgtggatccaccccgacctcccgctgttccgggtgtccgagaggcgggcgtcccggcggcggcggaagccccccaagggcgctcagccagcgctggctgtggtgctgttcctgcaggaggagtacggcgaagagcagatcctgcagctgcaccgcacactgcagcagccgccctggcgccaccaccacaccgagcaggtgcacggccggttcctgccctacctgccctgcagccaggacttcttcacgctggcccctgggacgccgctttgggccatccggcccgtgcactacggcaaggaaatcgtgcgcttcaccgtctactgtcgctacgacaactatgctgacagcctcaggttctaccagctgattctccggaggagccccagccagaagaaagcggacttctgcatcttccctattttttccaacctggatgtggacatccagttctccctgaaaagactgccctgtgaccagtgcccggtgcccaccgactcctccgtgctggagttccgagtgagggacataggcgagctcgtgcctctcctgcccaacccttgcagccccatcagcgaggggcgctggcagacggaggaccatgatgggaacaagatcctcctacaggcacaaagggtgcataagaagtttcctaaacctggcagagtacatcatgcctccgagaagaaacgtcattccactcctttgccgagcactgctgtaccaagccatacacctggcagcagccagcagtccccgctcaacagtcctcacccggggcccatccggacaggcctgcctcctgggcaccagcaggaatttgccggacgagccaacagcacccccaaccctccctggtctttccagagaagcaagtccttgttttgtttgcccacgggaggcccctccctggcctcctcagctgaaccacagtggttttcaaacacaggtgccccagggcacagggcatcagagtggaggcatggccacctcctctccatcgatgacctagagggggcccaggagacagacgtggacacaggcctgcggctgtcctcatcggacctgtctgtggtctctgcatattctgcacccagtaggttctgcagcacagtggagacacccctcccctccgaaagatgcagcagccactgggcagctcacaaggattccagggagggaccactgcccactgtcagcagggtgaccacagaggcctcctgggcttccctccctttcttcaccaaaaggtcttccagctcctcagcgacagctcgtgctgctcccccagctcccagcacctccaccctcacagactcctccccacagctcccatgcgatacccccaaagtcaagcagactgatggagacatgccaccacccccagggtcggctggccccggggataacgacatggaggaattctacatctga

SEQ ID NO: 44083 - DNA, 816 bp, Homo Sapiens
caggtcccgggcgaggcgcccgcgccgtccgccgacccggcgcgtccccacgcgtgccccgactgcggccgcgccttcgcgcgccgctccacgctggcgaagcacgcgcgcacgcacacgggcgaacggcccttcgggtgcaccgagtgcgggcggcgcttctcacagaagtcggcgctgaccaaacacggccgcacgcacacgggcgagcggccctacgagtgccccgagtgcgacaaacgcttctcggccgcctcgaacctgcggcagcaccggcggcggcacacgggcgagaagccgtacgcatgcgcgcactgcggccgccgcttcgcgcagagctccaactacgcacagcacctgcgcgtgcacacgggcgagaagccgtacgcgtgcccggactgcggacgcgcctttggcggcagctcgtgcctggcgcgccaccgacgcacgcacacgggcgagcggccctacgcttgcgccgactgcggcacgcgcttcgctcagagctcggcgctggccaagcaccggcgcgtgcacacgggcgagaagccgcaccgctgcgctgtgtgtggccgtcgcttcggccaccgctccaacctggcggagcacgcgcgcacgcacacaggcgagcggccctacccctgcgccgagtgcggccgccgcttccgcctaagctcgcacttcattcgccaccgacgcgcgcacatgcggcgccgcctgtatatttgcgccggctgcggcagggacttcaagctgccccctggcgccacggccgccactgccaccgagcgttgcccggagtgtgagggcagctga

SEQ ID NO: 44084 - DNA, 1236 bp, Homo Sapiens
ctcttcgagcgggagaggacgggcctgacctaccgcgtgccctcgctgctccccgtgccccccgggcccaccctgctggcctttgtggagcagcggctcagccctgacgactcccacgcccaccgcctggtgctgaggaggggcacgctggccgggggctccgtgcggtggggtgccctgcacgtgctggggacagcagccctggcggagcaccggtccatgaacccctgccctgtgcacgatgctggcacgggcaccgtcttcctcttcttcatcgcggtgctgggccacacgcctgaggccgtgcagatcgccacgggaaggaacgccgcgcgcctctgctgtgtggccagccgtgacgccggcctctcgtggggcagcgcccgggacctcaccgaggaggccatcggtggtgccgtgcaggactgggccacattcgctgtgggtcccggccacggtgtgcagctgccctcaggccgcctgctggtacccgcctacacctaccgcgtggaccgccgagagtgttttggcaagatctgccggaccagccctcactccttcgccttctacagcgatgaccacggccgcacctggcgctgtggaggcctcgtgcccaacctgcgctcaggcgagtgccagctggcagcggtggacggtgggcaggccggcagcttcctctactgcaatgcccggagcccactgggcagccgtgtgcaggcgctcagcactgacgagggcacctccttcctgcccgcagagcgcgtggcttccctgcccgagactgcctggggctgccagggcagcatcgtgggcttcccagcccccgcccccaacaggccacgggatgacagttggcctggggtcagtggggatgtggggtcctggaccctggcactccccatgccctttgctgccccgccccagagccccacgtggctgctgtactcccacccagtggggcgcagggctcggctacacatgggtatccgcctgagccagtccccgctggacccgcgcagctggacagagccctgggtgatctacgagggccccagcggctactccgacctggcgtccatcgggccggcccctgaggggggcctggtttttgcctgcctgtacgagagcggggccaggacctcctatgatgagatttccttttgtacattctccctgcgtgaggtcctggagaacgtgcccgccagccccaaaccgcccaaccttggggacaagcct

SEQ ID NO: 44085 - DNA, 1077 bp, Homo Sapiens
ttacagtctgctgcaaatcctgagactccaaactcaaccatctccagagaggccagcacccagtcttcatcagctgcagctagccaaggctgggtgttaccagaaggcaaaatcgtgccaaacactgtttttgttggtggaattgatgctaggatggatgaaactgagattggaagctgctttggtagatacggttcagtgaaagaagtgaagataatcacgaatcgaactggtgtgtccaaaggctatggatttgtttcgtttgttaatgacgtggatgtccagaagatagtaggatcacagatacatttccatggtaaaaagctgaagctgggccctgcaatcaggaaacaaaagttatgtgctcgtcatgtgcagccacgtcctttggtagttaatcctcctcctccaccacagtttcagaacgtctggcggaatccaaacactgaaacctacctgcagccccaaatcacgccgaatcctgtaactcagcacgttcaggcttactctgcttatccacattcaccaggtcaggtcatcactggatgtcagttgcttgtatataattatcaggaatatcctacttatcccgattcagcatttcaggtcaccactggatatcagttgcctgtatataattatcagccatttcctgcttatccaagatcaccatttcaggtcactgctggatatcagttgcctgtatataattatcaggcatttcctgcttatccaaattcaccatttcaagtcgccactggatatcagttccctgtatacaattatcaggcatttcctgcttatccaaattcaccagttcaggtcaccactggatatcagttgcctgtatacaattatcaggcatttcctgcttatccaaattcaccatttcaagtcgccactggatatcagttccctgtatacaattatcaggcatttcctgcttatccaaattcaccagttcaggtcaccactggatatcagttgcctgtatacaattatcaggcatttcctgcttatccaaattcaccatttcaagtcgccactggatatcagttccctgtatacaattatcag

SEQ ID NO: 44086 - DNA, 204 bp, Homo Sapiens
atggctgcatggagcccggccgcggcagcgcctctcctccgcgggatccgcgggcttccacttcaccatcggatgtttgccactcagactgagggggagctcagagtgacccaaattctcaaagaaaagtttccacgagctacagctataaaagtcactgacatttcaggaggttgtggggcgatgtatgaaattaaaattgaa

SEQ ID NO: 44087 - DNA, 1005 bp, Homo Sapiens
atggtaaccggcggcgcccatagtcgctctcggggcggccttcccagtgcctcccgtagaggcctcttccggggcgggccaaaggaggtcacttccggggtccgtcccggttcccggccgttgccacgacgacgaagctgccggccaatggctggcggatgggcccaaggttcccggcgtgcagcgcggctgcctgagggcggcaggctcatggcgccggcgtcgcggttgctcgcgctctgggcgctggcggctgtggctctacccggctccggggcggagggcgacggcgggtggcgcccgggcgggccgggggccgtggcggaggaggagcgctgcacggtggagcgtcgggccgacctcacctacgcggagttcgtgcagcagtacgccttcgtcaggcccgtcatcctgcagggactcacggacaactcgaggttccgggccctgtgctcccgcgacaggttgctggcttcgtttggggacagagtggtccggctgagcaccgccaacacctactcctaccacaaagtggacttgcccttccaggagtatgtggagcagctgctgcacccccaggaccccacctccctgggcaatgacaccctgtacttcttcggggacaacaacttcaccgagtgggcctctctctttcggcactactccccacccccatttggcctgctgggaaccgctccagcttacagctttggaatcgcaggagctggctcgggggtgcccttccactggcatggacccgggtactcagaagtgatctacggtcgtaagcgctggttcctttacccacctgagaagacgccagagttccaccccaacaagaccacgctggcctggctccgggacacatacccagccctgccaccgtctgcacggcccctggagtgtaccatccgggctggtgaggtgctgtacttccccgaccgctggtggcatgctacgctcaaccttgacaccagcgtcttcatctccaccttcctcggctag

SEQ ID NO: 44088 - DNA, 3249 bp, Homo Sapiens
cttgctttgcacaggaaggaactgcaggagctgcagaatctttacaaacagaacagtacacatacagcccagcaagcagagctgatccagcagcttcaggttctcaatatggacacacaaaaagtactgagaaatcaggaagatgttcacacagctgaaagtatatcatatcaaaaactttacaatgagttacatatttgttttgaaaccacaaaatcaaatgaagctatgctccggcaaagtgttactaatcttcaggatcagctattacaaaaagagcaagaaaatgctaagttaaaagaaaaacttcaggaatcacagggagcacctcttcctttacctcaagaaagtgatccagactactcagcacaggtacctcatcgcccatccttatcaagcttagaaacgttaatggtttcacagaagtctgaaattgagtatttacaggagaaactaaagatagcaaatgaaaaactgtcagaaaacatatctgccaacaagggtttctcccgaaagagcatcatgacaagtgctgaaggaaaacataaggaaccacctgtgaaacgttcaaggtctttgtccccaaagagctctttcacagactcagaagagctacagaagctgagaaaagctgaaagaaagattgaaaacttagagaaggcactacaactaaagagccaagaaaatgatgagctaagagatgcccatgaaaaacgcaaggaacggctacagatgttacagaccaactacagagcagtaaaagagcaattaaaacagtgggaagaaggcagtggcatgactgaaatcaggaaaataaagagagcagatccccaacaacttcgacaagaagattctgacgctgtgtggaatgaactggcatatttcaaaagggaaaaccaggagctaatgattcaaaagatgaatcttgaagaagaattagatgaacttaaagtacatatatctattgataaggcagcaatacaagaattgaatagatgtgtggcagagagaagagaagaacagctctttagatctggtgaagatgatgaggtcaagaggagtactccagagaagaatggaaaagaaatgttggagcagacattacagaaggtcactgagttggaaaatcggctgaaatcttttgagaaaaggtcgagaaaattaaaagaagggaataaaaaattaatgaaagaaaatgattttctgaaatccctcttaaaacagcaacaagaagatacagagaccagagaaaaagagctagaacagataataaaggggagtaaagatgtagaaaaagaaaatactgaacttcaagtaaaaatcagtgagctggagacagaagtcacttccctgaggagacaagtggcagaagctaatgcattgagaaatgaaaatgaagagctgatcaacccaatggagaaatcacaccagtcagcagacagagctaaatccgagatggccaccatgaaagtgagatctggacgatatgattgtaagacaactatgaccaaggttaaatttaaagctgcgaagaaaaattgctctgtgggtcgtcaccacactgttctcaatcattccatcaaggttatgagcaatgtgtttgagaacctcagcaaggacggctgggaggatgtgagtgaaagcagcagtgattctgaagcacagacctctcaaactttgggaacaattattgtagaaacatcccagaaaataagtcctacggaagatggaaaagaccagaaagaaagtgatccaacagaagacagccaaacacaaggaaaagaaatagtacagacatatttaaatatagatggcaagaccccaaaggactattttcatgataagaatgccaaaaaaccaacttttcaaaagaagaattgcaagatgcaaaagagttcacatacagcagttcctactagagtcaacagagaaaagtacaaaaatataactgcccagaaatcaagtagcaatattattttattacgagaacggattatatccttgcaacaacaaaacagtgtacttcagaatgccaagaaaacagcagaattgtctgttaaagaatataaagaagttaatgaaaagctcctccatcaacagcaagtatccgatcaacgatttcagacaagcaggcagacaataaagaagctaaatttggatttggctgggcttcggaaagaaaaagaagatttactaaagaaattggagtcctcatctgaaatcacaagtttggcagaagaaaattcccaggtaacatttccacggatacaagttacatcacttagtccttcaaggagcatggatttggaaatgaagcaattgcagtataaactaaagaatgctactaatgaactcactaaacagtcatcaaatgtgaagactttgaaatttgaactcctagcaaaagaagaacacataaaggaaatgcatgaaaagatatctcgaatggagagggatataactatgaaaagacatttgatagaggacttgaaatttcgacagaaagtaaatttggaaagtaacaagagttttagtgaaatgttacaaaatcttgataaaaaggtaaagacattaactgaagaatgttccaacaagaaggtatcaattgattcactaaagcaaagacttaacgttgctgtaaaagaaaagtcacagtatgaacagatgtatcagaaatctaaagaggagttagaaaaaaaggatctcaagcttactctcctagtatcaagaataagtgagactgaatctgcaatggcagaaattgaaacagcagcatctaagcagcttcaagaattagcattgcaaagtgaacaggtcctagaaggtgcacagaagacattgctgttagccaatgaaaaagtagaagagttcaccacatttgtgaaggctttggccaaagagttgcaaaatgatgtccatgtggtaaggcgacaaataagagagcttaaaaaaatgaagaaaaacagggacgcctgtaaaacctcaacccataaagcccagaccttggcagcttctatcctgaacatttcacggtcagatttagaggaaatattagacacagaagatcaagtggaaattgaaaaaacaaaaattgatgctgaaaatgacaaggaatggatgttgtacattcagaaacttcttgaaggacagagtcttgctctgtctcccaggctgaagtgcaatggcgcaatcgtggctcaccaaaacctccgcctgccagactcgagcagttctgcctcagcctcctga

SEQ ID NO: 44089 - DNA, 393 bp, Homo Sapiens
atgtctggtcgcggcaaacaaggcggtaaagctcgcgccaaggctaagactcggtcttctcgtgcaggtttgcagtttcctgtgggccgagtgcaccgcctgctccgcaaaggcaactactccgagcgcgtcggggctggcgcgccggtgtatctcgcggcggtgcttgagtacctgaccgccgagatcctggagctggcgggcaatgcggcccgcgacaacaagaagacccgcatcatcccgcgccacctgcaattggccatccgcaatgacgaggagcttaataaactcttggggcgtgtgaccatcgcgcagggtggcgttttgcctaatattcaggcggtgctgctgcctaagaaaactgagagccatcataaggccaagggaaagtga

SEQ ID NO: 44090 - DNA, 501 bp, Homo Sapiens
gccgtaactgctgccatcttctccgcgctatggctgcgttcggccgtcaggtccttgattggcaccgcctgatccccctcacctgggcctgtatggctaggcagactcctcatcttggagaacagagaaggacgacagcttctttgttgcgcaaactgactacagcctccaatggaggggtcattgaggagttatcttgtgttagatccaataactatgtgcaggaaccagagtgcaggaggaatcttgttcagtgcctccttgagaagcaggggactcctgtggtacaagggtccttggagctagagagggtcatgagttccctcctggacatgggtttcagcaatgcccatattaatgaattgctcagtgtacggcgaggtgccagtcttcaacagttgctggacatcatttcagaatttattctcttgggtctgaatccagagcctgtgtgtgtggtcttgaagaaaagtccccagttattgaaactgcctattatgc

SEQ ID NO: 44091 - DNA, 276 bp, Homo Sapiens
atgtctaactctcttcctttgcacattttcagattcttttctttatattgtgatacagttttttccaattgttttaaagtcaggtttactcaggcaaaattaaaattatgtaatcaaatgcactgtgaaaatctaccaacacataatttaaaaaaattaaacaataagaatatcaaattccaacaattcctcaaattgggattatttcatacttactgcatttcacccaaaaagcaggttattcttgctgttgttactgtttttggttgcttttag

SEQ ID NO: 44092 - DNA, 1143 bp, Homo Sapiens
ggagagagtggggggcggcggcacagtgggccggggaggagagagccgcagagggaaaccgattttaagatgaaggtcgcccccgataagacatgcatgcagttctccatccgccgccccaagctgccgtcctccgagacgcaccccgaggagagcatgtacaagaggctcggcgtctccgcctggctcaaccacctgaatgagctgggccaggtggaggaggagtacaagctgcggaaggccattttctttggcggtattgatgtgtcaatccgcggggaggtctggcccttcctgctgcgctattacagccacgagtccacgtcggaggagcgggaggcgctgcggctgcagaagcgaaaggagtactctgagatccagcagaaaaggctctccatgactcccgaggagcacagagcgttctggcgtaatgtgcagttcactgtggacaaagacgtggtccggacagatcggaacaaccagttcttccggggggaagacaatcccaatgtggagagcatgaggaggatcctgctgaactacgccgtgtacaaccctgccgtcggctattcccaagggatgtcggacctggtggcgcccatcttggccgaggtcctggatgagtcagacaccttctggtgctttgtgggtttgatgcagaacacgatcttcgtcagctcaccccgggacgaggacatggagaaacaactgctgtacctgcgcgagctgctgcggctgacgcacgtgcgcttctaccagcacctggtctcgctgggcgaggacggcctgcagatgctcttctgccaccgctggctccttctgtgcttcaagcgggagttccccgaggccgaagcgctgcggatctgggaggcctgctgggcccactaccagggggctgatgtctgatgaaagcgagtctgaagccaccgagtgccggtaccacacgccgcctttgcatgcggtcatcggctcgcccctggcccgggtctaggtttccctcctggctcagcctgctggacgtggacgtgcagggtggacgatctgcattaacgaagggaagcacggcatggacggtctgagaggcttcattcccaccactcccgaattaaaaaaaatcgtgcctcattgcacgttttcccagtg

SEQ ID NO: 44093 - DNA, 1032 bp, Homo Sapiens
tacgtggcccagctggtcagcagtgtggccagtgtctatgcaggtgctgggggctcaggcttccagatctccgtgtcccactccacaagcttctggggtggcttgggggacctggtgggaataggggatatccagaacgagaaggagaccatgcaaggcctgaatgactgtctggcctcctacctggacagagtgaggagcctgagagaccgagaaatggaggctggagagcaaagtctgggagcatctggagaagaagggaccccaggtcagagactagggcattacttcaagaccattgaggacctgagggttcagatcttcgcaagtactatggacagtgcctgcatcattctgcagactgacaaggcccatatagctgctgatgactttagagtcaagtgtgagacagaactggccatgtgccagtctgtggagagtgacatccatgggctccgcaagaccactgatgacaccaatgtcactcagctgcagctggagacagagattgaggctctcaaggaggagctactcttcatgaagaagacccacgaagaggaagtaaaaggcctccaagcccagattgccagctctgggttgaccatgcaggtagatgccctcaaatctcaggacctggccaagatcatggcagacatccgtgcccaatatgacaagttggctcagaagaaccgagaggagctgaacaagtactgcaccaagcagtccgctgagatcggagcttctgagataatgctcatggagctgagacatacactccagtccttggagatcaacctgaactcaatgagaaatctgaaagccaggttggagaacagcctgagggaggtggagacccgctatgccatgcagatggagcagctcaacagggttctgctgcacttgaagttggagctggcacagacctgggcagaggggcaacaccaggtccaggaatttgaggctctgctgaacataaagatcaagctggaggcggagatcactacctaccaccacctgctggaagatgaggag

SEQ ID NO: 44094 - DNA, 1561 bp, Homo Sapiens
atgcggggtccgagcggggctctgtggctgctcctggctctgcgcaccgtgctcggtggcatggaggtgcggtggtgcgccacctcggacccagagcagcacaagtgcggcaacatgagcgaggccttccgggaagcgggcatccagccctccctcctctgcgtccggggcacctccgccgaccactgcgtccagctcatcgcggcccaggaggctgacgccatcactctggatggaggagccatctatgaggcgggaaaggagcacggcctgaagccggtggtgggcgaagtgtacgatcaagaggtcggtacctcctattacgccgtggctgtggtcaggaggagctcccatgtgaccattgacaccctgaaaggcgtgaagtcctgccacacgggcatcaatcgcacagtgggctggaacgtgcccgtgggctacctggtggagagcggccgcctctcggtgatgggctgcgatgtactcaaagctgtcagcgactattttgggggcagctgcgtcccgggggcaggagagaccagttactctgagtccctctgtcgcctctgcaggggtgacagctctggggaaggggtgtgtgacaagagccccctggagagatactacgactacagcggggccttccggtgcctggcggaaggggcaggggacgtggcttttgtgaagcacagcacggtactggagaacacggatgaaagtccatcacgaaggcaaacatggaccagatctgaggaggaagaaggcgagtgccctgcacacgaggaagcacgtaggacgatgcgctctagtgctgggcaagcctggaaatgggctcccgttcacaggccccaggacgagtctgacaaaggagaatttggaaaacgggcaaagagtagggatatgttgggttaagaatcagctctttcaaacttggggttttttttgagatgggggtctcaccatgttgcccaggctggtctcaaacccccagcctcaactgatcctcgcatctcagcctcctgagtagctgggatgacaggcgtgcacctggcagctttttcaaagtgttgatggtaatctgaggcaatctaagggagtcattttttaagtgactttatacagaaagattggtaagagccaaggggtagaagtggcataaatgtctaaagcagggaagtgacaggactttcattgttcttggctgaggagaagcgggagtggctgatggaagcacctaaatgatgcctttgtctgtgggaaggcaaatgatgccccagagctctaaccaaaggttttgcagccgccgaaaaacaggaaagttgggaagcgggggtaggactacactgaatcattaacagtgctgtaaactaccatgtggccattaacaatgacctttagggagttttcctaaacgatcactctggtgcgggtgtttggttttgttttaaaatagctttgcagtgaaagctttcatgaccatacaaattatcttttttcttcctatttccttgtagaggtttttttcctccttgtcttaaggtcataaaaatattgttatgtggga

SEQ ID NO: 44095 - DNA, 363 bp, Homo Sapiens
gacattctgaaagaacatccatctcagaaatctctccagattgcaacactcttacaagagtatttagaaggcgtgggaagatctacagtcctcgaagagcctgtacaggaagatgcaacacaagaaacacacatttcatctcctgttgagtctccttcccaaaagaccaaaagtgaaaccgtcactggagaattatcaaaactcttggatgaaataaaactctgtcaagaaaaggattattcgtttgaagacttgtgccacacaatatcagaccactacttagataatttgagcaagatttcagaggaagaacttgggaaaaatggaagccagagtgtagtaagtaaggcgggggggaatgaa

SEQ ID NO: 44096 - DNA, 3420 bp, Homo Sapiens
atggcagtgcccggcgacgctgcacgagtcagggacaagcccgtccacagtggggtgagtcaagcccccacggcgggccgggactgccaccatcgtgcggaccccgcatcgccgcgggactcgggctgccgtggctgctggggagacctggtgctgcagccgctccggagctctcggaaactttcctccgcgctgtgcgcgggctccctgtcctttctgctggcgctgctggtgaggctggtccgcggggaggtcggctgtgacctggagcagtgtaaggaggcggcggcggcggaggaggaggaagcagccccgggagcagaagggggcgtcttcccggggcctcggggaggtgctcccgggggcggtgcgcggctcagcccctggctgcagccctcggcgctgctcttcagtctcctgtgtgccttcttctggatgggcttgtacctcctgcgcgccggggtgcgcctgcctctggctgtcgcgctgctggccgcctgctgcgggggggaagcgctcgtccagattgggctgggcgtcggggaggatcacttactctcactccccgccgcgggggtggtgctcagctgcttggccgccgcgacatggctggtgctgaggctgaggctgggcgtcctcatgatcgccttgactagcgcggtcaggaccgtgtccctcatttccttagagaggttcaaggtcgcctggagaccttacctggcgtacctggccggcgtgctggggatcctcttggccaggtacgtggaacaaatcttgccgcagtccgcggaggcggctccaagggagcatttggggtcccagctgattgctgggaccaaggaagatatcccggtgtttaagaggaggaggcggtccagctccgtcgtgtccgccgagatgtccggctgcagcagcaagtcccatcggaggacctccctgccctgtataccgagggaacagctcatggggcattcagaatgggaccacaaacgagggccaagaggatcacagtcttcaggaaccagtattactgtggacatcgccgtcatgggcgagacggcctcattaccgacctcctggcagacccttctcttccaccaaacgtgtacatccttgagagccgtgagcaacttgctcagcacacagctcaccttccaggccattcacaagcccagagtgaatcccgtcacttcgctcagtgaaaactatacctgttctgactctgaagagagctctgaaaaagacaagcttgctattccaaagcgcctgagaaggagtttgcctcctggcttgttgagacgagtttcttccacttggaccaccaccacctcggccacaggtctacccaccttggagcctgcaccagtacggagagaccgcagcaccagcatcaaactgcaggaagcaccttcatccagtcctgattcttggaataatccagtgatgatgaccctcaccaaaagcagatcctttacttcatcctatgctatttctgcagctaaccatgtaaaggctaaaaagcaaagtcgaccaggtgccctcgctaaaatttcacctctttcatcgccctgctcctcacctctccaagggactcctgccagcagcctggtcagcaaaatttctgcagtgcagtttccagaatctgctgacacaactgccaaacaaagcctaggttctcacagggccttaacttacactcagagtgccccagacctatcccctcaaatcctgactccacctgttatatgtagcagctgtggcagaccatattcccaagggaatcctgctgatgagcccctggagagaagtggggtagccactcggacaccaagtagaacagatgacactgctcaagttacctctgattatgaaaccaataacaacagtgacagcagtgacattgtacagaatgaagatgaaacagagtgcctgagagagcctctgaggaaagcatcggcttgcagcacctatgctcctgagaccatgatgtttctggacaaaccaattcttgctcccgaacctcttgtcatggataacctggactcaattatggagcagctaaatacttggaattttccaatttttgatttagtggaaaatataggaagaaaatgtggccgtattcttagtcaggtatcttacagactttttgaagacatgggcctctttgaagcttttaaaattccaattagggaatttatgaattattttcatgctttggagattggatatagggatattccttatcataacagaatccatgccactgatgttttacatgctgtttggtatcttactacacagcctattccaggcctctcaactgtgattaatgatcatggttcaaccagtgattcagattctgacagtggatttacacatggacatatgggatatgtattctcaaaaacgtataatgtgacagatgataaatacggatgtctgtctgggaatatccctgccttggagttgatggcgctgtatgtggctgcagccatgcacgattatgatcatccaggaaggactaatgctttcctggttgcaactagtgctcctcaggcggtgctatataacgatcgttcagttttggagaatcatcacgcagctgctgcatggaatcttttcatgtcccggccagagtataacttcttaattaaccttgaccatgtggaatttaagcatttccgtttccttgtcattgaagcaattttggccactgacctgaagaaacactttgacttcgtagccaaatttaatggcaaggtaaatgatgatgttggaatagattggaccaatgaaaatgatcgtctactggtttgtcaaatgtgtataaagttggctgatatcaatggtccagctaaatgtaaagaactccatcttcagtggacagatggtattgtcaatgaattttatgaacagggtgatgaagaggccagccttggattacccataagccccttcatggatcgttctgctcctcagctggccaaccttcaggaatccttcatctctcacattgtggggcctctgtgcaactcctatgattcagcaggactaatgcctggaaaatgggtggaagacagcgatgagtcaggagatactgatgacccagaagaagaggaggaagaagcaccagcaccaaatgaagaggaaacctgtgaaaataatgaatctccaaaaaagaagactttcaaaaggagaaaaatctactgccaaataactcagcacctcttacagaaccacaagatgtggaagaaagtcattgaagaggagcaacggttggcaggcatagaaaatcaatccctggaccagacccctcagtcgcactcttcagaacagatccaggctatcaaggaagaagaagaagagaaagggaaaccaagaggcgaggagataccaacccaaaagccagaccagtga

SEQ ID NO: 44097 - DNA, 555 bp, Homo Sapiens
gaaggtgaccacaagaaaccaaagggcaagatgtctgcttatgccttctttgcgcagacatgcagagaagaacataagaagaaaaacccagaggtccctgtcaattttgtagaattttccaagaagtgctctgagaagcggaagaccatgtctgggaaagagaagaccaaatttgatgaaatggcaaaggtggataaagtacactatgatcaggaaatgaaggataatggaccagttgagggaggcaagaagaaggaccctaatgccctcaaaaggccactgtctggattcttcctgttctgttcagaattccaccccaagatcaaatccacaaatcctggcatctctattggagacatggcaaaaaagctgggtgagatgtggattaactatagtgacagggaaaagcagccttacatcactaaggcagcagacctgaaggagaagtatgagaaggatgttgctgactataagtctaaaggaaagtttgatagtgcaaagggtcccactaaaattgcctggaaaaaggtgaaagagaaagacaaagaagatgag

SEQ ID NO: 44098 - DNA, 1368 bp, Homo Sapiens
gaaaacaaaggggaatctaaagaagaaagtgccaagactcccaaagaaacagaaaataatctggagaagccagataatgaggaagataaccgtgaggtgcccagcctgcgcctgagactgacaggagcttttgacgatacttcatttgcttctctatctaatcttgtcaatgaaaacactttgaaggcaataaaagaaatgagctttatgaacatgactgaaattcagcataaaaccatcagatcactcctggaaggcagggatcttctagcagctgcaaaaacaggcagtggtaccctggcttttctcattcctgcagttgaactcactgttaagttaaagttcatgcccacgaatagaccaggggtctttattctctcacctactagagaactagccatgcaaatttttggtggtcttaaggagctaatacaccacatgcatacctatgggttgataatgggtggcgataacacatctgctgaagcacagaaacttgctaatgggattaacatcattgtggccacaccaggccatctgcttgactatatgcagaatacaccagggtttatgtataaaaacctacaatatttggttattgatgaagctgatagaatcttggatgttgggtttgaagaggaattaaagcaaattattaaacttttgccaacatgcagacacactatgctcttatctgccacccaaactcgaaaagttgaagacctggcaaggatttctctgaaaaaaggagccattgtaggcgatgatggtaaagctaatgcaacagtggatggtcttgagcagggatacgttgtttgtccctctgaaaaaagattccttctgccctttgctgtccttaagaagaaccgaaagaggaagattatggtcttcttttcatcttctatgtctgtgaaatatcactatgagttgctaaattacatggatttgcccatcttggccattcatggaaagcaaaagcaaaataagggtacaaccacattcttccagttctgcaaagcagattcaggaatactattgtgtatggatgtggcagcaagaggactggacattcctgaagtcgactggatcgttcagcatgaccctctggatgaccctaaggaatatattcatcgtgtaagcagaacagccagaggtctaaatgggagaggtcatgtcttgctcattttgtgcccagaagaaatggggttccttcactacttgaaacaatccaagtttccattaagtgaatttgacttttcctggtctaaaatttctgacattcagtctcagcttgagaaattaattgaaaagaactgctttcttcataaggcagcccaggaagcatataagtcatacacacgagcctag

SEQ ID NO: 44099 - DNA, 537 bp, Homo Sapiens
aacaacttcagcacagaaataaacaccacttctgttttagtaggtcctctttccaatctggaaataacccatacctcaaacctcacctgtgtaaaatttagcaatactatagacacaaccaactcccaatgcatcaggtgggtaactcctcccacacgaatagtctgcctaccctcaggaatattttttgtctgtggtacctcagcctatcattgtttgaatggctcttcagaatctgtgtgcttcctctcattcttagtggcccctatgcccatctacactgaacaagatttatacaatcatgtcatacctaagccccgcaacaaaagagtacccattcttccttttgttattggagcaggagtgctaggcggagtagctactggcattggcggtatcacaacctctactcagttctactacaaactgtctcaagaactaaatggtgacatggaatgggtcgctgataccctggtcaccttgcaagatcaacttaactccctagcagcagtagtccttcaaaatcgaagagcttta

SEQ ID NO: 44100 - DNA, 1734 bp, Homo Sapiens
tcctcaaagccgccggagcaacccccaggtctttactttacaatcggcaatttgacttgctctgctgcatgtctggagggaccaaggaaagtgtggagacgctccaaggattaggtgatcggagcttgaaaagaaaaaaagccaaacaaataaacaaaacccacccaccctaacaaatatgaggctgctggagagaatgaggaaagactggttcatggtcggaatagtgctggcgatcgctggagctaaactggagccgtccataggggtgaatgggggaccactgaagccagaaataactgtatcctacattgctgttgcaacaatattctttaacagtggactatcattgaaaacagaggagctgaccagtgctttggtgcatctaaaactgcatctttttattcagatctttactcttgcattcttcccagcaacaatatggctttttcttcagcttttatcaatcacacccatcaacgaatggcttttaaaaggtttgcagacagtaggttgcatgcctccgcctgtgtcttctgcagtgattttaaccaaggcagttggtggaaatgaggcagctgcaatatttaattcagcctttggaagttttttggtaagtaaacatagtttaacttgtctattacaacttttgctgtgatattgtgtatatgaaagatttagtgaaagctggatttgttttactctttggttaagtataaaaattgttgaatcttttcatgtgccagtatccataccctgaagaaaagtagttaatgaataaagcaaatgttctcttacaatatattttggaggtttgggttttaaaattccatttaatgaattcaaggaatcaattaaaacactatgtgtctccttatagaggttatgtcaatatattgatcatttaatgaggtcttttagattattattattttgtatcatgggactgaggattttgaaaaggaaacatgacccagctggtcagaaagggaatgctaatttacttgttgacatgccatttattttgtacatttcactgtcaaagaagctactggcttggatgcttctgagaaatctatgtgaaaaaaaatttgaaaggaagatatgactaatgagtaatttgcaagtaaatgttgtatctatatatatatatatataaagattcaaaagtagttcagctttcataagtagaaccaatataaggacgttgttttagcatttttaatcattatttttaaataaatgatgtaacagaggcttgatttgtgttatgaaagattgagaaactaaattttctgttgatttaatttttttgtgccttaaaactttgttaaattcctgaagttaattatcatattgtattttttggggcataactcattagcagatatgtagtgcagtgatttacaaataattgagagtaaaatcagtgatgtataaactagttcatgagtctaggtaaaatatcaattacctctgtttaaaatgctctgttaattattattgtatgtatttaaatgtagttaaagcttttaaacatgttgttacatagtgttaattctacatagtgctacacagcttttagtgtcacatagccttacagagtttataatgatgtagcatctgcaaaatatatgcatagcttatatcctatttttatagagccagtaatggtttttgtgatgctgtattacttctgggttttagacaataaagtctgtttaacaaaaataa

SEQ ID NO: 44101 - DNA, 561 bp, Homo Sapiens
atgtctgtacagccaacggtttctcttgggggctttgaaataacaccaccagtggacttaaggttgaagtgtggttcagggccagtgcatattagtggacagcacttagtagctgtgaaggaaggtgcagagtcagaagatgaagaagaggaggatgtgaaactcttaagtatatctggaaagcagtctgcccctggaggtgggcagaaaaaagtaaaacttgctgctgctgctgaagaaaaagcgccagtgaagaaatctatacgagatactccagccaaaaatgcacaaaagtcaaatcagaatggaaaagactcaaaaccatcatcaacaccaagatcaaaaggacaagaatccttcaaaaaacaggaaaaatctcctaaaacaccaaaaggatctagttctgtagaagacattaaagcaaaaatgcaagcaagtatagaaaaacgtggttctcttcccaaagtggaaaccaagttcatcaattatgtgaagaatttcttctggatgactgaccaagaggctattcaagatctctggcagtggaggaagtctctttaa

SEQ ID NO: 44102 - DNA, 933 bp, Homo Sapiens
caggtgaaagcagggaatgagacacaaatttcagaatttcttcttctaggattttcagagaaacaagaattgcagcccttcctctttgggctgttcctgtccatgtacctggtcactgtgctcgggaacctgctcatcatcctggccgcaatctcagactcctgcctccacacccccatgtacttctttctctccaacctgtccttcgtagatatctgttttgcctccaccatggtcccaaagatgttggtgaacatccagacacagagcaaagtcattacctatgcaggttgcatcacccagatgtgcttttttgtactctttatagtgttggacagcttactcctgaccgtgatggcctatgaccagtttgtggccatctgtcaccccctgcactacacggtcatcatgagccctcagctctgtggactgctggttctggtgtcctggatcatgagtgtcctaaactccatgttacaaagcttagtgacattgcagttgtccttctgcacagacttggaaatccctcactttttctgtgaacttaatgagatgatccaccttgcctgttctgacacctttgtgaacaacatggtgatgcattttgcagctgtgctgctggacggtggtcctctcgttgggatcctttattcttactgtaggatagtttcctccatacgtgcaatctcgtcaactcaggggaagtacaaggcactttccacctgtgcatctcacctctcagttgtctccatattttatggtacggggctaggggtgtaccttagctctactatgacccaaaacttacactcaactgctgtcgcctcggtgatgtacactgtggtcacccccatgctcaaccccttcatttacagtctgaggaataaagacataaagggggctctgacacaattcttcagagggaaacaataa

SEQ ID NO: 44103 - DNA, 492 bp, Homo Sapiens
gctatggctttgtgtcaatacttggaggaacatgccgaggaattgaatttccaagatgcaaaaatacttgaaattggtgccggaccaggccttgtttccattgtggccagtattttaggagctcaagtcacagcaacagatttgcctgatgtcctgggaaaccttcaatacaatcttttaaaaaacacactacaatgtacagcacatctgcctgaagtgaaagaactggtatggggggaagacctggacaaaaactttcccaagtcagctttttactatgattacgtcctagcctcagatgtggtctaccatcactacttcctggacaagctgctcaccaccatggtgtacctttcccagccagggacggtgctgctttgggcaaacaaattcaggttcagcaccgactatgaatttttagataaattcaagcaagtttttgacacaacactgttggctgaatatccagagtcatcagtcaaactttttaag

SEQ ID NO: 44104 - DNA, 2942 bp, Homo Sapiens
ttttttaaacagtatgcaagcattgagaaaaacggtgaatttttcatgtcccccaatgactttgtcactcgatacttgaacatttttggagaaagccagcctaatccaaagactgtggaacttttaagtggagtggtggatcagaccaaagatggattaatatcttttcaagaatttgttgcctttgaatctgtcctgtgtgcccctgatgctttgtttatggtagcctttcagctgtttgacaaagctggcaaaggagaagtaacttttgaggatgttaagcaagtttttggacagaccacaattcatcaacatattccatttaactgggattcagaatttgtgcaactacattttggaaaagaaagaaaaagacacctgacatatgcggaatttactcagtttttattggaaatacaactggagcacgcaaagcaagcctttgtgcaacgggacaatgctaggactgggagagtcacagccatcgacttccgagacatcatggtcaccatccgcccccatgtcttgactccttttgtagaagaatgtctagtagctgctgctggaggtaccacatcccatcaagttagtttctcctattttaatggatttaattcgctccttaacaacatggaactcattagaaagatctatagcactctggctggcaccaggaaagatgttgaagtgactaaggaggagtttgttctggcagctcagaaatttggtcaggttacacccatggaagttgacatcttgtttcagttagcagatttatatgagccaaggggacgtatgaccttagcagacattgaacggattgctcctctggaagagggaactctgccctttaacttggctgaggcccagaggcagaaggcctcaggtgattcagctcgaccagttcttctacaagttgcagagtcggcctacaggtttggtctgggttctgttgctggagctgttggagccactgctgtgtatcctatcgatcttgtaaaaactcgaatgcagaaccaacgatcaactggctcttttgtgggagaactcatgtataaaaacagctttgactgttttaagaaagtgctacgctatgaaggcttctttggactgtatagaggtctgttgccacagttattgggagttgccccagagaaggccataaaacttacagtgaacgattttgtgagggataaatttatgcacaaagatggttcggtcccacttgcagcagaaattcttgctggaggctgcgctggaggctcccaggtgattttcacaaatcctttagaaatcgtcaagatccgtttgcaagtggcaggagaaatcaccactggtcctcgagtcagtgctctgtctgtcgtgcgggacctggggttttttgggatctacaagggtgccaaagcatgctttctgcgggacattcctttctcggccatctactttccgtgctatgctcatgtgaaggcttcctttgcaaatgaagatgggcaggttagcccaggaagcctgctcttagctggtgccatagctggtatgcctgcagcatctttagtgacccctgctgatgttatcaagacgagattacaggtggctgcccgggctggccaaaccacttacagcggagtgatagactgctttagaaagatactgcgtgaagaaggaccaaaagctctgtggaagggagctggtgctcgtgtatttcgatcctcaccccagtttggtgtaactttgctgacttacgaattgctacagcgatggttctacattgattttggaggagtaaaacccatgggatcagagccagttcctaaatccaggatcaacctgcctgccccgaatcctgatcacgttgggggctacaaactggcagttgctacatttgcagggattgaaaacaaatttggactttacctacctctcttcaagccatcagtatctacctcaaaggctattggtggaggcccataggaagatcagccctgggatagtgctgtctttttgtgggtactgcagtaaagaacatccctcctgggaatgaagcaatgcttcatcccttttacgtccatctcttgtttaaattcaagtccaggcttttttatcatgtgaaatcattcattttctgggtgttttcttaaccagatcattgtgaaattattcataattattatttggccctctgcccagaaacctttgtttgcatctgaaaattgatgggatttggtcaacactaacatgatttggggaaaggagcaagtcagaatagaaattagtactcccctccttgaactaggattgtagtcccaaagaggctactgtaaggcaatcatggtgctcagagcagtgtttcgtgtgtgttttaaactggtaggaaactaggtgcatatttataaaaataaaaaacactgggagaaatgaaaaaatatatatcaaatatattcagcctggcttcaaattgtaagcatgcacaaattctgtctctggattatattatgaagcttttatgtgaaacatgtttctttgtaatgaaaaccacattggagatgtttagtaatcatattgttactggtaccaagactactagggaaatgcctttgtactttagggaagtacttttggcattttactgtacagacagaaaaaactgagatgtagcccctctcctggaagtgctaattttgaaaaactgctcatatgatgtacatgtactgattactgcctattttaataaacactcttgaaaaatgcatgttgccctgttgctgcctgccctattctcctcatctccccatcattggtacccacttgcttttaaaatccactttatcttgaataatgtaagacaaatatgttctgacataagtatttaattcatgttgccttgcataatggtcagaggcgcatgaatttgtgaaggtggaaataaactatttgtaaagtga

SEQ ID NO: 44105 - DNA, 2406 bp, Homo Sapiens
gggaccctggtgaccaaagtggctccggtcagcgcccctcctaaagtcagcagcggccctaggctgcctgctcctcagatagtcgccgtgaaagcccccaacaccacgacaatccagtttcctgctaatttgcagcttcctccaggaaccgttttgattaaaagtaacagtggtccgttgatgttggtatctcctcagcaaactgtaacaagagccgagaccacaagtaacataacctcaaggccagcagtaccagcgaatcctcaaacagtcaaaatctgtacagtgccgaactctagctcacaattaatcaagaaagtggcagtgacacctgttaaaaaattggcacaaataggaactactgtggtaaccactgttccgaagccttcctcagtacaatctgtggctgtgccaaccagtgtcgtcacagttactcctggaaagccattgaatactgtaactaccctgaagccttcaagtttgggagcatcatccactccttcaaatgagcccaatcttaaagcagagaactcagcagctgttcagattaatctttctccgacaatgctagaaaatgtgaagaaatgcaagaacttccttgcaatgttaataaaactagcatgtagtggatcacagtccccagaaatggggcaaaatgtgaagaagctggtggaacaacttttggatgcaaaaatcgaagcagaagaatttactaggaaactgtatgttgaactcaagtcttcacctcagcctcacctggttccttttcttaagaaaagcgtggttgccttacgacaacttctgcctaactcccagagcttcatccagcaatgtgttcagcagacttctagtgacatggtcattgctacctgtactacaacagtaacaacttctcctgtggtgacaactacagtgtcctcaagccagtctgaaaagtcaattattgtttctggagcaacagcacccagaactgtgtcagtgcaaactttgaacccacttgctggtccagtgggagcaaaagctggagttgtgacacttcattctgtgggcccaactgctgcaacaggaggaacaacagctggaactggtttgcttcagacttcaaaaccacttgtgacatctgtggcaaacacagtgaccacggtctcactgcaacctgaaaagccagttgtctctggaacagcagtaacactgtcccttccagcagtaacttttggagaaacttcaggtgcagctatttgtcttccatctgtgaaacctgttgtttcttctgctgggaccacatctgacaagcctgttattgggactccagttcaaatcaaacttgcccagccgggccctgtcctttcacaaccagctgggattccacaggcagttcaagtcaagcaactattctcattgtttcaggtagttcagcagccttcaggaggcaatgaaaaacaagtgaccacaatttcacattcctcaacattgaccattcagaaatgtggacagaagacgatgccagtgaacaccataatacctactagtcagtttcctccagcttccattctaaagcaaattactctgcctggaaataaaattctgtcacttcaagcatctcctactcagaaaaatagaataaaagagaatgtaacatcatgcttccgagatgaggatgacatcaatgatgtgacttctatggcaggggtcaaccttaatgaagaaaatgcctgcatcttagcaacaaactctgaattggttggcacactcattcagtcatgtaaagatgaaccatttctttttattggagctctacaaaagagaattttagacattggtaaaaagcatgacattacagaacttaactctgatgctgtgaacttgatctcccaagcaacacaggaacgactacgaggccttctagaaaaactgactgcaattgctcagcatcgaatgactacttacaaggcaagtgaaaattacatcctgtgtagtgataccaggtcacagctcaaatttcttgaaaagctggatcaattggagaagcagagaaaggatttggaagaaagagaaatgttacttaaggcagccaagagtcgttctaataaagaagatccagaacagctgagattaaagcagaaagccaaagagttacagcaattggaacttgcacagatacagcatagagacgctaatctcacagctcttgcagctattggaccaaggaagaagagaccactagaatctggaattgagggcttaaaagacaaccttcttgcttctgggacatccagcctgacagccaccaaacagttgcatcgtccaagaatcacgagaatctgcctcagggacttgatattttgtatggaacaggaacgggagatgaagtattctcgagctctatacctggcccttctgaagtga

SEQ ID NO: 44106 - DNA, 882 bp, Homo Sapiens
atggctctcacgcccacaaacctaaataacaaaatgtctctgcagatgaagatggactgccaggaacaacagctgactaagaaaaacaatggctttttccaaaagctcaatgtgactgaaggtgcaatgcaggatttgctaaaggaaattatcaaagtggaccacatcttagacagatcggatgatgaggatgacatttcctccgaaaaccctcaaactgacttccttcacaagggtatgttggagctagaggctgagcatgaccaggacctgagtaaacaggataagcaagaaacagatgttgatgaggaccctcaagcgtctacatctctgcagttttcaaagaagaacctccttgaactcttattaaaagacatgctgaccctgaagggtcaaattgaaaagctggaggaccggggccttgaccttgatcaagggacaagcactgaggtgaatacttgtaatgaagtttatgaattaaagaagaaagtcatagaaaggctggaggacctttgcaagaatgtggaactgctgagtgcaaagctaaggatgtatcaaatggaggcagaggacactgactctcacagttctgaggaaatagatacggaagagatggaggccctgcttcctcaggccccagcatcctttttagtgcagaagtctcctccccgcaatacagcatggaaacgtgcactgaggattttcatcatgtttgatgtcctcaccgtcactggacttttatgttacatactattttttggtgctacatttctctttgaaagggtgcttctgagaatgcttgggtgccgcaccacatgggacctacgggagatgagagagcctttcttgaatttggaagtggaagccttgttaccctcctaa

SEQ ID NO: 44107 - DNA, 585 bp, Homo Sapiens
cagggaccattggaatttagagatgtggccatagaattctctctggaggagtggcattgcctggacactgcacagcagaatttatatagggatgtgatgttagagaactacagacacctggtcttccttggtattgttgtcactaagccagacctgatcacctgtctggagcaaggaaaaaaacccttcactgtgaagagacatgagatgattgccaaatccccagttatgtgttttcattttgcccaagacctttgtccagagcagagcctaaaagattccttccaaaaagtgatagtgacaagatatgaaaaacgtgaatatggcaatttagagttaaaaaaaggttgtgaaagtgtggatgagggtaaagtacacaaaagaggttataatggacttaaccaatgtttgacagctacccagagcaaagtatttcaatgtgatacatatgtgaaagtctctcatatattttcaaattcaaacagacataagataagagatactggaaaaaaacctttcaaatgtatagaatgtggcaaagctttcaaccagtcctcaacccttgctacacataagaaaattcat

SEQ ID NO: 44108 - DNA, 930 bp, Homo Sapiens
atgtctacgtctaatcacacccagttccatccttcttcattcctactgctgggtatcccagggctagaagatgtgcacatttggattggagtcccttttttctttgtgtatcttgttgcactcctgggaaacactgctctcttgtttgtgatccagactgagcagagtctccatgagcctatgtactacttcctggccatgttggattccattgacctgggcttgtctacagccaccatccccaaaatgttgggcatcttctggttcaataccaaagaaatatcttttggaggctgcctttctcacatgttcttcatccatttcttcactgctatggagagcattgtgttggtggccatggcctttgaccgctacattgccatttgcaaacctcttcggtacaccatgatcctcaccagcaaaatcatcagcctcattgcaggcattgctgtcctgaggagcctgtacatggttgttccactggtgtttctccttctgaggctgcccttctgtgggcatcgtatcatccctcatacttattgtgagcacatgggcattgcccgtctggcctgtgccagcatcaaagtcaacattaggtttggccttggcaacatatctctcttgttactggatgttatccttattattctctcctatgtcaggatcctgtatgctgtcttctgcctgccctcctgggaagctcgactcaaagctctcaacacctgtggttctcatattggtgttatcttagccttttttacaccagcatttttttcattcttgacacatcgttttggccataatatcccacagtatatacatattatattagccaacctgtatgtggttgtcccaccagccctcaatcctgtaatctatggagtcaggacaaagcagattcgagagagagtgctgaggatttttctcaag

SEQ ID NO: 44109 - DNA, 989 bp, Homo Sapiens
actacattgcccagtaacctcctgggctccgctgtgtttttctattctggggtgtaaggggcagctggaccactccagctgggactgctaggaaggttgcgggtccacccggccgagccgaacgagggaaatggtcctcacccggccactcgccggttgaaaaggggccgccctggcagggaagcggccgccgcggcgcggtgcagcgcagcggcgagaaggagtgcgttatcgtcttgcgctactgctgaatgtccgtcccggaggaggaggagaggcttttgccgctgacccagagatggccccgagcgagcaaattcctactgtccggctgcgcggctaccgtggccgagctagcaacctttcccctggatctcacaaaaactcgactccaaatgcaaggagaagcagctcttgctcggttgggagacggtgcaagagaatctgccccctataggggaatggtgcgcacagctctagggatcattgaagaggaaggctttctaaagctttggcaaggagtgacacccgccatttacagacacgtagtgtattctggaggtcgaatggtcacatatgaacatctccgagaggttgtgtttggcaaaagtgaagatgagcattatcccctttggaaatcagtcattggagggatgatggctggtgttattggccagtttttagccaatccaactgacctagtgaaggttcagatgcaaatggaaggaaaaaggaaactggaaggaaaaccattgcgatttcgtggtgtacatcatgcatttgcaaaaatcttagctgaaggaggaatacgagggctttgggcaggctgggtacccaatatacaaagagcagcactggtgaatatgggagatttaaccacttatgatacagtgaaacactacttggtattgaatacaccacttgaggacaatatcatgactcacggtttatcaagtgatctggtcggatctcacaaggccatccaatga

SEQ ID NO: 44110 - DNA, 522 bp, Homo Sapiens
gacagccacgtggccgcaggaggatttacaacattttctttcgccatcgatgttatcgcaaaatgtgtgagagaagcggctgcgcagcccggacgggagcgtgagggtgcgggccaggtaagcagccccggcggtttcgccgcatacgggactgcggggcgaccgcgggcaccagccacgcgcagcggctccgcggggtctcggccgggtccgcgctctgaaggatctcgagagccatggatggtgcaggcgggaccctcgagctgcagcatctccggtgacccggggttgccgaggaggtggagaccagcacaggtggtccggcccgggcgcctccgaatccgggggtggtcaagacggatccccaaggctgaggtcggcagtcccggggactcgcagctgttgagcctgtggagacgcggccccgtgaccgaggcacccttcagcaacccgggggcagcgttttccccctaccggaaatctgatgggcttatgacatcatggctggctgctgagcgatga

SEQ ID NO: 44111 - DNA, 231 bp, Homo Sapiens
atgattgaggcaaggtcttcagtcaagcttcatcctatgcaaaacaggagaattcatacaggagagaaacctcacaagtgtgatgattgtggcaaagcctttacttcacattcacacctcgttggacatcagagaatccatactggacagaaatcttgcaaatgtcatcagtgtggcaaggtcttcagtccgaggtcactccttgcagaacatgagaaaattcatttttga

SEQ ID NO: 44112 - DNA, 390 bp, Homo Sapiens
atggtgcgcacgaatgtcctggctgatgctctcaaaaggatcaacaatgcaaaaaagagaggcaaacgccaggtgcttcttaggccgtgctccgaagtcatcatccggtttctcactgtgatgaagcatggttacattggcgaatttgaaatcactgatgatcacagagctgggaaaatggttgtgtacctcacagacaggctaaacaagtgtggagtgattagccccagatttcatgtgcaactcaaagatctagaaaaatggcagaataatctgcttccatcctaccagtttggtttcattatactgacaacctcagctggcatcacagaccgtgaagaagcaagacgaaaacacacaggagggaaaatcctgggattctttttctag

SEQ ID NO: 44113 - DNA, 108 bp, Homo Sapiens
atggtagaggcagatcatcctggcaagcttttcatttgtggcctcaatagagagaccaatgagaagatgcttaaagcagtgtttgggaaatatggtcccatatcagaa

SEQ ID NO: 44114 - DNA, 577 bp, Homo Sapiens
cacaattgacagcctcaaggttcctggctttttgaaccaccacagacatctcctttcccggctaccccaccctgagcgccagacaccatgaaccttccttccacaaaggtctcctgggccgccgtgacgctactgctgctgctgctgctgctgccgcccgcgctgttgtcgtccggggcggctgcacagcccctgcccgactgctgtcgtcaaaagacttgctcttgccgcctctacgagctgctgcacggcgcgggcaatcacgcggccggcatcctcacgctgggcaagcggaggtccgggcccccgggcctccagggtcggctgcagcgcctcctgcaggccagcggcaaccacgccgcgggcatcctgaccatgggccgccgcgcaggcgcagagccagcgccgcgcccctgcctcgggcgccgctgttccgccccggccgccgcctccgtcgcgcccggaggacagtccgggatctgagtcgttcttcgggccctgtcctggcccaggcctctgccctctgcccacccagcgtcagcccccagaaaaaaggcaataaagacgagtctccatt

SEQ ID NO: 44115 - DNA, 553 bp, Homo Sapiens
gagaacactcttcctgttcctctgcagctgaaggatgatggctgagccctggcaggccctacagctcctgttggccattctattgactctgatggccctcccctaccaagcaaggaagaaaacctttctaagcgtccatgaagtgatggcagtagaaaactatgcgaaggacagcttgcagtggatcaccgaccagtataacaaggaaagtgatgacaagtaccacttcaggatcttccgagtccttaaagtccagaggcaggtcactgaccacctggagtatcacctgaatgtggaaatgcagtggaccacctgccaaaagccagagaccacgaactgtgtcccccaggaaagggagcttcacaagcaagtcaactgcttcttctcagtgtttgctgtaccctggtttgaacagtacaaaattttgaacaaaagctgcagcagtgactaggtgtcctggagtgtacaactgcggccactgcatgtgagagaatcctgcaatgggcaataatccttaatataggcaataaatgtttgtcaacatattctctta

SEQ ID NO: 44116 - DNA, 376 bp, Homo Sapiens
atagactgaacttaaaacaacctccctcaccccacaggttttattatctgaaatccaagtctgtcatgctggtttccctgactgccaagtgggagagtaagtctctattttatgtttctcttctctcctctttagatgtgcagagcagcccacacaaccagttcaccttcagacccctcccaccgccacctccgcctcctcatgcctgcacctgtgccaggaagccaccccctgcagcggactctcttcagaggagatcaatgactacccgcagccagcccagcccagctgctccagctcccccaaccagcacgcaggattcagtccatctgcataacagctgggtcctgaacagcaacataccattggagaccag

SEQ ID NO: 44117 - DNA, 717 bp, Homo Sapiens
ggttttgacccaccacatcagagtgacacaagaaccatctacgtagccaacaggtttcctcagaatggcctttacacacctcagaaatttatagataacaggatcatttcatctaagtacactgtgtggaattttgttccaaaaaatttatttgaacagttcagaagagtggcaaacttttattttcttattatatttttggttcagcttatgattgatacacctaccagtccagttaccagtggacttccattattctttgtgataacagtaactgccataaagcagggatatgaagattggttacggcataactcagataatgaagtaaatggagctcctgtttatgttgttcgaagtggtggccttgtaaaaactagatcaaaaaacattcgggtgggtgatattgttcgaatagccaaagatgaaatttttcctgcagacttggtgcttctgtcctcagatcgactggatggttcctgtcacgttacaactgctagtttggacggagaaactaacctgaagacacatgtggcagttccagaaacagcattattacaaacagttgccaatttggacactctagtagctgtaatagaatgccagcaaccagaagcagacttatacagattcatgggacgaatgatcataacccaacaaatggaagaaattgtaagacctctggggccggagagtctcctgcttcgtggagccaga

SEQ ID NO: 44118 - DNA, 3040 bp, Homo Sapiens
ctaaagagtcgccgcagacaagcaggcccccagatggagaaccagcctgtgaggtggcgggccctgccaggcctcccacgccctcctgggctccccgcagccccctggctcctccttggcgtgctgctgctgcccgggaccctgcgactggcaggaggacagtcagtgacccacaccggcctgcccatcatggcctccctggccaacacagctatctccttcagctgcaggatcacctatccatacactccccaattcaaggttttcacagtcagctactttcatgaagatctccagggacagaggagccctaagaagccaacaaactgccaccctggactgggcacagagaaccagagccacaccctggactgccaggtcacccttgtgctgccgggagcatcggccactggcacctactactgctctgtccactggccacactccacggtgagaggcagcggcaccttcatcctggtcagagacgcagggtaccgagagcccccgcagagtccacagaagctcctgctctttggcttcaccggcctcctgagtgtcctgagtgtagtgggcacggccctgctgctctggaacaagaagcggatgcggggtccagggaaggaccccaccaggaagtgcccagatccaagatctgccagcagccccaagcagcatccttcagaatctgtctacacagctctgcagcgccgcgagaccgaggtctatgcctgcatcgagaatgaggatggcagctcacccaccgccaagcagagccccctctcccaggagagaccgcatagattcgaagatgatggcgaacttaacctggtctatgaaaatctctaggatgggctccaccgctcatagagcttgccctgggtcagaggaccggggcagcccctgccaccaaaggacttgatctgagttgggagtaaggcccccagggacaccccatcatttcaccctcacattcaaggcccttcctgtcttggccggccccactgcccccccattctatgccccaaccaccaaggctttcccatcttggggcctttgcccaggctgttccttctgccaggcaggcccttcctcccttggcccaaccagcaaagcgcccctcagtcttcaagggctttcctggatgccacccttgcccagagccctgctcactgcctcatgctgacagagcagcatgctctcttggcaccagcctgcacctcagccagtagggcagcctctgagctgagggaggaccctgcaggggcgcctagcagtgctgtgtggggagccgaggtatggaggagctggggagcagctatgcaaatccctacctacccagctgggccagaggcacgaggcagccaggcagggtgggagcaggggctggcgtgggaggtctgggggacagacaaggatgatggacccctcagaggcaagactaggatcagggacagatctggaggcccaggacatggctgagaggtggtcagcaggctgggggcatggagcagagagggcttgggtacaagctggagaggaaggagattctggcatgttggggtgagggcagagggacagatgaggggaggagggtgctggctaaacaggaactgaatgaatggcctgaagctccctctcccaagggttcccactcccattggcctggccctgtacgtgcactctgtcatctccttggtcaccctctgctccaggccttctccaccacaggacctcagctgtccctccttctacccaaggtggagtcccccaaagtcccttctgtctggcctatcctgtgcccaccacctgtggcttcatccagccctcctcctctatctttatctgccataggccgcagccctggccccctgtggattgaggtcccaagtggtccagctgtggggtttggtgctgggaccctcaatggcagccggaaggtccctctgaggcagaagctcaagccccatggggacagtggctccccagtgcctggccctgagccatttctgctgtttcaggtgcccacatcaccctcatttcctcctcgcagtagccctgcaccgtggccagaaacccatccacaggcaggcagtggctggggtccgggtgccccgggctgttgggctctgcttcctccctctgctcccccatgtctccctgagttctcccacctttgctcatttgtaaaatgggcaggtcaatcttcccaccccaccgtgtgggctgccccaaccccaaatgtgcccagggaggggggggaacccaaggcacaggccccgcccctgcccccaagcagcactgggctactggctcacagaagcacctttggttctgcaggtcatgcccctccctgcagggaagggaaagctggtggtagaggctgggcacagactgacgtccagaagaagtcccttggccctgctagggtggcaccagacttctctggtcccacaggacagccagtggcctcccaacttggttctgggcccccgcctgcaagcacacatggcaaggagggctttagcaggctcacataaccgagtggcaaggcccctgctcccagaggctggatttgaatgaactccgggcctgtttggggaggtgaagctgccaggtgtgcacaggggcctcccaggctcctggctccaccagccaaggaggtgggggcaagggtcagggcaatgggggacaatgccgctcagggtgcagtgagctcccctgggaaaaccgaagccagcaagaccaggagagggccacctcactgggcctgcctcccccacctcctgggcctctctgacctcagctcctagaccctggacccttggctgggactcagcattttccagtctttttcaggggtagacaggggagcctgggttaaactttaccactgtgccctggcccaggcatcaccaacacggcctccctgcagctgccctgccaccgacagaccccgattaaacccacacctggccttggcctcccctgctctataccttgcatggtttttgcctcacttggaataaaattccaactcctc

SEQ ID NO: 44119 - DNA, 1248 bp, Homo Sapiens
atgtccgcctcggctgtcttcattctggacgttaagggcaagccattgatcagccgcaactacaagggcgatgtggccatgagcaagattgagcacttcatgcctttgctggtacagcgggaggaggaaggcgccctggccccgctgctgagccacggccaggtccacttcctatggatcaaacacagcaacctctacttggtggccaccacatcgaagaatgccaatgcctccctggtgtactccttcctgtataagacaatagaggtattctgcgaatacttcaaggagctggaggaggagagcatccgggacaactttgtcatcgtctacgagttgctggacgagctcatggactttggcttcccgcagaccaccgacagcaagatcctgcaggagtacatcactcagcagagcaacaagctggagacgggcaagtcacgggtgccacccactgtcaccaacgctgtgtcctggcgctccgagggtatcaagtataagaagaacgaggtcttcattgatgtcatagagtctgtcaacctgctggtcaatgccaacggcagcgtccttctgagcgaaatcgtcggtaccatcaagctcaaggtgtttctgtcaggaatgccagagctgcggctgggcctcaatgaccgcgtgctcttcgagctcactggccgcagcaagaacaaatcagtagagctggaggatgtaaaattccaccagtgcgtgcggctctctcgctttgacaacgaccgcaccatctccttcatcccgcctgatggtgactttgagctcatgtcataccgcctcagcacccaggtcaagccactgatctggattgagtctgtcattgagaagttctcccacagccgcgtggagatcatggtcaaggccaaggggcagtttaagaaacagtcagtggccaacggtgtggagatatctgtgcctgtacccagcgatgccgactcccccagattcaagaccagtgtgggcagcgccaagtatgtgccggagagaaacgtcgtgatttggagtattaagtctttcccggggggcaaggagtacttgatgcgagcccactttggcctccccagtgtggaaaaggaagaggtggagggccggccccccatcggggtcaagtttgagatcccctacttcaccgtctctgggatccaggtccgatacatgaagatcattgagaaaagtggttaccaggccctgccctgggttcgctacatcacccagagtggc

SEQ ID NO: 44120 - DNA, 477 bp, Homo Sapiens
atgtttatctttaatagcattgctgatgacatattccctcttatcagttgtgtaggtgccattcactgcaatatactggccatccgcactggcaacgactttgctgccattaagctacaggtgataaaattgatctatctcatgatatggcattcgttggtgattatctcacctgtagtgactctggcattcttccctgcatctctgaaacaggggagcttacactttctattaatcatatattttgtattattgttgacaccatggctggagttttcgaaaagtggaactcatcttcctagcaacacaaaaattccagcatggtgggtaagtatggatgcttatcttaatcatgctagtatatgctgccatcaattctcctgcttgtcagcagtgaaactgcagctgtcaaatgaggaattgataagagacacgaggtgggacatacaatcctacactacagatttcagtttttag

SEQ ID NO: 44121 - DNA, 600 bp, Homo Sapiens
tgtgttggatgcccgaacaaccatagcttctcccgcacagtggcccatgggggccgggctcttgcctcagcctggccacctcaggcccagttcttgcctgttggcggccgctccaggcccggctcctgcccctcggcctcctctccaggcccagaactggttcccgtcggcctctccaggcccagctctcccggccacctccacgggcccagctcctgcctcacgacaaccacgttcggcccagctcctgcccagctcctggcagccgttgtaggccccaggcttccctgcgttcaggcctcccggacccaccttcggctttccggcggccctgagagacccggctcctgcctgccagcggcctctcccggcccagctgcggcctcacgtcggcctccccaggccacgtttccgcctgcctcacggcagccccggcaggcccggctcccgcctgccgggggcctcttgaggaggctcatctcgtgcccggccgcggcctccccaggccaggctcctgcctgccggcaggcgccacaagcccagctcctgcgtcccgaaggcttctctaggcccggctcgtgcctcgctgcggcctcttga

SEQ ID NO: 44122 - DNA, 456 bp, Homo Sapiens
atggccaagtccaagaaccacaacacacatgaccagttccaaaaacggcacagaaatggtatcaagaaacctcagtcacaaagatcggtgtctctaaagggggtggatcccaaattcctgaggaacatgccctttgccaagaagcacagcaagaagggcctaaagaagatgcaggccaacagtgccaaggccatgagtgcacgtgccaaggctatcaaggccctcgtaaagcccaaggaggttaagcccaagatcccaaagggtgtcagccgcaagctcaatcagcttgcctacactggctaccccaagcttgggaagcatgcttgtgcccgcattgccaaggcgctcaggctgtgccggccaaaggccaaggccaaggatcaaaccaaggcccaggctgcagctccggcttcagttccagctcaggctcccaaaggtgcccagtccccctacaaa

SEQ ID NO: 44123 - DNA, 531 bp, Homo Sapiens
cagttcagagtgataggaccaagacaccctatccgggctctggtcggggatgaagtggaattgccatgtcgcatatctcctgggaagaacgctacaggcatggaggtggggtggtaccgcccccccttctctagggtggttcatctctacagaaatggcaaggaccaagatggagaccaggcacctgaatatcggggccggacagagctgctgaaagatgctattggtgagggaaaggtgactctcaggatccggaatgtaaggttctcagatgaaggaggtttcacctgcttcttccgagatcattcttaccaagaggaggcagcaatggaattgaaagtagaagatcctttctactgggtgagccctggagtgctggttctcctcgcggtgctgcctgtgctcctcctgcagatcactgttggcctcgtcttcctctgcctgcagtacagactgagaggaaaacttcgagcagagatagagaatctccaccggacttttgtcttccacctggaagccctctctggctaa

SEQ ID NO: 44124 - DNA, 387 bp, Homo Sapiens
tgcctgcaaatcgaccgtaaagcagccaggaagcaactgggtacaaaagccgctcacaagagtgcgccctctactggaggggtgaagaaacctcatcattacaggcctggtactgtggcactccgtgaaatcagacgttatcagaaggccactgaacttctgattcgcaaacttcgctttcagcgtctggtgcaagaaattgctcaggacttgaaaacagatctacgcttccagagtgcagctattggagctttgcaggaggcaagtgaggcctacctggttggcctttttgaagacagcaacctgtgtgctatccatgccaaacggctaactattatgccaaaagaaatccagctagcacgccgcatacaaggaaaacgtgcttaa

SEQ ID NO: 44125 - DNA, 951 bp, Homo Sapiens
atgggaaaaccaggcagagtgaaccaaaccactgtttcagacttcctccttctaggactctctgagtggccagaggagcagcctcttctgtttggcatcttccttggcatgtacctggtcaccatggtggggaacctgctcattatcctggccatcagctctgacccacacctccatactcccatgtacttctttctggccaacctgtcattaactgatgcctgtttcacttctgcctccatccccaaaatgctggccaacattcatacccagagtcagatcatctcgtattctgggtgtcttgcacagctatatttcctccttatgtttggtggccttgacaactgcctgctggctgtgatggcatatgaccgctatgtggccatctgccaaccactccattacagcacatctatgagtccccagctctgtgcactaatgctgggtgtgtgctgggtgctaaccaactgtcctgccctgatgcacacactgttgctgacccgcgtggctttctgtgcccagaaagccatccctcatttctattgtgatcctagtgctctcctgaagcttgcctgctcagatacccatgtaaacgagctgatgatcatcaccatgggcttgctgttcctcactgttcccctcctgctgatcgtcttctcctatgtccgcattttctgggctgtgtttgtcatctcatctcctggagggagatggaaggccttctctacctgtggttctcatctcacggtggttctgctcttctatgggtctcttatgggtgtgtatttacttcctccatcaacttactctacagagagggaaagtagggctgctgttctctatatggtgattattcccacgctaaacccattcatttatagcttgaggaacagagacatgaaggaggctttgggtaaactttttgtcagtggaaaaacattctttttatga

SEQ ID NO: 44126 - DNA, 693 bp, Homo Sapiens
atgttttgttgcttaggatatgaatggctgagcggaggctgtaaaacctggcactctgcttgggttatcaatactctggctgaccatcgtcatcgtgagactgactttggtggaagtccttggataattatcattattgtgtttctgggacgttacaaatttaccattctcttctgcacaatttacctttgtgtgcctttcctgaagactatcttctggtctcgaaatggacatgatagatccagggatgtacagcagagagctaggaggtccaaccgccgtagacaggaaggaattaaaattggcctggaagacatctgtactttatggaaacaggcggaaacaaaagttcaagctaaaatccgtaagatgaaggtcacaaagaaagtcaaccatcattacaaaatcaatggaaagaggaagaccgccaaagaacagaaactaagcatgaaagaatgtgagcatgcagaaaaggagaggcaggtatcagaggcagaggaaaatgggaaattggatatgaaagaaatacacacctacaagaaaatgtttcaacgtgcgcaagagttgcggtggcgggcagaggactaccacaaatgcaaaatcaccccctctgcaagaaagcctctttgcaactggtgcacttacaatttggtattacctgggagtgaaaagaaatattacagccatgcctaa

SEQ ID NO: 44127 - DNA, 132 bp, Homo Sapiens
atgggtgcatttaccttgccttcatcgagtaccctggtaggggaagagcctcttgagctgctgttcatcatggtagctgtaccagatcctggatctgttaaagaccagagaactgatgtagacttattctga

SEQ ID NO: 44128 - DNA, 549 bp, Homo Sapiens
cccaaggcggtgtttgctaaggagcagccagcacacagggaggtgcaggctgaagcaggggctagcgccacactgagctgtgaggtggcccaggcccagacagaggtgacttggtacaaggacgggaagaagctgagctccagcttgaaagtgcatgtggaggctgcaggctgtacacggaggctggtggtgcagcaggcaggccaggcagacaccggagagtatagctgtgaggctgggggccagcagctctccttccgcctgcaagtggcagagcccaaggcggtgtttgccaaggagcagccagcgagcagggaggtgcaggctgaggcggggaccagtgccacgctgagctgcgaggtggcccaggcccagacagaggtgacgtggtacaaggacgggaagaaactgagctccagctcgaaagtgcgaatggaggccgtgggctgcacacggaggctggtggtgcaggaggcaggccaggcggacgccggggagtacagctgcaaggccggggatcagcggctgtccttccacctgcacgtggca

SEQ ID NO: 44129 - DNA, 444 bp, Homo Sapiens
cagacgtcatcagcacccaccctcccagatgtgacaatcagaaatgtgtccagacatatccagatgtcccttatggggaagggagaatcgccctggctttgcagactccagctggaacccctgctgcaagcgatggaggagcaacagctcggcaatctggaggcaaggtgggaggtggagaagcacggaaacgaagtctctggctcaaccagcaaaagtgaaccactccccagagaagtttgggaagatgctgatttcatctgtccagtcctaaagcaatgcactaatccaaaattaaacgaaaacaaaaatattcaccaggcaaaggagtgtgaaaaatccccatttctgtctctctctcctcatcagcagtggaaaccggggcttcctagaagaaacgatgcactccccacctccctctgtttgtgctgcagtgaaaactga

SEQ ID NO: 44130 - DNA, 321 bp, Homo Sapiens
cccaacaaaaggagaccctgtacgtgcgaagagtgtggcaaggcctttggacagagaagtcaccttgttcagcacaccagtgagaagctgtatgcatgccaggaatgtgggtgtaccttcagcaacaattcatctctagtcaagcactggcacgtccacacaggcgagaagccctacatgtgtggccactgtggcaagtgcttccgagagagctcatcccttgccaagcaccagcgtgtgcacacaggtgagaagccatacgtgtgtggtgagtgtggacgcaccttcagcgagagcacacaccttgtacagcactggtga

SEQ ID NO: 44131 - DNA, 654 bp, Homo Sapiens
gaaactgaggccccaggacccccagagctagaggctgaacctggcatgaacccaagagctctaggcaaccaaatctgttctcttcccttcaagggcctccctgcaggattatgagaagccaagatggtaaagagatatttgtagttgccatctggagattcttttgggcaacatcatgatctcctggaaagagaggttcagctggaacttgaggcactgggcaactctctggacgtcagtggcaagcccggccagaccgatgtacaaccaaccacccatgggaaagatctcctggaagtccgtggtcaccatctgggcctggatcccgaagtgcctgtctgcagcgatggccacacggttcttccccttcatggccatgatggctcctccgttataggacataatagacatgattgtgtggtatacgaggacccctccattgccggagcaattccagtaaaccgggtctagccttcactcctgcccatcatttctgacatttagactctacatagagggtcctgagattccaggcctttactcatcctgcatcccctacctacttggatgaatattaatatttacaataacagagaaaagttctccagaatgtctgggaggtgaaagaagttaaataaatggaaagtgttgtta

SEQ ID NO: 44132 - DNA, 1216 bp, Homo Sapiens
gctcccgggtggcaagatggtggcgcgcaggaggaagtgcgccgcgcgggacccggaggaccgtatccccagcccactgggctacgcagctattccaatcaagttctctgaaaagcaacaggcttctcactacctctatgtgagagcacacggcgttcgacaaggcaccaagtccacctggcctcagaagaggactctttttgtcctcaatgtgcccccatactgcacagaggagagcctgtcccgcctcctgtccacctgtggcctcgtccagtctgtagagttgcaggagaagccggacctggctgagagcccaaaggagtcaaggtcgaagttttttcatcccaagccagttccgggtttccaggtagcctatgtggtgttccagaagccaagtggggtgtcagcggccttggccctgaagggccccctgctggtgtccacagagagccaccctgtgaagagtggcattcacaagtggatcagtgactacgcagactctgtgcccgaccctgaggccctgagggtggaagtggacacgttcatggaggcatatgaccagaagatcgctgaggaagaagctaaggccaaggaggaggagggggtccctgacgaggagggctgggtgaaggtgacccgccggggccggcggcctgtgctcccccggactgaggcagccagcttgcgggtgctggagagggagagacggaagcgcagccgaaaagagctgctcaacttctacgcctggcagcatcgagagagcaagatggagcatctagcgcagctgcgcaagaagttcgaggaggacaagcagaggatcgagctgctgcgggcccagcgcaaattccgaccgtactgagctgtgagagccgcagtgaatggctggaggtgcagggccaggaggaggcgaggcagggcctgcagcggtctctgagaggccgagctctggccaacgggccccaggttgaaggccaccgcgtccaacagccccatcagagtccacacaggccaggagggaaggaccaggccacccctcgggtcttgtgcttcagcagtcctggggacccaggcgtgccgagaggaggacttgtccttcctgcttcttgcctccacaccctcctctccaggaccctggatgaatccgttctgtgcttccttttccctcaatgcaaaagcccttgctggcaacgaaaaagcctcaaaagcagtgagaata

SEQ ID NO: 44133 - DNA, 872 bp, Homo Sapiens
gtgcggaactcaaaaccgactgcggagagcccagcgggcgggagctggggcgcacgttggggccctgccgaggggcgggcagggcccggtgccagccccggcaccgacgggacgccctcctccctccgcagggcgggaggatgccgccgccagcgaaggagggcgggcgcaagggcccgcgggagcgaagcgggaagagcgcgccaggcacggcgcagggtgaggagcgtgccaagggggcgcccgcgacagagccccccaagccgggctgggccctgacgccgcagggactggcggccatgctccctgcgcagcgccaccgccatctgctcttcggcgacctgctggaggacgtgggcgcggcggcctccaccttcccgtgcgggtcggtggaaccggggtaccgcatgcccgacccgcgcccgtggacgcagtcgctcgagctgcccgccgagcgccagaaccggctcctcggcgtcctcaaggcagcggaggcccgcgggcgagtccgcgccctgcggctgcgctacacccgcatgcgggccgaggagatcgcgctgctcatccagcggcagaagtccgcgcgcgccgccatccggctggagctgttcctgccgccgcagctgaagcccgcgcggatcccggaccccctggaccgccaagaggtgcagacaagccccggtaggggcggggaaaggggaggggccctgcccgcctccgcacacgccggaccccagcctctctccccggcagcggaggcgcgtggagaccatcctggaggagaacgtggatggcaccatcttcccgcggtgacggcgactgagagtgtgcgacgcgccccagcctcccacataaagttataattctccgaa

SEQ ID NO: 44134 - DNA, 2082 bp, Homo Sapiens
ctttttagagttggtggttccaggattttactcagaatgacgttaggaagagaagtgatgtctcctcttcaggcaatgtcttcctatactgtggctggcagaaatgttttaagatgggatctttcaccagagcaaattaaaacaagaactgaggagctcattgtgcagaccaaacaggtgtacgatgctgttggaatgctcggtattgaggaagtaacttacgagaactgtctgcaggcactggcagatgtagaagtaaagtatatagtggaaaggaccatgctagactttccccagcatgtatcctctgacaaagaagtacgagcagcaagtacagaagcagacaaaagactttctcgttttgatattgagatgagcatgagaggagatatatttgagagaattgttcatttacaggaaacctgtgatctggggaagataaaacctgaggccagacgatacttggaaaagtcaattaaaatggggaaaagaaatgggctccatcttcctgaacaagtacagaatgaaatcaaatcaatgaagaaaagaatgagtgagctatgtattgattttaacaaaaacctcaatgaggatgataccttccttgtattttccaaggctgaacttggtgctcttcctgatgatttcattgacagtttagaaaagacagatgatgacaagtataaaattaccttaaaatatccacactatttccctgtcatgaagaaatgttgtatccctgaaaccagaagaaggatggaaatggcttttaatacaaggtgcaaagaggaaaacaccataattttgcagcagctactcccactgcgaaccaaggtggccaaactactcggttatagcacacatgctgacttcgtccttgaaatgaacactgcaaagagcacaagccgcgtaacagcctttctagatgatttaagccagaagttaaaacccttgggtgaagcagaacgagagtttattttgaatttgaagaaaaaggaatgcaaagacaggggttttgaatatgatgggaaaatcaatgcctgggatctatattactacatgactcagacagaggaactcaagtattccatagaccaagagttcctcaaggaatacttcccaattgaggtggtcactgaaggcttgctgaacacctaccaggagttgttgggactttcatttgaacaaatgacagatgctcatgtttggaacaagagtgttacactttatactgtgaaggataaagctacaggagaagtattgggacagttctatttggacctctatccaagggaaggaaaatacaatcatgcggcctgcttcggtctccagcctggctgccttctgcctgatggaagccggatgatggcagtggctgccctcgtggtgaacttctcacagccagtggcaggtcgtccctctctcctgagacacgacgaggtgaggacttactttcatgagtttggtcacgtgatgcatcagatttgtgcacagactgattttgcacgatttagcggaacaaatgtggaaactgactttgtagaggtgccatcgcaaatgcttgaaaattgggtgtgggacgtcgattccctccgaagattgtcaaaacattataaagatggaagccctattgcagacgatctgcttgaaaaacttgttgcttctaggctggtcaacacaggtcttctgaccctgcgccagattgttttgagcaaagttgatcagtctcttcataccaacacatcgctggatgctgcaagtgaatatgccaaatactgctcagaaatattaggagttgcagctactccaggcacaaatatgccagctacctttggacatttggcagggggatacgatggccaatattatggatatctttggagtgaagtattttccatggatatgttttacagctgttttaaaaaagaagggataatgaatccagaggttggaatgaaatacagaaacctaatcctgaaacctgggggatctctggacggcatggacatgctccacaatttcttgaaacgtgagccaaaccaaaaagcgttcctaatgagtagaggcctgcatgctccgtga

SEQ ID NO: 44135 - DNA, 408 bp, Homo Sapiens
atgagggccttcttaaggaaccagaaatatgaggatatgcacaatattattcacattttacagatcagaaaattgaggcacagattaagtaacttcccaaggctaccaggcattctagctccagaaactgtgctcttaccattctgctacaaggtatttcgaaaaaaagaaaaagtaaaaagaagtcaaaaggcaacagagttcattgattattccatagaacagtcacaccatgcaattctcacacccttgcagacacacttgaccatgaaaggttcctcaatgaaatgttcctcattatcttcagaagccatattattcacattgactttgcagttaactcagaccctaggtctggaatgctgtcttctctacttatccaaaactatacatccacagatcatataa

SEQ ID NO: 44136 - DNA, 957 bp, Homo Sapiens
atgattcagcctatggcgtcacccagcaacagctccactgtcccagtctctgaattcctcctcatctgcttccccaacttccagagttggcagcactggctctccctgcccctcagccttctcttcctcctggccatgggagctaacaccaccctcctgatcaccatccagctggaggcctctctgcaccagcccctgtactacctgctcagcctcctctccctgctggacatcgtgctctgcctcaccgtcatccccaaggtcctggccatcttctggtatgatcttaggtcgatcagcttccctgcctgcttcctccagatgttcatcatgaacagtttcctccccatggagtcctgcacgtttatggtcatggcctatgaccgttatgtggccatctgccacccactgcggtacccatccatcatcactaatcaatttgtggccaaagctagtgtcttcattgtggtgcggaatgcgcttcttactgcacccattcctatcctcacttccctgctccattactgtggggaaaatgtcattgagaactgcatctgtgccaacttgtctgtgtccaggctctcctgtgataatttcacccttaacagaatctaccaatttgtggctggttggaccttgctgggctcagatttattcctcatcttcctctcttacaccttcattctaagagctgtgcttagattcaaagcagagggggcggcagtgaaggccctgagcacatgtggctcccacttcatcctcattcttttcttcagcaccatactgctggttgtggtgttgacaaacgtggccagaaagaaggtccccatggacatcctgatcctgctgaacgtccttcatcaccttattcctcctgcattgaaccctattgtgtatggggttcggaccaaagagataaaacagggaattcagaagttactgcagagagggaggtga

SEQ ID NO: 44137 - DNA, 174 bp, Homo Sapiens
gagtccaagaccctatccatgtctgggatggaatcttttattgaaaaacagacaaagttactggagatggaggcaacagaagccccagaaaaagatcctgaacaacttcccaaaggacatgtggacagctgcttgtcagatgcagctgtgccagcccacgatccagcaacgacg

SEQ ID NO: 44138 - DNA, 852 bp, Homo Sapiens
ataattggtaccatcaccaatggcctctatctatgggtgctaagattcaagatgaaacagactgtcaatactctcttattttttcatctcattctctcttattttatttcaacaatgattctgccatttatggccacctcccaacttcaagacaatcactggaactttggaactgccttgtgcaaggtcttcaatggcactttgtctctggggatgttcacctctgttttcttcctttcggccatcggtcttgatcgttaccttctcactcttcacccagtgtggtcccagcagcacaaccccgcgctgggcttccagcattgtggagtctggatttcagccgctgccctcagcatcccctatttgattttcagagagacacatcatgaccgtaaaggaaaggtgacttgccaaaataactatgctgtgtctactaactgggaaagcaaggagatgcaagcatcaaggcagtggattcatgtggcctgtttcatcagccgcttcttgctgggctttcttctgcctttcttcatcatcatcttttgttatgaaagagtagccagcaaggtgaaagagaggagcctgtttaaatccagcaagcccttcaaagttatgatgactgccattatctctttctttgtgtgttggatgccctaccatatacaccagggcttacttctcactacgaaccagtcactacttttagagttgactttgatacttacagtgctaaccacttctttcaatactatcttttctcccacactctacttatttgttggggagaatttcaaaaaggtcttcaagaagtccattcttgctctgtttgagtcaacatttagtgaagattct

SEQ ID NO: 44139 - DNA, 1436 bp, Homo Sapiens
gctgcatttgtccagtcctgctactggatgccatcattggcccccgactgcccactgcttgccatgcctgaggagacccaagaagactccgtggcgccaatgatgcccagccagaggagcagggggccattggcccccaaccacgtgcatgaggtatgcctgcaccaggtggagtccatcagcgacctacatagtggagcaggcacactgcgcccctatctaactgaagaggcacgaccgtgggatgagctgctgggcgttttgccgccgtcactgtgtgcccaggctggctgcagccctgtgtacagacgaggagggttcctgctgctgctcgcgctgctggtgctcacttgcctagtgctcgcactcctggctgtctacctgagcgtgctgcagagtgaatccctgcgcatcctggcacacacgctccgcacgcaggaggagacactactcaaactccgcttggccagcctcagccagcttcggaggctcaactccagtgaggcccaagcacccagctgagatgccatttggatctggggcctgggggtgtgtgttggtgggggaataaagtggctatgggcaggtctctccttccctactgctggctgccacatctacactatttccttggtgagatttttgtacaagaacctgttgttaacttaatggctgcctccctctcctgatctcttcaagccaggcctagccaagcctctggtgccaaagcctcgctttgggtggcccaaggtcaggggaaggggcaccagcctcctggctcctcctgtggcctgtcaacactctctggccaccccagatggcaggttctgaagtctagaaatagctgcccccatagcaatcacccaaactctgccagggctcccagtgagggtccagcctcagctcttaaagacaggctgggctctgagtagggggagaggcaccacctggggaagactgccttggagggcaaaggtgacatcgtggaagaccagttgggcccaagcctgggatagtagatggggagggagaacagaaaaatacccaggggttaagaccacagaaggctgaccgttctgtttaattatctgtaataatccttaaaaatcagcacacaaatccattccaggtagctttgccaccccacctgctgtggtggcatttgtccagatgccaccacccccctaagagtgggtcatcctgggggagcaaggcctgagaaaggaaaggaagggaaaggccccctagtgcctgccccacagccctgaggaaggcacatatttagcctggcctgagacaggacaggaaggggccacagggctgagtgcagggacaaaggggtcagggtcccaagtgtccgggcccccagctacccaccccatgtctgtttttggttttgtcattaaaaaaaataaagtgacaaatactggtggaga

SEQ ID NO: 44140 - DNA, 1869 bp, Homo Sapiens
agtagagagtctagaccccacccagtcttcatgtacggccgaccgcaggctgagatggaacaggaggctggggagctgagccggtggcaggcggcgcaccaggctgcccaggataacgagaactcagcgcccatcttgaacatgtcttcatcttctggaagctctggagtgcacacctcttggaaccaaggcctaccaagcattcagcactttcctcacagcgcagagatgctggggtcccctttggtgtctgttgaggcgccggggcagaatgtgaatgaaggggggccacagttcagtatgccactgcctgagcgtggtatgagctactgcccccaagcgactctcactccttcccggatgatttactgtcagagaatgtctccccctcagcaagagatgacgattttcagtgggccccaactaatgcccgtaggagagcccaatattccaagggtagccaggcccttcggtgggaatctaaggatgccccccaatgggctgccagtctcggcttccactggaatcccaataatgtcccacactgggaaccctccagtgccttaccctggcctctcgacagtaccttctgacgaaacattgttgggcccgactgtgccttccactgaggcccaggcagtgctcccctccatggctcagatgttgcccccgcaagatgcccatgaccttgggatgcccccagctgagtcccagtcattgctggttttaggatctcaggactctcttgtcagtcagccagactctcaagaaggcccatttctaccagagcagcccggacctgctccacagacagtagagaagaactccaggcctcaggaagggactggtagaaggggctcctcagaggcaaggccttactgctgcaactacgagaactgcggaaaagcttataccaaacgctcccacctcgtgagccaccagcgcaagcacacaggtgagaggccatattcttgcaactgggaaagttgttcatggtctttcttccgttctgatgagcttagacgacatatgcgggtacacaccagatatcgaccatataaatgtgatcagtgcagccgggagttcatgaggtctgaccatctcaagcaacaccagaagactcatcggccgggaccctcagacccacaggccaacaacaacaatggagagcaggacagtcctcctgctgctggtccttaggtgaatgaagaaggaagaggattccaggctgagagcactggacgtggcaactgttcagaggagaggcagtcttcaagttctacattcattcagaaaaatgttttttgagcctacaatactgagcgcaacaaggctgtggagacccatggtgaggagcatggagttaactaaaggatgtgtcagggaagaaagacttctcaaggaggtgcctccatcagacccaaaggactcatgggggctagctgcacctcacatttcttggacatataccgttggacatgtctatcttctggaaactatggcatggacagtaaggattcagaagtgcatgaaggcaccctgcctctgcagagcagaaagatcatagacaacatttatgaatgtgcccagtgctgccaagaagagaagccggtcctctgcaggctcaagcctatctgggcctctggggaagccccacagccttggctgtgcctgcccctgccctctcacccctaccctgaccttgtcctacttcactgcctttgtctgtgttactagtggccccagtatacctgggatggacatccaggtgcccttcatccaagctcctatgtgaggggaatggacattattaaaagaacaggggcagaagtggctcatttatgacccattcactagccccagggattg

SEQ ID NO: 44141 - DNA, 1083 bp, Homo Sapiens
atggctctggcgatgcttcgggactggtgcaggtggatgggtgcgaacgcagagcgctccctgctcatcctgggtatccctgatgactgcaaggaacatgagttccaggaggccgtgcgggctgccctgtcgcccctgggcaggtaccgagtactcaccaagcacttcagaaaggagctcggggccaaggcagccttggtggagttcgctgagtatttaaaccgaagcttgattccccatcaaataccaggcaatggggggccctggaaagtgatcttcctgccccaagtacctgttattgagtttcaggatatgcccagttttcctgcacagccccagggagctgtgggtgaagcaggagggacaaatgtaacaaaagcctgggtccagccttggcgctgcaccctacagcctgtgctggaaaacagggcctaccgggaattgagacccttttccaggagggagcagccaggctgcgaggaagagtcctttgagagctgggtggagcatgccaaggatatgctgcagctgtggtgccatgcgtcggaaagggagaagaagaggtggctgctggagagcttgggcggcccggccctggaagtcgtgagcggcctcctggaggaagataccaacttgtccgcgctggactgcctggcggcgctggggcaggtatttaggaaccaggacactcgaatgacttcgaggctgaagttcctgacctgcacgcaggggccccaggaggggctgtttgccttcgtggtgcgcctggaaggcctgctgcagagggctgtggagaagggggccgtctgcccagccttggccaattacctgcgactacagcaggtgctgtcttgggcccgccccagcgaggcactccaggataccctgagagggatgcagctggagaagaggccacctggcttcctggggctgctccggctcatccgggagatggaggcatgggcagccttcccagcgaggagccagcagggtgtggcctgggcagcggccccagtggagagtgaagacccagctgctgcccaggcctccccagcccaggggaatgccagcgaggctggtccc

SEQ ID NO: 44142 - DNA, 429 bp, Homo Sapiens
atgctctcgtgctgcttggagccagcagcgtgggactgtggggccgagggcagggatgggagagaagagatggttctgggctggaagcgagacagggggaccactccccgcaccctccccgccagccccagtgcggggacgcctctctggggtgcagggcacgtgcttggggacgctggcgagagccccttaccttcacatccgtgtccgaatcgctggagctgctgctggagtcggaagagctgtggtgtccttgctggatggaggtgcggcagtgaggcggcgccccttacccagccccctgaagttggaggcctaaggcaggaccctggggtcaggggcaaccccagccttcccgcccctccgcagccggtgatgaggcgacttacctttggacccggacctgcccctgcctccgaccggccctga

SEQ ID NO: 44143 - DNA, 903 bp, Homo Sapiens
aatcatacaaggcagatagaatttattcttctgggactgacggataattctcagttacagattgtaattttcttatttctacttctaaattgtgtgttgagcatgatagggaacttcactatcattgccctcattctgctggattcccagctcaagactccaatgtatttcttcctccgtaatttctcttttctggaaatttcattcacaactgcttgcattcccagattcctaatcaccattgttaccagggaaaagaccatttcctgtaatggttgcatatctcagttgtttttttacatattcttgggggttacagaatttttccttctagctgctctgtcctatgatcgctatgttgccatctgcaaacctttgcgttatatgtccatcatgagtaacaaagtttgctaccagcttgtattcagttcttgggtaactggattcctgatcattttcactccactgattttaggtcttaacttggatttctgtgcttcaaatatcattgatcatttcatttgtgacatttctcttatcctacaactttcttgctcagacacacatttactggaactgattgcctttttattagctgtgatgacacttattgtcacattgtttttagtaatcctttcttactcttacatcatcaagacaattctgaaattcccttcagctcagcaaaagaagaaagccttttccacctgctcttctcacatgattgttgtctccatcacttatggtagttgtatgtttatctacataaagccatcagcgaatgaaagagttgctttaagcaaaggagtaactgtgctcaatacttcagttgccccgttgttaaacccatttatttatactctgaggaatcagcaagttaaacaagccttcaaagctgtattt

SEQ ID NO: 44144 - DNA, 384 bp, Homo Sapiens
gaccaaggcgcctgcgcgaccccaggtccggcccatccctccattccctgtaaccgccagcctccgcccctcttgacaaccacccgctacgcttaccctgttacaaggaacccaggctgcaaccaggaaaaactgccatcagaaagtttatctaagccggagcaaacttggctggaccggcccctgacccgccttggcgctgccgcccctgtcttctgcggtccccggccaggcgaggaccagagttttgttctcggagattcttgcctttcttgttttagcacaaacgcgcacgcacccctttcccataacgagcccctccgcccaactacagatcccgggatctgttgcaggggctggaaaggccccactcgagaggcctga

SEQ ID NO: 44145 - DNA, 1647 bp, Homo Sapiens
cagctgcgcgggcggagcagaaagcaagtgattgctttcctttcctcatttttggaagccctgcctaacacacagctgcactgtacatcccagttcctggatggacgaagaaagtgaactgatccagccccaagaccagagctgctgggcctttctgcccgatttgtgtctgtgccgtgttttctggtggctaggagacagggacaggtccagggctgctcttgtctgcagaaagtggaaccagatgatgtattctgctgagctctggcggtacagaaccatcaccttcagcgggagaccttccagggtacatgcatctgaagttgagtcagctgtttggtatgttaagaagtttggtcgttatctggagcacctggaggtcaaattcatgaatccttacaatgctgtcttgaccaagaagttccaggtcaccatgcggggcctcctgtcttgtctgagtaagagcaacaaccgtctgaaatctctttccatccaatacctggagctggaccgcctggtatggaggaacagcatcaggagctcattcatcagcagcttgagcttcttcttaaagaagatgggcaaacgcctggattatctcaacctaaaaggggccaggctgaccgtggagcaaggctgccaaattctcgactccctcagctacatgaggaatgagaatgtgatctcagagctcaacatcgaggactatttcagccatcaccttgctgtctacaacagcccccagttcaaaaagaccatgtccacattccacaatcttgtgtccctgaacctcaactacaactgtatctccgacgagctgcttgagaacttgtgtgagaatgccagcaccctccggaccatcaacatcaaatgccacgttcatgacccccacggacaggtcatctggggtatgtcctgggccaagctggccaggcaggccaccaatctgaaggtgaacttcttctttgaacggatcatgaagtacgaacgcttggcccgaatcctcttgcaggagatcccgatcaggagcatcagtctgagaagctgctatttcagtgacccagactgttcaatgagacccactctgatagatctcctgcccaccttccggcacactctgcagaaattaacttgtgaattcaacaacaaccatgagtcactcgacgaggagctgcacctcctcatcatatcctgcaggaagttgttttacttcaaaatctgggctttccttgatgttagttttgtggagcggatcctgaagagtcagaaagaacggcagtgtgccctgcgtgtattcaaggcgagaatttatacaaacagatatgagacgaatgaagaggacaagaccctgcaggaaatttacaggaagtacagaaagctgatcgaatcagagcttagctattttgtcatcgtttactctgtgatgtaatgagcactctacagatgaagaaagctgggagcactttgaacttgaaaatcatttctcttagaactacacttgggcactgccggcccttttgctcctctctctcccctccactttttttttttgtcagctccatgacaacatgaccagctcagcaaaggctgagactgcccatgacctgaaggctccaggtggctttaaagcgctatgtttaccaacta

SEQ ID NO: 44146 - DNA, 1393 bp, Homo Sapiens
acactggaccttcaaaaccctcagggcagagagcagccctacactccctacaccacacccatactcagcccctgcaggcaaggagagaacaggtcaggttcccgagagctcaggaacatggagctgatccaggacacctcccgcccgccactggagtacgtgaagggggtcccgctcatcaagtactttgcagaggcactggggcccctgcagagcttccaagcccgacctgatgacctgctcatcaacacctaccccaagtctggcaccacctgggtgagccagatactggacatgatctaccagggcggcgacctagagaagtgtaaccgggctcccatctacgtacgggtgcccttccttgaggtcaatgatccaggggaaccctcagggctggagactctgaaagacacaccgcccccacggctcatcaagtcacacctgcccctggctctgctccctcagactctgttggatcagaaggtcaaggtggtctatgttgcccgaaacccaaaggacgtggcggtctcctactaccatttccaccgtatggaaaaggcgcaccctgagcctgggacctgggacagcttcctggaaaagttcatggctggagaagtgtcctacgggtcctggtaccagcacgtgcaggagtggtgggagctgagccgcacccaccctgttctctacctcttctatgaagacatgaaggagaaccccaaaagggagattcaaaagatcctggagtttgtggggcgctccctgccagaggagaccatggacttcatggttcagcacacgtcgttcaaggagatgaagaagaaccctatgaccaactacaccaccgtcccccaggagctcatggaccacagcatctcccccttcatgaggaaaggcatggctggggactggaagaccaccttcaccgtggcgcagaatgagcgcttcgatgcggactatgcggagaagatggcaggctgcagcctcagcttccgctctgagctgtgagaggggctcctggagtcactgcagagggagtgtgcgaatctaccctgaccaatgggctcaagaataaagtatgatttttgagtcaggcacagtggctcatgtctgcaatcccagcgatttgggaggttgagctggtaggatcacaataggccacgaatttgagaccagcctggtaaaatagtgagacctcatctctacaaagatgtaaaaaaattagccacatgtgctggcacttacctgtagtcccagctacttgggaagcagaggctggaggatcatttcagcccaggaggttgtggatacagtgagttatgacatgcccattcactacagcctggatgacaagcaagaccctccctccaaagaaaataaagctcaaaataaaata

SEQ ID NO: 44147 - DNA, 555 bp, Homo Sapiens
ccaaaggaaccagagcagttgagaaaactgtttattggtggtctgagctttgaaactacagaagatagtttaaaagaacattttgagaaatgggacacactcacagattgtgtggtaatgagagaccgccaaacaaaacgttccaggggcttaggttttgtgacttattcttgtgttacagaggtagatgcagcaatgtgtgctcgaccacacaaggttgatgggcatgtagtggaaccaaaaagagctgtttctagagaggattctgtaaagcccggtgcccatctaacagtgaagaaaatttttgttggtggtattaaagaagatacagaagaatataatttgagagactactttgaaaagtatggcaagattgaaaccatagaagttatggaagacaggcagagtggaaaaaagagaggatttgcttttgtaacttttgatggtcacgatacagttgataaaattgttgttcagaaataccacactattaataggcataattgtgaaaaaaaggccgtttctaaacaagaaatgcagtctgctggatcatag

SEQ ID NO: 44148 - DNA, 2345 bp, Homo Sapiens
ctaagcagcaagccacgcacctcccgcgctggcgaaatccgagacccgccccttccggaagttttgacactttgtgcgccccgggcaatgcgattgagagggtaatcatccggtccgttatctaaacccgtcactccgggaaacagcgacccgatctttccggatccgcgctctcccagcatcctttgccttccggtatgtggccccgtctggctagtcccgcctagcgcgcccatttcgagcccaagtttccagctcgggtttccaggctcagaattttccaggagtaggttcttgggcagtggctgtgggagctggaatggcgcagctggaaggttactatttctcggccgccttgagctgtacctttttagtatcctgcctcctcttctccgccttcagccgggcgttgcgagagccctacatggacgagatcttccacctgcctcaggcgcagcgctactgtgagggccatttctccctttcccagtgggatcccatgattactacattacctggcttgtacctggtgtcaattggagtgatcaaacctgccatttggatctttggatggtctgaacatgttgtctgctccattgggatgctcagatttgttaatcttctcttcagtgttggcaacttctatttactatatttgcttttctgcaaggtacaacccagaaacaaggctgcctcaagtatccagagagtcttgtcaacattaacactagcagtatttccaacactttatttttttaacttcctttattatacagaagcaggatctatgttttttactctttttgcgtatttgatgtgtctttatggaaatcataaaacttcagccttccttggattttgtggcttcatgtttcggcaaacaaatatcatctgggctgtcttctgtgcaggaaatgtcattgcacaaaagttaacggaggcttggaaaactgagctacaaaagaaggaagacagacttccacctattaaaggaccatttgcagaattcagaaaaattcttcagtttcttttggcttattccatgtcctttaaaaacttgagtatgcttttgcttctgacttggccctacatccttctgggatttctgttttgtgcttttgtagtagttaatggtggaattgttattggcgatcggagtagtcatgaagcctgtcttcattttcctcaactattctactttttttcatttactctctttttttcctttcctcatctcctgtctcctagcaaaattaagacttttctttccttagtttggaaacgtagaattctgttttttgtggttaccttagtctctgtgtttttagtttggaaattcacttatgctcataaatacttgctagcagacaatagacattatactttctatgtgtggaaaagagtttttcaaagatatgaaactgtaaaatatttgttagttccagcctatatatttgctggttggagtatagctgactcattgaaatcaaagtcaattttttggaatttaatgtttttcatatgcttgttcactgttatagttcctcagaaactgctggaatttcgttacttcattttaccttatgtcatttataggcttaacatacctctgcctcccacatccagactcatttgtgaactgagctgctatgcagttgttaatttcataacttttttcatctttctgaacaagacttttcagtggccaaatagtcaggacattcaaaggtttatgtggtaatatcagtgatatttcgaactgtgaaaatggacttaataattagaccatttctacaaagaacaactgaataggtggaaaacatggaatttcttttaggtgcagtggtggtcttcaaattacattagttttttttatatatattttaaacatatgtaagaaattaagtggcaaagaactgagaaagcttaagacctgcttcaaaagcctgaaaaatggaaaaataaaattgttttcagatatctcatatcactctcataatgttggccccttaaaaagcttgggaatgttttgtatgtacaagtttattaaaactgggtatgcttcatattactggaatgaatttattctcttcagagagaaatattaggttagtgcaaaagtaattgtggtttttgccattgaaagtaatggcaaaaccacaattacttttttaccaacctaataacaatgtattagcaaatatttacaaatggtcaggtgatattcttgattgaaaagttgcttaacatttcagtaatataattttaattctaagtcaaaatacaaatgcatagatagtaaatgataaagtagagactcatatatgcctgtctagacatcaaat

SEQ ID NO: 44149 - DNA, 1053 bp, Homo Sapiens
atggaggcagccacagctccggaggtggccgcaggatccaagctgaaggtgaaagaagccagcccagcggatgctgaaccaccccaggcttcacctggacagggggctggcagccccactccccagctcctgccccctatagaagagcaccccaagatctggctacctcgggccctgaggcagacctacatccggaaggttggggacacagtgaacctactaatcccattccagggcaagcccaaacctcaagccatctggacacatgatggctgtgccttggacaccaggcgtgtgagtgtgcggaatggggagcaagactccatcctcttcatccgagaagcccaacgtgctgactcaggtcgctaccaactccgcgtgcagctgggtgggctggaggccaccgccaccattgacatcctggtgattgagaggccaggccctcctcagagtattaagctggtggacgtttggggcttcagcgctacactggaatggacaccgccccaagatacggggaatacagcacttctgggatacacggtgcagaaggctgacacaaaatccgggctgtggttcacggtgctggagcactatcaccgcaccagctgcatcgtctctgacctcatcatcggcaactcctatgccttccgtgtctttgctgaaaaccagtgcggactcagtgaaacagcccccatcactacggacctcgcccacatccagaaagcagctactgtttacaagaccaaggggtttgcccaacgagacttctctgaagccccaaagtttacccagcctctggccgactgcactacagtcaccggctataatacccagctcttctgctgtgtccgcgcctctccccggcccaagatcatctggctgaagaacaagatggatatccaaggcaaccctaagtacagagccctgactcacctgggaatctgctccctagagatccgcaagccgggtccctttgatggaggcatctatacctgcaaggcggtgaaccccctaggggaggcatctgtggactgtcgggtggatgtgaaa

SEQ ID NO: 44150 - DNA, 195 bp, Homo Sapiens
ctgaagttgaaggggaatgtgttcaaacacaagcggattctcacggaacacagccacaagctgaaggcagacaaagcccgcaagaagcccctggctgaccaggctgaggcccgcgggtctaagaccaaggaagcacgcaagctccgtgaagagcacctccagaccaagaaggaagagatcatcaagactttgtcc

SEQ ID NO: 44151 - DNA, 3119 bp, Homo Sapiens
gtaataaaaagcattgtacttcatcttaaatcactggtaaggctcagcctacagaaagatttgaaatggccagagccaatcgcttggtgcattctgcgtaatggtttccatctccgatttcctcatcagggcctgtgaatacccaggtgcctgtatctttgccaagaccgtgatcaaggtagcttaagagagatggtcaggagaaaacactgtttttgttttttttgttgttttgttttgttttggccagttaaatatcatctctcaaatattgatctcaccgtgtcaaccttgcactgcacaaccttccttctgcttctcccacacccagtatttgcagaagggcaaagctgcttaagagagaggatcagggtgaagtttggcacacagggtttattaatggggcaaaaactgccttttcttcctcctcctgaccttattttgctcttcactctccccagccaataaagcgtctgtggcgattggtgaacagcataaacagctggacctcagcaagggtcaggcaaacccagtcactcggaaggcagctgtgtgagctgccaagctagtgggcttcaggtgcaagggtacctgtgccacaccaacctgggagcacacagaatactattaatgtgcacccagctggtctccccaggcaagaaggtatcctcttcccaaggtgtacccactgaatgttgttactacatattgagagtcattttatgcatatgcattctacctttcctgctttatgagtatttttaagcttttagttcaaggttatattcagaaaatatttcccagtataatgatacatcgtagcctaagaaatattttctcaatgtaattcccttcccagctacccaaatgctacagagaaatgttttctacttggccactatcagggttcgtcatctattgtgttgactattaatggctttttgattgggtaaggattttgctatagatgaaggtagagggctgtcagccctgaaaaacacacaggtcagacatttaaaaggcatgggtttcgagctgtctcaaaatattgcccaatagccataattttaccagcctttctgtcatatgctgctattacaaagtggaagctgttgaatgtttattggtgcccagggttttgctctccaatctaggttcagttgaaggaatattgtttctaagactgttttgagacatgtccagtacatcacaaaggagatcggggcgacccctgcagatgtggagccattagcccagttgaggatattctccaagttgtcctctctcctgctgatggaaatgggaatgaagttaagtggtctgaaaaacttgaatcgttcacatttctcagctctgggggtcatttaccagtttgttgtagaagaaataatcaggtaagttaaaagttcatttccagagaaggtaaaccccacttaccatctctgcatgatttcagtgggaattgattatcactaatccccaactgggctagaataaatgtaaagtttgacctttttaaaacgaaaagagagacaaagtctcagcacattccaaggagtggtagaaacagagctgaaggtgtccccattgtagattagtctcttctcactaaaatttactttccaacgtagggcctaaaggaaacctttcttaaagacaggctgaaaccccttcaaaggcagatgaggaggtacagacacgtgaccttttggtgcacactggagctacttggacaagaccagcatgccttgctgcacgtgtgtgtatttcactgctgagaacatcctttaacttggtgtgcaatttgaaaggatgtgaatcatggatggaaggccatttgtacatgtcccttggcaaaattctttctggtgtctcctaacttcagagacagggactctttttggatctctattgacaagtaataaaagtctggccctcataacttgtttccgaactagaaaagtctgtgagacccctacatcattctggtttttttgcttgagtaagaacaatccttttttatttttcttctgtacagtctaaagctacagagaaaaaaaaatgcactcttcccttgccggctcctggtaccattggtctgaacagctgtagttggtctactccttacttagcacttgattgtgtggggaaacaaaggtgggaggggtggggaatactggaaataatcagggcaatttttttctttcccataattggactagataccttggtactgttgaccttctcagcatctcccttttgccttagatggcaacaccctccagtctgtagcagagcagtccaacccagattagtgcagcccggaggcttagggtgcagcctccctggtcttcctccacacagttgttcaccaacagaccagacctcctttaaccacagtgtcaacatagtatcggaaagagagccatttcttaggggaataaaacagtttcgcttctttagctcatctgtggtgtcagaatccttggagctgaagagagaaatcaaaagagcatgatgatggctgcctggtttcaggtggaacttaatgcattgatctttagaagctccttctgttggaagttgagtacctgtgatctaaaatgtcctggaggcagatgacatctaaaatatgtgctttccaaccagcacagctggcgctcttagctcctgattggttgtgtgttttattaaggatcagtgcagttaagtcgtattttaaagtgttacctcccctcctaacccttccccttcttggacactgaaggaaaaggccaactagggtgttagccctctgggcaccaaggaaactaacagctttctcaaagcggtgaccactcaggccagcccagacaaatctgagggatggccagtgcactccaatgatgggacaggcctaacaacacatgtaagcttccccgagagctttcagctggttcacctctttgttctctagactcttaagtactgactgctttgacttttgtgattatgttatggtgatgtgtagtcagtgtaccaatatgttcacaacctaggatcatgataatggagtgtgttttgggttttttttaactgttcagaaaaaaagtaaattacaaatataagattaaagtgaa

SEQ ID NO: 44152 - DNA, 3260 bp, Homo Sapiens
atgaactgggctgccttcggagggtctgaattcttcatcccagaaggcattcagatagattcgagatgcccactaagcagaaatatcacggaatggtaccattactatggcattgcagtgaaagaaagctcccaatattatgatgtgatgtattccaagaaaggagctgcctgggtgagtgagacgggcaagaaagaagtgagcaaacagacagtggcatattcaccccggtccaaactcggaacactgctgccagaatttcccaatgtcaaagatctaaatctgccagccagcctgcctgaggagaaggtttctacctttattatgatgtacagaacacactgtcagagaatactggacactgtaataagagccaactttgatgaggttcaaagtttccttctgcacttttggcaaggaatgccgccccacatgctgcctgtgctgggctcctccacggtggtgaacattgtcggcgtgtgtgactccatcctctacaaagctatctccggggtgctgatgcccactgtgctgcaggcattacctgacagcttaactcaggtgattcgaaagtttgccaagcaactggatgagtggctaaaagtggctctccacgacctcccagaaaacttgcgaaacatcaagttcgaattgtcgagaaggttctcccaaattctgagacggcaaacatcactaaatcatctctgccaggcatctcgaacagtgatccacagtgcagacatcacgttccaaatgctggaagactggaggaacgtggacctgaacagcatcaccaagcaaaccctttacaccatggaagactctcgcgatgagcaccggaaactcatcacccaattatatcaggagtttgaccatctcttggaggagcagtctcccatcgagtcctacattgagtggctggataccatggttgaccgctgtgttgtgaaggtggctgccaagagacaagggtccttgaagaaagtggcccagcagttcctcttgatgtggtcctgtttcggcacaagggtgatccgggacatgaccttgcacagcgcccccagcttcgggtcttttcacctaattcacttaatgtttgatgactacgtgctctacctgttagaatctctgcactgtcaggagcgggccaatgagctcatgcgagccatgaagggagaaggaagcactgcagaagtccgagaagagatcatcttgacagaggctgccgcaccaaccccttcaccagtgccatcgttttctccagcaaaatctgccacatctgtggaagtgccacctccctcttcccctgttagcaatccttcccctgagtacactggcctcagcactacaggagcaatgcagtcttacacgtggtctctaacatacacagtgacgacggctgctgggtccccagctgagaactcccaacagctgccctgtatgaggaacactcatgtgccttcttcctccgtcacacacaggataccagtttatccccacagagaggaacatggatacacgggaagctataactatgggagctatggcaaccagcatcctcaccccatgcagagccagtatccggccctccctcatgacacagctatctctgggccactccactatgccccttaccacaggagctctgcacagtacccttttaatagccccacttcccggatggaaccttgtttgatgagcagtactcccagactgcatcctaccccagtcactccccgctggccagaggtgccctcagccaacacgtgctacacaagcccgtctgtgcattctgcgaggtacggaaactctagtgacatgtatacacctctgacaacgcgcaggaattctgaatatgagcacatgcaacactttcctggctttgcttacatcaacggagaggcctctacaggatgggctaaatgactgctatcataggcatccatatttaatattaataataataattaataataataataaacccaacacccatcccccagaagactttatctctatacattgtaactcatgggctattcctaagtgcccattttcctaatgaacatgaggatgggatcaatgtgggatgaataaactttagttcagaaacaggacttactaaaagtcagtgggactgggtttctgtagccaagccagacttgactgtttctgtagagcactatctcgggcaggccattctgtgccttttccctctgttccatgactttgctttgtgttggcaaccacttctagtaagctactgattttcctgttgacaaaatctctttagtcttgaaggatggatactggagacagaatctggtttgtgttcttggatgggcacataatttaccaagagcattcaccttgccatctgtcttgtcattgtactgtacaaggaacagccctcagacgtgttctgcacatcccttcttcctggtggtaccatccctatttcctggagcaccagggctaaatggggagctatctggaaactctagattttctgtcatacccacatctgtcacagtacctgcattgtcttggaatgtaagcactgtcttgagggaaggaagaggtctgttctgtattgccttaagttgattgaggtttgtaggagactggttcttctacatacaaggatttgtcttaagtttgcacaatggctagtgtcagcaaaaggcaggagagggtttttgttttttttttaagttctatgagaatgtggatttatggcattgagtatcacactcagctctgctgtgttaactttgtgaaactggatggaacaaactttaacttaccaagcaccaagtgtgaaagtgactttcacggttccttcataaaactataataatatccgacactttgatagaaaaaaattcaaagctgtgcctttgagcctatactatactgtgtatgtgtggaaataaaaatgtattgtacttttggagaattttttgtaggcatttttctgtcagatttgtagtaatttgtgaggtttgttagagattaatataggttttctttctgtattataaaatgcaccaagcaattatggtggacctattaccctatgggtaagaaataaatggaaatatgacatcggatgtttcagcaactgttctgtaaataaaatctttgatcacaccactcagtgtgataattgtgtctacagctaaaatggaaatagttttatctgtacagttgtgcaagatatgaatggtttcacactcaaataaaaaatattgaaacga

SEQ ID NO: 44153 - DNA, 996 bp, Homo Sapiens
gcccttgccaagccccgggcgtcctctctgggcccggggcctggggagctggcggcgcggtccccagtgctgcggggccctcaggcccccctgcgccctggcggctgggccccggatggcctgaagcacctctgggcaccgaccgggcggcccggcgttcctaacaccgccgccggcgaggatgcggacgtcgcagcgtgcccccgccgcggagaggaggaagagggcggaggcggtttcccgcacttcggcgttcgctcctgtgcacctccgggccgctgccctgcgcccccgcaccctcgggaatctacgaccagcttcgcctcggccccgcctcgcccggccccgggtctcgagcctcagcgtggcccagccgccagcccgcctcaggaacccagttcccggcctccgtcgccacctgcgggcctctccaccgagcccgcgggtcccgggacggcgccgcggccgttcctgcccggccagcctgccgaagtcgatggaaaccccccgccggccgcccccgaggctccagcggccagcccctcgacggccagcccggctccggccgcacccggagatctccgccaggaacatttcgatcgtctgatccgccggtcgaaactttggtgttacgcgaagggcttcgccttggacactccgagtttgcgccgggggccagagcggccgcctgcgaaagggccggctcggggagccgccaagaaacgccggctgccggcgccccctccgcgcaccgcgcagccccgccgccctgcaccgacgctccccaccacgagcaccttcagcctcctcaactgcttcccctgccccccggccctggtggtgggggaagacggagacctaaagccggcatcctcgcttcgcctccagggagactctaagcccccgcccgcccacccgctgtggaggtggcagatggggggtcccgctgtccctgagccccctggcctcaaattctgggggatcaacatggatgaa

SEQ ID NO: 44154 - DNA, 2282 bp, Homo Sapiens
taaaatctccccatgtgaggggatgtgtttccttcagcctctgctgtctggccgctctgtctaggtcctgggccacgggagagccccgtccctcctttctgaaggccccctgacttgggcctcagtgtccccgaagatcatgatggcgtatatgaacccggggccccactattctgtcaacgccttggccctaagtggccccagtgtggatctgatgcaccaggctgtgccctacccaagcgcccccaggaagcagcggcgggagcgcaccaccttcacccggagccaactggaggagctggaggcactgtttgccaagacccagtacccagacgtctatgcccgtgaggaggtggctctgaagatcaatctgcctgagtccagggttcaggtttggttcaagaaccggagggctaaatgcaggcagcagcgacagcagcagaaacagcagcagcagcccccagggggccaggccaaggcccggcctgccaagaggaaggcgggcacgtccccaagaccctccacagatgtgtgtccagaccctctgggcatctcagattcctacagtccccctctgcccggcccctcaggctccccaaccacggcagtggccactgtgtccatctggagcccagcctcagagtcccctttgcctgaggcgcagcgggctgggctggtggcctcagggccgtctctgacctccgccccctatgccatgacctacgccccggcctccgctttctgctcttccccctccgcctatgggtctccgagctcctatttcagcggcctagacccctacctttctcccatggtgccccagctagggggcccggctcttagccccctctctggcccctccgtgggaccttccctggcccagtcccccacctccctatcaggccagagctatggcgcctacagccccgtggatagcttggaattcaaggaccccacgggcacctggaaattcacctacaatcccatggaccctctggactacaaggatcagagtgcctggaagtttcagatcttgtagaggacgcagtctccatctctctccatcgggcctcgggaccctttctcttctgaatctgcttccctgcagtttagatcccgggatggcattcctgagaaagcaacccgaaccagctgtccttctgacagctcggtgttcagcttacagagaccacccctttcctccacagggagaggctcctccctctcctgggacagctcacaggtcctagtgattctctcaaccctaacaccgtctggcacgattgtgaccgctgaagtacaccacgagctccaggcttcagaaagtggtgctgagaacttgctccaagaagaagtcaaaccaaacttgcagttgatttggggtcatgtttaggtcagaatcaccgtgcccttgaacaagcaggtaggggggcttgataacttaactttccacgtggacagaatttttttttttgttttgtttttattgtgccactgtgctctagcctgggtcacaagagcgaaactccgtctcaataataacaacaacaaaaataacccaggagtggctcaagagtccagtgtgggatgaaaatataaacagaggaagacaacatatgtcactggggaggctgggggagctagacaaaattcacacgggaggggcagggatgagacaatattgtgccctgggtctgtgcaaacgttgggaccagaatccactataagtttcattcttcggagacacggaagctctgcactggaggccgggactcaggcgtggaagagaatcttctccttattcaccggggaggctgtgtcttgtgcaaacaagtcatagaaacttgatgggagttggggagggactgaaggatgcatgcaaggttctgggaaggagtgagaagtagtgaaggccaaggggcccccatcacaggccgatggggtaagacttcgagagagcctgatcctggggtcttctgagactccaccaggagccggagagggcagggagccaaatccagctaggaggttacagattgcttttcctgggctgggctcctgagtgttggttcttccagctgtgcacaggggatttcaaacgttctacgtcctaaagccaggaagagtgacaaggcaggtggggacagaaggaagaagccaggagcctccctgagaaggtgtcaccttatctgtcctcctcttccccacacactggcctctgggtcccccttctctgtccacccacagagtgaaaccaattaaaatgttggatctcatttaaa

SEQ ID NO: 44155 - DNA, 1407 bp, Homo Sapiens
gttggctcattacaagcatgctttcttgcaaagaggaatttccagattgatgtatatgaagctagggaagatactcgagtggctaccttcacacgtggaagaagcattaacttagccctttctcatagaggacgacaagccttgaaagctgttggcctggaagatcagattgtatcccaaggtattcccatgagagcaagaatgatccactctctttcaggaaaaaagtctgcaattccctatgggacaaagtctcagtatattctttctgtaagcagagaaaatctaaacaaggatctattgactgctgctgagaaataccccaatgtgaaaatgcactttaaccacaggctgttgaaatgtaatccagaggaaggaatgatcacagtgcttggatctgacaaagttcccaaagatgtcacttgtgacctcattgtaggatgtgatggagcctattcaactgtcagatctcacctgatgaagaaacctcgctttgattacagtcagcagtacattcctcatgggtacatggagttgactattccacctaagaacggagattatgccatggaacctaattatctgcatatttggcctagaaatacctttatgatgattgcacttcctaacatgaacaaatcattcacatgtactttgttcatgccctttgaagagtttgaaaaacttctaaccagtaatgatgtggtagatttcttccagaaatactttccggatgccatccctctaattggagagaaactcctagtgcaagatttcttcctgttgcctgcccagcccatgatatctgtaaagtgctcttcatttcactttaaatctcactgtgtactgctgggagatgcagctcatgctatagtgccgttttttgggcaaggaatgaatgcgggctttgaagactgcttggtatttgatgagttaatggataaattcagtaacgaccttagtttgtgtcttcctgtgttctcaagattgagaatcccagatgatcacgcgatttcagacctatccatgtacaattacatagagatgcgagcacatgtcaactcaagctggttcatttttcagaagaacatggagagatttcttcatgcgattatgccatcgacctttatccctctctatacaatggtcactttttccagaataagataccatgaggctgtgcagcgttggcattggcaaaaaaaggtgataaacaaaggactctttttcttgggatcactgatagccatcagcagtacctacctacttatacactacatgtcaccacgatctttcctccgcttgagaagaccatggaactggatagctcacttccggaatacaacatgtttccccgcaaaggccgtggactccctagaacaaatttccaatctcattagcaggtga

SEQ ID NO: 44156 - DNA, 789 bp, Homo Sapiens
atggcgatgagcagcggcggcagtggtggcggcgtcccggagcaggaggattccgtgctgttccggcgcggcacaggccagagtgatgattctgacatttgggatgatacagcactgataaaagcatatgataaagctgtggcttcatttaagcatgctctaaagaatggtgacatttgtgaaacttcgggtaaaccaaaaaccacacctaaaagaaaacctgctaagaagaataaaagccaaaagaagaatactgcagcttccttacaacagtggaaagttggggacaaatgttctgccatttggtcagaagacggttgcatttacccagctaccattgcttcaattgattttaagagagaaacctgtgttgtggtttacactggatatggaaatagagaggagcaaaatctgtccgatctactttccccaatctgtgaagtagctaataatatagaacagaatgctcaagagaatgaaaatgaaagccaagtttcaacagatgaaagtgagaactccaggtctcctggaaataaatcagataacatcaagcccaaatctgctccatggaactcttttctccctccaccaccccccatgccagggccaagactgggaccaggaaagataattcccccaccacctcccatatgtccagattctcttgatgatgctgatgctttgggaagtatgttaatttcatggtacatgagtggctatcatactggctattatatgggttttagacaaaatcaaaaagaaggaaggtgctcacattccttaaattaa

SEQ ID NO: 44157 - DNA, 1418 bp, Homo Sapiens
agctgccgcggtcgctccgagcggcgggccgcagagccaccaaaatgccagaagagatggacaagccactgatcagcctccacctggtggacagcgatagtagccttgccaaggtccccgatgaggcccccaaagtgggcatcctgggtagcggggactttgcccgctccctggccacacgcctggtgggctctggcttcaaagtggtggtggggagccgcaaccccaaacgcacagccaggctgtttccctcagcggcccaagtgactttccaagaggaggcagtgagctccccggaggtcatctttgtggctgtgttccgggagcactactcttcactgtgcagtctcagtgaccagctggcgggcaagatcctggtggatgtgagcaaccctacagagcaagagcaccttcagcatcgtgagtccaatgctgagtacctggcctccctcttccccacttgcacagtggtcaaggccttcaatgtcatctctgcctggaccctgcaggctggcccaagggatggtaacaggcaggtgcccatctgcggtgaccagccagaagccaagcgtgctgtctcggagatggcgctcgccatgggcttcatgcccgtggacatgggatccctggcgtcagcctgggaggtggaggccatgcccctgcgcctcctcccggcctggaaggtgcccaccctgctggccctggggctcttcgtctgcttctatgcctacaacttcgtccgggacgttctgcagccctatgtgcaggaaagccagaacaagttcttcaagctgcccgtgtccgtggtcaacaccacactgccgtgcgtggcctacgtgctgctgtcactcgtgtacttgcccggcgtgctggcggctgccctgcagctgcggcgcggcaccaagtaccagcgcttccccgactggctggaccactggctacagcaccgcaagcagatcgggctgctcagcttcttctgcgccgccctgcacgccctctacagcttctgcttgccgctgcgccgcgcccaccgctacgacctggtcaacctggcagtcaagcaggtcttggccaacaagagccacctctgggtggaggaggaggtctggcggatggagatctacctctccctgggagtgctggccctcggcacgttgtccctgctggccgtgacctcactgccgtccattgcaaactcgctcaactggagggagttcagcttcgttcagtgtgtggcaacttccagtgcaggaaacacaggcagtggaacccgaagacctgaatctcagtcccaagacccccacttacctgccccgcatcatcagacaagtttcctaggccctcggagcttctgctgctcacttgtgcctgtgtccaccccatatggtcatcaagaggatttgagctggacacgttaa

SEQ ID NO: 44158 - DNA, 500 bp, Homo Sapiens
agaaaggagagtgctttattgaaaacagaaaagtcagtaaagacttcaggaagaagactgctcctgacttcatggagtcaggagccttgaataccaccttttttgccctccagatgttgaacaatccagagaagatcgctgagcagataagcaaggatctggcctggctcacgtcccacatgatgactctgtggacccagttcctggacacagtcactctgcactcccaagtgaccacttatctcacccaggaacaccacaccctgagggtccgaaggttttctgaggccttcttttacatggagcaccaaaaacttgcagtcctgacatttcaggagaatctgatacagacgcacagccagctgtccctggatatccggaactcggagtacctcactagcatgcccccgctgcctgcagagtgcctggacatcgacggcgattggaacaccctgccggtgatctttgaggacagatacgtggactgccctgcgacaggt

SEQ ID NO: 44159 - DNA, 901 bp, Homo Sapiens
tcctatcatcacaaaactcatgatgctccggctgctcagttccctcctccttgtggccgttgcctcaggctatggcccaccttcctctcactcttccagccgcgttgtccatggtgaggatgcggtcccctacagctggccctggcaggtttccctgcagtatgagaaaagtggaagcttctaccacacgtgtggcggtagcctcatcgcccccgattgggttgtgactgccggccactgcatctcgagggatctgacctaccaggtggtgttgggtgagtacaaccttgctgtgaaggagggccccgagcaggtgatccccatcaactctgaggagctgtttgtgcatccactctggaaccgctcgtgtgtggcctgtggcaatgacatcgccctcatcaagctctcacgcagcgcccagctgggagatgccgtccagctcgcctcactccctcccgctggtgacatccttcccaacaagacaccctgctacatcaccggctggggccgtctctataccaatgggccactcccagacaagctgcagcaggcccggctgcccgtggtggactataagcactgctccaggtggaactggtggggttccaccgtgaagaaaaccatggtgtgtgctggagggtacatccgctccggctgcaacggtgactctggaggacccctcaactgccccacagaggatggtggctggcaggtccacggtgtgaccagctttgtttctgcctttggctgcaacttcatctggaagcccacggtgttcactcgagtctccgccttcatcgactggattgaggagaccatagcaagccactagaaccaaggcccagctggcagtgctgatcgatcccacatcctgaataaagaataaagatctctcagaaaa

SEQ ID NO: 44160 - DNA, 363 bp, Homo Sapiens
atgccaaagtgtggaggtaacaagtatttactagttcttttgtgtacctactgtgggtgggtggaggcttatccaacactaactgagaaagctcgtgaagtaacctgtgtgcttcttcgagatcttattcctagatttggactgcccttacggatcagctcagataatgggctaacgtttgtggctgacttggtacagaagatagcaaaggtattggggatcatttggaaactgcatgccgcctaccggcctcagagttccagaaaggcagagcagatgaatcagactatcaaaaatagtttagggaaagtatgtcaggaaacaggattaaaatggatacatgctctctatagtattatttaa

SEQ ID NO: 44161 - DNA, 1722 bp, Homo Sapiens
agggcgtctctaggcctggtcggctggcggcggtccttatgtcgtcagaagatcgagaagctcaggaggatgaattgctggccctggcaagtatttacgatggagatgaatttagaaaagcagagtctgtccaaggtggagaaaccaggatctatttggatttgccacagaatttcaagatatttgtgagcggcaattcaaatgagtgtctccagaatagtggctttgaatacaccatttgctttctgcctccacttgtgctgaactttgaactgccaccagattatccatcctcttccccaccttcattcacacttagtggcaaatggctgtcaccaactcagctatctgctctatgcaagcacttagacaacctatgggaagaacaccgtggcagcgtggtcctgtttgcctggatgcaatttcttaaggaagagaccctagcatacttgaatattgtctctccttttgagctcaagattggttctcagaaaaaagtgcagagaaggacagctcaagcttctcccaacacagagctagattttggaggagctgctggatctgatgtagaccaagaggaaattgtggatgagagagcagtgcaggatgtggaatcactgtcaaatctgatccaggaaatcttggactttgatcaagctcagcagataaaatgctttaatagtaaattgttcctgtgcagtatctgtttctgtgagaagctgggtagtgaatgcatgtacttcttggagtgcaggcatgtgtactgcaaagcctgtctgaaggactactttgaaatccagatcagagatggccaggttcaatgcctcaactgcccagaaccaaagtgcccttcggtggccactcctggtcaggtcaaagagttagtggaagcagagttatttgcccgttatgaccgccttctcctccagtcctccttggacctgatggcagatgtggtgtactgcccccggccgtgctgccagctgcctgtgatgcaggaacctggctgcaccatgggtatctgctccagctgcaattttgccttctgtactttgtgcaggttgacctaccatggggtctccccatgtaaggtgactgcagagaaattaatggacttacgaaatgaatacctgcaagcggatgaggctaataaaagacttttggatcaaaggtatggtaagagagtgattcagaaggcactggaagagatggaaagtaaggagtggctagagaagaactcaaagagctgcccatgttgtggaactcccatagagaaattagacggatgtaacaagatgacatgtactggctgtatgcaatatttctgttggatttgcatgggttctctctctagagcaaacccttacaaacatttcaatgaccctggttcaccatgttttaaccggctgttttatgctgtggatgttgacgacgatatttgggaagatgaggtagaagactagttaactactgctcaagatatggaagtggattgtttttccctaatcttccgtcaagtacacaaagtaactttgcgggatatttagggtactattcattcactcttcctgcgtagaagatatggaagaacgaggtttatattttcatgtggtactactgaagaaggtgcattgatacatttttaaatgtaagttgagaaaaatttataagccaaaggttcagaaaattaaactacagaatattaaatattataatgtgccc

SEQ ID NO: 44162 - DNA, 243 bp, Homo Sapiens
atggaaaacttgccaggaagttacttcattctttttctctttttcaaaagtgcatctcgtagtgccaacttggaactcacctgtttttctcggaaggaacgcttattttttgaccggacattctggctataccgcatcatcataaagttcttctgttttttcttctctttatttgtcgaactggaaaatggatttgttttggttttcttcctcacaaattcttttcggtctgtctttccagcc

SEQ ID NO: 44163 - DNA, 723 bp, Homo Sapiens
atgggaacccacactggagacaatccctatgagtgtaaggagtgtgggaaagccttcaccaggtcttgtcaacttactcagcacagaaaaactcacactggagagaaaccttataaatgtaaggattgtgggagagccttcactgtttcctcttgcttaagtcaacatatgaaaatccatgtgggtgagaagccttatgaatgcaaggaatgtgggatagccttcactagatcttctcaacttactgaacatttaaaaactcacactgcaaaggatccctttgaatgtaagatatgtggaaaatcctttagaaattcctcatgcctcagtgatcactttcgaattcacactggaataaaaccctataaatgtaaggattgtgggaaagccttcactcagaactcagaccttactaagcatgcacgaactcacagtggagagaggccctatgaatgtaaggaatgtggaaaggcctttgccagatcctctcgccttagtgaacatacaagaactcacactggagagaagccttttgaatgtgtcaaatgtgggaaagcctttgctatttcttcaaatcttagtggacatttgagaattcacactggagagaagccctttgagtgcctggaatgtggtaaagcatttacgcattcctccagtcttaataatcacatgcggacccacagcgccaaaaccattcacgtgtatggaatgtggcaaagc

SEQ ID NO: 44164 - DNA, 753 bp, Homo Sapiens
atgctgccacctcccttagagctggggtaccgggtcacggctgaagacctgcacctggaaaaagagacggcattccagcgcatcaacagtgcactgcacgttgaggacaaggccatcccggactgcagaccctcacggccttcccacactttgtcctcacttgcaacaggggcttcgggtgggcctcccgtttctaaagcacccactatggatgcacagcaggacagacccaagtcccaagactgcctgggcctagtggcccccctagcatctgctgcagaggtccccgctacagctcccgtgtctgggaagaagcacagaccaccaggacccctgttctcctcctcagatccccttcctgccaactcttcccactcccgggactcagcccaggtcacctcgatgattcctgcccccttcacagctgcaagcagggatgccggcatgagaagaacaaggtcggctcctgcagctgccgcagcagcccctcccccctccacattgaaccccacgtcggggtcactactccagtggatggaggcccctcacatttcttggcctcagccacagctgcagcacgtgcccagaggtcagagatataaccagagatcccagacctcccggaccagatcctgcctcaaacgaaatgccagctccagctcccacagctctacggaaggcctccaggaagtaaagcggaggagggggccagcctcatcccactgccagctggccctcagttcctcaaacaca

SEQ ID NO: 44165 - DNA, 1145 bp, Homo Sapiens
gctggcggccgcggagacgcagagtcttgagcagcgcggcaggcaccatgttcctgactgcgctcctctggcgcggccgcattcccggccgtcagtggatcgggaagcaccggcggccgcggttcgtgtcgttgcgcgccaagcagaacatgatccgccgcctggagatcgaggcggagaaccattactggctgagcatgccctacatgacccgggagcaggagcgcggccacgccgcggtgcgcaggagggaggccttcgaggccataaaggcggccgccacttccaagttccccccgcatagattcattgcggaccagctcgaccatctcaatgtcaccaagaaatggtcctaatcctgagtcgtcacccttggattttatggatcacggagctgaccatctttacctggtcctggaactgaaaaactgtagcttgtgtgaaaatgagcctttggaccagtctttattaaaacaaacaaacatgagtagtctgcatatcgaatatctagagctctaaacccccaatacttaaaagtctaattgctgtcctgtggtttcattagtctgataggaagatagggatttcctcagtcacagatgatattttgaaggaaagctgcaataaagccacaatgatttgaggtctttgcttaagtatgagatacttgatgggggctttatcatgcaacattagtttgcttaccttaagaattgcccaaaaatgaaagaaaatatgagcttttcagttaaacatactcctaaaaacattttccgggattttactactaaaattggacatttaagcgaagtaaaagaggccgggtgcggtggctcacgcctgtaatcccaacactttaggagtccaaggcgggcggatcacttgaggtcaggagttcaagaccagcttggccaaggtgataaaacccgtctctactaatacaaaaaaaattagctgggtatgttggtgcaggcttgcaatcccagctacttgggacgctgaggtgggaggatcgcctgaacctcagaggcagaggttgcaatgaagcggaggttgcagtgagccgagagcatgccgctgcactccagcctgggagactgcatctcaaaaaagaaaaataaacgaagtaaaagatatttatcaga

SEQ ID NO: 44166 - DNA, 399 bp, Homo Sapiens
atggccgaggaacgcattgctgttggaggtgtaatggacgttaatactgctttacaagaggtgctgaagaccgccctcatccacaatggcctagcatgtggaatttgcaaagctgccaaagccttagacaagcgccaagcccatctttgtgtgctggcatccaactgtgatgagcctatggatgtcaagttggtggaggccctttgtgctgaacaccaaatcgacctaattaaggttgatgacaacaagaaactaggggaatgggtaggtctctgtaaaactgacagagaggggaaaccccgtaaagtggttggtcgcagttgtgtagtagttaaggactatggcacggagtcccaggccaaggatgtcattgaagagtacttcaaatgcaagaaatga

SEQ ID NO: 44167 - DNA, 2052 bp, Homo Sapiens
attccaggaagcgtttgcacatcctggccccagaagattttgcgtagcctcaccaagagaagaagttggaaagaaaaaaaaagaagttggcaaggcatccagaggagacccccccagcacctgggttctctgccaggggagagagttatgaagaagacttgagcaggcagtccagagctgatacagctgctccaatcaccagagatgcaatctcctgctagatgtcttcacatctacctttctatgtcacatgtgcaagatggttgctctgccttcagacatcacatttacattccaggcagaaaggagaaggaaagagcaaaagatgtgttccgaacaaatccatcttaaaaacaaacaaggggaggggtagcaggagaaaatttaaaaagaagaagaagaaaaacaaaaacaggaaagccgttgtttccctaaaagccccatcaagccgacttctaccggtgactcattacccagtcatgtggccacgcctggattcaaggcagtctgaggaggtgagtgtttcaaagaggcacatggatgccacagacaaaatcaagtttccatggttgaaggagaagaggacgatagagtttggggaggcagcaggctacgtctgccacagaagatataaagatatggagccacacgagaagatgggggaggctgccaaaaaagtccactgggtacagatgaggagcaggtgacattggagttgctccatctgaggagcccgcacctgcaatggcttgtgctcctgctcctgtgggtataggcacaaggctgatgccgagagagtgagttgtttctgttggggttcagaacacaataccccaaagtatggcgatgagtacttaactaaaggacattggaaggcctcagaagcagcctcagatccaaggtccctctgacctgctcctgccctcctgtctctctcgtccctcgttctcccctgaagtgagtcatagaaaccagaatcctcttccccacggtaggtcctagaaactagaaccctttttccccgaagcaaaagccataaaaactggaattattactctaaactctccttgactttttgtccagaagatggccataaagaaattctcagctaggtgtggtggctcgtatctgtaatcccagcactttgagaggccaaggtgggaggatcacttgaggccaggagtttgagatcggcctgggcaacatagtaagacccccatctctacaaaacttttttttttaaacttacctaagcgtggtggtacacctgtagtctcagctacttaggaggctgaggtgggagggaccctgctctggctgtgactgctttatcacagggagtgcctatctgtgggctgctttctacacattaaagcattttcagaaagggccagcatcagccttggaaaaaaggaggaagagccacggagagtctccctttatcttccccttatgtgatgtgagagtgcacatgactgtgtgcacatacacacacacacacacaccacacacacacaccccacaggcacacagggtcaagaacatgctgggcagagcttaagccactgaatgtttcagtaggaatcatgatatctaaaaataggacagctgataagggggttcttactactcacagttcctggaattatatgcaattgcatcttggaaactcaacaaataaacagttagtatggaattaaggaattaagtttggtgaagttcaaagaagctgatgttactcacaagagtaaatagagaggaaaccgggcgtggtggcttcacgcctgtaattctagcactttgggaggccaagacgagcagatcacttgaggtagagagtttgagaccagcctggccaacatgatgaaaccctgttctctactaaaaatacaaaaattagctgggtgtggtggcaggcacctgcaatcccagctacatgggaggctgaggcaggagaatcgcttgaacccaggagacaggggttgcagtgagccaagatcacaccactgcactccagcctgggcgacagagcaagactccctctcaggaaag

SEQ ID NO: 44168 - DNA, 1017 bp, Homo Sapiens
atccaagatagatcaactctccctaaaggctgacagtgaactcttggggccgttttattctctgaggttagcaaggagtcatctactagccattcaggaggccagctgggaagacaaaataggcaccccaaactcagcaacttcataacaccttcctctccccgcctgaagccttaaactgcatcaagtcaaagaaacctggggcaaatccttaacatgtttttgactgcagtaaatccacagccactctctactccgagctggcagattgagaccaagtattcaacgaaagtgctcactggaaattggatggaagagaggagaaagttcaccagagacactgacaagacaccccaatccatttacagaaaagaatacatccccttcccagaccacagaccagaccagatctccaggtggtatgggaagaggaaagttgaggggctaccttacaaacacctgatcacccaccaccaggagcccccacatcgctacctgatcagcacctatgacgaccattacaaccggcatggttacaacccggggctgcctccactccgcacttggaatggacagaagttgctgtggctgccagagaagtctgactttccccttcttgctccccctacaaactatggactctatgagcagctcaagcagagacagctcacacccaaggctggcctgaagcagagcacttatacttcatcctaccccagaccaccgttgtgcgctatgtcctggagggagcatgcggtcccggtccctccccatcgcctgcatcctttcccacacttctgagagctgccaccccaggagcagctcagatagaatcagctggagaccacagcatcactggacttgccagacaacaagtggcgcagataaactcagagtacgagatctggcccgtcaaaggtgctctcagaatcatcatctgcatttggcggtacctgtcccccctcaaaacccacaggttcctttcttttccatccaacaattaaagatctttgacac

SEQ ID NO: 44169 - DNA, 1200 bp, Homo Sapiens
cagaaggaactcacctgcgtcatctgtttgaactacctggtagaccctgtcaccatctgctgtgggcacagcttctgtaggccctgtctctgcctttcgtgggaggaagcccaaagtcctgcaaactgccctgcatgcagggaaccatcaccgaaaatggacttcaaaaccaatattcttctgaagaatttagtgaccattgccagaaaagccagtctctggcaattcctgagctctgagaaacaaatatgtgggacccataggcaaacaaagaagatgttctgtgacatggacaagagtctcctctgcttgctgtgctccaactctcaggagcacggggctcacaaacaccatcccatcgaagaggcagctgaggaacaccggggcaatgtggttttacgggcacagatgatcaggaatgagtataggaagctgcatccggttctccataaggaagaaaaacaacatttagagagactgaacaaggaataccaagagatttttcagcaactccagagaagttgggtcaaaatggatcaaaagagtaaacacttgaaagaaatgtatcaggaactaatggaaatgtgtcataaaccagatgtggagctgctccagaagtttctttctaatcttgacctgtgttttctagtgagaatctctttcttatctgaacataagaatttacaattttcactggaacattctcttttttctacagtggaaatttccttccattttgaagtaaccaatcacaatatcaggctctttgaggatgtgagaagttggatgtttagacgtggacctttgaattctgacagatctgactattttgctgcatggggagccagggtcttctcctttgggaaacactactgggagctggatgtggacaactcttgtgactgggctctgggagtctgtaacaactcctggataaggaagaatagcacaatggttaactctgaggacatatttcttcttttgtgtctgaaggtggataatcatttcaatctcttgaccacctccccagtgtttcctcactacatagagaaacctctgggccgggttggtgtgtttcttgattttgaaagtggaagtgtgagttttttgaatgtcaccaagagttccctcatatggagttacccagctggctccttaacttttcctgtcaggcctttcttttacactggccacagatga

SEQ ID NO: 44170 - DNA, 258 bp, Homo Sapiens
atgaagaaagttctcctcctgatcacagccatcttggcagtggctgttggtttcccagtctctcaagaccaggaacgagaaaaaagaagtatcagtgacagcgatgaattagcttcagggttttttgtgttcccttacccatatccatttcgcccacttccaccaattccatttccaagatttccatggtttagacgtaattttcctattccaatacctgaatctgcccctacaactccccttcctagcgaaaagtaa

SEQ ID NO: 44171 - DNA, 1266 bp, Homo Sapiens
cggcttgtcacctgccctaggagacgcagccgccggaccctgcccagggcacccacgcctcggcgaccaccatgtcccagaccaaaatgctgaaggtccgcgtgaccctcttctgcatcctggcaggcatcgtgctggccatgacagccgtggtaaccgaccactgggctgtgctgagcccccacatggagcaccacaacactacctgcgaggcggcccacttcggcctctggcggatttgtaccaagcgcatccccatggacgacagcaagacctgcgggcccatcaccctgcccggggagaagaactgttcctacttcaggcattttaaccccggcgagagctcggagatcttcgaattcaccactcagaaggagtacagcatctcggcagccgccatcgccatcttcagccttggcttcatcatcctgggcagcctctgtgtcctcctgtccctcgggaagaagagggactatctgctgcgacccgcgtccatgttctatgcctttgcaggtctctgcatcctcgtctcggtggaggtcatgcggcagtcggtgaagcgcatgattgacagtgaggacaccgtctggatcgagtactattactcctggtcctttgcctgcgcctgtgccgccttcatcctcctctttctcggcggtctcgccctcctgctgttctccctgcctcgaatgccccggaacccatgggagtcctgcatggatgctgagcccgagcactaaccctcctgcggccctagcgaccctcaggcttcttccccaggaagcggggtcttggcctggaaccttccagagaggaggcgggagcaattttagccccaccctgctcccatctgcccccctgcaacagtcgcaggctgcttcctctctctgagttcctctgggctgccgcaggctcccctgggaatagagcaagacgtgagtcctaacctggccacagttgggggaggcagagccagcaggtggacaggtgtttgcaggggcccaacttcccctggagctcagaggtgtccccactgtaccagcctctgataagctgcctccagttgtcctttatgaacattgcagggacaacctgtgtttgccagctgggtgttccgtgtaaatagccagcctgtctctttctcggtgataaaacacaccctctctggtgagcccagcgtcccctccttggcttccaggagccctgggaagcatttttaactgggtagaatctgactgtggcttgaaataaaaagctctcagaaaa

SEQ ID NO: 44172 - DNA, 936 bp, Homo Sapiens
atgttttatcacaacaagagcatatttcacccagtcacatttttcctcattggaatcccaggtctggaagacttccacatgtggatctccgggcctttctgctctgtttaccttgtggctttgctgggcaatgccaccattctgctagtcatcaaggtagaacagactctccgggagcccatgttctacttcctggccattctttccactattgatttggccctttctacaacctctgtgcctcgcatgctgggtatcttctggtttgatgctcacgagattaactatggagcttgtgtggcccagatgtttctgatccatgccttcactggcatggaggctgaggtcttactggctatggcttttgaccgttatgtggccgtctgtgctccactacattacgcaaccatcttgacatcccaagtgttggtgggcattagcatgtgcattgtaattcgtcccgttttacttacacttcccatggtctatcttatctaccgcctacccttttgtcaggctcacataatagcccattcctactgtgagcacatgggcattgcaaaattgtcctgtggaaacattcgtatcaatggtatctatgggctttttgtagtttctttctttgttctgaacctggtgctcattggcatctcgtatgtttacattctccgtgctgtcttccgcctcccatcacatgatgctcagctaaaagccctaagcacgtgtggcgctcatgttggagtcatctgtgttttctatatcccttcagtcttctctttccttactcatcgatttggacaccaaataccaggttacattcacattcttgttgccaatctctatttgattatcccaccctctctcaaccccatcatttatggggtgaggaccaaacagattcgagaacgagtgctctatgtttttactaaaaaataa

SEQ ID NO: 44173 - DNA, 381 bp, Homo Sapiens
atggaagtttacgttttaacacctcttttatacttggtaaaattgcctgtgtttcgctttattccttttttttttagacggactcttgtactgtcacccaggctgaagtgcagtggcgcaatcttggctcactacaacctccgcctcctgggttcaagtgattcttttgcctcagcctcccaagtagcagggattacaggcatgtgccaccacacccggcttatttttgtatttttagtagagacagggcttcgccatgttgaccaggctggtctcaactcctctgggaatccgcctgtcttggccttccagggtgctgggattacaggcgtgagccactggaacctggccttgttttgctttattttttctcttacatga

SEQ ID NO: 44174 - DNA, 558 bp, Homo Sapiens
agtcagaaatcttccaacttggaagggagaatgaagtcagtcaccaggccgactgggtcatctgctgaaatcacttgtgaccttactgtaataaatgccgtctacatccactggtacctacagcaggaggggaagaccccacagcatcttctgcactatgatgtctccaactcaagggatgtgttggaatcaggtctcagtcttggaaagtattatactcatacaccgaggaggtggagctggaatttgagactgcaaaatctaattgaaaatgattctggggtctattactgtgccacctggggcaggcacagtgattcagatctgccctacaccacactgaacatctgccttgtggctgcctctggtacacaagatagagccgccccctctcatttcctgccaccaaatttactgtattctgaacaagagaaagacagcttaactcctgatctccctcctaatatcacactgtcctggcagcagctgcaccctgttccctacccctcccccacaactttcctgaagatcaagctgccatctccgggcctcagttaa

SEQ ID NO: 44175 - DNA, 1224 bp, Homo Sapiens
atgaggggccacccctctctgctgctgctatatatggcattaaccacctgcctggatacttcacccagtgaggagacagaccaagaagtcttcctgggtcccccagaggcccagagcttcctgagtagccatacccggattccaagagccaaccactgggacctggagctgctcacaccagggaacctggaacgggagtgtctggaagagaggtgttcctgggaagaggccagggagtattttgaggacaacactctcacggagcgcttttgggagagctacatctacaatggcaaaggagggcgtggacgagtggatgtggccagcctggctgtggggctgacaggtggcatcctgctcattgtcctggccggcctgggagccttttggtatctgcgctggcgacagcaccgaggccagcagccctgtccccaagaggccgggctcattagccctctgagtcctttgaaccctctgggcccaccgacgcccctgcctccacccccacccccacccccaggcctccccacctatgagcaggcgctggcagcctctggggtacacgacgcacctccacccccctacaccagcctcaggaggcctcactgaagagctgctttcgagacccggctctccgaaccgtgcccctgattcataccggattccggaagccgctaggcctcatagacgccgaagctggacttggagtggggaatggtgggagtaggggtcatccggcccgaggcctgccctggcacacgcgtttccgccgcgtatggatatacacatgttttcggcaacgtgttcccgtgtcctggcccctcacgggcccccacactctcctgaccgtgagggcactggtcagttccgcccccgtggtaggcagacgcgcggggaaattcggacccaggagcccagccccggctgtgccatcttgtgtatgggcagatatgacctgacagccccctccagtgccacagggtacgcacacgcagagccccgcctgtgcacacgcgtgtcttcgtgcactccccgtgcggtacaggggcacttcgtaacccagggaaagggcggggggcatatttgcaagcgcgctcggtgcgggcaggctcgcattgcacccagggagctggagttgagctgttcccctaaataaaaacccttcggaaaggagaccaaaaaaagcagaaataatgcaaaaaataataatgaaatgaactgcga

SEQ ID NO: 44176 - DNA, 2128 bp, Homo Sapiens
acttcctttccgtatcaacaggaggccagggactggctggacccctaggagccaggtcctacggataggtgagccggccccccagggcaaacacctccactgggcagacctgactgcccagagctggattctttacttgtaaaaggggccatgagtgacacaggctcggcctgctgtgccttgaggaaaggagaggctaaaaattctgccttctctcctaaagccagccgggctctttatggtgggggaaggaaggatttgtttatttgcactcttctgaaataaaagttctctatcctccctcctggctggagttgggagggccccatgggtgggctctgagatgtggcacacggtacccagggcagggctgggaagggtggggtgcaggggcctccctggctgcagggcccacccaccaggtgcctgggcttgctgcactgagcaggcatgggctctggcccccctcactgtcccttccaggcccagcctgtgttcagggcccaggacagggtctggccagcaggccccaggcctccaagatgttctcagcctctggagtgtgtgtgatgatgagcactcatggagcttcctgtatgctgggccctgggcttctgagagggccaccgggtggcgactgagtcacgaggtggagggccagtcccagggactccaggtgacctcgtgtcggcaccacgcccttctcccatgggcagtcctgggcgccccttcctggccttgggcccagtggcctgtggcctgaccccgtccactcctgcttggttgtcccagcagcagcaggagcccatgctggagaaggtgttatggggcaggtggagggcccggctgactcagatgatcccccaagtttcttttcaatgaacacttgtttagtgcagtttttcctcctcaaatccccctcacacaggcagacaccctcttggcccagggtaatctgctgagcctttgctcaaatatagcagctttgctgctttctaaacacaactaatccaatttgggatttggggattcgaggtgggcagcactgggcctcagatgagcccccatcaccccagacccatgcaggaagagccaggcagggtggggccctggggccacctggtgggctcagggccagggcatcgcgatgtccccatccttcacactacggggcttcctggctgcagagttggggactcagctgggaatgctggccatagaggcagagagcccccatcctgctgggccagccctgacctggcttctccagggtggcccagtgtccccttctgcccttcccctggctcccaccgtccacatccctctatctgcccaccctggacaacaaccagcacagtgcagtgtggccctgcagtgacaccacctgcagagaggtcaggcccagcctcccccgtctcctaaaaggccagcaggtcccaggagctgggggtggggcctggctgtggggcctccatgccccaggggccagggcagaccctccttagccggcaaccactgcagattcctcccctggccagcactcggggacctccctgcccctgccccgtccccctaccttgcctgctgagacatagggctccacgggtctctctcctggggccgggctgactgtggcctgcgaggggcagtcatcgtgttgggttttcctgccagaggcagaaaccacaaaattacctggaacatacacgccccaagtgacagattcaattcaattccacaaatattgacctcgcgtctaatccactcgtcctccagtgccagctcattcctgagaagcccagcctggcagccgcagatcccatttaatcccagccccacaatgtcaccagctcgcagcttgggagctgggctcatccaggccctggcaggtggggccagagctgggctctgacctctgtacccacacttaccaccatgtaaagtgctgggaagaggggtggggagtcacggcaagttgagggtccaggcttgccccagctcgccagatgctcgccctggctgccctgacctagcagctaatctctgcggggcactgcggctacatggtgactccagcacggggacatttatcagaaatggaactgatggattaaagtggaaccaagcg

SEQ ID NO: 44177 - DNA, 433 bp, Homo Sapiens
ggcctgaacttggctgacctccgcagcttccgcccgactctggctaaagtcttggaggctactgccttgaagatgacctctagggaccagcccagacccaagggccccccgaaaagcacttcgccttgtcctgggatctcgaactctgagagctctccgacgctgaattatcagggcattctaaatcggctcaagcagttccccaggtgagagcaattccaggggccggaggtctcacgctgggaaggagccccacctggcctctctcccgggggtcctagtgagtggtctagaggctgctggcccaagagccaggctcaggaacaggaagccatgcagatacccagcatggagaacccggcaatacccatcccagcttttgattaaacaaaattaccaacaaatattaaaattttgattttcctgttcgaca

SEQ ID NO: 44178 - DNA, 1941 bp, Homo Sapiens
agattagactcctcagaagctaattgactagggaaggatcaggaagacaagacacatcaaaaaggggaggggaatctacaatggaaggacacaagaaagatcagctggattaagtagtcatgattatgcaaagccatatccagagaccaaggtgtaaagcagggtcggagaaaatggaaatctcaagattggctcagtcaaaaagaaacattatcagtttgaacatggaccttgaaagggatacgcagagaatagatgaagcaaatcagaaacttcttctcaaaatccaagagagggaagataagattcagaggctggaaagtgagatcattcagacgcggggcctggtggaagatgaagagtgggagaaggagaaccgcaccacgatggaaagggaaagagccttgcaggagctggaggaagaaacagccagacttgaaaggaagaataagacgttggtccacagtataacagaacttcaacaaaagcttacaaggaaatcacaaaagataaccaattgtgaacaaagcagtccagatggagccctagaagagacaaaggttaagttacaacagctggaagcttcctatgcatgccaagagaaggagctgctcaaggtaatgaaggagtatgcatttgtgacccagctctgtgaagatcaagccctctacataaagaagtaccaggaaacgttgaagaaaatagaagaagaactagaggctctgttccttgagagagaagtatcaaaactcgtgagcatgaaccctgtggaaaaagagcataccagccaaaataatgagggtactcctacccaaaagacagcaagattattcagtaaaaaatgggcctcctccttttagtggcaagatggctgccaacaatccagatctcgtactaccagattggcaacctttgcagaataaaagtcttttccaacaggttcagcagtaaagtccagaaaaggtcataaactggcctatctgaggtcaattgcctaccctgtcccacagtcaatgtggccagagggatggagtactctgattggtcaagcttatgtcatatgttcagccccttactaaggattaagagcagtcaaagaagaagaacaaagtaagggaatgacctaaactatatgaaatgcatttctcccactaaaaggggctcagtgcctatggaagagaaaagggatgctggacacgcaaaagcagaggtctacttcattgctaaactctgtgtcttcctataagcaaaaattataacttctaaagatagtagattaagacggtgaaagcttctacaaagagctcagtttaagaaccatgtaaataatcaggtcactagggctaaagtaagcaacaattctaaaataagtagaatatgactggtataaattgcttcaccaactcaaagtagcatatatatcacacctcttatttttccaattaattgctgaaacattcacatgccttactaataggatatactctacattattttccagtacaagagaaaattattttaaatggtaaggttttaggtctaaaagtgtctcaattttaagaaagctgatatcaagcaggtcatattttctaggcattgtgcaatgactatagaaattatgaaaatgtgtaaccaaccagtaatatctagccacaggcaaattttataaaagatccttttaattaacttctggattaaatggaaaatccaaactgagattacttttatagggtcagttacatgctaaggaggaagcatagagagtagaagaatggttaccagaggctgtaaccttcttaatttaaggtaaaaaattctacctattagcttagtattagatgaaaacagaaattcttgtcacatacaggcactattcactgcagtgaagtatatcttttcagaaagttgcataaaatcgaataaaataccatgtattaaatt

SEQ ID NO: 44179 - DNA, 339 bp, Homo Sapiens
atggtttccagggaagggcgtagaacactcatggaactttggggcttgctgcccggggctgcctcaagtctctgctccccacatcccggcacagtgctccttggctgccgtagttgtggctccagtgggcccaggtgcagtttagtccctgctctggagggcaaagtggtgaacctcagcatccacatggtactgattttgcaagtgtgcagagtgcacaagatgtggaagcatggcatccttcaaagagatttctttttttttttttttacagactctcactgtattgcccaagctggagtgcagtggtgcgatcttggctcactgcaacctccgcct

SEQ ID NO: 44180 - DNA, 1019 bp, Homo Sapiens
atgaggccccgctccggccccacgcggaacccgcggctccgagccttcgccggcgtcccgacccgaggccggacccgaggccagtcccgccgctgcgcagccgaagccagtgcggggcctgagagggacgcgcgccccggggcccccgccgcgggcaccatgggcgctgcccactccgcgtctgaggaggtgcgggagctcgagggcaagaccggcttctcatcggatcagatcgagcagctccatcggagatttaagcagctgagtggagatcagcctaccattcgcaaggagaacttcaacaatgtcccggacctggagctcaaccccatccgatccaaaattgttcgtgccttcttcgacaacaggaacctgcgcaagggacccagtggcctggctgatgagatcaatttcgaggacttcctgaccatcatgtcctacttccggcccatcgacaccaccatggacgaggaacaggtggagctgtcccggaaggagaagctgagatttctgttccacatgtacgactcggacagcgacggccgcatcactctggaagaatatcgaaatgtaaagtggtcgaggagctgctgtcgggaaaccctcacatcgagaaggagtccgctcgctccatcgccgacggggccatgatggaggcggccagcgtgtgcatggggcagatggagcctgatcaggtgtacgaggggatcaccttcgaggacttcctgaagatctggcaggggatcgacattgagaccaagatgcacgtccgcttccttaacatggaaaccatggccctctgccactgacccaccgccacctccgcggagaaactgcactttgcaatggggccgcctccccgcgtagctggagcagcccaggcccggcggacagcctcttcctgcagcgccggtacatagccaaggctcgtctgcgcaccttgtgtcttgtagggtatggtatgtgggacttcgctgtttttatctccaataaaaaaaaaaaaaaggtttgttaattaa

SEQ ID NO: 44181 - DNA, 870 bp, Homo Sapiens
atgacaggagtgtttgacagaagggtccccagcatccgatccggcgacttccaagctccgttccagacgtccgcagctatgcaccatccgtctcaggaatcgccaactttgcccgagtcttcagctaccgattctgactactacagccctacggggggagccccgcacggctactgctctcctacctcggcttcctatggcaaagctctcaacccctaccagtatcagtatcacggcgtgaacggctccgccgggagctacccagccaaagcttatgccgactatagctacgctagctcctaccaccagtacggcggcgcctacaaccgcgtcccaagcgccaccaaccagccagagaaagaagtgaccgagcccgaggtgagaatggtgaatggcaaaccaaagaaagttcgtaaacccaggactatttattccagctttcagctggccgcattacagagaaggtttcagaagactcagtacctcgccttgccggaacgcgccgagctggccgcctcgctgggattgacacaaacacaggtgaaaatctggtttcagaacaaaagatccaagatcaagaagatcatgaaaaacggggagatgcccccggagcacagtcccagctccagcgacccaatggcgtgtaactcgccgcagtctccagcggtgtgggagccccagggctcgtcccgctcgctcagccaccaccctcatgcccaccctccgacctccaaccagtccccagcgtccagctacctggagaactctgcatcctggtacacaagtgcagccagctcaatcaattcccacctgccgccgccgggctccttacagcacccgctggcgctggcctccgggacactctattag

SEQ ID NO: 44182 - DNA, 1323 bp, Homo Sapiens
aaaatgttcaccctcctggacgtggtgaactgcaaggcccgcttcatccacgatggccctgaggacacctctgaccagctggtgctggaggtgtcagtgatggcttggttgcccatgccctcatgcctgcggaggggccaaacagacctcctgcccatccaggtcaaccctgtcaatgacccaccccacatcatcttcccacatggcagccttatggtgatcctggaacacacacagaagcctctggggcctgaggttctccaggcctatgacctggactctgcctgtgagggcctcaccttccagctccttggcaccccctctggcctccccgtggagcaccgagaccagcctggggagccggtgactgagttctcctgctgggagttggaggccggcagcctagtctatgtccactgtggtggccctacacaggacttgacattccgggtcagcaatggactgcaggccagccccccggccatgctgaaggtggtggctgtccagctggccatacaaatccaccgcagcacagggctgcatctggcccagggctctgccatgcccatcttgcctaccaacctgttggtggagaccagcgccgtggggcaggatgtgaccgtgctgttccgtgtcaccggaggcctgccgttcagggagctgcagaagcagggggctggtggggtggaggatgctgagtggtgggtcacacaggcgttccaccagcaggatgtggagcagggccacgtgaggtacctgagcactgacccacagcactacaccgaggacaccgtggagaacctggatctgcaggtgcaggtgagctgggaaatcctgagcaatctgtccttcctagtgaccatccagagagccactgtgtggatgctgcagctggagccactgcacactcagaacacccagcaggaggccctcaccacagcccacctggaggccaccctggaggaggcaggcccaagccccccaaccttccactgtgaggtggttcaggctcccaggaaaggcaactttcaactacagggcacgatgctgtcagacggtcagggcttcacccaggatgacgtacaggctgcagaggtgacctatggggccatggcacatgcctcagtggcagtggaggacaccttctgtttccatgtcacagctccaccatatttctccccactctgtaccttctccatccatattggcggtgacccagacatgcctgtcctcgtggtgcccgagggtggtgggtgtgtcctctctgctgaccagctcttcatcaagagtctcaacagtgccaggtacctctatgaggtcatg

SEQ ID NO: 44183 - DNA, 756 bp, Homo Sapiens
ttaagacggccgggagcgcctgcgagctggatctggtggaggatgctgcggcaggtgcttcgcagagggctccagtcgttctgccacaggctgggtttgtgcgtgagccggcacccggtctttttcctcaccgtgcccgcagtcctgacaatcaccttcggcctcagcgcgctcaaccgcttccagcccgagggcgacctggagcgcctggtcgctcccagccacagcctggccaagatcgagcgcagcctggccagcagccttttccccctggaccagtccaaaagccagctctattcggacttacacacccctgggaggtatggcagggtgatcctcctctccccaaccggggacaatattttgctccaggctgaggggatcctgcagacccaccgagccgtgctggaaatgaaggtgaaccacaagggctataattatactttttcccatctgtgtgtgttgagaaatcaggataagaaatgcgtgctggatgatattatttcagtgctagaggatctcaggcaggctgccgtctccaataagacaacagccagggtgcaagtgaggtatcccaacactaaattaaaggtatgctccttctgcatgcttctgccaattagaggcagcacttcatttcttgccctaaacaagcaaagaaaatgcagaggtctcatccttaagactcagaagctaatgcttctttcatttctggggggaaaagatgggcaactgagtgaagaaaacaggcaatga

SEQ ID NO: 44184 - DNA, 2719 bp, Homo Sapiens
gcactgacggcccatggcgccgccagccgcccgcctcgccctgctctccgccgcggcgctcacgctggcggcccggcccgcgcctagccccggcctcggccccggacccgagtgtttcacagccaatggtgcggattataggggaacacagaactggacagcactacaaggcgggaagccatgtctgttttggaacgagactttccagcatccatacaacactctgaaataccccaacggggaggggggcctgggtgagcacaactattgcagaaatccagatggagacgtgagcccctggtgctatgtggcagagcacgaggatggtgtctactggaagtactgtgagatacctgcttgccagatgcctggaaaccttggctgctacaaggatcatggaaacccacctcctctaactggcaccagtaaaacgtccaacaaactcaccatacaaacttgcatcagtttttgtcggagtcagaggttcaagtttgctgggatggagtcaggctatgcttgcttctgtggaaacaatcctgattactggaagtacggggaggcagccagtaccgaatgcaacagcgtctgcttcggggatcacacccaaccctgtggtggcgatggcaggatcatcctctttgatactctcgtgggcgcctgcggtgggaactactcagccatgtcttctgtggtctattcccctgacttccccgacacctatgccacggggagggtctgctactggaccatccgggttccgggggcctcccacatccacttcagcttccccctatttgacatcagggactcggcggacatggtggagcttctggatggctacacccaccgtgtcctagcccgcttccacgggaggagccgcccacctctgtccttcaacgtctctctggacttcgtcatcttgtatttcttctctgatcgcatcaatcaggcccagggatttgctgttttataccaagccgtcaaggaagaactgccacaggagaggcccgctgtcaaccagacggtggccgaggtgatcacggagcaggccaacctcagtgtcagcgctgcccggtcctccaaagtcctctatgtcatcaccaccagccccagccacccacctcagactgtcccaggtagcaattcctgggcgccacccatgggggctggaagccacagagttgaaggatggacagtctatggtctggcaactctcctcatcctcacagtcacagccattgtagcaaagatacttctgcacgtcacattcaaatcccatcgtgttcctgcttcaggggaccttagggattgtcatcaaccagggacttcgggggaaatctggagcattttttacaagccttccacttcaatttccatctttaagaagaaactcaagggtcagagtcaacaagatgaccgcaatccccttgcaattcaggactcggaagtgacatcactcatctggtctcaggggcagcccagaagtatctgactgtagacacaactaggctccgtgggcatatctgggtggcaatttcagagggcagaggggacaccttcattgcctctcctcgcacagaaatggtgggctctctctggcccagcgtggtggttcatgcctgtaataccagcgttttgggaggctgagatgggaggattgcttgagcccaggaggtcgaggctgcagtgagctatgatcacaccaccacactccagcctgagcagcagagcgggacctcgtctctaagaatagaaagaaagaaagagaaacggtgtcctccgcacagccggtcagaactgtgtgactcacttgaggcaggaccgagagtgacatccagttgcacctttctcacctactttgggacctttgggggtgagttcccctttgtcctctcgtggaaacagcacacagcaagcaaccacaaaaccagagcggaaggagggacttcccaccggcatccggccccagtgccatgttttatcatctggaacggttgtgaagctttgtgtgacttgctcaggatcagcagtcaccatggtctaatcccaagagggactcgtcacccagagacctcaaaaggccccaggcctactgtggttttttctgagaggctcccagaaccaagtggcacgttggtttcctgtgcgtctgtgtctttgtgcctgtatctcgctgggggacttcacaggaagcaggatttgggcattcctgaagctcccagctggacaccactcctgagcgccacatcccatgatcacttcaaccacaggcctttgactttgccacatggcaaggcacccagcagaagatgaggatgacgggtgatgctagatggatgtgtacctggtggatggcccacgcacgaagactcaagaccctcaggactggccatataatctgcaaggtccagtatgaaataagaataagcagcccacacaactgggcatagtggttcatgcctgtaatcccagcactttgggaggctgaggagggtggatcacttgaggccaggaattcgagaccagcctggccaacatggcgaaaacccatctctactaaaaatacaaaaattagttgggcatggtggcacacacctgtaatcccagctactcggaggctgaggcacaagaattgcttgaacctgggaggcggaggttgcagtgagctgagataacgccactgcactccagtgtaggcaacagagtgagaccctgtctc

SEQ ID NO: 44185 - DNA, 519 bp, Homo Sapiens
actaatgtaacctaccctgctggattcatggacgtcatgagcactgacaagacgggagagaatttccatctgatctgtgacaccaaggctccctttgctgtacatcgtattgcacctgaggaggccaagtacaggttgtgcaaagtgagaaaaatatttgtggacacaaaaggaatccctcatctgctgactcatgatgctcataccatctgctaccctgatcccctcatcaaggtgaatgacaccattcaggttgatttggagaatggcaagattactggtttcatcaagttcaacactgagaacctgtgtatggtgactggaggtgctaacctgggaagaattggtgtgatcaccaacagagagaggcaccctggttcttttgatgtggttcatgggaaagatgccaacagcaacatcaacaaaccctggatttctcttccccaaggaaaggtaatgcgcctcaccattgctgaagagacagacaagagactggtggccaaacagaccagtggatga

SEQ ID NO: 44186 - DNA, 1488 bp, Homo Sapiens
atgaaccgggccaagcccaccacggtgcgccggcccagcgccgcggccaaaccctcagggcaccctcccccaggagacttcattgctctgggctcaaagggtcaggccaatgaatcgaaaacggcgtccaccctgctgaagccagccccttccggcctgccttctgagcgcaagcgggatgcggcggccgcgttgtccagtgcctcggccctcaccggtctcaccaaacgccccaaactctcctccacaccccctctgagtgccctggggcgcctggctgaggctgcagtggcagaaaaacgagccatttctccgtcgattaaagagccatctgtggtgccaattgaagtgctgcccacggtgctgctggatgagatcgaggcggccgagctggagggcaacgatgacaggatcgagggcgtgctgtgcggggccgtgaagcagctgaaggtcacccgcgccaagcctgacagcaccctctacctgagcctcatgtacctggccaagatcaagcccaacatcttcgccactgagggcgtcattgaggctctgtgtagcctcctgcggcgggacgcctccatcaacttcaaggccaaggggaacagcctggtgtctgtgctggcctgtaacctcctcatggccgcctacgaggaggacgagaactggcccgagatctttgtcaaggtgtacatcgaggactccctgggggagcggatctgggtggacagccctcactgtaagacgtttgtggacaacatccagacggccttcaacaccagaatgccccccaggagcgtgctgctgcagggggaggcgggccgcgttgcgggcgacctgggtgcagggagcagcccacacccctccctcacggaggaggaggacagccagacggagttgctgatcgcggaggagaagctgagccccgagcaggagggccagctcatgcccaggtacgaagagctcgcggagagcgtggaggagtatgtcctggacatgctgcgggaccagctgaaccggcgccagcccatcgacaacgtctccaggaacctcctgcggctcctcacctccacctgcggctataaggaggtgcggctgctggcggtgcagaagctggagatgtggctgcagaaccccaagctgacccggccggcccaggacctgctgatgtccgtctgcatgaactgcaacacgcacggttccgaagacatggacgtcatctcacacctgatcaagatccgcctcaagcccaaggtcctcctcaaccacttcatgctgtgcatcagggagctgctgagcgcgcacaaggacaacctgggcaccaccatcaagttggtgatcttcaatgagctctccagcgcccggaacccgaacaacatgcaggtcctctataccgcactgcagcacagctcagagctggcgcccaaggtaggcccagggtccctggccttgccctccacgccggaatatggggctctgggctggaggggc

SEQ ID NO: 44187 - DNA, 1808 bp, Homo Sapiens
aagtggccgatgcccgtcgccagtgacaccgggacaacagctgcgggctctgtgcgagcggcccagcagcgcggagcctcagcggagtgagcgagcgcggggcagtagcggcctgcgattgtgagatggggactgagaacaaggaggtgattcccaaggaagaaatttctgaagaatctgagccacatgggtcattattagaaaaatttccaaaagtggtttaccaaggtcatgagtttggagcaggatgtgaagaagacatgttggagggacattcgagagagtccatggaagaggttatagagcagatgtctcctcaggagagagactttccatcagggttgatgatctttaagaaatcaccctcaagtgagaaagaccgggagaataatgagagtgagagaggctgcagtcccagcccaaatctggttacacatcagggagatacaacagagggagttagtgcatttgctacctctggccaaaacttcctagagattttagaatctaacaaaacacagagaagttctgtgggagaaaagcctcatacatgtaaagaatgtgggaaagcctttaatcagaactcacatctcatccagcatatgagagttcatagtggagaaaaaccctttgaatgtaaagaatgtggaaagacatttggaactaattcaagccttcgacggcacctgagaattcatgctggagaaaaaccctttgcttgtaatgaatgtggaaaggccttcattcagagttcacaccttattcaccatcatagaattcatactggagagagaccctataaatgtgaagaatgtggtaaagccttcagtcaaaattcagcccttattctacaccagagaatccatactggagagaaaccatatgaatgtaatgaatgtgggaagacctttagggttagttcacagcttattcagcatcagagaattcatactgaagaaagataccatgaatgcaatgagtgtggcaaagccttcaagcatagctcaggccttattagacaccagaaaattcatactggagaaaaaccatatctgtgtaatgaatgtgggaagggcttcgggcagagttctgagcttatccggcatcagagaattcatacaggggacaaaccctatgaatgtaatgaatgtgggaaaacttttggccagaactcagagattattagacatattagaattcatactggtgagaagccctatgtatgtaaggaatgtgggaaggccttcagggggaactcagaacttcttagacatgagagaattcacactggagagaaaccctatgaatgctttgagtgtggaaaggctttcaggcggacctctcaccttattgtccaccagagaattcatactggagagaaaccccatcaatgtaatgagtgtgcaagaaccttttgggataattctgagctgcttctccaccagaaaattcatattggagagaaaccttatgaatgtagcgagtgtgagaaaacatttagccagcattcccaacttatcatacatcagagaattcacactggagagaagccttatgagtgccaagaatgtcagaagacttttagtcggagctctcacctcctccgacatcaaagtgttcactgtatggagtaatctgcaaaataggaaagcttttagtggaaaagctaaagtccaacttattcatttgttcataatatgcaaatatgcaccccaagtattcaaatccaatgaatggacagaacctcctctgtcctcccactgattttaaatagttggttgaagaagatgaggcactttttttttttt

SEQ ID NO: 44188 - DNA, 342 bp, Homo Sapiens
atgaatgagacaaacaaaacacttgttgggccttcggagctccccacagcgtctgctgtggcccctggcccaggcactggggctcgggcatggcctgtgctggtaggatttgtgctgggggctgtggtcctctcgctcctcattgcacttgctgccaaatgccacctctgccgccgataccatgccagctaccggcaccgcccactgcctgagacaggaaggggaggccgcccacaggtggctgaagatgaggatgatgatggcttcatcgaggacaattacattcagcctgggactggcgagctggggacagagggtagcagggaccacttctccctctga

SEQ ID NO: 44189 - DNA, 1860 bp, Homo Sapiens
ggggccgggccgcagctgtcagagccgcggcggcgaacgaggcgcagcgagctgagcggtggcagcgccgcagccggggccggagcgcaggagccgacggggcccgaccaggatggtgcagtggcggctccgcggcgcacgcacgcgctgagcgggcccagcctgggccccgcgccccccgcgccccccgccgccccgatccgggccggcatgatgtgcctggaatgcgcctcggcggcggcgggcggcgcggaggaggaggaggcggacgcggagcggcggcgccggcgccggggggcgcagcgaggggctggcggtagcggttgctgcggggcgcggggcgcgggcggcgctggagtctcggccgcgggcgatgaggtgcagacgctgtcgggcagcgtaaggcgggccccgaccggaccccccggcacccccggcacccccggctgcgcagctactgcaaagggccccggcgctcagcagcccaaaccggccagcttgggccgcgggcggggggcagccgccgccatcctcagcttgggcaacgtgctcaactacctggacaggtacaccgtggcaggcgtccttctggacatccagcagcactttggggtcaaggaccgaggcgccggcctgctgcagtcagtgttcatctgtagcttcatggtggctgcccccatcttcggctacctgggcgaccgcttcaacaggaaggtgattctcagctgcggcattttcttctggtcggccgtcaccttctccagctccttcattccccagcagtacttctggctgctggtcctgtcccgggggctggtgggcatcggggaggccagctactccaccatcgcccccactatcattggcgacctcttcaccaagaacacgcgtacgctcatgctgtccgtcttctacttcgccatcccactgggcagtggcctgggctacattactggctccagcgtgaagcaggcagccggagactggcactgggcattgcgggtgtcccctgtcctgggcatgatcacaggaacactcatcctcattctggtcccagccactaaaaggggtcatgccgaccagctcggggaccagctcaaggcccggacctcatggctccgagatatgaaggccctgattcgaaaccgcagctacgtcttctcctccctggccacgtcggctgtctccttcgccacgggggccctgggcatgtggatcccgctctacctgcaccgcgcccaagttgtgcagaagacagcagagacgtgcaacagcccgccctgtggggccaaggacagcctcatctttggggccatcacctgctttacgggatttctgggcgtggtcacgggggcaggagccacgcgctggtgccgcctgaagacccagcgggccgacccactggtgtgtgccgtgggcatgctgggctctgccatcttcatctgcctgatcttcgtggctgccaagagcagcatcgtaggagcctatatctgtatcttcgtcggggagacgctgctgttttctaactgggccatcactgcagacatcctcatgtacgtggtcatccccacgcggcgcgccactgccgtggccttgcagagcttcacctcccacctgctgggggacgccgggagcccctacctcattggctttatctcagacctgatccgccagagcactaaggactccccgctctgggagttcctgagcctgggctacgcgctcatgctctgccctttcgtcgtggtcctgggcggcatgttcttcctcgccactgcgctcttcttcgtcagcgaccgcgccagggctgagcagcaggtgaaccagctggcgatgccgcccgcatctgtgaaagtctga

SEQ ID NO: 44190 - DNA, 1695 bp, Homo Sapiens
agtccaataaaaacctcatcagttaccaactaaatcagggcatggtgtttttttgttgttttctttttaaagcatagttttagtaatatatttactaaaaaccttagacattatgaaaaaagtcaggatttggaatcttacactgcttggctaaattgacacaatatagaccaacagtttcatcctggggcttatgggtctcataggagcacccgtatgctgaagaaaggcaaagagagaactacagaatttgtagaaaagttttgttgtagttgcttctgaacaattagtttttgtttgtttgttttgttttgttttgtttttctggtaacctagcagtcaaagctcacatttttggacaatgactcattcttcccaggacactggttcttgtggcattcaggaagatggaaagctttatgtggtggattccataaatgacttaaacaaactaaacctctgtccagccggatcgcagcatctgttccctctagaggacaaaatcccagtccttggcacaaactcaggaaatggaagccggagtctgttttttgtggggctgctaattgtgctgattgtcagcctggcactggtttttttcgtgatatttctaatagttcaaactggaaacaagatggatgatgtgtcaagaagactaacagctgaaggaaaagacatagatgatcttaagagaatcaataacatgatcgtaaagcgactcaaccaactcaaccaactggactctgaacaaaactaaaggaatgattttctgaaagcacctgctaacaccttgagctttttactttcctgggagtgtacagggttaggaactgagaaagtgcacttcctcaggcaacagatgatctggtcaggcaacccacccctggggcccactttctgcagcaagatgggagcaattccaaggcaagtgggtatgggaatagcaactaaaaaggggtgaacttgtctcagcccccttttatggtagggcacttcaactttaatggggtgggcggctagcagggaggagaatcaacaaagcaagagaacttgactatgtacgtccaacttcttacagaaggagctttgctaccagaacaagttcactgtgtcaatgaagttcatgacacctcatgcacctttacagatatctgggaaagcctgagaaattcattgagttttatgtattgaagggaaccaggtgattactcttttcaataagagggattctgctcaggtgattagactttgactctatttccccagggacagtgatgggtgggccccagagctagttgctgtctggtgtttgctggtgaaaacatgagcagtagttatgtggggctgagagtcaaaagggaaagcctaattaattcaactaatgtttattaagctcctactctgtgcaaatcactctactcaagaggagctcacataagagtgcaggataaagaaaggagatggacagttatatgtaattatataaactttgtgtattttgtttctcatgaaaaaacccctttggcaccctgctgattgatttggaagaaatctgatagatttgtggcctttcctaaattgcactaggaaattatgtagttagaatatttggaacctgcattagttccagcaatgaaagtaagacacacagcatatgacataagacacagtgtgaaataaatgagtttaaaaagc

SEQ ID NO: 44191 - DNA, 438 bp, Homo Sapiens
gtttgctattcacttgacccagagaactccacaaaatcatgcaaatcaagacgttcaaatctttgtgttcactttaagaacactcatgacacttcccaggtcatcaaggtgggcaggtgtgcccaggccaagcagtggggctggacacaaggttggtggcccaaaaagagtgctgaatttttgctgcacatggttaaaaatgcagagagcaatgcagaacttaagggtttagatgtagattctctggtcattgagcatatccaagtgaacaaagcacctaagatgcgccgccggatcgacagagcttatggtcggatttacccatgcatgagctctccctgccacatcgagatgatccttactgaaaaggaacagattgttcctaaaccagaagacaaggttgccctgaagaaaaagatatcccagaagaaacaaaaa

SEQ ID NO: 44192 - DNA, 651 bp, Homo Sapiens
atgcatctggtcatggtgctgaggaacctgctcaacatcctggctgtcagctctgactcccccctccacacccccacgtacttcttcctctccaacctgtgctgggctgacaccggtttcacctcggccacggttcccaatatgattgtggacatgcagtcgcatagcagagtcatctctcatgcggactgcctgacacagatttccttcttgctcctttttgcatgtatagaaggcatgctcctgactgtgatgacctatgactgctttgtagccatctgttgccctctgcactacccagtcatcgtgaatcctcacctctgtgtcttcttcgttttggtgtcctttttccttagcctgttggattcccagctgcacagttggattgtgttacaattcaccatcatcaagaatgtggaaatctctaattctgtctgtgacccctctcaacttctcaaacttgcttgttctgacagcgtcatcaatagcatattcatgcatttccataatactatgtttggttttcttcccatttcagggatccttgtgtcttactataaaatcgtcccctccattcttaggatttcatcgtcagatgggaagtataaagccttctccacctgtggctctcacctagcagttgtttgctga

SEQ ID NO: 44193 - DNA, 1162 bp, Homo Sapiens
cgcgccgcggcccgcaggcacccggcacgcgccttccccgccgccaggatgcccaagaggaaggtcagctccgccgaaggcgccgccaaggaagagtccaagaggagatcggcgcggttgtcagctaaacctcctgcaaaagtggaagcgaagccgaaaaaggcagcagcgaaggataaatcttcagacaaaaaagcgcaaacaaaagggaaaaggggagcaaagggaaaacaggccgaagtggctaaccaagaaactaaagaagatttacctgcagaaaacggggaaacgaaaactgaggagagtccagcctctgatgaagcaggagagaaagaagccaagtctgattaataaccatataccatgtctcatcagtggtccctgtctcccttcttgtacaatccagaggaaaatttttatcaactattttgtaaatgcaagttttttagtagctctagaaacatttttaaggaggagggaatcccacctcatcccattttttaagtgtaaatgcttttttttaagaggtgaaatcatttcctggttgtttattttttggtacaaccagaaagtagtgtgggatattgaattatgggaggctctgactgtctcgggtgtcagcttaacattccatagatggggggttagtttttatatcccataatacaaagcatattaaatggcaatatggagtcagtcctgcatttaatgtcttgaacattctaaattacttctattaccatgttgttttttagtagaattgtttcctaaagaaaaccactctttgatcatggcgctctctgtcagaattgtgtgtactctgtaacatctttggttgtggtagtcctgttttcctaataacttactgtgctgtgaaagattacaaatttgaacatgtagtgtacgtgctattgagttgtgaactggtgggccgtatgtaacagctgaccaacatgtgaagatactggtacttgataacctcttaaggaaaatttgcttccaaattttaagctggagagtcactggaataactttaaaaaagaattacaatacatggctttttagaatttcgttacgtatgttaagatttgtgtacaaattgaaatgtctgtactgatcctcaaccaataaaatctcaattatgaaaaaaataaaaataaaa

SEQ ID NO: 44194 - DNA, 1056 bp, Homo Sapiens
ggtcatccatctgaaccagctcagcagcatccacaacatctacaatggccttgactttttatttactggtggccctagtggtgctcagctacaagtcattcagctctctgggctgtgatctgcctcagactcacagcctgggtaacaggagggccttgatactcctggcacaaatgcgaagaatctctcctttctcctgcctgaaggacagacatgactttgaattcccccaggaggagtttgatgataaacagttccagaaggctcaagccatctctgtcctccatgagatgatccagcagaccttcaacctcttcagcacaaaggactcatctgctgctttggatgagacccttctagatgaattctacatcgaacttgaccagcagctgaatgacctggagtcctgtgtgatgcaggaagtgggggtgatagagtctcccctgatgtacgaggactccatcctggctgtgaggaaatacttccaaagaatcactctatatctgacagagaagaaatacagctcttgtgcctgggaggttgtcagagcagaaatcatgagatccttctctttatcaatcaacttgcaaaaaagattgaagagtaaggaatgagacctggtacaacacggaaatgattcttatagactaatacagcagctcacacttcgacaagttgtgctctttcaaagacccttgtttctgccaaaaccatgctatgaattgaatcaaatgtgtcaagtgttttcaggagtgttaagcaacatcctgttcagctgtatgggcactagtcccttacagatgaccatgctgatggatctattcatctatttatttaaatctttatttagttaactatctatagggcttaaattagttttgttcatattatattatgtgaacttttacattgtgaattgtgtaacaaaaacatgttctttatatttattattttgccttgtttattaaatttttactatagaaaaattctttatttattctttaaaattgaactccaaccctgattgtgcaaactgattaaagaatggatggtaca

SEQ ID NO: 44195 - DNA, 2588 bp, Homo Sapiens
aacgcctcgctcttgagaccagccaccaaaccacgaaaagtgactttcttctcgtgtgctctctacggcccttctgatggaagcagaaacagggagcagcgtggagactggaaagaaggccaacagaggcactcgaattgccctggtcgtgtttgtcggtggcaccctagttctgggcacgatcctctttctagtgagtcaaggtctcttaagtctccaagctaaacaggagtactgcctgaagccagaatgcatcgaagcggctgctgccatcttaagtaaagtaaatctgtctgtggatccttgtgataatttcttccggttcgcttgtgatggctggataagcaataatccaattcccgaagatatgccaagctatggggtttatccttggctgagacataatgttgacctcaagttgaaggaacttttggagaaatcaatcagtagaaggcgggacaccgaagccatacagaaagccaaaatcctttattcatcctgcatgaatgagaaagcgattgaaaaagcagatgccaagccactgctacacatcctacggcattcacctttccgctggcccgtgcttgaatctaatattggccctgaaggggtttggtcagagagaaagttcagccttctgcagacacttgcaacgtttcgtggtcaatacagcaattctgtgttcatccgtttgtatgtgtcccctgatgacaaagcatccaatgaacatatcttgaagctggaccaagcaacactctccctggccgtgagggaagactaccttgataacagtacagaagccaagtcttatcgggatgccctttacaagttcatggtggatactgccgtgcttttaggagctaacagttccagagcagagcatgacatgaagtcagtgctcagattggaaattaagatagctgagataatgattccacatgaaaaccgaaccagcgaggccatgtacaacaaaatgaacatttctgaactgagtgctatgattccccagttcgactggctgggctacatcaagaaggtcattgacaccagactctacccccatctgaaagacatcagcccctccgagaatgtggtggtccgcgtcccgcagtactttaaagatttgtttaggatattagggtctgagagaaagaagaccattgccaactatttggtgtggagaatggtttattccagaattccaaaccttagcaggcgctttcagtatagatggctggaattctcaagggtaatccaggggaccacaactttgctgcctcaatgggacaaatgtgtaaactttattgaaagtgccctcccttatgttgttggaaagatgtttgtagatgtgtacttccaggaagataagaaggaaatgatggaggaattggttgagggcgttcgctgggcctttattgacatgctagagaaagaaaatgagtggatggatgcaggaacgaaaaggaaagccaaagaaaaggcgagagctgttttggcaaaagttggctatccagagtttataatgaatgatactcatgttaatgaagacctcaaagctatcaagttttcagaagccgactactttggcaacgtcctacaaactcgcaagtatttagcacagtctgatttcttctggctaagaaaagccgttccaaaaacagagtggtttacaaatccgacgactgtcaatgccttctacagtgcatccaccaaccagatccgatttccagcaggagagctccagaagcctttcttttggggaacagaatatcctcgatctctgagttatggtgctataggagtaattgtcggacatgaatttacacatggatttgataataatggtagaaaatatgataaaaatggaaacctggatccttggtggtctactgaatcagaagaaaagtttaaggaaaaaacaaaatgcatgattaaccagtatagcaactattattggaagaaagctggcttaaatgtcaaggggaagaggaccctgggagaaaatattgctgataatggaggcctgcgggaagcttttagggcttacaggaaatggataaatgacagaaggcagggacttgaggagcctcttctaccaggcatcacattcaccaacaaccagctcttcttcctgagttatgctcatgtgaggtgcaattcctacagaccagaagctgcccgagaacaagtccaaattggtgctcacagtccccctcagtttagggtcaatggtgcaattagtaactttgaagaattccagaaagcttttaactgtccacccaattccacgatgaacagaggcatggactcctgccgactctggtagctgggacgctggtttatggcatcctgagacagttgcacagtgccagcggaggctgcactgagccttcatcgcccattgctttaggcctggagactttcatttttagtgcattttcattatttgggtaggtgacctgcttggatctagacagcatctgttcaaagttgtagggcttataaagtggaatataagaatgaactaagtatgtttctttagaaaatcaaaccaacaaaaataaatccctaggctacttttgttaaaa

SEQ ID NO: 44196 - DNA, 2654 bp, Homo Sapiens
gccgggcgggcaggggttgtggcgcggcaagcggcgggccagcgacggcgcgaatggcggactctcagctgttctgtgtggcggaggaacgcagcggccactgcgccgtggtggacggaaacttcctctacgtgtgggggggctacgtgtctattgaagacaatgaagtatatttgcctaatgatgaaatttggacctatgatattgatagtgggttgtggagaatgcacctcatggaaggagaactcccagcctccatgtcaggaagctgtggtgcttgcattaatggaaagctgtacatttttggaggatatgatgacaaaggatacagcaatcgactttattttgttaatttacgaacaagagatgaaacctacatttgggagaaaatcaccgactttgaagggcaaccacctacaccacgtgataaactttcctgctgggtatataaagacagactaatatattttggtggttatgggtgtaggagacacagtgaactccaagactgttttgatgttcatgatgcatcttgggaagagcagatattctggggatggcataatgatgtccacatatttgacacaaagacacagacttggtttcaaccagaaattaaaggtggagttccaccacagccacgagccgcgcatacatgtgcagttcttggaaataagggttatatctttggcggacgtgttctgcaaactaggatgaatgatttgcactatctaaacctagacacctggacttggtctggaaggattactattaatggagaaagcccaaaacatcggtcatggcatactttaacacctatagctgatgataaacttttcctatgtggtggactaagtgcagataatatcccattaagtgatggttggattcataatgtcacaacaaattgttggaaacaacttacacatttacctaaaacaagacctaggttatggcacacagcctgtttgggaaaagaaaatgaaataatggtatttggtgggagcaaagatgacttacttgccttggatacaggtcactgtaatgatttattgatctttcaaacacagccttattcactactcaggtcatgccttgactgcattggtaaaaattctatcatgttagaaagtcagatatctttattacctcctaaacttctgcaacaagtactcaaaaaaataacattttgggctgcagctaatcaccgagaagaacaaagagtccaaaaagaagaaacagaaaataaatatcagtggatcagtagcaattaaattgttatatactttacatatttagtatgttttaactttttaatcagactatacatttacactcccaaattgcaggctttatttaaaggataaaatttaaaggataaaaaaacagtcactctgttaagtgactatatgccatgggatatatggaaaaaagatattaatgcagattaatttatatttgtaaacaaatttccttacaaactgcagaacaaatattctttctgaaagtaagtacagttataacagattttaaatcaatgtgtattctttactggaaagattacatacatttgagaataagaaattactctcaagaacttcagaaatctgcaacataattttataaatatataaatacatgtatgtatgtcaaaacactacatatacactttcagaaagaataaactttctcaagtcattttaaagttacctaacgttcttcttgaataactaatacagtgggtcaaatattataaaataggcaaacaccaaaatggtattaaatattgaactcctgaccttttcgacacttacctagtaaagtattcttaggcatcatcataacttttcctcacctttattcgaatagaggaataaatgtcttcagttgtctctccattacccctaagttattagtttgtctagtttatatataaagaccatgttttaaagtacataaagtggaggtttatttatcatacaggctttgaaacattaagaagcagtatttttattaactttttgagacatattaaaatacattttgccttagaagactgcttctaaagtaatttttgtaagtaatgagatgggatggtaatctagtaatttgactttatagaaatccctcagtttggcccccaccattctacagagttgtactcaagacagatactgaaaaaatctaataccttcccttgtattttcagcattaccatctatacagaaatggaacactgtatctttatattcctaaaaatggtacttttggcataattaagaaatttttcttcatattatcacaatcatgcccttccattgaattattaattacaattaattactaaaaagcttggtatgtaaaattattctccacaatattaccatgcaagttatctctgaaatttaaaatgttaaagaaaaacatttctatattgaaatatatataatttataatgaaaattatagtagtttgtagtatttcattgaattttagagagatatttcatatatatgtactgtattttggatgtgtaaagcttctatgtattgaaatatttttttacgttttatttattgtacaaagtgtatataattactgttttcttttttgtcagtgtaaagcagtcattagaattgattatacaaaaaata

SEQ ID NO: 44197 - DNA, 1641 bp, Homo Sapiens
cctggtcacccattgaagcagtgtttgtggtggagcccctgagggcttggtggggttgagcagaatgaggaaaggtttcatggagcagggagggagacggctagggcagcaagtgaaggacagactcgccttcccatccctccaggggcactcctgccagccagcccctctcccgcttcccatgatggggtggctgttggaattctgcaccccatctcttctgattgttggggcccaggacaaggggacaggcatttgtgggcctaacctccccaggcagataggaggaggaagccatgtcccagcaggctagggcagagggacccccagtgccaacagtgctttatcagcgggcgccaggcagggccatccccagggtgaggacaacatctccctgggccctgttatcagtcacagagtccacaggacgctccttgggttaacgtgtaaccatgagccctcccctccaccccctgaagccactcgctcccagattaggtcgctctggggctatcaggccagcatggacgctggcaaagcggggcagaccctgaagactcactgctcagcccagcgcccagatgtctgcaggtggctgagccccttcatcctctcctgctgcgtgtacttctgcctctggattcccgaggaccagctgtcctggttcgctgccctggtcaagtgcctgcccgtcctctgcctggctgggttcctgtgggtcatgtccccaagcgggggctacacccagctcctccagggagcccttgtgtgctcggctgtgggggacgcttgcctcatctggccggcagccttcgtccctggcatggccgcctttgccaccgcccacctcctctacgtctgggccttcggcttctctcccctgcagcccggcctgctgctgctcatcatcctggcccctggcccctacctcagccttgtgctccagcacctcgagccggatatggtcctgccggtggcagcctatgggctgatcctgatggccatgctgtggcgcggcctggcccagggcgggagtgccggctggggcgcgctgctcttcacgctctctgatggcgtgctggcctgggacaccttcgcccagcccctgccccatgcccacctggtgatcatgaccacctactatgctgcccagctcctcatcacactgtcagccctcaggagcccggtgcccaagactgactgactagggagcttgaagggccggtgttcaggccctctcctcctgcaaggacctgggcctcccagcccagcccagcctgagaaataccctcagcagcgaagcttcctgacgcctgtctgcaggcgccgctgccgccgtcgcttctggctgaagacgtttgaggacgatttgcggaattccaagtccactactgggttccagctgccttcccccggttctgactccagatccctggctcctcagccaggcccacatggagccctcccagccaccagcctgcctccatgttcactgtcggccccacagcctgcccgccccctgctgctgctctgaatccgttttccctgtgggtgtggaaccgtagatgttgctgttaccgtaggagaggcctcggggagggtcatgattgtgataaaccatcgcggttaatgacagcagaa

SEQ ID NO: 44198 - DNA, 908 bp, Homo Sapiens
ccggggaccacacgccgcgctgtccccagcacccaacccaggttaccatggcctccctgttctctggccgcatcctgatccgcaacaatagcgaccaggacgagctggatacggaggctgaggtcagtcgcaggctggagaaccggctggtgctgctgttctttggtgctggggcttgtccacagtgccaggccttcgtgcccatcctcaaggacttcttcgtgcggctcacagatgagttctatgtactgcgggcggctcagctggccctggtgtacgtgtcccaggactccacggaggagcagcaggacctgttcctcaaggacatgccaaagaaatggcttttcctgccctttgaggatgatctgaggagggacctcgggcgccagttctcagtggagcgcctgccggcggtcgtggtgctcaagccggacggggacgtgctcactcgcgacggcgccgacgagatccagcgcctgggcaccgcctgcttcgccaactggcaggaggcggccgaggtgctggaccgcaacttccagctgccagaggacctggaggaccaggagccacggagcctcaccgagtgcctgcgccgccacaagtaccgcgtggaaaaggcggcgcgaggcgggcgcgaccccgggggagggggtggggaggagggcggggccggggggctgttctgacccgctagggtggaggagaggagtggggtttgttgatgaacctccacccccaccccacccccgcacgcctgtaatcccagcacttggggaggccaaggcgggaggatcgcttgagcccagaggttcgagatcaacctgggcaagagagtgagaccctgactctacgaaaattaaaagttagcccggtgtggtggcgcgcacctgtggcttagctaccctgaa

SEQ ID NO: 44199 - DNA, 792 bp, Homo Sapiens
atgttttatttccactgcccgccacagctagagggcactgcaacctttggcaatcactcttcgggggattttgatgacgggtttctgcgtagaaaacagcgccggaaccggacgacgttcactcttcagcagctggaagctctcgaggccgtttttgcccaaacacactatccagatgtcttcaccagagaagagctcgccatgaaaataaacctcacagaagccagagtgcaggtttggttccagaacagaagggccaaatggaggaagacagagagaggggcctcagaccaggagccaggagccaaggagcccatggcagaggtgacacctcctccagtgagaaacatcaactccccgccccctggggaccaagcccggagtaagaaggaggcgctggaggcccagcagagcctggggcgaacggtaggtcctgcagggcctttcttcccctcctgcttgccggggactctcctgaacacggccacctacgcccaggccttgtcccatgtggcttccctcaaagggggcccactgtgctcttgctgcgtcccagaccccatgggactctccttccttcccacctatggctgccagagtaaccgcacggccagcgtggccaccctgcgcatgaaggcccgcgagcactcagaagctgtcctgcagtcagccaacctcctgccttccaccagcagcagccccggccctgtcgccaagccggcgcccccagatggcagccaggaaaagacctctcccaccaaggaacagagcgaggcagagaagagtgtatga

SEQ ID NO: 44200 - DNA, 951 bp, Homo Sapiens
gggcggagagcaggaggaggagcggttcgatggcatgttgctggccatggccagcacgagggcggcgtgcaggagcttgtgaacactttcttcagcttccttcgacgcaaaacagactttttcactgcaggagaagaggggatggcaaagaagcttatcatacagactttcagccacgacaatcagctggcacagaaggcccggtgggagaagagaacccgggagaaggtggagcgggtggccgggctggccaaggaagccaagtcagagacctcggggccccagataaagagacaggcagagaggctgcagctagagattgaccagaaaaaggatgcagagaatcatgaggcccagctcaagaacggcagccttgactccccaggaaagcaggagaagaaggaggaagatgaggaggacaaaggaaaactgaagcccaacctaggcaacggggcagacctgcccaattactgctggacccagagcctgtcggagctggacctggtggtccctttccgtgtaaacttccggctgaaagggaaggacatggtggtggacatccaggggcagcacctccgggtggggctcaaggggcagccagcaatcatcgatggggagctctacaacgaagtgaaggtaggggagagctcgtggctcattgaggatggcaaggtggtgactgtgcatcttgagaagatcaataagatggagtggtggagctgcttggtgtccagtgaccctaagatcaataccaagatgattaaccctgagaattccaagctgtcagacctggacaatgagactcgcagcatggtggaaaagatgatgtatgaccagagacagaagtccatggggctgccaatctcagacgaacagaagaaacaggagattctgaagaagttcatggatcagcatctggagatggatttttccaaggccaaattcaactag

SEQ ID NO: 44201 - DNA, 666 bp, Homo Sapiens
atgcggctgcgcttttggctcctcatttggctcctgctgggatttatcagccatcagcccacccctgtgtctttcctgaagactatcttctggtctcgaaatggacatgatggatccatggatgtacagcagagagcctggaggtccaaccgcagtagacagaaagggctgaggtccatttgtatgcacacaaagaaaagagtttcttcctttcgaggaaataaaattggcctgaaagacgtcattactctacggaggcatgtggaaacaaaagttagagctaaaatccgtaagaggaaggtgacaacgaaaatcaaccgtcatgacaaaatcaatggaaagaggaagaccgccagaaaacagaaaatgtttcaacgtgcgcaagagttgcggcggcgggcagaggactaccacaaatgcaaaatccccccttctgcaagaaagcctctttgcaactgggtaagtttgtttgttttccttgcttttgaacatagtctgccaggtcaggacatggatacatttttctccctacagctctgtgctcaagccctgcagagggagatggcagagaggaaggctgcctacaggcatcacagtcccatccctgttggtaaccgtgttgtgcaaaaacaccttcatccccacccagtggggcccctgatctaa

SEQ ID NO: 44202 - DNA, 1720 bp, Homo Sapiens
aggagggaggggcgggggctggaggcagcagcgcccccgcactccccgcgtctcgcacacttgcaccggtcgctcgcgcgcagcccggcgtcgccccacgccgcgctcgctcctccctccctcctcccgctccgtggctcccgtgctcctggcgaggctcaggcgcggagcgcgcggacgggcgcaccgacagacggccccggggacgcctcggctcgcgcctcccgggcgggctatgttgattgccccgccggggccggcccgcgggatcagcacagcccggcccgcggccccggcggccaatcgggactatgaaccggaaagcgcggcgctgcctgggccacctctttctcagcctgggcatggtctacctccggatcggtggcttctcctcagtggtagctctgggcgcaagcatcatctgtaacaagatcccaggcctggctcccagacagcgggcgatctgccagagccggcccgacgccatcatcgtcataggagaaggctcacaaatgggcctggacgagtgtcagtttcagttccgcaatggccgctggaactgctctgcactgggagagcgcaccgtcttcgggaaggagctcaaagtggggagccgggaggctgcgttcacctacgccatcattgccgccggcgtggcccacgccatcacagctgcctgtacccagggcaacctgagcgactgtggctgcgacaaagagaagcaaggccagtaccaccgggacgagggctggaagtggggtggctgctctgccgacatccgctacggcatcggcttcgccaaggtctttgtggatgcccgggagatcaagcagaatgcccggactctcatgaacttgcacaacaacgaggcaggccgaaagatcctggaggagaacatgaagctggaatgtaagtgccacggcgtgtcaggctcgtgcaccaccaagacgtgctggaccacactgccacagtttcgggagctgggctacgtgctcaaggacaagtacaacgaggccgttcacgtggagcctgtgcgtgccagccgcaacaagcggcccaccttcctgaagatcaagaagccactgtcgtaccgcaagcccatggacacggacctggtgtacatcgagaagtcgcccaactactgcgaggaggacccggtgaccggcagtgtgggcacccagggccgcgcctgcaacaagacggctccccaggccagcggctgtgacctcatgtgctgtgggcgtggctacaacacccaccagtacgcccgcgtgtggcagtgcaactgtaagttccactggtgctgctatgtcaagtgcaacacgtgcagcgagcgcacggagatgtacacgtgcaagtgagccccgtgtgcacaccaccctcccgctgcaagtcagattgctgggaggactggaccgtttccaagctgcgggctccctggcaggatgctgagcttgtcttttctgctgaggagggtacttttcctgggtttcctgcaggcatccgtgggggaaaaaaaatctctcagagccctcaactattctgttccacacccaatgctgctccaccctcccccagacacagcccaggtccctccgcggctggagcgaagccttctgcagcaggaactctggacccctgggcctcatcacagcaatatttaacaatttattctgataaaaataatattaatttatttaattaaaaagaattcttccac

SEQ ID NO: 44203 - DNA, 806 bp, Homo Sapiens
ccctgagaggccgtgctcgggctcgcctgctcagctcactccgaaagcctctgctcagacctgcacccagtcacagcagcacagatgtgcaggaggagaccatttccacggaccctccgactcctaggaggcagtcccttagggactggccctaacaacaaatgaggagaagccaagttctctgctttctgcagacagggcctcccctggatgggatcttcctctgaggcgagcttcagatctgctcaagcttcctgcagtggggccaggaggcagggcctgggcaggggagaccagaacctctcggtgatgcctccgaatggcagggctcagacacacacacctggctgggtttcagatcccttagttttgggtgcccaagttcacggagggtgccggggaatagaagctctgtcagtctcgtctggatcttggtcctcagcaactgtctggatcctgacaggccttggtctaggtctctccaggcctttccttcctggagccacagtgcttagagacaggccactggggtcagcatttgagctcagctatgatcagaaaaaagcaccgttgaggttgcagtgagccgagatcacgccactgcactccagcctgggcgacagagagagactccatctcaaaacaaaaacaaacaaacaaacagaaagcaccgtcgagaaatggctccagcgctgactagcggccacctcatttccccccttgaccactgggccagttgggtggctaggttgcctcattttgcatccttctgtatccccaaatctgaaataaaagctggaaaaaaa

SEQ ID NO: 44204 - DNA, 1761 bp, Homo Sapiens
tgctctctggagggggtagagatcaaaggcggctccttccgacttctccaagagggccaggcactggagtacgtgtgtccttctggcttctacccgtaccctgtgcagacacgtacctgcagatctacggggtcctggagcaccctgaagactcaagaccaaaagactgtcaggaaggcagagtgcagagcaatccactgtccaagaccacacgacttcgagaacggggaatactggccccggtctccctactacaatgtgagtgatgagatctctttccactgctatgacggttacactctccggggctctgccaatcgcacctgccaagtgaatggccgatggagtgggcagacagcgatctgtgacaacggagcggggtactgctccaacccgggcatccccattggcacaaggaaggtgggcagccagtaccgccttgaagacagcgtcacctaccactgcagccgggggcttaccctgcgtggctcccagcggcgaacgtgtcaggaaggtggctcttggagcgggacggagccttcctgccaagactccttcatgtacgacacccctcaagaggtggccgaagctttcctgtcttccctgacagagaccatagaaggagtcgatgctgaggatgggcacggcccaggggaacaacagaagcggaagatcgtcctggacccttcaggctccatgaacatctacctggtgctagatggatcagacagcattggggccagcaacttcacaggagccaaaaagtgtctagtcaacttaattgagaaggtggcaagttatggtgtgaagccaagatatggtctagtgacatatgccacataccccaaaatttgggtcaaagtgtctgaagcagacagcagtaatgcagactgggtcacgaagcagctcaatgaaatcaattatgaagaccacaagttgaagtcagggactaacaccaagaaggccctccaggcagtgtacagcatgatgagctggccagatgacgtccctcctgaaggctggaaccgcacccgccatgtcatcatcctcatgactgatggtcagaagggacctctctcctcaccccacttcctcagggcttggaccctcatccttcctttttatccctcagatgtctatgtgtttggggtcgggcctttggtgaaccaagtgaacatcaatgctttggcttccaagaaagacaatgagcaacatgtgttcaaagtcaaggatatggaaaacctggaagatgttttctaccaaatgatcgtctctgagtctctgtggcatggtttgggaacacaggaagggtaccgattaccacaagcaaccatggcaggccaagatctcagtcattgtaagcacagaatcccagtagtggggacttgggggagctttccctctctactgttgtgtccccagcgcccttcaaagggacacgagagctgtatgggggctgtggtgtctgagtactttgtgctgacagcagcacattgtttcactgtggatgacaaggaacactcaatcaaggtcagcgtaggtaaggatgcaactgaaggaggggagaagcgggacctggagatagaagtagtcctatttcaccccaactacaacattaatgggaaaaaagaagcaggaattcctgaattttatgactatgacgttgccctgatcaagctcaagaataagctgaaatatggccagactatcaggcccatttgtctcccctgcaccgagggaacaactcgagctttgaggctt

SEQ ID NO: 44205 - DNA, 1689 bp, Homo Sapiens
ccaaccctgcacctggccctctaaccaattctgagtgcccgtagaaaaatgtacatgtaaagacaccagattttagggaagtaattctaaatgtttattttagctactgaatgtgttcattcatagtttttgtgtcatatccatgtctgccaactcacctttcacaacagaatcttcttttcagggagatgtcctttgcttctcagatgtaaatgcactttaagtttgttattcaacagtgaaaatgagtcatacagaggtaatattttcgtatgttctgcatcttcagggttcctggttttttgtttgtttgtaattatgtggcttcagagtaattttattttcaactttcactgtgggaggcagtatagcataagtggttaagagcgaggaatctagagcagactaccctgagtttaaatcctagctagcggctatataaccttgggcaagttacttaatctgctgtgccttatctataaaatggggataatgatagtgcttgcctcacagaattgttagaaaagtgaaataagttaatacatataaagcacttataataatacccgacacagtaagcacttaactactattattaatatcactactttttatttggaggctatgacttgaattatgagcctcacagagcaaacatatatatagctgttcagttgtcttaataggcaagaaagtaatttttgatccctttattctcttgaattccaggttaaattaaaaataccttttggaaataaattactagatgctgtttgtttggtacctaacaagagcttaacatatggaataattcttacacatggagcatcaggagatatgaatcttcctcatttgatgtcactggcatcccatcttgcatctcatgggtttttctgcctgagatttacctgtaaaggccttaatattgtacatagaattaaggcgtataaatcagttttgaattacctgaagacatcaggagaatacaaacttgcaggtgtttttcttggaggtcgttcaatgggctcaagagcagctgcttctgtaatgtgtcacattgagccagatgatggtgatgattttgttcggggtctcatttgtatttcttacccactgcaccatccaaagcagcagcataaactcagagatgaagacctctttcgtttaaaagagcctgtactgtttgtgtcaggctcagcagatgaaatgtgtgaaaagaacttgttggagaaagtggcacagaaaatgcaagctccccataaaatccactggattgagaaggcaaatcattccatggcagtgaaaggacggtcgacaaatgatgttttcaaagaaataaatacacagattttgttttggatccaagaaattactgaaatggacaagaaatgtcattagttaaaagccatgttatcttgagtacacatacagttaatttgataaagaagagtatgcctctcagcattgtgagatatatttcagactaatttgatgttctttaatgttcccttatttttgaaacacgttttaaatgtgaaattaatgtccttcacaaaatgtcttttgaaagcactgttacagttgtataaagatgatgtaaaaatattgaaggtggtctacatataatttattttcattagtatagttaagttttgaaaaaaattaaacatctgaattttgttacaaaaa

SEQ ID NO: 44206 - DNA, 1254 bp, Homo Sapiens
atggcctggtttgccctctacctcctgagccttctctgggctacagctgggactagtacccagacccagagttcatgctccgttccctcagcacaggagcccttggtcaatggaatacaagtactcatggagaactcggtgacttcatcagcctacccaaaccccagcatcctgattgccatgaatctggccggagcctacaacttgaaggcccagaagctcctgacttaccagctcatgtccagcgacaacaacgatctaaccattgggcagctcggcctcaccatcatggccctcacctcctcctgccgagaccctggggataaagtatccattctacaaagacaaatggagaactgggcaccttccagccccaacgctgaagcatcagccttctatgggcccagtctagcgatcttggcactgtgccagaagaactctgaggcgaccttgccgatagccgtccgctttgccaagaccctgctggccaactcctctcccttcaatgtagacacaggagcaatggcaaccttggctctgacctgtatgtacaacaagatccctgtaggttcagaggaaggttacagatccctgtttggtcaggtactaaaggatattgtggagaaaatcagcatgaagatcaaagataatggcatcattggagacatctacagtactggcctcgccatgcaggctctctctgtaacacctgagccatctaaaaaggaatggaactgcaagaagactacggatatgatactcaatgagattaagcaggggaaattccacaaccccatgtccattgctcaaatcctcccttccctgaaaggcaagacatacctagatgtgccccaggtcacttgtagtcctgatcatgaggtacaaccaactctacccagcaaccctggccctggccccacctctgcatctaacatcactgtcatatacaccataaataaccagctgaggggggttgagctgctcttcaacgagaccatcaatgttagtgtgaaaagtgggtcagtgttacttgttgtcctagaggaagcacagcgcaaaaatcctatgttcaaatttgaaaccacaatgacatcttggggccttgtcgtctcttctatcaacaatatcgcggaaaatgttaatcacaagacatactggcagtttcttagtggtgtaacacctttgaatgaaggggttgctgactacatacccttcaaccacgagcacatcacagccaatttcacacagtactaa

SEQ ID NO: 44207 - DNA, 873 bp, Homo Sapiens
atggaagtttccctaaaccacccagcatctaatacaaccagcacaaagaacaacaactcggcatttttttactttgagtcctgtcaacccccttctccagctttactcctattatgcatagcctatactgtggtcttaattgtgggcctttttggaaacctctctctcatcatcatcatctttaagaagcagagaaaagctcagaatttcaccagcatactgattgccaatctctccctctctgataccttggtgtgtgtcatgtgcatccattttactatcatctacactctgatggaccactggatatttggggataccatgtgcagactcacatcctatgtgcagagtgtctcaatctctgtgtccatattctcacttgtattcactgctgtcgaaagatatcagctaattgtgaacccccgtggctggaagcccagtgtgactcatgcctactggggcatcacactgatttggctgttttcccttctgctgtctattcccttcttcctgtcctaccacctcactgatgagcccttccgcaacctctctctccccactgacctctacacccaccaggtggcctgtgtggagaactggccctccaaaaaggaccggctgctcttcaccacctccctttttctgctgcagtattttgttcctctaggcttcatcctcatctgctacttgaagattgttatctgcctccgcaggagaaatgcaaaggtagataagaagaaggaaaatgagggccggctcaatgagaacaagaggatcaacacaatgttgatttccatcgtggtgacctttggagcctgctggctgccccgaatatcttcaatgtcatctttgactggtatcatgaggtgctga

SEQ ID NO: 44208 - DNA, 471 bp, Homo Sapiens
caggtccagttcaaacttgtattggttggtgatggtggtactgggaaaacgaccttcgtgaaacatcatttgactggtgaatttgagaagtgtatagccaccttaggtgttgaggttcatcccctagtgttccacaccaacagaggacctattaagttcaatgtatgggacacagccagcagggagaaattcggtagactgagagatggctattatatccaagcccagtgtgccattataatgtttgatgtaacatcaagagttacttacatgtgcctatggcatagagatcaggtgagagcgtgtgaaaacatctccatcgtgttgtgtggcaacaaagtggatattaagaagaggaaagggaaggcaaaatccattgtcttccaccaaaagaacaatcttcagtactatgacatttctgccaaaagtaactacaactttgaaaagcccttccactggcttgctaggtag

SEQ ID NO: 44209 - DNA, 171 bp, Homo Sapiens
atgtctcatttacctgctgtctctccagtgttcttccagctccctgccccacatccacccactgtcctcagacctcagctggggctgcaccccaaccctgagtgtgacagagagaagatgagtgttagagatcatgatcctgaagtgctgacgagaaattcaggtgagtta

SEQ ID NO: 44210 - DNA, 2868 bp, Homo Sapiens
atgccggccgtgtccaagggcgatgggatgcgggggctcgcggtgttcatctccgacatccggaactgtaagagcaaagaggcggaaattaagagaatcaacaaggaactggccaacatccgctccaagttcaaaggagacaaagccttggatggctacagtaagaaaaaatatgtgtgtaaactgcttttcatcttcctgcttggccatgacattgactttgggcacatggaggctgtgaatctgttgagttccaataaatacacagagaagcaaataggttacctgttcatttctgtgctggtgaactcgaactcggagctgatccgcctcatcaacaacgccatcaagaatgacctggccagccgcaaccccaccttcatgtgcctggccctgcactgcatcgccaacgtgggcagccgggagatgggcgaggcctttgccgctgacatcccccgcatcctggtggccggggacagcatggacagtgtcaagcagagtgcggccctgtgcctccttcgactgtacaaggcctcgcctgacctggtgcccatgggcgagtggacggcgcgtgtggtacacctgctcaatgaccagcacatgggtgtggtcacggccgccgtcagcctcatcacctgtctctgcaagaagaacccagatgacttcaagacgtgcgtctctctggctgtgtcgcgcctgagccggatcgtctcctctgcctccaccgacctccaggactacacctactacttcgtcccagcaccctggctctcggtgaagctcctgcggctgctgcagtgctacccgcctccagaggatgcggctgtgaaggggcggctggtggaatgtctggagactgtgctcaacaaggcccaggagccccccaaatccaagaaggtgcagcattccaacgccaagaacgccatcctcttcgagaccatcagcctcatcatccactatgacagtgagcccaacctcctggttcgggcctgcaaccagctgggccagttcctgcagcaccgggagaccaacctgcgctacctggccctggagagcatgtgcacgctggccagctccgagttctcccatgaagccgtcaagacgcacattgacaccgtcatcaatgccctcaagacggagcgggacgtcagcgtgcggcagcgggcggctgacctcctctacgccatgtgtgaccggagcaatgccaagcagatcgtgtcggagatgctgcggtacctggagacggcagactacgccatccgcgaggagatcgtcctgaaggtggccatcctggccgagaagtacgccgtggactacagctggtacgtggacaccatcctcaacctcatccgcattgcgggcgactacgtgagtgaggaggtgtggtaccgtgtgctacagatcgtcaccaaccgtgatgacgtccagggctatgccgccaagaccgtctttgaggcgctccaggcccctgcctgtcacgagaacatggtgaaggttggcggctacatccttggggagtttgggaacctgattgctggggacccccgctccagccccccagtgcagttctccctgctccactccaagttccatctgtgcagcgtggccacgcgggcgctgctgctgtccacctacatcaagttcatcaacctcttccccgagaccaaggccaccatccagggcgtcctgcgggccggctcccagctgcgcaatgctgacgtggagctgcagcagcgagccgtggagtacctcaccctcagctcagtggccagcaccgacgtcctggccacggtgctggaggagatgccgcccttccccgagcgcgagtcgtccatcctggccaagctgaaacgcaagaaggggccaggggccggcagcgccctggacgatggccggagggaccccagcagcaacgacatcaacgggggcatggagcccacccccagcactgtgtcgacgccctcgccctccgccgacctcctggggctgcgggcagcccctcccccggcagcacccccggcttctgcaggagcagggaaccttctggtggacgtcttcgatggcccggccgcccagcccagcctggggcccacccccgaggaggccttcctcagcccaggtcctgaggacatcggccctcccattccggaagccgatgagttgctgaataagtttgtgtgtaagaacaacggggtcctgttcgagaaccagctgctgcagatcggagtcaagtcagagttccgacagaacctgggccgcatgtatctcttctatggcaacaagacctcggtgcagttccagaatttctcacccactgtggttcacccgggagacctccagactcatctggctgtgcagaccaagcgcgtggcggcgcaggtggacggcggcgcgcaggtgcagcaggtgctcaatatcgagtgcctgcgggacttcctgacgcccccgctgctgtccgtgcgcttccggtacggtggcgccccccaggccctcaccctgaagctcccagtgaccatcaacaagttcttccagcccaccgagatggcggcccaggatttcttccagcgctggaagcagctgagcctccctcaacaggaggcgcagaaaatcttcaaagccaaccaccccatggacgcagaagttactaaggccaagcttctggggtttggctctgctctcctggacaatgtggaccccaaccctgagaacttcgtgggggcggggatcatccagactaaagccctgcaggtgggctgtctgcttcggctggagcccaatgcccaggcccagatgtaccggctgaccctgcgcaccagcaaggagcccgtctcccgtcacctgtgtgagctgctggcacagcagttctga

SEQ ID NO: 44211 - DNA, 474 bp, Homo Sapiens
atggaaccagagaatggtacgaggattttaggatttcttcttctgggactttcagaggaaccagaattgcagcccgttatgtttggactcttcctctccatgtatctgacaactgtgtttggaaacctgctcatcatcctggccatctgctctggttcccacctccacacccccatgtacttcttcctctctaacctgtcctttgtagacatctgtgttacctccaccacagtcccaaagacactgtcaaacatccggacacagagtaaagtcatcacctatgcaggttgcatcacccagatgtacttttttgtactctttatagtgttggacagcttactcttgaccgtgatggcctatgaccagtttgtggccatctgtcaccccctgcactacacggtcatcgtgaaccctcggctctgtggactgctggttctggcgtcctggatcatgagtgccctgaattccttgata

SEQ ID NO: 44212 - DNA, 849 bp, Homo Sapiens
tttcccatccctgccctggccagggcccggcctgaagttctgacctgtaccccctggggggctcccattatttgggatggctctttcgacccagatgtggccaagcaagaggctagacagcagaacctcaccattgggctgactatctttgctgtaggcagatacctggagaagtacctggagcgcttcctggagacggcggagcagcacttcatggcgggccagagcgtgatgtactacgtgttcaccgagcttccgggagcggtgccccgcgtggcgctgggcccgggacgccggctgcccgtggagcgcgtggcgcgcgagcggcgctggcaagacgtgtcgatggcgcgcatgcgcacgttgcacgcggcgctgggcgggctgccgggccgcgaggcgcacttcatgttctgcatggacgtggaccagcacttcagcggcacttttgggcccgaggcgctggccgagtcggtggcgcagctgcactcctggcactaccactggccgtcgtggctgctgcccttcgaacgcgacgcgcattcggccgccgcgatggcgtggggccagggcgacttctataaccacgcggcggtgttcgggggcagcgtggcggcgctgcgcgggctgacggcgcactgtgcggggggcctggactgggaccgcgcgcgcggcctggaggcgcgctggcacgacgagagccacctcaacaagttcttctggctgcacaagcccgccaaggtgctgtcgcccgagttctgctggagcccggacatcggcccgcgggccgagatccgccgcccgcgactgctgtgggcgcccaaggggtaccggctgctgcggaactag

SEQ ID NO: 44213 - DNA, 492 bp, Homo Sapiens
cagcctggaagtttttctagctggtctggtagtttcctcatggatgataacatgtctaatactctaaatagccttgacgagcacactagtgagttttacagtatggatgaaaatcagcctgtgtctgctcagcagaattcacccacaaagttcctggccgtggaggcaaacgctgtgttatcctctttgcagaccatcccagaatttgcagagactctagaacttattgaatcttttttcaacacatgtcctggtaatgaacaacttaatatagaaaatccttcatttacatcaacccctatttgtgggcagaaagctctcattacaactcctcttcataaggaaacaactcccaaagatcaaaaggaaaatgtagggtttagaacacctactattagaagatctatactgggtaccacaccaagaactcctactccttttaagaatgcgcttgctgctcaggagaaaaaatatggacctcttaaaattgtg

SEQ ID NO: 44214 - DNA, 723 bp, Homo Sapiens
atggaagattataccaaaatagagaaaattggagaaggtacctatggagttgtgtataagggtagacacaaaactacaggtcaagtggtagccatgaaaaaaatcagactagaaagtgaagaggaaggggttcctagtactgcaattcgggaaatttctctattaaaggaacttcgtcatccaaatatagtcagtcttcaggatgtgcttatgcaggattccaggttatatctcatctttgagtttctttccatggatctgaagaaatacttggattctatccctcctggtcagtacatggattcttcacttgttaaggtagtaacactctggtacagatctccagaagtattgctggggtcagctcgttactcaactccagttgacatttggagtataggcaccatatttgctgaactagcaactaagaaaccacttttccatggggattcagaaattgatcaactcttcaggattttcagagctttgggcactcccaataatgaagtgtggccagaagtggaatctttacaggactataagaatacatttcccaaatggaaaccaggaagcctagcatcccatgtcaaaaacttggatgaaaatggcttggatttgctctcgaaaatgttaatctatgatccagccaaacgaatttctggcaaaatggcactgaatcatccatattttaatgatttggacaatcagattaagaagatgtag

SEQ ID NO: 44215 - DNA, 303 bp, Homo Sapiens
cttccaattgtggacaagataaggaccattgcccaggctgtctatggagccaaagatatcgaactctgtcctgaggcacaagtcaaaatagatcgttacactcagcagggttttggaaatttgcccatctgcatggcaaagaccgatctttctctgtctcaccaacctgacaaaaaaggtgtgccaagggacttcatcttacctatcagtgatgtccgggccagcataggtgctgggttcatttaccctttggtcggaacggtgagtgagtcacattttccaaaatccctccccattctgcat

SEQ ID NO: 44216 - DNA, 1293 bp, Homo Sapiens
atgattgattttcaaatgttgaaccagctttgcagaactataataaacccaagtgtgataccctgtctcaagtattgtggtgatcaaataggaccagtgactttcgaggatgtggctgtgcttttcactgaggcagagtggaagagactgagccttgagcagaggaacctatacaaagaagtgatgctggaaaatctcaggaatctggtctcattggaatcaaagccagaagtccatacctgcccttcttgccctctggcctttggcagtcagcagttcctcagccaagatgagctacacaatcatcctattccaggtttccatgcaggaaatcaactccacccaggaaatccctgcccagaggatcagccacagtcacaacatccttctgataaaaatcacaggggggctgaagcagaagatcaacgagtggaaggaggcgtcagacccttgttttggagtacaaatgaaaggggggctttagtgggtttctctagcctgttccagagaccaccaataagctcttggggaggcaacagaatattagagatacagctcagtccagcccagaatgcaagctctgaggaagtagacagaatttccaagagggcagaaaccccagggtttggagcagtcacgtttggggagtgtgcactagcttttaaccagaagtcaaacctgttcagacagaaggcagtcacagcagaaaaatcttcagacaaaaggcagtcacaggtgtgcagggagtgtgggcgaggctttagcaggaagtcacagctcatcatacaccagaggacacacacaggagaaaagccttatgtctgcggagagtgtgggcgaggctttatagttgagtcagtcctccgcaaccacctgagtacacactccggggagaaaccttatgtgtgcagccattgtgggcgaggctttagctgcaagccatacctcatcagacatcagaggacacacacaagggagaaatcgtttatgtgcacagtgtgtgggcgaggctttcgtgaaaagtcagagctcattaagcaccagagaattcacacgggggataagccttatgtgtgtcaagtgacggtccccttggaggaatggtctttgcatctgactacttccttctgcaactgtgttcttccattagcttccatgacactctcctgctttatttttttctacatctctagcctttgctgtttcctctcctaccccacctttagattttactcagagttcagtctccagccctacaatctgagggacacctttaccaggtccccttcctaa

SEQ ID NO: 44217 - DNA, 345 bp, Homo Sapiens
attgcagagattggtgtggggatcaccggtttcggcatcttcttcatcctctttggaacactcctgtactttgattccgtgctcctggcctttggaaacctgctgttcctgacgggcctgtccctcatcattggcctgaggaagaccttttggttcttcttccaacggcacaaactcaagggaaccagcttcctcctggggggtgtggttatcgtgctcctacgctggcccctcctcggcatgttcctggaaacctacggattcttcagcctctttaagggctttttccctgtcgccttcggcttcctgggcaatgtctgcaacatccccttcctgggtgcggta

SEQ ID NO: 44218 - DNA, 1038 bp, Homo Sapiens
gtgacctttgaggacatggtggtggacttcagccaggaggagtggaggcagctggagcctgcccagagggccctgtactatgatgtaatgctggacgccttcaggcttctggtctctgtaggacattggttaccaaagccaaacatcacctccctgctggagcaagaggcagagccatgggcggtggactctggagttccccaaggcatgtacccaggggagaagccctacgagtgccatgagtgtggaaaagccttcacccagatcacaccactgattcagcaccagaggacccacacaggagaaaagccctgtgagtgcagtgagtctgggaaagccttcagccagagcacattcctgactgagcatcagaggatttacacgggagagaagccctatggatgcaacgagtgtgggaaaaccttcagccacggctcctcacttagccagcaggagcggatgcacacaggagagaagccgttcgactgcagtcagtgtgggaaggccttccttcagagcacaaacctcacacaccagcaaatccacacagggcagaagccctacaaatgcaatgactgcagcaaggcattcagccacagcttgtccctcaccaaacatcagcgaaaccacactgaggagaagccctacaaatgcaaccagtgtggcagagccttcagtcagcttgctcccctcattcagcatcagaggatccacacaggagagaaaccctatgaatgtaaccagtgtagccagagctcccttctcatcaaacaccagaggattcataccaaggaaaagccctatgggttcaataagtgtgggaaatccttcaaccacagctcctcactcagccagcacaaaaggacacacactggggaaaagccttatgagtgtcacgattgtggaaagtcctttaggcagagcacccacctcacacagcactggaggatccacacaggagagaagccatatgcatgcagggactatggaaagacctttacacacagcacctcccttaccaagcaccagagaactcac

SEQ ID NO: 44219 - DNA, 2751 bp, Homo Sapiens
atgaccgcgggcgccggcgtgctccttctgctgctctcgctctccggcgcgctccgggcccataatgaggatcttacaactagagagacctgcaaggctgggttctctgaagatgattacacggcattaatctcccaaaatattctagaaggggaaaagctacttcaagtcaagttcagcagctgtgtggggaccaaggggacacaatatgagaccaacagcatggacttcaaagttggggcagatgggacagtcttcgccacccgggagctgcaggtcccctccgagcaggtggcgttcacggtgactgcatgggacagccagacagcagagaaatgggacgccgtggtgcggttgctggtggcccagacctcgtccccgcactctggacacaagccgcagaaaggaaagaaggtcgtggctctggacccctctccgcctccgaaggacaccctgctgccgtggccccagcaccagaacgccaacgggctgaggcggcgcaaacgggactgggtcatcccgcccatcaacgtgcccgagaactcgcgcgggcccttcccgcagcagctcgtgaggatccggtccgacaaagacaatgacatccccatccggtacagcatcacgggagtgggcgccgaccagccccccatggaggtcttcagcattgactccatgtccggccggatgtacgtcacaaggcccatggaccgggaggagcacgcctcttaccacctccgagcccacgctgtggacatgaatggcaacaaggtggagaaccccatcgacctgtacatctacgtcatcgacatgaatgacaaccgccctgagttcatcaaccaggtctacaacggctccgtggacgagggctccaagccaggcacctacgtgatgaccgtcacggccaacgatgctgacgacagcaccacggccaacgggatggtgcggtaccggatcgtgacccagaccccacagagcccgtcccagaatatgttcaccatcaacagcgagactggagatatcgtcacagtggcggctggcctggaccgagagaaagttcagcagtacacagtcatcgttcaggccacagatatggaaggaaatctcaactatggcctctcaaacacagccacagccatcatcacggtgacagatgtgaatgacaacccgccagaatttaccgccagcacgtttgcaggggaggtccccgaaaaccgcgtggagaccgtggtcgcaaacctcacggtgatggaccgagatcagccccactctccaaactggaatgccgtttaccgcatcatcagtggggatccatccgggcacttcagcgtccgcacagaccccgtaaccaacgagggcatggtcaccgtggtgaaggcagtcgactacgagctcaacagagctttcatgctgacagtgatggtgtccaaccaggcgcccctggccagcggaatccagatgtccttccagtccacggcaggggtgaccatctccatcatggacatcaacgaggctccctacttcccctcaaaccacaagctgatccgcctggaggagggcgtgccccccggcaccgtgctgaccacgttttcagctgtggaccctgaccggttcatgcagcaggctgtgagatactcaaagctgtcagacccagcgagctggctgcacatcaatgccaccaacggccagatcaccacggcggcagtgctggaccgtgagtccctctacaccaaaaacaacgtctacgaggccaccttcctggcagctgacaatgggatacccccggccagcggcaccgggaccctccagatctatctcattgacatcaacgacaacgcccctgagctgctgcccaaggaggcgcagatctgcgagaagcccaacctgaacgccatcaacatcacggcggccgacgctgacgtcgaccccaacatcggcccctacgtcttcgagctgccctttgtcccggcggccgtgcggaagaactggaccatcacccgcctgaacggtgactatgcccaactcagcttgcgcatcctgtacctggaggccgggatgtatgacgtccccatcatcgtcacagactctggaaaccctcccctgtccaacacgtccatcatcaaagtcaaggtgtgcccatgtgatgacaacggggactgcaccaccattggcgcagtggcagcggctggtctgggcaccggtgccatcgtggccatcctcatctgcatcctcatcctgctgaccatggtcctgctgtttgtcatgtggatgaagcggcgagagaaggagcgccacacgaagcagctgctcattgaccccgaggacgacgtccgcgacaacatcctcaagtatgacgaggaaggcggtggcgaggaggaccaggactacgacctcagccagctgcagcagccggaagccatggggcacgtgccaagcaaagcccctggcgtgcgtcgcgtggatgagcggccggtgggcgctgagccccagtacccgatcaggcccatggtgccgcacccaggcgacatcggtgacttcatcaatgagggactccgcgctgctgacaacgaccccacggcacccccctatgactccctgctggtcttcgactacgaggggagcggctccaccgcaggctccgtcagctccctgaactcatccagttccggggaccaagactacgattacctcaacgactgggggcccagattcaagaagctggcggacatgtatggaggtggtgaagaggattga

SEQ ID NO: 44220 - DNA, 1314 bp, Homo Sapiens
catgtgcagccggccagccgggctctcctcctcgcggcggatgggtgaccttttcctggcacgggcaggctgtgggaggcagcggagcaggcgatgaagaagaagcagcagcatcccggcggcggcgcggatccctggccccatggggcccctatggggggcgcccctccgggcctgggcagctggaagcgtcgggtgcccctgctgcctttcctgcgcttctccctccgggactacggcttctgcatggccaccctgctggtcttctgcctgggctccctcctctatcagctcagcgggggaccccctcgcttcctgctcgacctgcggcagtacttgggaaattccacttacttggatgaccatggaccacctcctagtaaggtactacctttcccaagccaggtggtgtacaacagggtaggcaagtgtgggagccgtactgtggtcttgcttctgagaatcttgtcggagaagcacggatttaatttggtcacatcagacattcacaacaaaaccaggcttactaaaaatgaacaaatggaactgattaaaaatataagtactgccgaacaaccctatttattcactcgacatgttcatttcctcaacttctcaaggtttggaggagaccagcctgtctacatcaacatcattagagaccccgtcaaccggttcttatccaactattttttccgtcgctttggagactggagaggggaacaaaatcacatgatccgcacccccagcatgaggcaggaggagcgctacctggatatcaatgagtgtattcttgaaaactatcccgagtgctccaaccccaggttattttacatcattccgtacttttgtggacagcatcccagatgcagggagcctggtgaatgggcccttgagagagcaaagctgaacgtgaatgaaaacttcctgctcgtggggattcttgaagagttggaagatgtgctgctgttactggaaagatttttacctcattacttcaagggcgtgctcagtatctacaaagacccagagcacaggaagcttggaaacatgactgtgacggtgaagaagactgtcccctctcctgaggctgtgcagatcctctaccagcggatgagatacgagtacgagttttaccactacgtcaaagagcagttccacctgctgaagcgcaagtttggacttaagtctcacgtcagcaagccccccctgaggccacacttctttatcccaactccactggaaaccgaggagccaatcgacgatgaagaacaggatgatgaaaagtggctggaagatatttataagaggtga

SEQ ID NO: 44221 - DNA, 2814 bp, Homo Sapiens
gccgggtgtccagcgaacccctttcccaaaccttcggggagaagggaggtgggaggaggcaaagaaactacaggcagggagctggaagggggggtggggggggcaggagacaagaaatcaagacaccaggcagcaggacacacacacactcacatacactcacacacatagagaccaacagatagacagctacctaaagcctgaaagactgacagcaacacagaaaaaaagaaacaggcagaaagagagacaaagacagaaatagaaacagactaacacacagagtcaaaaatacagagacagaaagacagggagaaagagaaacagaaaattagacaccaaagacatacgaacagggaggaaggccgactgaaagaaagacggagaagaggagagagaagccagggccgagcgtgccagcaggcggatggagggcggcctggtggaggaggagacgtagtggcctgggctgagctgggtgggccgggagaagcgggtgcctcagagtgggggtgggggcatgggaggggcaggcattctgctgctgctgctggctggggcgggggtggtggtggcctggagacccccaaagggaaagtgtcccctgcgctgctcctgctctaaagacagcgccctgtgtgagggctccccggacctgcccgtcagcttctctccgaccctgctgtcactctcactcgtcaggacgggagtcacccagctgaaggccggcagcttcctgagaattccgtctctgcacctgctcctcttcacctccaactccttctccgtgattgaggacgatgcatttgcgggcctgtcccacctgcagtacctcttcatcgaggacaatgagattggctccatctctaagaatgccctcagaggacttcgctcgcttacacacctaagcctggccaataaccatctggagaccctccccagattcctgttccgaggcctggacacccttactcatgtggacctccgcgggaacccgttccagtgtgactgccgcgtcctctggctcctgcagtggatgcccaccgtgaatgccagcgtggggaccggcgcctgtgcgggccccgcctccctgagccacatgcagctccaccacctcgaccccaagactttcaagtgcagagccatagagctgtcctggttccagacggtgggggagtcggcactgagcgtagagcccttctcctaccaaggggagcctcacattgtgctggcacagcccttcgccggccgctgcctgattctctcctgggactacagcctgcagcgcttccggcccgaggaagagctgcccgcggcctccgtggtgtcctgcaagccactggtgctgggcccgagcctcttcgtgctggctgcccgcctgtgggggggctcacagctgtgggcccggcccagtcccggcctgcgcctggccccaacgcagaccctggccccgcggcggctgctgcggcccaatgacgccgagctcctgtggctggaagggcaaccctgcttcgtggtggccgatgcctccaaggcgggcagcaccacgctgctgtgccgcgacgggcccggcttttacccgcaccagagcctgcacgcctggcaccgggacacggacgctgaggccctggagctggacggccggccccacctgctgctggcctcggcttcccagcggcccgtgctcttccactggaccggtggccgcttcgagagacgcacagacatccccgaggccgaggatgtctatgccacacgccacttccaggctggtggggacgtgttcctgtgcctcacacgctacattggggactccatggtcatgcgctgggacggctccatgtttcgtctgctgcagcaacttccctcgcgcggtgcccacgtcttccagccactgctcatcgccagggaccagctggccatcctaggcagcgacttcgccttcagccaggtcctccgccttgagcctgacaaggggctcctggagccactgcaggagctggggcctccggccctggtggccccccgtgcctttgcccacatcactatggccggcagacgcttcctctttgctgcttgctttaagggccccacacagatctaccagcatcacgagatcgacctcagtgcctgagaccaccaacgggactctgggcatggctggggcccctggacggccccttggctggctcctggccctacttggggtgatggcccgcctgtgagctgctgaccgtgggccacgttcatcagccacacgtctaggccttaagcccacttcttaaaggatctgcacccatggggggacatagagggtcccagcctactggacctcccgagctgcccttcaggtctaaagcaacatctggacatctcggctggggcagattccccatcaaaggcaacctggggggtgcaggctggtgcactgcatggagtcgaggtggaggtcacgtgcagagctccatgaggtcccggagcccccctctcaacccgctcctaccccgctggtccctctgaaagcaccgaggggttgatggcattcctttcccattctaaactccacgcagccaatcgctttcctggaggagcgccaacctcgaagacaactcagcactgggcgggttcccctctgctgcttgtgcgcatgcgtgcggccgcccagcaagctgtgccttttgcgcctcttgcgcgtgcgccggggcacagggagggacagcgggaggtgtcgcggggagcctggtgcccttctagatgggcgacggaggcaaggacaagacgagtccgagctcaataaatgcgctgtgcaccctc

SEQ ID NO: 44222 - DNA, 2568 bp, Homo Sapiens
ccacagcttccagtggctccggaacctgccgggctgtcccaaaagcaaaggcaacaacgtgtttgttgtccacaagccctcggccgtgccctcgcgggagggctccgagtctggcccgggacccagcagcggaagcccctcggaggagtccccgcccggccccggcggtggcctggaggatgctctttccctgccgcgctcctcagggtccccgcggaggccccgagcgaccccaggtcggccagcggggaagatgacccctgcgcccccaagaaggtcaaggtcgactgcgactccttcctgtgccagaaccccggggagcccggcctccaggaggcccagaaggcaggcgggctccctgcggatgcctcgccgctcttccgccagctcttcctcaagtcgcaggaacctcttgtgagccacgagcagatgcaggtgttccagatgatcaccaagtcccagcggatcttctcccatgcccaggtggcagcagtctcctcccagctccctgcgcccgagggcaaaccagccgccctgaggccgctgcaggggccgtggccgcagcagcccccaccactggctcctgctgtggactctctccacgccggccctggaaaccccgaggcagagggctccccagcccgcaggagaaaaaccacacccggggttcccagagaggcctcccccggcagcacgagacgagacgcaaaggggggactgaaagtggccgcggttccaacgccccttgcagcaccgtctctggacccttccaggaatccagacatctcttctctggccaagcagctgcgatcctctaaagggaccttggacctggaggacatcttcccctccacaggccaacggcagacccagttaggtggggaggagccaccaggagcctcgctgccagggaagcaggccccagccgagaatggcgcggcttcaaggatcacaaaaggtgaaaagggcccagcctgctcccggggtggaggctaccggctcttgggcaaccccagggccccgcgattctccggcttccggaaagagaaggcgaagatggatatgtgctgtgcggcttctccgagccaggtagccatggcctccttctcatcggccgggcccccggcagatccctccaagtccaagctgacaatattcagcagaatccagggtggaaacatctacaggctcccccatccggtgaaggaagagaatgtggcaggcagaggtaaccagcaaaacggcagtcccacagactggacgaagcccaggagcacttttgtctgcaagaactgcagccagatgttttatacggagaaagggctgagcagccacatgtgttttcacagcgaccagtggccgtcacctcgagggaagcaggaaccgcaggtgtttggcacagagttttgcaagccgctaagacaggtgctgaggccagaaggggacaggcatagtcccccaggaaccaagaagcccttggaccccacagctgcagcccctttggtggtcccccaatcgatccccgtggttccagtgacccgacacatagggagcatggccatgatccagacaaagacggtagctcagtgcgttgagtattattacatctggaaaaaaatgatcaagtttgactgtggccgagccccagggctagaaaagagggtcaagagagagccggaggaagtggaaaggacagaggaaaaggtcccatgcagccctcgggagagacccagccaccatccaactcccaagttaaagaccaagagttataggagggagtccatcctcagctccagcccaaatgcaggctccaagcggacccccgagctgttgggaagtgcagagagccagggcatttttccatgcagagagtgtgaaagggtgtttgacaagatcaagagtcgaaatgcccatatgaagcggcaccgccttcaggaccacgtggagcccatcatcagggtgaagtggccagtgaagcccttccagctaaaggaagaggagctgggagctgacatcggccccctgcagtggtgactcccgtggcagcaagtccgaatggggcctccagtgctgcccctcctcccttcggcctctccagggcgtttggggcacccctctgcctccccccaccctccctgtcccctgttggccaacctgcctgcaaacatggagggcatttggccacagataggcaggaggagctcagttgtcggacagctatgcagtccctgtccggtggtgctggaggctccactctccttaggttcatagtctctccccttctttcccttccacttctagagcagggaggcttggggaggggaaaatttagctctgggtagctcttaaatcttagcctcagttgtggggtttggtttcatgtgttagataaggccaagacttagagaatcagtgggaaaaaaccttgagatctccaacacgctgggcccctccctggggcggggactctaccttccagattcagtccctagtcttgcgatgaattctgcattgttcggtgttttttgtacatgtcaactcgtaaatctgattaaattgggttcttga

SEQ ID NO: 44223 - DNA, 567 bp, Homo Sapiens
gggccagttaaatggatcatcatctctaacccctctgctgacagccccatgtttgtgatgggtatgaaccatgagaaatataacaacagcctcaagatcatcaacagtgtttcttgtaccaccaactgcttagcatctctggccaagatcatccatgacaactccgatttagtggaaggactcatgaccacagtaaatgctatgattgccacccagaagactgtggacggcccctctgtgaaactgtggcatgacagctgcagggctcaaaggaacatcatccttgcatctactggcactctcaaggctgtgggcaagtatatcaatgagctgcatgggaagatcactagcatggcattccaggtccccaccacgaacatgttggtcatgaacctgacctgccctcaggaaaagcatgccaaatatgataacatcaagcaggtggtgaaggcatcagaaggcccccataagggcatcctgtgcaacactgagaaccaggttgcctcctccagcttaaccattgacacccactcttccaccttcaatcctgggactggcattgccctc

SEQ ID NO: 44224 - DNA, 975 bp, Homo Sapiens
atgcagaagccccagctcttggtccctatcatagccacttcaaatggaaatctggtccacgcagcatacttccttttggtgggtatccctggcctggggcctaccatacacttttggctggctttcccactgtgttttatgtatgccttggccaccctgggtaacctgaccattgtcctcatcattcgtgtggagaggcgactgcatgagcccatgtacctcttcctggccatgctttccactattgacctagtcctctcctctatcaccatgcccaagatggccagtcttttcctgatgggcatccaggagatcgagttcaacatttgcctggcccagatgttccttatccatgctctgtcagccgtggagtcagctgtcctgctggccatggcttttgaccgctttgtggccatttgccacccattgcgccatgcttctgtgctgacagggtgtactgtggccaagattggactatctgccctgaccagggggtttgtattcttcttcccactgcccttcatcctcaagtggttgtcctactgccaaacacatactgtcacacactccttctgtctgcaccaagatattatgaagctgtcctgtactgacaccagggtcaatgtggtttatggactcttcatcatcctctcagtcatgggtgtggactctctcttcattggcttctcatatatcctcatcctgtgggctgttttggagctgtcctctcggagggcagcactcaaggctttcaacacctgcatctcccacctctgtgctgttctggtcttctatgtacccctcattgggctctcggtggtgcataggctgggtggtcccacctccctcctccatgtggttatggctaatacctacttgctgctaccacctgtagtcaacccccttgtctatggagccaagaccaaagagatctgttcaagggtcctctgtatgttctcacaaggtggcaagtga

SEQ ID NO: 44225 - DNA, 1362 bp, Homo Sapiens
atggacggcaccactgcccctgtcactaaatctggagctgccaagttagttaagagaaatttccttgaggcgctaaagtccaatgacttcggaaaattgaaggctattttgatccaaaggcaaatagatgtggacactgtttttgaagtcgaagatgagaatatggttttggcatcttataaacaaggttactggttgcctagctataaattgaagtcttcctgggccacaggcctccatctctctgtcttgtttggccatgtggaatgtcttctggtgctactggaccacaatgctacaatcaactgtagacccaatgggaaaacccctcttcacgtggcttgtgaaatggccaatgtggattgtgttaagatcctctgtgatcgtggggcaaagctcaattgctactccttaagtggacacacagctttgcacttttgtacaactccaagttccattctctgtgccaagcaattggtttggagagtgacacaagtcaaccacatgttaggaaattccctggtcaatgaagtggaacatgtgacacaagtcaaccacatgttaggaaattccctggtcaatgaagtggaacatggggcgaatgtgaacatgaagaccaacaaccaagatgaggagacgcccttgcacacggctgcccacttcggcctttcggagctggtggccttctacgtggaacacggggccatagtggacagcgtgaatgcccacatggagacccccctggccatcgccgcctactgggccctccgctttaaggagcaggagtacagcacggagcaccacctggtctgccgcatgctgcttgactacaaagccgaagtcaatgcccgagatgacgactttaaatctcccctccacaaggcagcctggaactgtgaccacgtgctcatgcacatgatgctggaagctggcgccgaagccaatctcatggatatcaacggctgtgctgccatccagtacgtgctgaaggtcacctccgtgcgccctgctgcccagcctgagatctgctaccagctcctgttgaaccatggggctgcccgaatataccctccacagttccataaggtgatacaggcctgccattcttgtcctaaagcaattgaagttgtagtcaatgcctatgaacacatcagatggaacacaaagtggagaagagctatccccgatgatgacttggaggtaaataatcgattcccttctaatagttttcactatcaagtacttccagactgctctagaagtacagaaaattgtaacaaaaaagttggttttgagaatgcctttaaagcgtactcaaatgcaatgagacaaagggttataaaatgcaggtttgagagttaa

SEQ ID NO: 44226 - DNA, 1420 bp, Homo Sapiens
cgccaccaatgtggcccaggccaccagcccccgtgacactgcagccatcccctttgctccccgtcgtggcctcccgaccgagcagccagagtgaccccgaaagcctaaatcagcctgcggcgccctcacccgtcctccagctgccatcgcctcctgggtgaagaggacgcagctggtgacgcgcactgacgtcctgcaaggcccgctccaggtgcgccacctttgactggcatgctgaaaggacaaagggacggaggcattttaccggagaggacatccatggggcccagcaggtcaaattcctttctctaagtatgggagacatttttaaaaataatggagtcctccagggccggctgcgtgctgtggcctgtgctcctcactgctttggacccaggctgcgctgtctccaccacgaccaaggactcacagagctcgcctgggggacctggccccacagtcaccccgtccgtcatcagcctcaaatgccatcagcccgtgaatgctgctccatcgtctgcatggcagccaaggaggatggtgccaggtgatgtggcgatgagtgggcatcgcgtgggggccttggacgagcgtggacaccccaatccccagactggccattgccgtggaggcagcgtgagtgtgacatggagctcggtgtcgtgctgcagaggacgcctcgcggctgtacgcgtcatgatagccagggacccctccacatgtcacttagccaaaggatgcagcccagcctggggctttctaccccaggcccgaggacctgcagggacaaggacccctcagcgcagatgcagctctcatgaggcctgaaaccaagctggacttgcagaactgcgcacgctccctttctgaaagaaacacccgttaccgggtccagactgaatgtgggcgtaagaaagcgggaagggtcccccacagcaagagagagaccctcccagtcacttggtcatctgagccttgagtgtgtccggccccagccaccagcctgtccccactatccctcttgtcagcacggctgaaaggagctgcctgggcacctgaggtggctgaggctcatctttgaggagcatggaactcgaggggagaagtcgcgcccccagggaagccagtacagacgggtttcaccctgttgcccaggctgctctcaaactcctggcctcatgtgatctgcccgcctcggcctcccaaggtgctgggattacaggcatgagccatcgggcctggccggctagtgcaatttggacgatgagtttaaaactgcagaaccaaagtaacctcttccacaggcttcaagcacagtagctgaagataataaatccattataacaaaagagtagccaaaatgctgtggcattcttagaaatgaagaaagaactgaactgataagacaaaaaaaaaaaaa

SEQ ID NO: 44227 - DNA, 2405 bp, Homo Sapiens
agtggagtcccagttgaagagacaaaaaaacagaagctgtcggaatgcagtctaaccaaaggtcaagatgggctacagaatgactttctgtccatcagtgaagacgtgcctcggcctcctgacactgtcagtactgggaaaggtggaaagaattctgaggctcagttggaagatgaggaagaagaggaggaagatggactttcagaggagtgcgaggaggaggaatcagagagttttgcagacatgatgaagcatggactcactgaggctgacgtaggcatcaccaagtttgtgagttctcatcaagggttctcgggaatcttaaaagaaagatactccgacttcgttgttcatgaaataggaaaagatggacggatcagccatttgaatgacttgtccattccagtggatgaggaggacccttcagaagacatatttacagttttgacagctgaagaaaagcagcgattggaagagctccagctgttcaaaaataaggaaaccagtgttgccattgaggttatcgaggacaccaaagagaaaagaaccatcatccatcaggctatcaaatctctgtttccaggattagagacaaaaacagaggatagggaggggaagaaatacattgtagcctaccacgcagctgggaaaaaggctttggcaaatccaagaaaacattcttggccaaaatctaggggaagttactgccacttcgtactatataaggaaaacaaagacaccatggatgctattaatgtactctccaaatacttaagagtcaagccaaatatattctcctacatgggaaccaaagataaaagggctataacagttcaagaaattgctgttctcaaaataactgcacaaagacttgcccacctgaataagtgcttgatgaactttaagctagggaatttcagctatcaaaaaaacccactgaaattgggagagcttcaaggaaaccacttcactgttgttctcagaaatataacaggaactgatgaccaagtacagcaagctatgaactctctcaaggagattggatttattaactactatggaatgcaaagatttggaaccacagctgtccctacgtatcaggttggaagagctatactacaaaattcctggacagaagtcatggatttaatattgaaaccccgctctggagctgaaaagggctacttggttaaatgcagagaagaatgggcaaagaccaaagacccaactgctgccctcagaaaactacctgtcaaaaggtgtgtggaagggcagctgcttcgaggactttcaaaatatggaatgaagaatatagtctctgcatttggcataatacccagaaataatcgcttaatgtatattcatagctaccaaagctatgtgtggaataacatggtaagcaagaggatagaagactatggactaaaacctgttccaggggacctcgttctcaaaggagccacagccacctatattgaggaagatgatgttaataattactctatccatgatgtggtaatgcccttgcctggtttcgatgttatctacccaaagcataaaattcaagaagcctacagggaaatgctcacagctgacaatcttgatattgacaacatgagacacaaaattcgagattattccttgtcaggggcctaccgaaagatcattattcgtcctcagaatgttagctgggaagtcgttgcatatgatgatcccaaaattccacttttcaacacagatgtggacaacctagaagggaagacaccaccagtttttgcttctgaaggcaaatacagggctctgaaaatggatttttctctacccccttctacttacgccaccatggccattcgagaagtgctaaaaatggataccagtatcaagaaccagacgcagctgaatacaacctggcttcgctgagcagtaccttgtccacagattagaaaactacaggcgcgcaccaccacgcctagctgatttttgtatttttttgtagagacgggggtttggccatgttgccgaggctaactcctgggattacaggcatgagctgtgctggccgggtttttttttcttgatgtaaacgtgtacagctgttttattagttaaggtctaatttttactctaggtgccttttatgttcagaactctttccactggactggtatttgctcaaaaataaataatggtagagaagaaaactataaaaatggacaaggctttcttctatcagtagcgtttaccctttgtcaccagtggctttggtatttccatgtctggcattgcataaacttctctggtgtgaaaggataaatatgcctttctaaagttgtatatcaaaattgtatcaatttttattttctatgatttctagaaacaaatgtaataaatatttttaaaatctc

SEQ ID NO: 44228 - DNA, 420 bp, Homo Sapiens
gtggctgccaggaagccaccccccgacagcctgtcagaggagagcagtactttggacctgccaagcctgtatgtgaaggattatgtcctgcagagatgcagccaagaggccaacagcaaggcttttagttctgtgaaattccattcttttccttgcttttctgatgtggatccagacaccaggagcctaaatactaaacaaaatgactctgggaccactgagaactttatttcacctttctgtggccaatcagagaccgtagaagaggataatggacttcagaaatctctggataaattctatgaaatgtttggatatccaaagctagcctctgggaatccattctctgcatctgtctgccagtgcctgtctcagaaaatccctcaactaagagtccaggagagccaaaagtatgccctc

SEQ ID NO: 44229 - DNA, 1403 bp, Homo Sapiens
atggcccctgcactgctcctgatccctgctgccctcgcctctttcatcctggcctttggcaccggagtggagttcgtgcgctttacctcccttcggccacttcttggagggatcccggagtctggtggtccggatgcccgccagggatggctggctgccctgcaggaccgcagcatccttgcccccctggcatgggatctggggctcctgcttctatttgttgggcagcacagcctcatggcagctgaaagagtgaaggcatggacatcccggtactttggggtccttcagaggtcactgtatgtggcctgcactgccctggccttgcagctggtgatgcggtactgggagcccatacccaaaggccctgtgttgtgggaggctcgggctgagccatgggccacctgggtgccgctcctctgctttgtgctccatgtcatctcctggctcctcatctttagcatccttctcgtctttgactatgctgagctcatgggcctcaaacaggtatactaccatgtgctggggctgggcgagcctctggccctgaagtctccccgggctctcagactcttctcccacctgcgccacccagtgtgtgtggagctgctgacagtgctgtgggtggtgcctaccctgggcacggaccgtctcctccttgctttcctccttaccctctacctgggcctggctcacgggcttgatcagcaagacctccgctacctccgggcccagctacaaagaaaactccacctgctctctcggccccaggatggggaggcagagtgaggagctcactctggttacaagccctgttcttcctctcccactgaattctaaatccttaacatccaggccctggctgcttcatgccagaggcccaaatccatggactgaaggagatgccccttctactacttgagactttattctctgggtccagctccataccctaaattctgagtttcagccactgaactccaaggtccacttctcaccagcaaggaagagtggggtatggaagtcatctgtcccttcactgtttagagcatgacactctccccctcaacagcctcctgagaaggaaaggatctgccctgaccactcccctggcactgttacttgcctctgcgcctcaggggtccccttctgcaccgctggcttccactccaagaaggtggaccagggtctgcaagttcaacggtcatagctgtccctccaggccccaaccttgcctcaccactcccggccctagtctctgcacctccttaggccctgcctctgggctcagaccccaacctagtcaaggggattctcctgctcttaactcgatgacttggggctccctgctctcccgaggaagatgctctgcaggaaaataaaagtcagcctttttctacata

SEQ ID NO: 44230 - DNA, 846 bp, Homo Sapiens
aaggacatctttttctaccaggcagacgatgagcactacatcccccgggctgtgctgctggacctggagccccaggtgatccactccatcctcaactccccctgtgccaagctctacaacccagagaacatctacctgtcggagcatgggggaagagctggcaacaactgggccagcagattctcccagagggagaagatccatgaggacatttttaacatcacagaccaggaggcagatggtagtgacaatctagatggctttgtgctgtgtcagttcattgctggggggacaggctctggcctgggctcctacctcttagaatggctgaatgacaggtatcctaagaagctggtgcagacatactcagtgtttcccaaccaggacaagatgagcaacgtggtggtccagctttataattcactcctcacactcaagaggctgatgcagaacgcagactgtgtggtggtgctgcacaacacagccctgaaccagattgccacagaccagatcctgcacatccagaacccatccttctctcagaccaaccagctggtgtccaccatcatctcggccagcaccatcaccctgcgctaccccagctacatggacaatgacctcataggcctcatcgcctcactcattcccaccccatggctccactttctcatgactggctacacccagctgactatggaccaatcagtggccagcgtgaggaagaccatggtcctggatgtcatgaggtggctgctgcagcccaagaacgtgatggtatccacaggccgagaccgccagaccaaccactcctacatcaccatcctcaacaccatccagggagaggtg

SEQ ID NO: 44231 - DNA, 357 bp, Homo Sapiens
ctaatggctgatttcgacaatctttttgatgaatcgatggcgcgcgcggataccactatacgtggattgatgggcgcagaggcaaggataacctcaggatctttatccggcgtcacgctccggggggtctttgacgatccagagaacattggttacgccgaagtggggatccgaattgatggaaccaggccgacgttgtttgtgaacacatcggatgttagcgggctggaaaggctggatacgctgaaggttaacgggcgtgaattttgggttgatcgcgttggtccggatgattgcgggtcctgccatgtttggctgggtagtggatcacctcccggcggttcgcggcgtcgttaa

SEQ ID NO: 44232 - DNA, 615 bp, Homo Sapiens
aaggcaaggaggaagcttatctgtgaaaaagcaaagcactatcacaaggaatataggcagatgtacagaactgaaattcgaatggtgaggaaggcaagaaaagctggcaacttctatgtacctgcagaacacagatcggtatttgtcatcaggatcaggggtatcaatggtgtggccaaggtccgaaaggtgttgcggcttcttcaccttcgtcaaatcttcagtggaacttttgtgaagcttaacaaggcttcaattaacatgctgaggattgtagatccatatattgtatgggggtacccaaatctgaagtcagtaaatgaactaatctacaagtgtggttatggcaaaatcaataagaaaataattgctttgacagacaacgctttgattgctccatctcttggtaaatatggcatcatctgcatggaggatatgattaatgagatctatactgttggaaaacacttcaaagaagcaaataacttcctgtggccctttgaattatcttctccacgaggcggaatgaagaaaaagaccacccattttgtagaaggtggagatgctggcaacagacaggaccagatcaacaggttttttagaagaatgaactaa

SEQ ID NO: 44233 - DNA, 264 bp, Homo Sapiens
atggtcaactccactgtattatctaacatcttgggtcatgccttttttgagctgtttgcagacagagttccaaagacagcagaaaactttcatgctctgagcactggagagaaaggatttgggtataagggttcctgtttttacagaattattccagggtttatgtgtcaaggtggtgacttcacatgccataatggcactggtggtaagtccatctacagggagaaatttgatgacaagaactacatcctgaagcatgcaggt

SEQ ID NO: 44234 - DNA, 1717 bp, Homo Sapiens
atttctctactcacctgtctccgaatccgccgtggtgtttcaagcgagtcaagattccagatcgcgccccaggctggactcggaattactgccccgcgggtctgcattttcacagcggcaggtggcttgtggtccctgacaaggaggaccctgagggcaaccacaccttgccatgcagagcacctggcttctcatctgccaagctcactctgacccggctgcaggaagggaaggagccaaccccggactcaagactcaaggggaccagaaccagggagatgagacataccagggctgggcagctgtgggggtccttccagagaggagctgagatacgcctacctggaggggcccctgggcctggaggggctcctcagtgtgactgggtgaagtgttttcagaggaccagggttgaggttgggggcatctcatccagaccctgccggcatctgcccgaacccaagggcccctccttcctccctcctcaatggaaatgctggagatgtcctcagtcaccctctgagcactcacacatcaccccttatttggaaatttttctcactctaaccttccttcctgccgcaccttctgccccatccccaggctctggcctctctctctcctcttctaccctttagcaggtaatgactcagttcccactgaggagccagctgtaggtgagagtttgggctctcggtgaggttgggagaaggaaaaggcttatgggccagggggtgggagggagaatgggcacagccagagcagagtggaagggttgggggaggcgataaagacagatgtttccgtattaccatttttctttcatggtccgagggagctgcccttcccccaagcccaggaaagtgaaaagagaagcaggaacagtaaaatactccacaggaaaagaaaatcttagtgatccctcctgctgtctctttccttttgcctattctggcaaattttgtaagtgaaatttgttaccaagatgtgaaaatcttataagaaagtctctaaatatttgagaataaaattatcaatgtctcagctctgcaggctgaaaaaacggaggctttacaaaataaaatcatgcttggaaaacttctcctctgagggatgtcaaaggctgcactgaataagctctaaggtggtgctgaaatgagtcatttatttgcctgtgtaagctcaggcaggtgttggaattgaggaagtataggtaatgaaaaaagtaaacatgtcctcgggacatagcgactggtgatgaccacacaatcaacacaataaactctagcattcacattgtagtccagctcattcaagcaaagctatctccaatagggagtttaccctgtacagaacacgtgcatttccacctgttctcagactgaccctttgctcatcacaatagtgaaaaaaaacacagccctgggtggagatttaagatgctaatgagtcatgagatgtatgaacaagcatgtacagctactgcacacgtgcacccagaagaccgcccagaacatgcttgctagtaacacctcttcccacccacctcctgtgaataatcatgtaagactcccataaagggagtttctccagcagtgatcaatgctgtctcatccttaggagcagcccaccctgaatcctctcagggtgtacagtttattttgcacttaactttcaaaataatatttttcctttgtaataaattgctttgtacttc

SEQ ID NO: 44235 - DNA, 1311 bp, Homo Sapiens
tgccaggcgacatgttggagggttggtggtagtggcttggggagatgctcgctctgttggtctcactctctcacatgcttcccctggctcccttcgttccccccacccggcctgcatgcgggagtgtgtgcgagggagtgggaggacgtcggggggagggaaggcattctggtccccaagagacccgcggaggaaggcagaggctgtgagggactccgggaagctatggacgtcgagaggctccaggaggcgctgaaagattttgagaagaggggaaaagaagtttgtcctgtcctggatcagtttctttgtcatacagccaagactggagaaacaattcagtggtcccaatttaaaggctattttattttcaaactggagaaagtgatggatgatttcagaacttcagctcctgcgccaagaggtcctcccaaccctaatgtcgaatatatttcctttgatgaaacaaaggaaagaatactgaaaactgtcactggatttaaccgtatcccttttactattcagcgactagaattgttaacagatccaaggagaaactatacaggaacagacaaatttctcagaggagtagaaaagcatgtgatggttgttagctgtgtttatccttcttcagagaaaaacaattccaatagtttaaatcgaatgaatggtgttatgtttcctggaaattcaccaagctatactgagaggtctaatataaatgggcctgggacacccaggccacgtaatcgaccaaaggtttctttgtcagcccccatgacaacaaatgggtcgcctgacagcacagacagcaaagaggtaaatttgcagcaaaatgaagagaaaaatcacagtgactcttcgacatctgaatcagaagtttgctcagtgagccctctgaaaaataaacatccagatgaagatgctgtggaagctgaggggcatgaggtaaaaagactcacgtttgacaaaaaaggcgaagtcagagaaacagccattcaagcgacttgcagcgaaatttcttcggttatggtagaagaaacagaagcatcaccttcatctcaggataaagacaaagaaagccgttgtacccggcagcactacaacaacatttgcttatttttagagtcttttatgatatcaagagaaatgatcccggaaagaaaaaatcaagaaaaagaatctgatgcctcaactgtgaatgaagagacttctgaggaaaataatcaaatggaggaatctgatgtgtctcaagctgagaaagatttactacattccgaaggtaatgaaaacgaaggccctgaaagtagt

SEQ ID NO: 44236 - DNA, 468 bp, Homo Sapiens
atgtcaactgggactgtaatcgtccgaaggtttgactggggctggagggtccacttcaggatggtgaactcctatgactggcaggtggtatctggctatatgcaggagggctcagttcctttccacatggcccgctccatatttttcccagggttgagtgtccatatgacattgtggatggcttcccccagagtatgcagcaatcaaggcagtaatagattttatgacctagccttgggaagcacacactgtcaccttcacagtattttattggtcacatgggtcagccccattcaatgggggagggcactctataagggcacaaatgccaggaggcctcagaaacataaatatttttgctatgggtatagattcatgggttttaggctggaagaaaccacaaaaataccctggttgacagtaagaatcagtcccattgatgataaaagatggaatttaaaagcttaa

SEQ ID NO: 44237 - DNA, 1474 bp, Homo Sapiens
atggagagcggggcctacggcgtggccgaggcgggcggctccttcgacctgcggcccttcctgacgcagccgcaggtggtggcgcgcgccctgtgcttggtgatcttcgccttgatcgtgttctcctgcatctatggcgagggctacagcaacacccataagtctaagcagatgtactgcgtgttcaaccacaacgaggatgcctgccgctatggcagtgccatcggggtgctggccttcctggcctcggccttcttggtggtcgacgcgtatttcccccagatcagcaacgccactgaccgcaagtacctcgtcattggtgacctgctcttttcagctctctggaccttcctgtggtttgttggtttctgcttcctcaccaaccagtgggcggtcaccgacccggaggacgtgctggtgggggccgactctgcgagggcagccatcaccttcagcttcttttccatcttctcctggggtgtgctggcctccctgacctaccagcgctacaaggctggcgtggacgacttcatccagaactacgtcgaccccagtccggaccccaacactgcctacgcctcctacccaggtgcatctgtggacaactaccaacagccacccttcacccagaatgcggagaccaccgagggctaccagccgccccctgtgtactgagtggcggttagggtgggaagggggacagagagggccctcccctctgccctggactttcccatgagcctcctggaactgccaaaccccctctttcacctgttccatcctgtgcagctgacacacagctaaggagccttacagcccggcgggggctggccgagccacaccccacgtgcctgtgcccagagggcttcagtcagccgctcactcctccagggcacttttaggaaagggtttttagctagtgtttttccttgcttttaatgaccccatccccgcctggagtggctagaagccagcaggcacccatgtgctactgacaagtgcctcagcttccccccggcccgggtccggccgtgggagccgctgttacctgcgttctctgccaaagactcgtgggggccgtcacacctaccctgtgcagcggagccggaccaggctcttgtgtcctcactcaggtttgcttcccctgtgtccactgctgtatgatctgggggccaccaccctgtgccggtggcctctgggctgcctcccacggtgtgaaggcggggctggtgctcatggcacttccttcttgctcccacccctggcagcagggaatggctttgcctgacaacacccagctttatgtaaatattctgcagttgttacttaggaagcctggggagggcagaggtgtcccatggctcccaaactctgtctgtgccgagtgtattataaagtcgtaggggagatgcccggccctgggatgctgtttggagatggaataaatgttttctcattcaaaaaaaaaaaaaaa

SEQ ID NO: 44238 - DNA, 1572 bp, Homo Sapiens
atgagtttccacaaggaggacggagtgaacagtctgtgccagaaggctctgcacatcgtcaccgagctgtgcttcgccggccaggtggagtgggagaagtgctcgggcatcttccctcgggacaggggcagccagggcggaagcagcacagatatttcagtcagcctgttagctgtcgttgtcagcttttgtggactggccttgttggttgtctcactttttgtcttctggaagctgtgttggccatgctggaaaagcaaacctgtgacttccaacatcactacgcttccacagagcatttcaagtgctcctactgaagtttttgagactgaagagaaaaaagaaattaaggaaaatgaaaagccagccgtaaaagctattgagcctgcaataaaaatcagccacacttcccctgacatcccagcagaagtccaaactgctttaaaagaacatttaattaaacatgcacgtgtgcaaagacaaattactgagcctacgtcatcaacccgccacagttccttccgaagacacctgccgaggcaaatgcaggtttccagtgttgattttagcatgggcacagaacctgttttacaacgaggagaaacaacaaccagcattgggaggataaagccagaactctacaaacagaaatcagttgactctgagggcaaccaaaacgaagatgtcaaaatctgtgggaaacttaactttaccctccagtatgattatgaaaatgaacttctagttgttaaaattatcaaagctttagatctccctgctaaagacttcacaggaacttctgacccttatgtgaagatgtatcttcttccagataggaaaaagaaatttcagacccgcgtgcacagaaagactttaaatcctctatttgatgaaacttttcaatttcctgtagcatatgatcaactaagcaaccgaaaactacatttcagtgtgtatgattttgacagattttctagacatgacatgattggggaagtgattcttgataatttgtttgaagtctctgatctctccagggaagccacagtatggaaagatattcactgtgctaccacagaaagtatagacctgggtgaaatcatgttttccctttgttacctaccgacggctgggcgtatgacattgacagtcattaagtgcagaaatctgaaggcgatggatattactggctcatcagatccttatgtcaaagtgtccctgatgtgtgaaggtcgaagattaaaaaagaggaaaacaactacaaagaaaaacactctaaaccctgtgtacaatgaggccattatttttgacatccctccagagaacgtggaccaggtcagcctctccattgcggtcatggattacgatagggtaggacacaatgaggtcataggagtgtgcagaacaggactggatgctgagggtcttgggcgagaccactggaatgaaatgctggcctatcatcgaaaaccaataacgcactggcacccattgctggagttacctggccgggcgaccagttttgatagtcaaggatcctgcccttctcctaaaccaccttccacaccataa

SEQ ID NO: 44239 - DNA, 887 bp, Homo Sapiens
cgggccaagaaaaccagcgaaggcccggccccccagcagaggccggaccatggttgaccagttgcgggagcgcaccaccatggccgacccgctgcgggagcgcaccgagctgttgctggccgactacctggggtactgcgcccgggaacccggcacccccgagccggcgccatccacgcccgaggccgccgtgctgcgctccgcggccgccaggttacggcagattcaccggtcctttttctccgcctacctcggctaccccgggaaccgcttcgagctggtggcgctgatggcggattccgtgctctccgacagccccggccccacctggggcagagtggtgacgctcgtgaccttcgcagggacgctgctggagagagggccgctggtgaccgcccggtggaagaagtggggcttccagccgcggctaaaggagcaggagggcgacgtcgcccgggactgccagcgcctggtggccttgctgagctcgcggctcatggggcagcaccgcgcctggctgcaggctcagggcggctgggatggcttttgtcacttcttcaggaccccctttccactggctttttggagaaaacagctggtccaggcttttctgtcatgcttgttaacaacagccttcatttatctctggacacgattattatgagttttaaaacttttaacccgcttctacctgcccaactgtgaccaactaaatgacagatgtgtgagaacaagaactgagggaaagcaccttcccccaccccagacgtttttatctgaatgcatacaaggagtcctgaggtggtgatttggccagtgttttaacttgtgacaagtactcaggtgtgaggacaagaatgcaaatggctcttccttgagtgaaagaa

SEQ ID NO: 44240 - DNA, 417 bp, Homo Sapiens
atggctcttcatattcatgaagcttgcatacttctgttggtcatccctggattggtcacctctgctgctatcagtcatgaagactatcctgctgatgaaggtgaccagatctccagtaatgacaatctgatctttgatgactatcgagggaaagggtgtgtcgatgacagcggctttgtatacaagttgggagaacgatttttccctgggcattccaactgtccatgtgtctgtgctctagatggacctgtttgcgaccaaccagaatgccctaaaattcacccaaagtgtactaaagtggaacacaatggatgctgtcctgagtgcaaagaagtaaaaaacttctgtgaatatcacgggaaaaattacaaaatcttggaggaatttaaggtatgcgttaccctccatatttattga

SEQ ID NO: 44241 - DNA, 1576 bp, Homo Sapiens
atgcgcaagaaggtgcctgcgggactggagcagagcgggctgcgagggtcttcccagcgcaggcgggttttccagtgttacttgcggctgggcgtgggggactagctgcctttctggcagcaggcaggaagccgcaaaaagtttctgagcccccgaacctgtagcggacgtggaaaaagaacgcccctcctcaagtgtctggctgaaagatgccacccagggaagggaactcgggctagctaaggaggccattcttgatgttgcttctagatctcatgtcatcaccgagccctcagctgctggtggcagctgctcagcagacccttggcatgggaaagagacggagtccaccccaagccatctgccttcacttagctggagaggtgctggctgtggcccggggactgaagccagctgtgctctatgattgcaactgtgcaggggcatcagagctccagagctatctggaggagctgaaggggcttggcttcctgacttttggacttcacatccttgagattggagaaaacagcctgattgtcagtcctgagcatgtatgtcagcacttggagcaggtgctgcttggtaccatagcctttgtggatgtttccagctgccagcgtcacccttctgtctgctccctggaccagcttcaggacttgaaggccctcgtggctgagatcatcacacatttgcaggggctgcagagggacttatctctagcagtctcctacagcaggctccattcctcagactggaatctgtgtactgtatttgggatcctcctgggctatcctgttccctatacctttcacctgaaccagggagatgacaactgcttagctctgactccactacgagtattcactgcccggatctcatggttgctaggtcaacccccaatcctgctctattcttttagtgtcccagagagtttgttcccaggcctgagggacattctaaacacctgggagaaggacctcagaacccgatttaggactcagaatgactttgctgatctcagcatctcctctgagatagtcacactgccggctgtggccctctgactttaactctcctcccatatagaaggtactcagtaaatgatcatctctaggttggggatggcaaataatcatctcaactgccaattccaagtgtcttgaatacactaaggcacaatgctgtagatcagttggccacaaatgcaaagggcatgtaaataggtaatggtggtgctagtagcaaattggtagatagtacatacttgccatttctatactaggaagtcctcttagtggagatgttttcattttcactggataaaagatagaaggaaggagatgatagaggaaaagcagggtgatggaagacaagccaaacactcttgcatggtaaccttgtaaatatacctgctctatgtgggtgctgcatgctaggaaagtagggctgggggcttttctgcatgtttatatgcctccaactgaatttgaggagagtagaccaccagtatgcttaaatatgtgatacttgttaatgtaatacaccattcaggaataaactgagagttctgagg

SEQ ID NO: 44242 - DNA, 2893 bp, Homo Sapiens
gatgttgacgttgcagacttggctagtgcaagccttgtttattttcctcaccactgaatctacaggtgaacttctagatccatgtggttatatcagtcctgaatctccagttgtacaacttcattctaatttcactgcagtttgtgtgctaaaggaaaaatgtatggattattttcatgtaaatgctaattacattgtctggaaaacaaaccattttactattcctaaggagcaatatactatcataaacagaacagcatccagtgtcacctttacagatatagcttcattaaatattcagctcacttgcaacattcttacattcggacagcttgaacagaatgtttatggaatcacaataatttcaggcttgcctccagaaaaacctaaaaatttgagttgcattgtgaacgaggggaagaaaatgaggtgtgagtgggatggtggaagggaaacacacttggagacaaacttcactttaaaatctgaatgggcaacacacaagtttgctgattgcaaagcaaaacgtgacacccccacctcatgcactgttgattattctactgtgtattttgtcaacattgaagtctgggtagaagcagagaatgcccttgggaaggttacatcagatcatatcaattttgatcctgtatataaagtgaagcccaatccgccacataatttatcagtgatcaactcagaggaactgtctagtatcttaaaattgacatggaccaacccaagtattaagagtgttataatactaaaatataacattcaatataggaccaaagatgcctcaacttggagccagattcctcctgaagacacagcatccacccgatcttcattcactgtccaagaccttaaaccttttacagaatatgtgtttaggattcgctgtatgaaggaagatggtaagggatactggagtgactggagtgaagaagcaagtgggatcacctatgaagataagacattgcctccttttgaagccaatggaaaaatcttggattatgaagtgactctcacaagatggaaatcacatttacaaaattacacagttaatgccacaaaactgacagtaaatctcacaaatgatcgctatctagcaaccctaacagtaagaaatcttgttggcaaatcagatgcagctgttttaactatccctgcctgtgactttcaagctactcaccctgtaatggatcttaaagcattccccaaagataacatgctttgggtggaatggactactccaagggaatctgtaaagaaatatatacttgagtggtgtgtgttatcagataaagcaccctgtatcacagactggcaacaagaagatggtaccgtgcatcgcacctatttaagagggaacttagcagagagcaaatgctatttgataacagttactccagtatatgctgatggaccaggaagccctgaatccataaaggcataccttaaacaagctccaccttccaaaggacctactgttcggacaaaaaaagtagggaaaaacgaagctgtcttagagtgggaccaacttcctgttgatgttcagaatggatttatcagaaattatactatattttatagaaccatcattggaaatgaaactgctgtgaatgtggattcttcccacacagaatatacattgtcctctttgactagtgacacattgtacatggtacgaatggcagcatacacagatgaaggtgggaaggatggtccagaattcacttttactaccccaaagtttgctcaaggagaaattgaagccatagtcgtgcctgtttgcttagcattcctattgacaactcttctgggagtgctgttctgctttaataagcgagacctaattaaaaaacacatctggcctaatgttccagatccttcaaagagtcatattgcccagtggtcacctcacactcctccaaggcacaattttaattcaaaagatcaaatgtattcagatggcaatttcactgatgtaagtgttgtggaaatagaagcaaatgacaaaaagccttttccagaagatctgaaatcattggacctgttcaaaaaggaaaaaattaatactgaaggacacagcagtggtattggggggtcttcatgcatgtcatcttctaggccaagcatttctagcagtgatgaaaatgaatcttcacaaaacacttcgagcactgtccagtattctaccgtggtacacagtggctacagacaccaagttccgtcagtccaagtcttctcaagatccgagtctacccagcccttgttagattcagaggagcggccagaagatctacaattagtagatcatgtagatggcggtgatggtattttgcccaggcaacagtacttcaaacagaactgcagtcagcatgaatccagtccagatatttcacattttgaaaggtcaaagcaagtttcatcagtcaatgaggaagattttgttagacttaaacagcagatttcagatcatatttcacaatcctgtggatctgggcaaatgaaaatgtttcaggaagtttctgcagcagatgcttttggtccaggtactgagggacaagtagaaagatttgaaacagttggcatggaggctgcgactgatgaaggcatgcctaaaagttacttaccacagactgtacggcaaggcggctacatgcctcagtgaaggactagtagttcctgctacaacttcagcagtacctataaagtaaagctaaaatgattttatctgtgaattcagattttaaaaagtcttcactctctgaagatgatcatttgcccttaaggacaaaaatgaactgaagtttcacatgagctatttccattccagaatatctgggattctactttaagcactacataaactgactttatcctcaga

SEQ ID NO: 44243 - DNA, 747 bp, Homo Sapiens
aaaaattactatgaagtacttggagttacgaaagatagtggtgatgaagatttgaaaaaagcttatagaaagcttgctttgaagtttcatccagacaaaaaccatgcacctggagcaacagatgcttttaaaaaggttgggaatgcttatgctgttttaagtaatccagaaaagcgaaaacagtatgacctcacgggcaatgaagaacaagcatgtaaccaccaaaacaatggcagatttaatttccatagaggttttgttgatataactccagaagacttgtttaatatattttttgggggtggatttccttcaggtagtatacattctttttcaaatggaagagctgaagaggaaagaggagatggaggtttttctgtgtttatccagctgatgcccataattgtattgatcctcgtgtcattattaagccagttgatggtctgtaatcctccttattccttctatcccagatctggaacagggcaaactattaaaacgcagacagaaaacttgggtggtgtttattatgtcagcaaggactttaaaaatgaatataaaggaatgttattacaaaaggcagaaaagagtgtggaggaagattatgtgactaatattcgaaataactgctggaaagaaagacaacaaaaaacagatatgcagtatgcagcaaaagtataccgtggtgatcgactccgaaggaagtcagatgccttgagcatggacaactgtaaagaattagagcgg

SEQ ID NO: 44244 - DNA, 1026 bp, Homo Sapiens
atggaaccccacaaagtgaacgagcttcgggcctttgtgaaaatgtgtaagcaggatccgagcgttctgcacaccgaggaaatgtgcttcctgagggtgtgggtggagagtatggggggtaaaccacctgctactcagaaagctaaatcagacgaaaataccaaggaagaaaaacctggtagtaagaaagtggaggaagacttaaaggcagacaaaccatcaagtgaggaaagtgatctagaaattgataatgaaggtgtgattgaaccagacactgatgcccctcaagaaatgagagatgaaaatgcagagataacagaggagatgatggatcaggcaaatgataagaaagtagctgctattgaagccctaaatgatggtgaactgcagaaagccattgacgttttcacagatgccattaagctgaatcctcacttggccattttgtatgccaagagggccagtgtctttgtcaaattacagaagccaaatgctgccatccaacactgtgacagagccattgaaataaatcctgatttagctcagccttacaagtggcgagggaaagcacacaggcttccaggccactggaaaggagcagcccatgatcttgcccttgtctgtaaattggagtatgataaagatgctagtgcaacgctgaaagaagtccaatttagggctcagaaaattgcagaacatcggagaaagtatgagcaaaaatgtgaaggagcccagagggaggaagcagccagacaacagtcaggagctcagtatggctcttttccaggtggctttcctggggtaatgcctggtaattttcttggaagaatgcctggaatcggagggggcataccaggagtggccagaatgcctgggcttaatgaaattcttagtgatccagaggttcttacagccatgcaggatccagaagttatggtggccttccaggatgtggctcagaacccagcaaatatatcaaaataccagagcaacccaaaggttatgaatcttatcagtaaattgtga

SEQ ID NO: 44245 - DNA, 1035 bp, Homo Sapiens
atgggtaaaacattggggaagctgcctgatagcagtgatgatgaggaatctgattctgaagatgacagtaacaggttcaaaattaaacctcagtttgagggcagagctggacagaagctcatggatttacagtcgcactttggcactgatgacagattctgcatgaattctcgatttctagaaagtgacagtgaagacgaacaggaagaggtaaatgaaaagaaacccgctaggaagaagagcttgctgaagaaaaaaagaaagctggatgttgtacaaagtgttttgaaaatcaacttaagcaattctacaggatcagtagctgctaagaaatttaagggcatcgtacattatgatccaacaaagcaagaccatgccacttatgaaagaaaaatagatgataaaccaaaagaaagtaaagaaaaacgaaaaaagaaaagggaggaagctgaaaagctacgtgagatgtccaaagaaacgtattataacattgctatggatctgaaagaaatatttcaaacttcaaaatatgccggtgaaaaggaagaggacacaccctggaatgaggagtgtggtaaagataaacctgaggaaatccaggaccctgcactgaccagtggggctgagcagcccagcaggttcacattctccttttttgattcagacactaaagacgtaaaggaagagacccacagagttgaaacagtgaaacctggaaagattgtccaggtttctggagacgaggaagaccctcgtttccaagacagcagttcagaagaggaagatgttactgaaggaacagatcacagaaagtccagtcctggagaagcatcattacctgagaaagagaccactagatttttctttttctctaagaatgatgaaagacttcaagtagaagtaggctctgatttattctggagaggagtggggagtaatattagcaggaactcttgggatgccagaacaaacaacctgcgtgtggattgtcagaagaaacataaagatgcaaaaaggaaaatgaaaccaaaataa

SEQ ID NO: 44246 - DNA, 966 bp, Homo Sapiens
atgtttctcagttccagaatgattacttcagtaagccctagcaccagcacgaattcttcctttcttctcactggattttctggcatggagcagcaatacccctggctttccatccccttctcctcaatctatgccatggtgcttttgggcaattgcatggttctccatgtgatatggactgagccaagcctgcaccagcctatgttttacttcctgtccatgctggccctcactgacctgtgcatggggctgtccactgtgtacacagtgctggggatcctgtgggggatcattcgagagatcagcttggattcctgcattgcccagtcctatttcatccatggtctgtccttcatggagtcctctgtcctcctcactatggcctttgaccggtacattgcaatttgcaatccactacgttattcctccatcctgactaattccagaattatcaaaattgggctcactataataggtaggagttttttctttattacaccccccatcatctgtctgaaattttttaattactgtcatttccacatcctttctcactctttctgcctgcaccaggatcttctccgcttagcctgttcagacatccgattcaatagttactatgccctgatgctggttatttgcatactgttgttggatgctatactcatccttttctcctacatcctgattcttaagtcagtcctggcagttgcctctcaggaagagaggcataaattatttcagacctgcatctcccacatctgtgctgtccttgtgttctacatccctatcattagcctcacaatggtgcaccgttttggcaagcacctttcccccgtggcccacgttctcattggcaacatctacatccttttcccacctttaatgaatcccatcatctacagtgtcaagacccaacagattcataccagaatgcttagactcttttctctgaaaagatattga

SEQ ID NO: 44247 - DNA, 357 bp, Homo Sapiens
atgtcctctggggaaggggctgcccataacttggaggaacttagaaggcaaaacctactgcgccccaaccctagagggaaccccgaaggcgaggggcgagatcagggactcggcgacgagggcgagcgcccccgggcttaccacgagcacggggaccccggcggccagcgagtagaggagcacggggggcacggcgctgctgtcctccgggcccgggtagggtttgcggtaggcgctgtcgtggcagaagaagccctgcacgttcacggtgaacgtgtccgtatactcgaagtagtacgccagcatcaccgtccctgccatgatcaccatctggaaatagagcatgctgctggtgag

SEQ ID NO: 44248 - DNA, 708 bp, Homo Sapiens
ccctgcgggggagacctgacaggaccatctggagtcatcctctcaccaaattacccagaaccctacccgccaggcaaggagtgtgactggaaagtgaccgtctcaccagactacgtcatcgccctggtatttaacatgtatgtacctttcccccgggtgggagacgaagggttcagagtggctaggggctctgggacctgggtctccagctttaacctggagcctggctatgacttcctccatatctacgacggacgggactctctcagccctctcataggaagcttctatggctcccagctcccaggccgcattgaaagcagcagcaacagcctcttcctcgccttccgcagcgatgcatctgtgagcaatgctggcttcgtcattgactatacagaaaacccgcgggagtcatgttttgatcctggttccatcaagaacggcacacgggtggggtccgacctgaagctgggctcctccgtcacctactactgccacgggggctacgaagttgagggcacctcgaccctgagctgcatcctggggcctgatgggaagcccgtgtggaacaatccccggccagtctgcacagccccctgtgggggacagtatgtgggttcggacggagtggtcttgtcccccaactacccccagaactacaccagtggacagatctgcttgtattttgttactgtgcccaaggactat

SEQ ID NO: 44249 - DNA, 492 bp, Homo Sapiens
atgccaccgaagttcgaccccaacaagatcaaagtcgtatacctgaggtgcaccggaggtgaagtcggtgccacttctgccctggcccccaagatcggccccctgggtctgtctccaaaaaaggttggtgatgacattgccaaggcaacgggtgactggaagggcctgaggattacagtgaaactgacaattcagaacagacaagcccagattgaggtggtgccttctgcctccgccctgaccatcaaagccctcaaggagccaccaagagacggaaagaaacagagaaacattaaacacagtgggaatatcacttttgatgagatcatcaaggttgctcgacagatgcggcaccgatccttagccagagaactctctggaaccattaaagagatcctggggactgcccagtctgtgggctgtaatgttgatggccgccactctcatgacatcatagatgacatcaacagtgacaaagcaagactccatctc

SEQ ID NO: 44250 - DNA, 264 bp, Homo Sapiens
caactagaaagctgtgggttgtggttttttgcttttcgtccttttgttgaagaggacaaaggaatgtgcattgataggaaaacctaatccggggtagtgaactgaaacccccccctccccacagctctcacctctcctgctggggtcgggggtgcagagaagaaggtgagtggagagagaaatggaagatgaggagacgaggggagagaaggagggagggcagaagccagagggagaaacagtagccccacctaaaacacacca

SEQ ID NO: 44251 - DNA, 1131 bp, Homo Sapiens
cagctttataaaaagctcaatactcatgtggccttagttggtatggaaatctggactgacaaggataagataaagataaccccaaatgcaagcttcaccttggagaatttttctaaatggagggggagtgttctctcaagaagaaagcgtcatgatattgctcagttaatcacagcaacagaacttgctggaacgactgtgggtcttgcatttatgtctacaatgtgttctccttattctgttggcgttgttcaggaccacagcgataatcttcttagagttgcagggacaatggcacatgaaatgggccacaactttggaatgtttcatgacgactattcttgcaagtgtccttctacaatatgtgtgatggacaaagcactgagcttctatatacccacagacttcagttcctgcagccgtctcagctatgacaagttttttgaagataaattatcaaattgcctctttaatgctccattgcctacagatatcatatccactccaatttgtgggaaccagttggtggaaatgggagaggactgtgattgtgggacatctgaggaatgtaccaatatttgctgtgatgctaagacatgtaaaatcaaagcaacttttcaatgtgcattaggagaatgttgtgaaaaatgccaatttaaaaaggctgggatggtgtgcagaccagcaaaagatgagtgcgacctgcctgaaatgtgtaatggtaaatctggtaattgtcctgatgatagattccaagtcaatggcttcccttgccatcacgggaagggccactgcttgatggggacatgccccacactgcaggagcagtgcacagagctgtggggaccaggaactgaggttgcagataagtcatgttacaacaggaatgaaggtgggtcaaagtacgggtactgtcgcagagtggatgacacactcattccctgcaaagcaaatgataccatgtgtgggaagttgttctgtcaagtgactttcctgacatgtaaaacatttgatcctgaagacacaagtcaagaaataggcatggtggccaatggaactaagtgtggcgataacaaggtttgcattaatgcagaatgtgtggatattgagaaagcctacaaatcaaccaat

SEQ ID NO: 44252 - DNA, 381 bp, Homo Sapiens
atggaggggctggctgttcccagagcaggtcactcccccacttgcattgccttgcctggactcttttcttggagggaggtccctttcctctacccatctgaatttttttttcttccaccagtgtccagcttgcctttcaccatgggcctaatgatggaaattacagttattttgtatcttcaaacagaaccaagcaaatcctctgagcttcattcatatgggaaattttctttctttcttttttttttttttgagatggaatttcgctcttgttgcccaggctggagtgcaatggctcaatctcggctcactgcaacctccacctcccaggttcaagagtttctcctgcctcagcaggaggattactgtaatcccaagtag

SEQ ID NO: 44253 - DNA, 1197 bp, Homo Sapiens
atgaggcttcgggagccgctcctgagcggcagcgccgcgatgccaggcgcgtccctacagcgggcctgccgcctgctcgtggccgtctgcgctctgcaccttggcgtcaccctcgtttactacctggctggccgcgacctgagccgcctgccccaactggtcggagtctccacaccgctgcagggcggctcgaacagtgccgccgccatcgggcagtcctccggggagctccggaccggaggggcccggccgccgcctcctctaggcgcctcctcccagccgcgcccgggtggcgactccagcccagtcgtggattctggccctggccccgctagcaacttgacctcggtcccagtgccccacaccaccgcactgtcgctgcccgcctgccctgaggagtccccgctgcttgtgggccccatgctgattgagtttaacatgcctgtggacctggagctcgtggcaaagcagaacccaaatgtgaagatgggcggccgctatgcccccagggactgcgtctctcctcacaaggtggccatcatcattccattccgcaaccggcaggagcacctcaagtactggctatattatttgcacccagtcctgcagcgccagcagctggactatggcatctatgttatcaaccaggcgggagacactatattcaatcgtgctaagctcctcaatgttggctttcaagaagccttgaaggactatgactacacctgctttgtgtttagtgacgtggacctcattccaatgaatgaccataatgcgtacaggtgtttttcacagccacggcacatttccgttgcaatggataagtttggattcagcctaccttatgttcagtattttggaggtgtctctgctctaagtaaacaacagtttctaaccatcaatggatttcctaataattattggggctggggaggagaagatgatgacatttttaacagattagtttttagaggcatgtctatatctcgcccaaatgctgtggtcgggaggtgtcgcatgatccgccactcaagagacaagaaaaatgaacccaatcctcagaggtttgaccgaattgcacacacaaaggagacaatgctctctgatggtttgaactcactcacctaccaggtgctggatgtacagagatacccattgtatacccaaatcacagtggacatcgggacaccgagctag

SEQ ID NO: 44254 - DNA, 885 bp, Homo Sapiens
atgccacacctcagcaacaccacatctgagttcccaatcttcctcctaacaggcttccctgggctggaggccttccacatctggatctcaattcccttcttccttctgagcacagttgctctcttagggaacagcatgatcctattggttgttattctggagccaaacctccatgaacccatgtactgttttctcttcatgctgtctgccgctgacctggggctgaccctctccacaatgcccacgaccctcagtgtcctctggttcagtgcacgtgaaatcatcctcaatgcatgtatcatccagctctttttcctccacagctctggctttatggaatcctcagtactgatggccatggcttttgaccgctttgttgccatttgcagacccctcagatatgctaccatcctgacagactccagaattctaaagattggtgtagcaatagtcctaagaacattgatcagcctctgtccatccctctttctcattaagagactgtcattttgcaaagtcaatgtcctttcccattcttactgcttccaccctgatgcgcttaaagttgcatgttctgattcaaggatgaacagctatggaggcttagctgttctcattctggtcaccggggttggtacaccatgtgttgcgctttcctacatcctgataatccactctgtactaaacatcatctcttcagagggacggaggaaggccttcgacacttgtggatctcacattggggcagttgcagtcttctacattccctgggttgttctttcagttgtccacagatttttccacaaggcttcaccaatatgtccacccactattgtccaacatctatttccttggcccctctcggctgaaccccatcatatatag

SEQ ID NO: 44255 - DNA, 1501 bp, Homo Sapiens
atctagtctttcccagagacagattgaacttcaaggtaaaagtgaattttcagatgcggacaagctaacttctaaggattatgagtaattcgactcatcttttaaatatccagaaaacctcatttttagtgaaagagtggagataaaagaatattaagagtccagaaactggtgttctggctgtggccctgccttagactgtctcactttgtagtcactttatgcaggaaacgtgcccgggcatcttgaaatggatgagttctcttctggagatatgtctcatgtgtacgcatatctggagatatgcctcttgtgggtgctgctgcagctgctgtgcccatctcatatcaatacccaagcttttctcatgacgaaccagatgactcttggtaaccaggtttgctccccagcttctaatttcaatatgatgagaagttacataacatttactcctttgtaaaggtttctctgtcatcagacaaaactctgaatagaaaccggtgggtaatccagtgtactggtttttcctaatgtatttggtactatagtgtatgaaccgagaataatcgagtcaagtgaaacccccttttccagtcataaaatgtctcattcattatactaaaaggagctgttcttttaaaaaagccttcttatttttctactaaatttttagataagtataacctactatattcctcaaatctaggcttacatttgagaagggtaagctgtgttttttcctccgaagagttgggctgtgatctttacaacgagacgtcgtttttcccagcatatttctgttttctacctaaacattaagatacacatttttctaggcattagaaatagtacaatattgcctgtggtctttccatttgacacctgtggctggaatatatgtgtcgctccagaatttatatgttggaatttaaatgcccctgtgtgatagaattaaaaagtggggactttgggaggaggttaagagtgcaattagagaccttataaaagaactcaatggaagtagctaggctttttagcccttccaccattagaggacactgtatttgtcctctctggagaacacagcaacaaggtgccatcttggaagaagagacccaccttcaccagacattggacctattagtgccttgatcttggacttcccagtgtctaaaactgtaagaaatttatttctttccagtttcataagttacccagtccaaggtactgtgttatagcatcaggaacatactgagatggcatatttattgtggaaattttggtcctcatacttaatgaatgggcttcaagtatttcgttagtttttaaaaacagggctcctcctttacaattgatctcatttttattttttaaaagttagcttttacaacatagaactggaaaaaatctctactcagacctctagagtgtcctagattttgtggcagaatcactatggataatttataggtgcttgtgatctcatctgtgtattatttac

SEQ ID NO: 44256 - DNA, 1333 bp, Homo Sapiens
ttttgcagagccttgaaaccagcgaaacaataatcaaagagcagttctgtcaaagaaaacaacataaatcaggtacaagaaatttcagagtgggatatcagatctttagtgtgaagatacatctacattaaaccaggaatcactagaactgacatttggacaagaaaatttggaaaattttaaaactgtgaaggttgatcatggaaattaaagaggaaggggcatcagaagaagggcagcactttcttcctacagcccaggccaatgatcccggggactgtcagttcacaagtatccagaagactccaaatgaaccgcagttggaattcatccttgatttgaatcaagaattaagagattagcagctgcaagaatttattcataataatgttctaccagtataaaaaacttcaatttctttttttatatatatttttaaaatatactaagaaacaacaacagataattttatcttgtcaaatggcaagaaatgcttgatgagcgaacacaagtttactaaaaaaatattatttcaagtcatcatggaactgtattgttgatcctagaagacacagtccccaaactgttaggttccttagcactttaagatcttcaactacaccatttcttgaagaattttttaaaaactactctttcaagggtattacagataaacccgtggatgttttactgtccatttttgtcatttttttctttgagattttttaattccacaaatcctccgacgtcacctattattgtatgagtaacttctattcatttcccaatgaaagaataatagcttcttaaatatttttatcatgtttaagggtgtgcatatttatttaatcagaagtaaaacaagaacaaattctaggaaaaagaaattcagtaaggaagagggctttttcgtctaattttaactaaatctttgatatttgattctctactcttaaccaaagtattcaaattatttaggaatttcaatgaccttgctttctaaattaggaaaacagccacaccaatcaatttgctaggtgccatattgctttgtataagttattttccatcaaggatttgtgtctgctttgtgtgctgctatataataattatgtcttgctgaagttcttctgcttattgaattcctctactgaagttccttacttattcaaataagtaaggtaggaggtacttagtcaattgagcagctaattggctaaaagtgtcttgagcacaagataagcatgtactgaaaaactgagtatctcttgtccattgttaactgtatttctaatggttgattgcatttaaattaaataattcacccctacaa

SEQ ID NO: 44257 - DNA, 800 bp, Homo Sapiens
aaacatgtggaattcattcaaaatacatgagagctatgtatcctaccaaaaccttcccaaatcattacaccattgtcacgggcttgtatccagagtcacatggcatcattgacaataatatgtatgatgtaaatctcaacaagaatttttcactttcttcaaaggaacaaaataatccagcctggtggcatgggcaaccagtatgtagcattctacacgtcgcaactgaagtaacctccatttctcaaagtgtcccatttgaagagaggatttctacactgttaaaatggctggacctgcccaaagctgaaagacccaggttttataccatgtattttgaagaacctgattcctctggacatgcaggtggaccagtcagtgccagagtaattaaagccttacaggtagtagatcatgcttttgggatgttgatggaaggcctgaagcagcggaatttgcacaactgtgtcaatatcatccttctggctgaccatggaatggaccagacttattgtaacaagatggaatacatgactgattattttcccagaataaacttcttctacatgtacgaagggcctgccccccgcatccgagctcataatatacctcatgacttttttagttgtaagtatgaagacacctatatgaaaaaaagggtaaacctgaaatgccgaaaacctgatcagcatttcaagccctatttgactcctgatttgccaaagcgactgcactatgccaagaacgtcagaatcgacaaagttcatctctttgtggatcaacagtggctggctgttagg

SEQ ID NO: 44258 - DNA, 495 bp, Homo Sapiens
agctcccaaggggctctgctgcttggccaggccccagaacctttgtctctgccctgtactccagtgaccttggagcagcaactggtttctccttctggggatccccacagggcccctgccctgcccagcatatgctcaactctgatcctccagccctgtgccacccttgaccctcttctactgcagccacaggtcctgggaaatgcctattctctcatgcactttcctttccaggtccccaaagtctctgaccaggctttggtttctgcccactcagagtggcagcggaagctggaggccgctgaggctctgctgactctgagaaactctgcccaggcccctcctgactccatctccctgcaccagccttgcaacccaccagctcctgctggagataaaggattccagcctcccagcccctctctccgccccaggccagccagctccatctcgctgcctattggacatctgggatgcatctccctcttgagctag

SEQ ID NO: 44259 - DNA, 1842 bp, Homo Sapiens
gggtagtagaacaatgggattatgctgtcacaaaaaacaaagaaaaaacataatttcttaaatcatggtctgtcactgaatctggttataaaaccttatcttgcactagaaggatctgtagcttttccagctgagaatggggttcaggataccgaatcaacactagaaaagagagaaactggggatgaagaaaactcagctaaatttcctataggaaggagagattttgacacactcagatgtatgctgggaagagtctaccaacgttgctggcaagtctgattctttttttgatatggacctgttggtccatatcatcttttcagaagaaaagcatttaattgccaatgggaggagaagcccataatgttactgtaacttgggtattatgttaactgtctgttttaaaagaaagtagcgttaagatagatcagtaaccaaaatcataggctttttctgtgcattgaactttgtgaaaatgctgtataattttgacttactagtatttttgaacaatgcttaacatactaaccttacatacactctagaccaaaataaggcatcataatttacaccttaatctcaaaaattaagcatgtctttggtgaatggttttatatatacataaacctaaaacatataagacaaaaatttatgtttggagcctgtgttctgtaaagagaaggttgatttgtcttttagctatcgtatttggagtggaactataatacaaatgtataatattctttttttttttttttttgagatggagtctcactctgttgcccaggctggagtgcaatggcacgatctcggctcactgaaacctctgcctcccgggttcaagcaattccctgcctcagcctcatgaatagctgggattacaggtgcccaccaccatgcctggctggtttttgtatttttagtagaggcaaggtttcaccatcttggtcaagttggtctggaactcctgaccctgtgatccacctgccttggcttcccaaagtgctgggattacaggcgtgcaccactgagtccagcctatattcttgtttatcagttcaaaaatgctctgcactgtttttgactctttaaaaataacttagattcaaatttatagtagaagaaaaaaaatctttcagataagaggtgttctccagaatggaagaacgacttggcatgtaagaaatagcgtcagtgtcctaatgcatattgtgactgtttgcatatacttctgtttgtaaaaatatcggttttattttcagaggatttgtaagaaacatttaaattttcattgaaataaatgacaagtcatactgtcacttaaaaaaaaaaaaaagacctttgtcaaggagagtgcagtcaaccagtaaactgcagattctcagaatgtttattgacgtactgattattcattctgttatactctaacatctgtatatttttaccagtattctcagaccacttctaccaaaacataaatctgtgattgtgatctctgaaagtcagtccttttatctactcaataactgatctgataatgtcaacttttgaaaacagatagttatgactcaaggctttgagaatgtaaagagacgcccttcacatgttgagaaatggcacgatttcacgttatcagtgcagttcggttctcagggggaaagaagtgtgaaactgtcaggaagacagatgaaatgatttgcctgaggccgtatcatcaaacaagaaattcatattcacctttctggaattcttaggataatgattacatgtgttcaattgttaaaaattggcagataaaattttatgtatttaccacgtacaacatgaaattttgaaaca

SEQ ID NO: 44260 - DNA, 8613 bp, Homo Sapiens
tgaataattgaactttgtttatttctccatatttttgcagtggtaattccattataaaacctaatgaaacaatgtttttatagatggtgtggaaagacttttctgggctcagaggtgaaactgacccttgtgtatcagcagcatttctgactgactgagagagtgtagtgattaacagagttgtgatgttagttaagaaacttagatttgccattgtagcttttctaccaattagcagattgtttaactcactgaaattgtaaagtggtagacgtggacttagtcattactgggcagcttatgaattgtattcatttactcatgatgtaaaaatggttagtctccacttttaaggctctagttctagtggctaaataggtacttatttatacagtatgataactgctgtattaaaatacatgtctcaaatgtggaatagtagaagaggtgaagaaaatcatagtttgaggtagaatactgtttgctggtcttaaaaactgtggtattttggtgattccataaattaggtcagatacttccactggagggaaacagtttaaaggatatatgtgatactattaatagaatgaggaagacacaccagatatttaggagggaattagcgagcttgaaactaagagctggtttgaatgagactgggtcataagtgatttcaagtaccagattaaggcactgagattttatttttaagcactgaagtcagattttttccttttaaaagaaaggattcatgatgaaatctgctttttgttttgcagagagcttggagataattctggtggctgtgtggagtatgtgttggaggtattaaattttcacagtatatataaggcagcaattgataggcctttcacagattcttctgataactacataaagagacaaaaaaaagaaaaaagagcaaagatctgtgctgtgtcaagtatgacagccatcactcatggctctccagtaggagggaacgacagccagggccaggttcttgatggccagtctcagcatctcttccaacagaaccagacttcatcacctgattcttccaatgagaattccgtagcaactcctcctccagaggaacaagggcaaggtgatgccccaccacagcatgaagatgaagagcctgcatttccacatactgagctggcaaacctggatgacatgatcaacaggcctcgatgggtggttcctgttttgccaaaaggggaattagaagtgcttttagaagctgctattgatcttagtgtaaaaggccttgatgttaaaagtgaagcatgccaacgtttttttcgagatggactaacaatatctttcactaaaattcttatggatgaggctgtgagtggctggaagtttgaaattcatagatgtattattaacaatactcatcgcctagtggagctttgtgtggccaagttgtcccaagattggtttccacttctagaacttctcgccatggccttaaatcctcactgcaagtttcatatctacaatggtacacgtccgtgtgaattaatttcctcaaatgctcagttgcctgaagatgaattatttgctcgttcttcagatcctcgatcaccaaaaggttggctagtggatctcatcaataaatttggcacattaaatgggttccagattttgcatgatcgtttttttaatggatcagcattaaatattcaaataattgcagctcttattaaaccatttggacaatgctatgagtttctcagtcaacatacactgaaaaagtacttcattccagttatagaaatagttccacatttattggaaaacttaactgatgaagaactgaaaaaggaggcaaagaatgaagccaaaaatgatgccctttcaatgattattaaatctttgaagaacttagcttcaagaatttcaggacaagatgagactataaaaaatttggaaatttttaggttaaagatgatactcagattgttgcaaatttcctcttttaatggaaagatgaatgcactgaatgaaataaataaggttatatctagtgtatcatattatactcatcggcatagtaatcctgaggaggaagaatggctgacagctgagcgaatggcagaatggatacagcaaaataatatcttatccatagtcttgcaagacagtcttcatcaaccacaatatgtagaaaagctagagaaaattcttcgttttgtgattaaagaaaaggctcttacattacaggaccttgataatatctgggcagcacaggcaggaaaacatgaagccattgtgaagaatgtacatgatctgctagcaaagttggcttgggatttttctcctggacaacttgatcatctttttgattgctttaaggcaagttggacaaatgcaagtaaaaagcaacgtgaaaagctccttgagttgatacgccgtcttgcagaagatgataaagatggtgtgatggcacacaaagtgttgaaccttctttggaacctggctcagagtgatgatgtgcctgtagacatcatggaccttgctcttagtgcccacataaaaatactagattatagttgttcccaggatcgagatgcacagaagatccagtggatagatcactttatagaagaacttcgcacaaatgacaagtgggtaattcctgctctgaaacaaataagagaaatttgtagtttgtttggtgaagcatctcaaaatttgagtcaaactcagcgaagtccccacatattttatcgccatgatttaatcaaccagcttcaacaaaatcatgctttagttactttggtagcagaaaaccttgcaacctacatgaatagcatcagattgtatgctggagatcatgaagactatgatccacaaacagtgaggcttggaagtcgatacagtcatgttcaagaagttcaagaacgactaaacttccttagatttttactgaaggatggccaactgtggctctgtgctcctcaggcaaaacaaatatggaagtgcttagcagaaaatgcagtttatctttgtgatcgtgaagcctgttttaagtggtattccaagttaatgggggatgaaccagacttggatcctgatattaataaggacttctttgaaagtaatgtacttcagcttgatccttcccttttaactgaaaatggaatgaaatgctttgaaagatttttcaaagctgtcaattgtcgagaaaggaaactaatagcaaaaagaagatcctatatgatggatgatttggaattaattggactagactacctttggagggttgtgattcagagtagtgacgagattgctaacagagctatagatcttcttaaagagatatacacaaaccttggcccaagattaaaagccaatcaggtggttatccatgaagacttcattcagtcttgctttgatcgtttaaaagcatcatatgatacactgtgtgtttttgatggtgacaaaaacagcattaattgtgcaagacaagaagccattcgaatggttagagtattaactgttataaaagagtacattaatgaatgtgacagtgattatcacaaggaaagaatgattctacctatgtcgagagcatttcgtggcaaacacctctctcttatagttcggtttccaaaccagggcagacaggttgatgagttggatatatggtctcatacgaatgacacaattggttcagtacggcgatgtattgttaatcgtattaaagccaatgtagcccacaaaaaaattgaactttttgtgggtggtgagctgatagattctgaagatgacagaaagctaattggacaattaaacttaaaagataaatctctaattacagccaaacttacacaaataaatttcaatatgccatcaagtcctgatagctcttccgattcctcaactgcatctcctggaaaccaccgtaatcattacaatgatggtcccaatctagaggtggaaagttgtttgcctggggtgataatgtcagtgcatcccagatacatctctttcctttggcaagttgcagacttaggtagcaacctgaatatgccacctcttagagatggagcaagagtacttatgaaacttatgccaccagatagaacagctgtagaaaaattacgagctgtttgtttggaccatgcaaaacttggagaaggcaaacttagtccaccccttgactctcttttctttggtccttctgcctcccaagttctatacctaacagaggtagtttatgccttgttaatgcctgctggtgtgcctctaactgatgggtcctctgactttcaagttcacttcttgaaaagtggtggcttacctcttgtactgagtatgctaataagaaataacttcttgccaaatacagatatggaaactcgaaggggtgcttatttaaatgctcttaaaatagccaaactgttgttaactgcgattggctatggccatgttcgagctgtagcagaagcttgtcagccagttgtagatggtacagaccccataacacagattaaccaagttactcatgatcaagcagtggtgctacaaagtgcccttcagagcattcctaatccctcatccgagtgcgtacttagaaatgagtccatacttcttgctcaggaaatatctaatgaggcttcaagatatatgcctgatatttgtgtaattagggctatacagaaaattatctgggcatcagcatgtggggcattaggactagtttttagcccaaatgaagaaataactaaaatttatcagatgaccaccaatggaagcaataagctggaggtggaagatgaacaagtttgctgtgaagcactggaagtgatgaccttatgttttgctttacttccaacagcgttggatgcacttagtaaagaaaaagcctggcagaccttcatcattgacttattattgcactgtccaagcaaaactgttcgtcagttggcacaggagcagttctttttaatgtgcaccagatgttgcatgggacacaggcctctgcttttcttcattactttactctttaccatactggggagcacagcaagagagaagggtaaatattcaggtgattatttcacacttttacggcaccttctcaattatgcttacaatggcaatattaacatacccaatgctgaagttcttcttgtcagtgaaattgattggctcaaaaggattagggataatgttaaaaacacaggtgaaacaggtgtcgaagagccaatactggaaggccaccttggggtaacaaaagagttattggcctttcaaacttctgagaaaaagtatcactttggttgtgaaaaaggaggtgctaatctcattaaagaattaattgatgatttcatctttcccgcatccaaagtttacctgcagtatttaagaagtggagaactaccagctgagcaggctattccagtctgtagttcacccgttaccatcaatgccggttttgagctacttgtagcattagctattggctgtgtgaggaatctcaaacagatagtagactgtttgactgaaatgtattacatgggcacagcaattactacttgtgaagcacttactgagtgggaatatctgccccctgttggaccccgcccaccaaaaggatttgtgggactcaaaaatgctggtgctacgtgttacatgaactctgtgatccagcagctatacatgattccttctatcaggaacagtattcttgcaattgaaggcacaggtagtgatttacacgatgatatgttcggggatgagaagcaggacagtgagagtaatgttgatccccgagatgatgtatttggatatcctcatcaatttgaagacaagccagcattaagtaagacagaagataggaaagagtataatattggtgtcctaagacaccttcaggtcatctttggtcatttagctgcttcccaactacaatactatgtacccagaggattttggaaacagttcaggctttggggtgaacctgttaatctccgtgaacaacatgatgccttagagttttttaattctttggtggatagtttagatgaagctttaaaagctttaggacacccggctatactaagtaaagtcctaggaggctcctttgctgatcagaagatctgccaaggctgcccacataggtatgaatgtgaagaatcttttacaactttgaatgtggatattagaaatcatcaaaatcttcttgactctttggaacagtatatcaaaggagatttattggaaggtgcaaatgcatatcattgtgaaaaatgtgataaaaaggttgacacagtaaagcgcctgctaattaaaaaattgcctcgggttcttgctatccaactcaaacgatttgactatgactgggaaagagaatgtgcaattaaattcaatgattattttgaatttcctcgagagctggatatgggaccttacacagtagcaggtgttgcaaacctggaaagggataatgtaaactcagaaaatgagttgattgaacagaaagagcagtctgacaatgaaactgcaggaggcacaaagtacagacttgtaggagtgcttgtacacagtggtcaagcaagcggtgggcattattattcttacatcattcaaaggaatggtaaagatgatcagacagatcactggtataaatttgatgatggagatgtaacagaatgcaaaatggatgatgatgaagaaatgaaaaatcagtgttttggtggagagtacatgggagaagtatttgatcacatgatgaagcgcatgtcatataggcgacagaagaggtggtggaatgcttacatacttttttatgaacaaatggatatgatagatgaagatgatgagatgataagatacatatcagagctaactattgcaagaccccatcagatcattatgtcaccagccattgagagaagtgtacggaaacaaaatgtgaaatttatgcataaccgattgcaatatagtttagagtattttcagtttgtgaaaaaactgcttacatgtaatggtgtttatttaaaccctgctccagggcaggattatttgttgcctgaagcagaagaaattactatgattagtattcagcttgctgctagattcctctttaccactggatttcacaccaagaaaatagttcgtggtcctgccagtgactggtatgatgcactgtgcgttcttctccgtcacagcaaaaatgtacgtttttggtttactcataatgtcctttttaatgtatcaaatcgcttctctgaataccttctggagtgccctagtgcagaagtgaggggtgcatttgcaaaacttatagtgtttattgcacacttttccttgcaagatgggtcttgtccttctccttttgcatctccaggaccttctagtcaggcatgtgataacttgagcttgagtgaccacttactaagagccacactaaatctcttgagaagggaagtttcagagcatggacatcatttacagcaatattttaatttgtttgtaatgtatgccaatttaggtgtggcagaaaaaacacagcttctgaaattgaatgtacctgctacctttatgcttgtgtctttagacgaaggaccaggtcctccaatcaaatatcagtatgctgaattaggcaagttatattcagtagtgtctcagctgattcgttgttgcaatgtgtcatcaacaatgcagtcttcaatcaatggtaatccccctctccccaatcctttcggtgaccttaatttatcacagcctataatgccaattcagcagaatgtgttagacattttatttgtgagaacaagttatgtgaagaaaattattgaagactgcagtaactcagaggataccatcaaattacttcgcttttgctcttgggagaatcctcagttctcatctactgtcctcagcgaacttctctggcaggttgcatattcatatacctatgaacttcggccatatttagatctacttttccaaattttactgattgaggactcctggcagactcacagaattcataatgcacttaaaggaattccagatgacagagatgggctgttcgatacaatacagcgctcgaagaatcactatcaaaaacgagcatatcagtgcataaaatgtatggtagctctatttagcagttgtcctgttgcttaccagatcttacagggtaacggagatcttaaaagaaaatggacctgggcagtggaatggctaggagatgaacttgaaagaagaccatatactggcaatcctcagtatagttacaacaattggtctcctccagtacaaagcaatgaaacagcaaatggttatttcttagaaagatcacatagtgctaggatgacacttgcaaaagcttgtgaactctgtccagaagaggagccagatgaccaggatgccccagatgagcatgagccctctccatcagaagatgccccattatatcctcattcacctgcctctcagtatcaacagaataatcatgtacatggacagccatatacaggaccagcagcacatcacttgaacaaccctcagaaaacaggccaacgaacacaagaaaattatgaaggcaatgaagaagtatcctcacctcagatgaaggatcagtga

SEQ ID NO: 44261 - DNA, 744 bp, Homo Sapiens
cccgccccgcctttccggcagctcctgccggcgccccggctgtgcgcccgcccttcaggctgctcagtttgcgcgcgtgttctgcggccgggccccctgcggcctcgcgggccctgcaccgctgtgggtgtggcgtgcgaaggagacaaagctttgattgatttcctgagtgatgaaattcaggaggaaaggaaaatccagaagcataaaacccttcctaagatgtctggagtttgggagctggaactgaatgggacagaagctaaattagtgcggaaagttggggaaaaaatcactgtcactttcaatattaacaacagcatcccaccaacatttgatggtgaggaggaaccctcgcaagggcagaaggttgaagaccctgaattgatatcaactccccatttcgtggttgaagctataaagaatgatggcaagaaggcccttgtgctggactgtcattatccagaggatgaagctggacaagaagaggaggctgaggacatcttctctatcagggaagttagcttttggtccaccagcgagtttgaatggaaggatactaactatacactcaacacagattccctggactgggccttatatgaccacctaatggatttccttgcggaccaaggggtggacaacatttttgcagatgagttggtggagcttcgcacagccccggagcaccaggcgtacattacttttcttgaagacctcaaaagttttgtcaagagccagtag

SEQ ID NO: 44262 - DNA, 2693 bp, Homo Sapiens
atgcttcctgaggctggctccctgtggctactgaagctgctccgggacatccagttggcccagttttactggcccatccttgaggagcttaatgtcactcggccagagcacttcgactttgtaaagcctgaggacctggacggcattggcatgggccggcctgcccagcgcagactgtccgaagctctgaaaaggctacgttctgggcctaagtctaagaactgggtctacaagatccttggaggttttgcccctgagcacaaggagcccaccctgccctcggacagcccacggcacctccctgagccagaggggggcctcaagtgtctgatcccagagggtgctgtttgcagaggggagctgctgggttcaggctgcttcggtgtggtgcaccgagggctgtggacgctgcccagtggcaagagtgtcccagtggctgtcaagtccctccgggtaggtcccgaaggcccgatgggcacagaactgggggacttcctgcgagaggtatcggtcatgatgaacttggagcacccacacgtgctgcgtctgcacggccttgtactgggccagcctctgcagatggtgatggagctggcgccactgggctccctgcacgcgcgcctaacggccccggccccgacacccccgctgctcgtggccctgctctgcctcttcctgcggcagctggcgggagccatggcgtacctgggggcccgcgggctggtgcaccgagacctcgctacgcgcaacctactgctggcgtcgccgcgcaccatcaaggtggctgacttcgggctggtgcggcctctgggcggtgcccggggccgctacgtcatgggcgggccccgccctatcccctacgcctggtgtgccccagagagcctgcgccacggagccttctcgtctgcctcggacgtgtggatgtttggggtgacgctgtgggagatgttctccgggggcgaggaaccctgggccggggtcccaccgtacctcatcctgcagcggctggaggacagagcccggctgcctaggcctcccctctgctccagggccctctactccctcgccttgcgctgctgggccccccaccctgccgaccggcctagcttttcccacctggaggggctgctgcaagaggccgggccttcggaagcatgttgtgtgagggatgtcacagaaccaggcgccctgaggatggagactggtgaccccatcacagtcatcgagggcagctcctctttccacagccccgactccacaatctggaagggccagaatggtcgcaccttcaaagtgggcagcttcccagcctcggcagtgacgctggcagatgcggggggcttgccagccacccgtccagtccacagaggcacccctgcccggggagatcaacacccaggaagcatagatggagacagaaagaaggcaaatctttgggatgcgcccccagcacggggccagaggaggaacatgcccctggagaggatgaaaggcatttccaggagtctggagtcagttctgtccctcggtcctcgtcccacagggggtggttcaagcccccctgaaattcgacaagccagagctgtgccccagggacctccaggcctgcctccacgcccacctttatcctctagctctcctcagcccagccagccctctagggagaggcttccctggcccaaaagaaaacccccacacaatcaccccatgggaatgcctggagcccgtaaagccgctgccctctctggaggcctcttgtccgatcctgagttgcagaggaagattatggaggtggagctgagtgtgcatggggtcacccaccaggagtgccagacagcactaggagccactgggggagatgtggtttctgccatccggaacctcaaggtagatcagctcttccacctgagtagccggtccagagctgactgctggcgcatcctggagcattaccagtgggacctctcagctgccagccgctatgtcctggccaggccctgagctcagcttctgcgggcacagacaccagcatgaaaagcctaggcccctgagggcctggccacatgggaccaagcggaaccagaacaaggtcccgacaggggtagacgttccacctggggagatcccacctgccgtaggcacatggaggaggagcccagagttgggcactggcaaatgtctcctccctcccatgctccttggcttctgaaggctgaagctcctttggctgggccaagaaggatctagtctgcccactacattctcaaacaagaggacttggaagaaaagagctgctatacatcatatgcagaggaagcttctacgcgctagagaggatcaaggggccacactggaccatgtgaacagccatcctgaactgccatcagctaccacactggactctgcagggcagccatcctggatgatggaagccaccatattgacttggggtataggcccaaactgccttcgtttggtccagggccatcgtgggtgatgacgattgctctcttgcactcaaggacatttgatgctggtagtatggattatgagatggactagcccctgccccagcccagctctcacattcccctttgttttttcccataccaactgcttctaccctcccctattacatacatctttcaatgtccaaaaagttacaaagtttatatgaatgtaacatataaaga

SEQ ID NO: 44263 - DNA, 315 bp, Homo Sapiens
gtgaagcctggagtcaatggattaggctgtattgggtgcgtggtcaccagggctgcttttaactctggtaaagtggatattgtcgccatcaatgatgccttcaatgacctcaactacatggtctacatgttccagtatgatttcacccatggcgaattccatggcactgtcaaagctgagaacaggaagcttgtcatcaatagagatcccatcaccatcttccaggagctagattccaccagaatcaaatggggtgatgctggcactgggtatgttgtgaagtccactgacatcttcatcatggagaaggctggg

SEQ ID NO: 44264 - DNA, 81 bp, Homo Sapiens
atgaccatctgtatcttgttacctgctttctctctcaacaccacagttctcaaccctgagccttccagagagagctattga

SEQ ID NO: 44265 - DNA, 426 bp, Homo Sapiens
atgagctctgagtgcctgcctcacctgccctcaagggtcccctctcccacacatgctaaccttcctcaacctcacaaggcaccccccacacaggcctcttgccattccacacacctgacattggggtatactctgtacctctcagaagacctcctagcgcacttctttctagtaccactccatatagtcccctgcctttgtgtgagcctgaactatctcttccttcaaattcttttggtagagagcccatatctctttttccctcccctagtcctcccaaccaccacttcttcattatccactgtcaaatttcttcctttcttcccttttctgggaaagttagaaattttcttctgcaaatttccctttaaactagcttttcctcctttaattaaatggactacatgggggggtaatccaggatga

SEQ ID NO: 44266 - DNA, 1098 bp, Homo Sapiens
gcggcggcgcggtgtaccctgggatagggagcgatctccgagcgaggcggcaagatggacgcgggatttttccgcggaacaagtgcagaacaggataatcggttcagcaacaaacagaagaaactactgaagcagctgaaatttgcagaatgcctagaaaaaaaggtggacatgagcaaagtaaatttggaggttataaagccttggataacaaaaagagtaacggaaatccttgggtttgaagatgatgttgtgattgagtttatattcaaccagctggaagtgaagaatccagactccaaaatgatgcaaatcaacctgactggatttttgaatggaaaaaatgctcgagaatttatgggagaactgtggcccctgctgctaagtgcacaagaaaacatcgcgggaatcccttctgctttcctagaactgaagaaagaagaaataaaacaaagacagattgaacaagaaaaactggcatctatgaaaaagcaagatgaagacaaagataaaagagataaggaagaaaaagaaagcagcagagaaaaaagggagcggtctcgtagcccaagaagacgcaaatccagatctccttcccctagaagacgatcttcccctgtcaggagagagagaaagcgcagtcattctcgatctccccgtcacagaaccaagagccggagtccttcccctgctccagaaaagaaggaaaaaactccagagctcccagaaccttcagtgaaagtaaaagaaccttcagtacaagaggctacttctactagtgacattctgaaagttcccaaacctgaacctataccagagcctaaagaaccttctccggaaaaaaattccaaaaaagaaaaggagaaggagaagacccgaccacgatctcggtcacgctccaaatcaagatcccggacgcggtcccgctctccttctcacactcgacctagacggcgccatagatcccgatcaagatcgtattcacctagaaggcggccaagcccaagaaggcggccatctcctcgaagaagaactccgccaagaagaatgcctcctccaccaaggcatagaaggagtagatctccagtaagacggtaa

SEQ ID NO: 44267 - DNA, 2222 bp, Homo Sapiens
atcaaggccctgggctggaggaagacatcccagatccagaggagctcgactgggggtccaagtactatgcgtcgctgcaggagctccaggggcagcacaactttgatgaagatgaaatggatgatcctggagattcagatggggtcaacctcatttctatggttggggagatccaagaccagggtgaggctgaagtcaaaggcactgtgtccccaaaaaaagcagttgccaccctgaagatctacaacaggtccctgaaggaagaatttaaccactttgaagactggctgaatgtgtttcctctgtaccgagggcaagggggccaggatggaggtggagaagaggaaggatctggacaccttgtgggcaagttcaagggctccttcctcatttaccctgaatcagaggcagtgttgttctctgagccccagatctcccgggggatcccacagaaccggcccatcaagctcctggtcagagtgtatgttgtaaaggctaccaacctggctcctgcagaccccaatggcaaagcagacccttacgtggtggtgagcgctggccgggagcggcaggacaccaaggaacgctacatccccaagcagctcaaccccatctttggagagatcctggagctaagcatctctctcccagctgagacggagctgacggtcgccgtatttgatcatgacctcgtgggttctgacgacctcatcggggagacccacattgatctggaaaaccgattctatagccaccacagagcaaactgtgggctggcctcccagtatgaagtgtgggtccagcagggcccacaggagccattctgagtttctggccaaacacattcaagctcacattcccttttgtgtctccagatcctatgatttcatggaaggggaccctcccacccaccgccactgccaaccaagacatagctcagtggtcaagacttgggcttgggagtcgggatcctgtaacgaatgtcacttgaccgctttctttttttatgaaacagtctcgctctgtctcccaggttggagtgcagtggcacgatctcggctgactgcaacctccacctcctgggttcaagcgattctcctgcctcagcctccccagtagctgggattacaggcgtgggcccccatgtccagctaatttttatattttcgctctgtctcccaggttggagtgcagtggcacgatctcggctgactgcaacctccacctcctgggttcaagcgattctcctgcctcagcctccccagtagctgggattacaggcgtgggcccccatgtccagctaatttttatatttttagtagagacagggtttcaccatgttgtccaggctggtcttgaacccctgacctcaagtgatccacccacctctgcctcccaaagtgctgggattacaggtgtgagccaccatgccaggccctcttaacctcttcaagtctgttttctcatctgcaaaacagaggtaataagatcagtatcttcttaatggaagcacctggactacatttttttcattcattgttatcataaatgaggactaacctgtctcccgttgggagttttgaacctagacctcatgtcttcatgacgtcatcactgccccaggcccagctgtgtccctacaccagccccagctgacgcatcttctttttctgcctgtagagatggttacaatgcctggcgtgatgcattctggccttcgcagatcctggcggggctgtgccaacgctgtggcctccctgcccctgaataccgagccggtgctgtcaaggtgggcagcaaagtcttcctgacaccaccggagaccctgcccccagggatctcttcacatgtggattgacatctttcctcaagatgtgcctgctccacccccagttgacatcaagcctcggcagccaatcaggtgagactcagagttgtcatctggaacacggaggatgtggttctggatgacgagaatccactcaccggagagatgtcgagtgacatctatgtgaagagctgggtgaaggggttggagcatgacaagcaggagacagacgttcacttcaactccctgactggggaggggaacttcaattggcgctttgtgttccgctttgactacctgcccacggagcgggaggtgagcgtctggcgcaggtctggaccctttgccctggaggaggcggagttccggcagcctgcagtgctggtcctgcagg

SEQ ID NO: 44268 - DNA, 513 bp, Homo Sapiens
attatcttccaggacctcatcagccacaatgagatgttctctgacatttacaagatctgggagatcacaaatgggctgtgcctggaagtggagcagaagatgctcagtaagacaacagggaacactgatgactcactcattggcagaaattcctcctctgaaagtactgaggatgaagttactgaaagcacgataatcactagtgttgatattgttacaaaccatcacttgcaggaaagcatcttcacaaaagaagcctacaagaagtatatcaaagattacatgaaatcaatcaacgaaaaacttgaagaacagagaccagaaagagtgaaactttttataacaggaatggaacaaatcaagcacatctttgctaattttaaaaactactattttattggtgaaaacctaaatccacctggcatggttgctctgctgaactaccgtaaggatggtcagtatgaccccatatatgattttttaaggaatggtttagaaattaaaagatgttaa

SEQ ID NO: 44269 - DNA, 777 bp, Homo Sapiens
cccggtgtccctgaggacgtgcgggccaggtacggccccgaaagtaggaagcggagggggagcaggtttgcggggccaagtgttgcggcgacgcacctcacgtcgagaatcgggaggaggagactgcaaggataggcccaggagtaatggagtccaaagaggaacgagcgttaaacaatctcatcgtggaaaatgtcaaccaggaaaatgatgaaaaagatgaaaaggagcaagttgctaataaaggggagcccttggccctacctttgaatgttagtgaatactgtgtgcctagaggaaaccgtaggcggttccgcgttaggcagcccatcctgcagtatagatgggacataatgcataggcttggagagccacaggcaaggatgagagaggagaatatggaaaggattggggaggaggtgagacagctgatggaaaagctgagggaaaagcagttgagtcatagtttgcgggcagtcagcactgatccccctcaccatgaccatcacgatgagttttgccttatgccctgaatcctgatggtttccctgaagttaatagggagacccctgcttcctaaacttacacatttgtggtgtacctttgtcgtaaacgttttgatgttacctatttcttgtgggtctcctattaccagcttctaaatgaatgttgtttttgacccagtttgtaagtttctgtcagcaggagagttttacctattgcatggaaagatgctcattatatattgtgaagttaataaaacagttttaaaaagca

SEQ ID NO: 44270 - DNA, 2055 bp, Homo Sapiens
tccgtgcccctgcggggagcgcgccggggctgccccccgaatgacgggcggaaggttcgacttcgacgatggcggcacctactgcggcggctgggaggagggcaaggcgcacgggcatggcatctgcacggggcccaagggccagggcgagtactcgggctcctggtcgcacggcttcgaggtggtcggaggctacacctggcccagcggcaacacctaccagggctactgggcgcagggcaagcggcacgggctgggggtggagacgaagggcaagtggatgtaccggggggagtggtcacatggtttcaaggggcgctacggggtccggcagagcctgtgcacccccgctcgctacgagggtacctggagtaacgggctgcaagacgggtacggcgtggagacctacggggacggaggtacctaccagggccagtgggccggaggcatgcggcatggctacggcgtgcgccagagcgtgccctacggcatggccacggtgatccgctcaccgctgcgtacctcgctggcctcgctgcgcagcgagcagagcaatggcagcgtgctccacgacgccgcagccgccgccgacagcccggccggcacccgcggcggtttcgtgctcaacttccacgcagacgctgagctagcgggcaagaagaagggcggcctcttccggaggggctcccttcttggaagcatgaaacttcgcaagtccgaatccaagtcttccatctcgagcaagcgcagctctgtccgcagcgacgcggccatgagcagaattagttccagcgatgccaactccacgatcagctttggcgatgtagattgtgatttttgcccggtggaagaccacgtggacgccaccaccacggaaacctacatgggcgagtggaagaacgacaagcgcaacggcttcggcgttagcgagcgctccaatggcatgaagtatgaaggggagtgggcaaataacaagaggcatggatatggctgtaccgtgtttcctgacggctccaaagaagagggaaaatacaaaaataatattctggtccgtgggataaggaagcagcttataccaataagacatacaaaaactagggagaaggtggacagagcaattgaaggcgcccaaagggcagctgccatggccagaaccaaagtggaaatagcaaattcaaggactgcacatgccagagcgaaggccgatgccgccgaccaggccgcgctggccgctcgccaggagtgcgacatcgcgagagctgtggccagggagctgtcacctgatttctaccaaccaggccctgattacgtcaaacagagatttcaggaaggtgtagatgctaaagaaaatccagaagaaaaggtaccagaaaagccacctacaccaaaggagtctcctcatttttatcgcaaaggcacgacacccccaagatctcctgaggcaagtcccaaacacagccactctcctgcttcctccccaaagcccctgaagaagcaaaaccccagctcaggggcgagactcaaccaagacaaaaggagtgtggctgatgagcaggtgacggccattgtcaataagcccttgatgtcaaaggctcccacgaaggaggcaggagcggttgtgccccagtccaagtactctggccgccaccacatccccaaccccagtaacggggagctgcattctcagtatcacggctactacgtgaagctgaacgccccccagcaccctccagtagacgtggaggacggcgatggatccagccagtcttcctcagcactggtgcacaagccatccgctaacaagtggagtccctccaaatctgtgacaaaaccagttgccaaagaaagcaaagctgagccaaaagctaagaagtctgaacttgctataccaaagaatccagcaagcaacgattcatgccctgctttggaaaaagaagccaattcaggccctaattcaatcatgattgtccttgtcatgctgttgaatatcgggttggccattctttttgttcactttctaacttgattggaattaggaaaggtaagaatcgcctt

SEQ ID NO: 44271 - DNA, 519 bp, Homo Sapiens
atgctccacctgcatggctggcaaaccatgcagggtagaaagatggggcacccaccagtctctcccagtgccccggccccagctggcaccacagctatacctgggcttattccagaccttgtcgccgggaccccctggccccgctgggctctcattgccggcgcccttgccgcgggcgtcctcctcgtctcctgcctcctctgtgctgcctgctgctgctgccgccgccacaggaagaagcccagggacaaggagtccgtgggtctgggcagtgcccgcggcaccaccaccacccacctggtgcaacctgatgtggatggcctggagtccagcccgggggatgctcagcaatgggggtgcctgcagctctccctggagttcgactttggaagccaggaggtgaagggccccgctgcgcaggaccagcggttctgcgagtttccggaaagggtgacgggggaagggcagaccccatgccctgggtggtggggagctgacagggcaggggcccttggctga

SEQ ID NO: 44272 - DNA, 408 bp, Homo Sapiens
caactgcaaacgttacgtgaggccctgaggcagcaggtggcagagttggaatttcagttaggagaccgggctcagcaaatcagagaagggattttactgctggaggttctcacagcagagccacctgaacactattcaaatctgcatcaatataactggatagaagaaagcaatgggcagacttcatgttctaaaatccacccaggcatggccccgaggactgtgtttcctcccgatgatggccaggaggctccctgttcaggtgggacccagttggctgccttcactccacccaccttggagaacagcaccaggatgtctccttcatcatcagcttgggcaaagttaggtccaacccctttgtcaaattgtcctgttggagaaaaggatgcagatgtcttcctctag

SEQ ID NO: 44273 - DNA, 1509 bp, Homo Sapiens
ttttcttctcttgaatatatcttaacgccaaattttgagtgcttttttgttacccatcctcatatgtcccagctagaaagaatcctgggttggagctactgcatgttgattgttttgtttttccttttggctgttcattttggtggctactataaggaaatctaacacaaacagcaactgttttttgttgtttacttttgcatctttacttgtggagctgtggcaagtcctcatatcaaatacagaacatgatcttcctcctgctaatgttgagcctggaattgcagcttcaccagatagcagctttattcacagtgacagtccctaaggaactgtacataatagagcatggcagcaatgtgaccctggaatgcaactttgacactggaagtcatgtgaaccttggagcaataacagccagtttgcaaaaggtggaaaatgatacatccccacaccgtgaaagagccactttgctggaggagcagctgcccctagggaaggcctcgttccacatacctcaagtccaagtgagggacgaaggacagtaccaatgcataatcatctatggggtcgcctgggactacaagtacctgactctgaaagtcaaagcttcctacaggaaaataaacactcacatcctaaaggttccagaaacagatgaggtagagctcacctgccaggctacaggttatcctctggcagaagtatcctggccaaacgtcagcgttcctgccaacaccagccactccaggacccctgaaggcctctaccaggtcaccagtgttctgcgcctaaagccaccccctggcagaaacttcagctgtgtgttctggaatactcacgtgagggaacttactttggccagcattgaccttcaaagtcagatggaacccaggacccatccaacttggctgcttcacattttcatccccttctgcatcattgctttcattttcatagccacagtgatagccctaagaaaacaactctgtcaaaagctgtattcttcaaaagacacaacaaaaagacctgtcaccacaacaaagagggaagtgaacagtgctatctgaacctgtggtcttgggagccagggtgacctgatatgacatctaaagaagcttctggactctgaacaagaattcggtggcctgcagagcttgccatttgcacttttcaaatgcctttggatgacccagcactttaatctgaaacctgcaacaagactagccaacacctggccatgaaacttgccccttcactgatctggactcacctctggagcctatggctttaagcaagcactactgcactttacagaattaccccactggatcctggacccacagaattccttcaggatccttcttgctgccagactgaaagcaaaaggaattatttcccctcaagttttctaagtgatttccaaaagcagaggtgtgtggaaatttccagtaacagaaacagatgggttgccaatagagttattttttatctatagcttcctctggg

SEQ ID NO: 44274 - DNA, 1281 bp, Homo Sapiens
gaagagtccaaggatctggctggccgcctgcaatacgccttgcagcgtattcaagaattggagcgggctctctgtgctgtgtctacacagcagcaggaagaggacaggtcctcgagctgcagagaagcggtcctccagtggcggttacagcagaccataaaggagcaggcactgctgaacgcacacgtgacacaggtgacagagtcactaaaacaagtccagctagagcaggacgaatatgctaaacacataaaaggagagagggcccggtggcaggagaggatgtggaaaatgtcggtggaggctcgaacattaaaggaagagaagaagcgtgacatacatcggatacaggagctgaagaggagcttgtccgaactcaaaaaccagatggctgagcccctatccctggcgcccccagcagtgacctctgtggtggaacagctacaagatgaggccaaacacctgaggcaggaggtggaaggtctggagggaaagctccaatcccaggtggaaaacaatcaggccttgagtgtcctgagcaaggaacaaaagcagagactccaggagcaggaggagagactccaggagcaggaggagatgatccgagagcaggaggagatgctccgagagcaggaggcgcagaggaacaatgagaaaaagagcgcactgcagttggagcagcaagtaaaggagctgcaggagaagctagacgaggtgaaggagatggtaacctccaccccatccaagaagggctgggaggcgggcaccagcctctggggaggggaggtgccaggccaaaggcagctccagctgggaggcagctttacggacctcccgaaggagaaggcagatgggacggagcaggtggagagacgagagcttggattcgtccagccttctggagtgacagatggcatgaggggcagtgccaaacacgtggcaccaggagatggaagatgtcatcaggctggcccagaaggaggaggagatgaaggtgaatctgctggagctgcaagagctggtgttgccccttgtgggcaacatgaggggcatggcaaattcctcaccgctgcccagaaccctgctgatgagcccactccagggcccccagccccccaggaactgggggctgccgacccccgcctccctctctccaaagatttttatgaagtgagcctggacaacaatgtggagcctgcaccaggagcggccagggagggttctccccatgacaaccccactgcacagcagatcgtgcagctgtctcctgtaatgcaggac

SEQ ID NO: 44275 - DNA, 510 bp, Homo Sapiens
gttcactattcacttgaccctgacaaccgcacaaaatcatgcaaatcaagaggttcaaatcttcgtgttctctttaagaacactcgtgaaactgcccaggccatcaagggtatgcatatacgaaaagccacaaagtatctgaaaaatgtcactttacagaagcagtgtgtaccatttcgactggggctggacacaaggtcggtggcccaaaaaagtgctgaatttttgctgcacattcttaaaaatgcagagagtaatgctgaacttaagggtttagatgtagattctctggtcattgagcatatcctagtgaacaaagcacctaagatgcaccgttggacctacagagctcatggtcggattaatccatacatgagctctccctgccacattgagatgatccttactgaaaaggaacggattgttcctaaaccagaaaaggaagttgcccagaggaaaaagatatcccagaagaaattgaagaaacaaaaacttatggcaggggagtaa

SEQ ID NO: 44276 - DNA, 1348 bp, Homo Sapiens
gatcttaacaccacgccttgagcaagtcgcaagagcgggaggacacagaccaggaaccgagaagggacaagcacatggaagccagcccagcatccgggcccagacacttgatggatccacacatattcacttccaactttaacaatggcattggaaggcataagacctacctgtgctacgaagtggagcgcctggacaatggcacctcggtcaagatggaccagcacaggggctttctacacaaccaggctaagaatcttctctgtggcttttacggccgccatgcggagctgcgcttcttggacctggttccttctttgcagttggacccggcccagatctacagggtcacttggttcatctcctggagcccctgcttctcctggggctgtgccggggaagtgcgtgcgttccttcaggagaacacacacgtgagactgcgtatcttcgctgcccgcatctatgattacgaccccctatataaggaggcactgcaaatgctgcgggatgctggggcccaagtctccatcatgacctacgatgaatttaagcactgctgggacacctttgtggaccaccagggatgtcccttccagccctgggatggactagatgagcacagccaagccctgagtgggaggctgcgggccattctccagaatcagggaaactgaaggatgggcctcagtctctaaggaaggcagagacctgggttgagcagcagaataaaagatcttcttccaagaaatgcaaacagaccgttcaccaccatctccagctgctcacagacgccagcaaagcagtatgctcccgatcaagtagatttttaaaaaatcagagtgggccgggcgcggtggctcacgcctgtaatcccagcactttggaggccaaggcgggtggatcacgaggtcaggagatcgagaccatcctggctaacacggtgaaaccctgtctctactaaaaatacaaaaaattagccaggcgtggtggcgggcgcctgtagtcccagctactctggaggctgaggcaggagagtagcgtgaacccgggaggcagagcttgcggtgagccgagattgcgctactgcactccagcctgggcgacagtaccagactccatctcaaaaaaaaaaaaaccagactgaattaattttaactgaaaatttctcttatgttccaagtacacaatagtaagattatgctcaatattctcagaataattttcaatgtattaatgaaatgaaatgataatttggcttcatatctagactaacacaaaattaagaatcttccataattgcttttgctcagtaactgtgtcatgaattgcaagagtttccacaaacact

SEQ ID NO: 44277 - DNA, 930 bp, Homo Sapiens
atgaaatcatggaacaatacaataattttagaatttcttctcctgggaatttcagaggaaccagaattgcaggccttcctctttgggctgttcctgtccatgtacctggtcactgtgctcgggaacctgctcatcatcctggccacaatctcagactcccacctccacacccccatgtacttcttcctctccaacctgtccttcgtagacatctgttttgtctctaccactgtcccgaagatgctggtgaacatccagacacacaacaaagtcatcacctatgcaggctgcatcacccagatgtgctttttcttactctttgtaggattggataacttccttctgaccgtgatggcctatgaccggtttgtggccatctgtcaccctctgcactacatggtcattatgaaccctcaactctgtggactgctggttctggcatcctggatcatgagtgttctgaattccatgttacaaagcttaatggtgttgccactgcccttttgtacacacatggaaatccctcattttttctgtgaaattaatcaggtggtccaccttgcctgttctgacacctttcttaatgacatagtgatgtattttgcagtagcgctgctgggcggtggtcccctcactgggatcctgtactcttactctaagatagtttcctccatacgtgcaatctcatcagctcaggggaagtataaggcattttccacctgtgcatctcacctctcagttgtctccttattttatggtacatgcttaggggtgtaccttagttctgctgccacccacaattcacacacaggtgctgcagcctcagtgatgtacactgtggtcacccccatgctgaaccccttcatctacagtctgaggaataaacacataaagggtgctatgaaaacattcttcagaggaaagcaatag

SEQ ID NO: 44278 - DNA, 747 bp, Homo Sapiens
atgatcagagaatggaagaatgactgtcagaggattgaaaaacagagggctagtgacacaatggtgcaagaaaggaagaatgaaaagccagttagaatatttaataccaactcttcctttcaggatcaagccccaacgtgttgccaagaggatctgagttctgcttcaccgttgcggatatggagcaaattctacagatcagacccacggattgcccttgggaaatactcccccttggaaaaagagatcctacgtctaggtggcattcacaccatagcagcaagaaggcttttggcttacaagcaagaggaagaatgcagaatgctcaaggaactacagttgctgtctccggactacaaacaagcaatggagtataaaaagaaacattcctctccttgtgctatttgtgtacccctagaaaaaatatggacagcaaaggtgattgcgcccctggaggcatttaaaatgccacaacgagagcaggtgaacgtcagtaagcacatagagaggatgaggcttgctcgggctctgggaaatcatcagcctttaccctacattgaaaggtttacacgctcctcatttctgtctggggtgggcctgggtccaatggcaaaaaataaggccagacgaaaggaagacaactatgacacccataattgtgatgatgccaaccaagataagaaagaggaggcagagggaaaaaacacaaaaagacgagaaataaaaatgaatgtagttttcaagtca

SEQ ID NO: 44279 - DNA, 618 bp, Homo Sapiens
gaccctgagcccccggccccggccctccagtatctgggccgccagagctcccctccccggaacaactactcagacttgaggcagctcccgaacgctggccccggggcgcccccggctctcggcttctcgcgctttcccgcgggcgcgcgctacgccggggctgggggcctggagcgcttctcgggagggggccgctcgctcataaagaagcgcctgtacgtcggggagccgcaccgaggcccagggctaccccacggtggcaccggccgcagcctgagctctcccaactgcttcgggccgcagcccggaggccccgagatgcggcgcgtgaactcggcgggtcgcgcgccccccggaggcctgcacgcgccgaggctggcttgtcggggcaaatacagaagtatgagcagcatcttttcctctcggtccctcggggagatgagagacgtgttggctaaccagctgcagatattcacctcacatctcttgctctcccccaggtctccctacaccaccacccgctatggaagccccatcaacacgttcaccgtgaggcctgggacccgccatcccatctcctatgtctgctcaggggcccatcggaaagccacctcctga

SEQ ID NO: 44280 - DNA, 252 bp, Homo Sapiens
accggtctctatgagtgctcacccaacctcgggccctggatctggcaggtcaaccagagctggcgcaaagagcgcattctgaacgtgcccctgtgcaaagaggactgtgagcgctggtgggaggactgtcgcacctcctacacctgcaaaagcaactggcacaaaggctggaattggacctcagggattaatgagtgtccggcctgggccctctgccacacctttgagccctacttccccactccagctgcc

SEQ ID NO: 44281 - DNA, 917 bp, Homo Sapiens
aggctctctaccggtgagggtttgcggggaagatggagtatcccgcgccggccacggtgcaggccgcggacggcggagcggccgggccttacagcagctcggagttgctggagggccaggagccggacggggtgcgctttgaccgcgagagggcgcgccgcctgtgggaagccgtgtccggtgcccagccggtgggtagagaggaagtggagcacatgatccagaagaaccaatgtctcttcaccaacacccagtgtaaggtttgctgcgccttgcttatttctgagtcccagaagctggcacattaccagagcaaaaaacatgccaacaaagtgaagagatacctagcaatccatggaatggagacattaaagggggaaacgaagaagctagactcagatcagaagagcagcagaagcaaagacaagaaccagtgctgccccatctgtaacatgaccttttcctcccctgtcgtggcccagtcgcactacctggggaagacccacgcaaagaacttaaagctgaagcagcagtccactaaggtggaagccttgcaccagaatagagagatgatagacccagacaagttctgcagcctctgccatgcaactttcaacgaccctgtcatggctcaacaacattatgtgggcaagaaacacagaaaacaggagaccaagctcaaactaatggcacgctatgggcggctggcggaccctgctgtcactgactttccagctggaaagggctacccctgcaaaacatgtaagatagtgctgaactccatagaacagtaccaagctcatgtcagcggcttcaaacacaagaaccagtcaccaaaaacagtggcatcatccctgggccagattccaatgcaaaggcaacccattcagaaagactcaaccaccttggaagactag

SEQ ID NO: 44282 - DNA, 297 bp, Homo Sapiens
atgtctgttcggggcaaggccggaaaaggccttgggaaaggcggtgccaagtgccatcgcaaggtactgagcgataatattcagggcattaccaagtgcactatccggcgcttggcccggcatggcggtgtcaagcgcatcttgggcctcatttatgaggagacccgccgggtgttcaaggtgttcctggaaaatgtgatctggtacgccgtgaccaacacggagcacgccaagcgcaagacggtcaccgccatggccgtggtctacgtgctcaaacgccagggaagaaccctgtaa

SEQ ID NO: 44283 - DNA, 687 bp, Homo Sapiens
ttcggccttggttccgtggcccatatgcttctaaataaaacatttgggagctaccttggtgtcaacttgggttttggcttcggagtcaccatgggagtgcacatggcaggccgcacctctggagcccacatgaacgcagctgtgagcctcactaactgtgcactgggccgtgtgccctggaggaagtttccagtctatgtgctggggcagttcctgggctccttcctggcagctgccaccatctacagtctcttctacagacaagaactctggatggagactgtaccaagatgtgtctctgctggtgggcttgggtctggggaactgccgaggtcctgtggcttggggaggggcccagcatctgctcctcaggagtggctgaccgggatgctccagctgtgtctcttcgccatcgtggaccaggagaacaacccagcactgccaggaacacacgcactggtgataggcatcctcgtggtcatcatcagggtgtaccatggcatgaacacaggatatgccatcaatccgtcccgggacctgccccgcatcttcaccttcattgctggttggggcaaactggtcttcagcgatggggagaacttgtggtgggtgccagtggtggcaccacttctgggtgcctctctaggtggcatcatctacctggtcttcattggctccaccatccca

SEQ ID NO: 44284 - DNA, 1482 bp, Homo Sapiens
tctccattcaatatttttaaaggattctgaagattcttgtagaaacctggtccctgtacaaagagtggtgtacaatgttctcagtgaactggagaagacatttaacctgtcagttttggaagcactgttcagcgaggtcaacatgcaggaataccccgatttaattcacatttataaaagcttcaaaaatgcaatccaagacaaattgtctttccaagaaagtgatcgaaaagaaagggaagagaggcctgacatcaaactaagtcttaaacaaggagaagtgccagaaagcccggaagcaaggaaggaaagtgaccaagcatgtggcaaaatggatactgtggatattgcaaacaactctactttgggaaaacccaagaggaaaagaagtaagaataaataagaatttacttgcttttgatgttacaaatacatttttaatgccagagttttctttttgtcattgttactgtttctgttattatttgcaatactgtggtagagagaatgatggccaccccaaaaaacgtccacctcctaatccctggacctgtaatctgctatcttacatggcaaacgggactttacagatacaattaatttagagaccttgaaatggggagatgatcctgggttatgtggtgggcccaatctaatcttgtaggctttaaagagtggagaacttttcctggctgtggagaaaggaaaatgtgactatggaagagtcatcagaaacatgtaatgttgcaggctttgaagatggaagagggaaccaaggaatgtggatgacctctagaagctgaaaaaacaaggaaatagtttgtcctttccagcccccagaaaggaatgaaggcctacaccttgactttaggcagtaagacccgtgtcacacttctcactgacataactggaagataatatatttgtgttgttttaaaccactaaatttgtggtaatttgttatggcagcaattaagagtaatacggattttagtacttggcagtggggtgtggctatcacatattcctgaaagtgttggggtgtctttgagattgcgcagtggaaagaggttggaagaattttaaatagagtgataggaaaatcctagatgaaaaaatggaaattaagtcaattaataaccctacaatggcctgtaagtgctcaagttaaagaaagagtcggccgggcgcggtggctcacgcctgtaatcctagcactttgggaggccgagacgggcggatcacgaggtcaggagatcgagaccatcttggctaacacggtgaaaccccgtttctactaaaaatacaaaaaattagccgggcgtgttggcgggcacctgtagtcccagctgcttgggaggctgaggcaggagaatggcatgaacctgggaggcggagcttgcagtgagccaggatcgcgccactgcactccaacctgggagacacagcgagactccgtctcaaaaaaaaaaaaaaaaaaaa

SEQ ID NO: 44285 - DNA, 939 bp, Homo Sapiens
atgcccaattcaaccaccgtgatggaatttctcctcatgaggttttctgatgtgtggacactacagattttacattctgcatccttctttatgttgtatttggtaactctaatgggaaacatcctcattgtgaccgtcaccacctgtgacagcagccttcacatgcccatgtacttcttcctcaggaatctgtctatcttggatgcctgctacatttctgttacagtccctacctcatgtgtcaattccctactggacagcaccaccatttctaaggcgggatgtgtagctcaggtcttcctcgtggttttttttgtatatgtggagcttctgtttctcaccattatggctcatgaccgctatgtggctgtctgccagccacttcactaccctgtgatcgtgaactctcgaatctgcatccagatgacactggcctccctactcagtggtcttgtctatgcaggcatgcacactggcagcacattccagctgcccttctgtcggtccaacgttattcatcaattcttctgtgacatcccctctctgctgaagctctcttgctctgacaccttcagcaatgaggtcatgattgttgtctctgctctgggggtaggtggcggctgtttcatctttatcatcaggtcttacattcacatcttttcgaccgtgctcgggtttccaagaggagcagacagaacaaaggccttttccacctgcatccctcacatcctggtggtgtcagtcttcctcagttcatgctcttctgtgtacctcaggccacctgcgatacctgcagccacccaggatctgatcctttctggtttttattccataatgcctcccctctttaaccctattatttacagtcttagaaataagcaaataaaggtggccatcaagaaaatcatgaagagaattttttattcagaaaatgtgtaa

SEQ ID NO: 44286 - DNA, 541 bp, Homo Sapiens
ggccatcgtccccagtggtgaccagccctgccatgggaaactatagttcccacaaaaggaccaaagcacccaagcaggcccgcaaggagaggccggctgacatggacaaggcctggtggaaatcgttcctcaaccacctcactcggaagaagccggctaccaggatcgtgctgattctccccctggacaagcggcagccgctggccaacgctgggcaacggattgactacgcgtccggcgctgggctgggctccccggcggcacccagattgcgcggagcgggcgaaggtagcgagcgcgagccgaggatgccggtactgctgctgctgcggcggcaagaggcgcggcggccggaagagggcggggccagggcagctctgagctggccgcggctgctctcgcgcttccggtccccggggaaggctccccgcgaagccggccccgccgaggagcagccgcgcaaacggtgccgctgccctcgcccgcagctttaaacgcttggcccggaccccgcccaataaagagtgcgtggcaaccctgg

SEQ ID NO: 44287 - DNA, 162 bp, Homo Sapiens
caagacgagttcagtagacagggattctcacccactcaacaaggacaccaggcacagagatccaaactattatatcaaatccagtccctaaaatggaagaagccaaaagccaaagtttggaggaagactttgaaggacaggccacacatacaggcaagcaaa

SEQ ID NO: 44288 - DNA, 690 bp, Homo Sapiens
atgaaaggagggaaagcgcatcaaacctgtccatttcacaatagaacgtctgtcctcaccggcttagtgatcacgaatgatcctgtctttaattccctgtctgcaaaacgttgttttgaactccaggaaaggtgcctccagaaccccttggagaacttggaattaacttgtggcaacctattagaagaggacttgaagtgtctctcccagttcccaagcctcggttacctaaagcatctgaatctcagctacgtgctgctgttccgcatcagtcttgaacccctaggagctctgctagagaaaattgctgcctctctcgagaccctcgtgttagagggctgtcagatccactactcccaactcagtgccatcctgcctggcctgagctgctgctcccagctcaccaccttctactttggcagcaattgcatgtctattgacgccctgaaggacctgctgcgccacaccagtgggctgagcaagttaagcctggagacgtatcctgcccctgaggagagtttgaattccttggttcgtgtcaattgggagatcttcaccccacttcgggctgagctgatgtgtacactgagggaattcaggcagcccaagaggatcttcattggccccaccccctgcccttcctgtggctcatcaccgtctgaggaactggagctccatctttgctgctag

SEQ ID NO: 44289 - DNA, 2209 bp, Homo Sapiens
acagtcagagggaacgcccgcgcggggagccaggggcgcccgaccccgccgccgccgcagcggcgcgcagcccccgacgcgccctgtggggacccggaccaggagggaccctgccccgggaaaaggctgtggagacctgggctccgaccccagttcatccccccacacccccgccgccccgtgccaccctggtccgcgctgggaaccctatcctgcccctcgtgtcagcccggcactggccagaatcgcgggcatggcggtgaccatgctgcaggactggtgccggtggatgggggtcaacgctcgcaggggcctgctcatcctgggcatcccggaggactgtgatgatgccgaattccaagagtccctcgaggctgccctgaggcctatgggacactttacagtgctaggcaaagcgtttcgagaggaggataatgccaccgcggccctggtcgagctcgaccgggaagtcaactatgctttggtccccagggaaatccccggcactgggggcccgtggaacgtggtctttgtgccccgttgctcaggcgaggagtttctcggtctcggtcgcgtgttccacttcccggagcaagaggggcagatggtggagagcgtggccggcgccctgggtgtggggctgcgcagggtgtgctggctgcgatccatcggtcaggcggtccagccctgggtggaggccgtgaggtgccagagcctgggcgtgttttccgggagggaccagccagccccaggggaggagtcctttgaggtctggctagaccacaccaccgaaatgctgcatgtgtggcagggggtctcggaaagggagaggaggaggaggctgctggaaggcttgcgtgggaccgccctgcagctcgtgcacgcgctcctggcggagaaccccgccaggacggcgcaggactgtctggcggccctggcccaggtgtttggagacaacgagtcccaggcgaccatccgggtgaagtgtctgaccgctcagcagcagtcaggcgagcgtctctcagctttcgtgttgcggctggaagtgctgctgcagaaggccatggagaaggaggccctggccagagcatccgccgaccgcgtgcgcctgaggcagatgctcaccagggcccaccttactgagcctctggatgaagcactgaggaagctgagaatggccgggaggtctccaagtttcttggagatgctggggctcgttcgggagtctgaggcatgggaggccagtctagccaggagcgtgagagcccagacacaggaaggggccggtgcccgggctggtgcccaggctgttgccagagccagcactaaagtagaggcggtcccaggaggtcctggtcgggagccagagggcctcctccaggcaggaggccaggaggctgaggagctcctccaggaggggctcaagcccgtcctggaggaatgtgataactaggttggggctggggaggcagcccagcgcgagtcctccccgggcaaataggctccgagggccccggggcctcctctcctcctctcaggcagcagggccctggagacaggcggaggcggggccagggccggtccctcaccccacatcgggatcggggccccccacttccccccaaggggccctgcccaccaccaccttcccggtgacccagatgaccacatttaataccaaatggggtggggggaggcgcccctccagtgccaggggcacgtgctgtgagcttcctgggagcccaggttgtgctcactgctctcccgtatcgtgagcaccacctctgctttccctgcgtagatctaggccaggggctgcttgtttttgtggagccgtgtgtgttcttctctgagcagctcctccccagaggaccccagcgcagtcccgggagatggcggaaagaaggcaccagggcacagtggacactcatcccgtgacagcgatggtgaccatgactgtgggagaaagaacaggacccgggatggagtggggctgtctgagtttccccagtgaactttgtgctttggcgttccacccctgttgttacttgttactgagtttcctagacctggggtgggtgttcccccaggaggaggggggtcccgacctgtgtcctgtggtggccatttgcagcttctgtgttgtgattcccttctcttcaacggtttcagtacatatctctcttcaataaatttcattcagtgttcc

SEQ ID NO: 44290 - DNA, 465 bp, Homo Sapiens
atctgtagccccttgctgtacagtgtcatcatatccaataaggcttgcttttctctgattttaggggtgtatataataggcctggtttgtgcatcagttcatacaggctgtatgtttagggttcaattctgcaaatttgatttgattaaccattatttctgtgatcttcttcccctcctaaagctctcttgctctagtatctatgtcaacaaactacttattctatgtgttggtgcatttaacatccttgtccccagcctgaccatcctttgctcttacatctttattattgccagcatcctccacattcgctccactgagggcaggtccaaagccttcagcacttgtagctcccacatgttggcggttgtaatcttttttggatctgcagcattcatgcagccatcttcaatcagctccatggaccaggggaaagtatcctctgtgttttatactattattgtg

SEQ ID NO: 44291 - DNA, 1302 bp, Homo Sapiens
ggtcctggaggtcctggagggcctgggggtcctggaaggccaggctggcctaccaagggcaccaggcttccctggggggccagtcctgccactccgggtttccctataccagggaacccagggggccctgggaggcccggctcccctttggggcctggaatcccaggtggtccaatggggccactagggcccccaatccctgggatacctggggggcccaaccctgatcccgggattcctggctctcccttaggtccgagaagccctggaacaccagggagtcctggtacacctttttgcccagcttcccccttgggccctatgggacctggcaaacccctcatgccaggaggccctacttcaccaaggaaacctggctttcctgggaagcctgcctcacccttgggacctggtggcccctgtggccctacaatcccaccttctcctttgggtccaggaaaaccaatagcacctggagggcccataggacctgggattccaggcaggcctggctctcctggaggaccccctattcctggggcacctattggtcctttctcccctcttggtccaagagccccaggaacacctcccatgccccggtcacctttgggtcctgggaagcctggtttcccaatccctggaaggcctgggggtcctggtagccctggcagtccttgctcccctttgccacctggaaatcctggctggcctgggatcccatcctggcctggctttccaattccgggtatcccaggattgaacccccggccaatagggccttgtggcccaggttctcctggagcccctggctttcccagggggccctggggcccagggaagcctgtcactcctggtttgcccactcctggcagtccaacagggccgggagggccgtgcatccctggaggcccctttacacctggcgcacctggcatcccgaagcccttgtctcctttaggacccggccttgaggtcctgagtcctttgggtcctcgatcaccctttggtcctggttgccctggtaaccctggcccacctggcttcccaatgccaggaagtccacctggaggtccttgtggtcctgggatccccataggcccaatttcccctttctgtccaatttctccttttgccccaggcatgcccatggctcctggcttccctggcattccaggcatacctggctttccaactcctggatatccctgtggccctggttttcctttaattccaggtatcccagacctggcaaaccaggggccaggtggtcctcttgggccaggctctccacggggacct

SEQ ID NO: 44292 - DNA, 3496 bp, Homo Sapiens
ttacagtctgctgcaaatcctgagactccaaactcaaccatctccagagaggccagcacccagtcttcatcagctgcagctagccaaggctgggtgttaccagaaggcaaaatcgtgccaaacactgtttttgttggtggaattgatgctaggatggatgaaactgagattggaagctgctttggtagatacggttcagtgaaagaagtgaagataatcacgaatcgaactggtgtgtccaaaggctatggatttgtttcgtttgttaatgacgtggatgtccagaagatagtaggatcacagatacatttccatggtaaaaagctgaagctgggccctgcaatcaggaaacaaaagttatgtgctcgtcatgtgcagccacgtcctttggtagttaatcctcctcctccaccacagtttcagaacgtctggcggaatccaaacactgaaacctacctgcagccccaaatcacgccgaatcctgtaactcagcacgttcaggcttattctgcttatccacattcaccaggtcaggtcatcactggatgtcagttgcttgtatataattatcaggcatttcctgcttatccaaattcaccatttcaagtcgccactggatatcagttccctgtatacaattatcagccatttcctgcttatccaagttcaccatttcaggtcactgctggatatcagttgcctgtatataattatcaggcatttcctgcttatccaaattcaccatttcaagtcgccactggatatcagttccctgtatacaattatcagccatttcctgcttatccaagttcaccatttcaggtcactgctggatatcagttgcctgtatataattatcaggcatttcctgcttatccaaattcaccatttcaagtcgccactggatatcagttccctgtatacaattatcaggcatttcctgcttatccaaattcaccagttcaggtcaccactggatatcagttgcctgtatacaattatcaggcatttcctgcttatccaagttcaccatttcaggtcaccactggatatcagttgcctgtatataattatcaggcatttcctgcttatccaagttcaccatttcaggtcaccactggatatcagttgcctgtatataattatcaggcatttcctgcttatccaagttcaccatttcaggtcaccactggatatcagttgcctgtatataattatcaggcatttcctgcttatccaagttcaccatttcaggtcaccactggatatcagttgcctgtatataattatcaggcatttcctgcttatccaagttcaccatttcaggtcaccactggatatcagttgcctgtatataattatcaggcatttcctgcttatccaagttcaccatttcaggtcaccactggatatcagttgcctgtatataattatcaggcatttcctgcttatccaaattcagcagttcaggtcaccactggatatcagttccatgtatacaattaccagatgccaccgcagtgccctgttggggagcaaaggagaaatctgtggaccgaagcatacaaatggtggtatcttgtctgtttaatccagagaagagactgataaattccgttgttactcaagatgactgcttcaagggtaaaagagtgcatcgctttagaagaagtttggcagtatttaaatctgttggatcctctcagctatctagtttcatgggaagttgctggttttgaatattaagctaaaagttttccactattacagaaattctgaattttggtaaatcacactgaaactttctgtataacttgtattattagactctctagttttatcttaacactgaaactgttcttcattagatgtttatttagaacctggttctgtgtttaatatatagtttaaagtaacaaataatcgagactgaaagaatgttaagatttatctgcaaggatttttaaaaaattgaaacttgcattttaagtgtttaaaagcaaatactgactttcaaaaaagtttttaaaacctgatttgaaagctaacaattttgatagtctgaacacaagcatttcacttctccaagaagtacctgtgaacagtacaatatttcagtattgagctttgcatttatgatttatctagaaatttacctcaaaagcagaatttttaaaactgcatttttaatcagtggaactcaatgtatagttagctttattgaagtcttatccaaacccagtaaaacagattctaagcaaacagtccaatcagtgagtcataatgtttattcaaagtattttatcttttatctagaatccacatatgtatgtccaatttgattgggatagtagttaggataactaaaattctgggcctaattttttaaagaatccaagacaaactaaactttactgggtatataaccttctcaatgagttaccattcttttttataaaaaaaattgttccttgaaatgctaaacttaatggctgtatgtgaaatttgcaaaatactggtattaaagaacgctgcagcttttttatgtcactcaaaggttaatcggagtatctgaaaggaattgtttttataaaaacattgaagtattagttacttgctataaatagatttttatttttgttttttagcctgttatatttccttctgtaaaataaaatatgtccagaagaggcatgttgtttctagattaggtagtgtcctcattttatattgtgaccacacagctagagcaccagagcccttttgctatactcacagtcttgttttcccagcctcttttactagtctttcaggaggtttgctcttagaactggtgatgtaaagaatggaagtagctgtatgagcagttcaaaggccaagccgtggaatggtagcaatgggatataatacctttctaagggaaacatttgtatcagtatcatttgatctgccatggacatgtgtttaaagtggctttctggcccttctttcaatggcttcttccctaaaacgtggagactctaagttaatgtcgttactatgggccatattactaatgcccactggggtctatgatttctcaaaattttcattcggaatccgaaggatacagtctttaaactttagaattcccaagaaggctttattacacctcagaaattgaaagcaccatgactttgtccattaaaaaattatccatagtttttttagtgcttttaacattccgacatacatcattctgtgattaaatctccagatttctgtaaatgatacctacattctaaagagttaattctaattattccgatatgaccttaaggaaaagtaaaggaataaatttttgtctttgttgaagtatttaatagagtaaggtaaagaagatattaagtccctttcaaaatggaaaattaattctaaactgagaaaaatgttcctactacctattgctgatactgtctttgcataaatgaataaaaataaactttttttcttcaaa

SEQ ID NO: 44293 - DNA, 450 bp, Homo Sapiens
tttcacctgcagttgaagatccgtgaggtgcccagaagatcatgcagtcatcagtcccacggagcagcccgcgaggctgaggctcctcccactggaccgccccccaactggcaccactgctgcccctgcccctactctcagcctcacgtgactctcgggcagaggcagtggtggggcagccagggcagcgtcaagagtctgagccagctgcaggacaaattcgagcatcttaaaatgattcaacaggaggagataaggaagctcgaggaagagaaaaaacaactggaaggagaaatcatagatttttataaaatgaaagctgcctctgaagcactgcagactcagctgagcactgatacaaagaaagacaaacatcctgatccatatgaattcctcttattaagaaaaataaagcatccaggattcaatgaagaactatcaccttgttaa

SEQ ID NO: 44294 - DNA, 783 bp, Homo Sapiens
aagatgccgaaaggaaagaaggccaaggggaagaaggtggttccggcccctgctggcatgaagaaacaggaggccaagaaagtggtgaatcccctgtttgagaaaaggcctgagaattttggcattggacaggacatccagcctaaaagagaactcacccactttgtgaaatggccccgctatatcaggttgcagcggcagagagccaccctctataaacggctgaaagtgcctcctgtgattaaccagtttacccaggccctggactgccaaacagctactcagctgcttaagctggcccacaagtacagaccagatccaaagcaagagaagaagcagaggctgttggcctgggccgagaagaaaactgctggcaaaggggacatccccactaagagaccacatgtccttcgagcaggaattgacaccgtcaccaccttggtggagaacaagaaagctcagctagtggtgatagcacacaacgtggatcccatcgggctggttatcttcttgcctgccctgtgtcgtaaaatgggggtcccttactgcattatcaaggggaaggcaagactgggccgtctagtgcacaggaagacctgcaccactgtcgccctcacacaggtgcacttggaagataaaggcggtttagctaagctggtggaagctatcaggaccaattacaatgacagatatgatgagatccgccgtcactggggtggcaatgtcctgggtcccaagtctgtggctcgcatcgccaagcttgaaaaggcaaaggctaaataa

SEQ ID NO: 44295 - DNA, 945 bp, Homo Sapiens
atgggtgtaaaaaaccattccacagtgactgagtttcttctttcaggattaactgaacaagcagagcttcagctgcccctcttctgcctcttcttaggaatttacacagttactgtggtgggaaacctcagcatgatctcaattattaggctgaatcgtcaacttcatacccccatgtactatttcctgagtagtttgtcttttttagatttctgctattcttctgtcattacccctaaaatgctatcagggtttttatgcagagatagatccatctcctattctggatgcatgattcagctgttttttttctgtgtttgtgttatttctgaatgctacatgctggcagccatggcctgcgatcgctacgtggccatctgcagcccactgctctacagggtcatcatgtcccctagggtctgttctctgctggtggctgctgtcttctcagtaggtttcactgatgctgtgatccatggaggttgtatactcaggttgtctttctgtggatcaaacatcattaaacattatttctgtgacattgtccctcttattaaactctcctgctccagcacttatattgatgagcttttgatttttgtcattggtggatttaacatggtggccacaagcctaacaatcattatttcatatgcttttatcctcaccagcatcctgcgcatccactctaaaaagggcaggtgcaaagcgtttagcacctgtagctcccacctgacagctgttcttatgttttatgggtctctgatgtccatgtatctcaaacctgcttctagcagttcactcacccaggagaaagtatcctcagtattttataccactgtgattctcatgttgaatcccttgatatatagtctgaggaacaatgaagtaagaaatgctctgatgaaacttttaagaagaaaaatatctttatctccaggataa

SEQ ID NO: 44296 - DNA, 333 bp, Homo Sapiens
atgtctggagcccctgatgtcctgcaaatgaaggaggaggatgtccttcagttccttgcagcaggaacccacttaggtggcaccaaacttgacttccagatggaacagtacatctataaaaggaaaagtgatggcatctacatcataaatctgaagaggacctgggagaagcttccgttggcagctcgtgccattgttgccattgaaaaccctggtgatgtcagtgttatatcctcctggaatactggccagagggccatgctgaagtttgctgctgccactggagccactccaattgctgaccgctttactcctggaaccttcactaactag

SEQ ID NO: 44297 - DNA, 922 bp, Homo Sapiens
ggctcttcgcgcgcagtcccttagggggcgcctggaagcccggcgcatgcgccctgagggctcgctgacctaccgggtgccagagaggctgcggcagggttcctgtggcgtgggtcgggcagcacaggccttggtgtgtgcgagtgccaaggagggcaccgccttcaggatggaggctgtgcaggagggggcggccggggtggagagtgagcaggcggctttgggggaggaggcggtgctgctgttggatgacataatggcggaggtggaggtggtggcggaggaggagggcctcgtggagcggcgggaggaggcccagcgggcacagcaggctgtgcctggccctgggcccatgaccccagagtctgcactggaggagctgctggccgttcaggtggagctggagccggttaatgcccaagccaggaaggccttttctcggcagcgggaaaagatggagcggaggcgcaagccccacctagaccgcagaggcgccgtcatccagagcgtccctggcttctgggccaatgttattgcaaaccacccccagatgtcagccctgatcactgacgaagatgaagacatgctgagctacatggtcagcctggaggtggaagaagagaagcatcgtgttcatctctgcaagatcatgttgttctttcggagtaacccctacttccagaataaagtgattaccaaggaatatctggtgaacatcacagaatacagggcttctcattccactccaattgagtggtatccggattatgaagtggaggcctatcgccgcagacaccacaacagcagccttaacttcttcaactggttctctgaccacaacttcgcaggatctaacaagattgctgagatcattagccagggcctatggctcaatccattggagttctaccccagggagtga

SEQ ID NO: 44298 - DNA, 414 bp, Homo Sapiens
atggcgagcccctttgggcgcctcactgatcagaagggcagaggacaccctgctggatctggaggagtggaagtcaatggcgggtctgcgagggcggcgttcagcggtggtggacggagggtgttgagcggtggtggacggacggccttcggcggtggtggacggacggccttcggcggtggtggacggacggccttcggcgttggtggacggacggccttcggcggtggtggacggacggccttcggcggtggtggacggacggccttcggcgttggtggacggacggctttcggcggtggtgaacgagtctcactcttgtcaccaggctggagtgcattggcgcgatcttggctcactgcatcctctgcctcccgggttcaagcgattctcctgcctcagcctcccgagtag

SEQ ID NO: 44299 - DNA, 1263 bp, Homo Sapiens
atgggaaaggaaaagactcatatcaacattgtcgtcattggacacatagatttggtcaagtccaccaccactgatcatctgatcaacaaatatggtagcatcaacaaaagaaccatcgaaaaatctgctgagaaggaagctgctgagatggaaaagggctccccccatgcctgggtcttggataaactgaaagctgacactgaacgtggtatcactattgatacctccccatggaaatttgatgtctcaggacacagagattttatcataaacatgaatccaggcacatctcaggctgactttcctgtcctgattgttgctgctgacattggtgaatttgaaggcatctccaagaatgggcagaccgatgatcatggtgctcttgcttatacactgggtatgaagcaaccaattgttggtgtttacaaaatgaattccactgagccaccctatggccagaagaggattgcaaaaaacgatagcacttatattaagcaaattggctacaacccggacacagtaacatttgttccaatttctggttcaaatagtgacaacacgctcaagtcacatgctaacatgcattggttcaagggatggaatacccataaagatggcaatgccagtggaaccatgctgcttgacactctggactgcatcctaccaccaactcatccaactaataagcccttgtgtctacctctccaggatgtctgcaaaactgatggtcgtggtactatgcttgtaggccaagtggagactggtgttctcaaaccaaatatggtggtcactcttgctccagtcaatattataactgaagtaaaagtctctttgagtgaagctcttcctggggacaatgtgggcttcaatgtcaagaatgtgtctgtcaaagatgtttgttgtggcaaagttgctagtgacagcaaaaatgacccaccagtggaagcagctggcttcattgttcaggtgattatcctgagctgtccaggccatattggtgctgaccatgcccctctaatgaattgtcacacatttcacattgcttgcaagtttgctgagctgaaggaaaagattgattgctgttatggtaataagctggaagatagccctaaattcttgaagtctgatgatgttgccattgttgatatggctcctggaaagcccatgtgtgttgagaagttcttggacaatcctcctctgggtcgttttgctgtttgtgatatgagacagacagttgccgtggatgtcatcaaaacagtggac

SEQ ID NO: 44300 - DNA, 165 bp, Homo Sapiens
atgccactgcactccagcctgggtgacacagccaaaaaaaaaaccactaagttagatctctacctcacagtgtccatacaaattagttccagagggaagatataccacaaaattactcaaaaatttttatacctctggtgtgggacggtcttttctaaactttaa

SEQ ID NO: 44301 - DNA, 1527 bp, Homo Sapiens
agttgcagaaagaagaaaggaaagggaaagaaaagtgttcagaaatctttatatggggaaagagacattgcttctaagaagcccctcctcagtcctattcccgagctgcctgaagtccctgagatgacaccttccattccgagcatccgaagactgggttcaggttatttcagttcaaatggcaaactggaagaagtgaagactcctaaaaatccagtgaaaagaaaggatcttttgcgtcatgacccagatttgcatatgcatcaaggctatgataaatatgatgtctctgaattctgctcttatataaaaagttcctcatcgcttggcaatgctacttctgatgaagatccaaatacaaatataatgaacattaatgaaaataaaaatattccaaaagcaaaaaataagtcagaaagtgaaaatgaaccaaaagctggaactgacagtcctgtttcttgtgcttctgtaactgaagaacgtgtggcatcagatagtcccaaacctgctctgaccctgcagcagggtcaagaattttctgctggtggtcaaaatgcagaaaacctttgtcagttctttaaaatttcaccagatttaaacataaagtgtgaaagaaaggatgacttcttaggagctgcagaaggaaaactgcaatgcaatcgtttaatgcctaattcacaaaaagactgtcattgtttaggagatgtcttaattgaaaatacgaaagaatctaaaagccagagtgaggatttgggaagaaaacccatggaaagtagcagtgttgtgagttgcagagacaggaaagatagaagacgttccatgtgttattctgatggtcgaagtttacatttggaaaaaaatggaaatcacacaccatcctccagtgtgggcagctctgtagaaattagtttagaaaattctgaactgtttaaagatttgtctgatgccattgagcaaacctttcagaggagaaatagtgaaaccaaagtgcgacgtagcacgaggctacagaaggatttagaaaacgaaggtcttgtatggatttcacttccacttccttccacttcccaaaaagccaaaagaagaacaatatgtacatttgacagcagtggatttgaaagtatgtctcccataaaagaaactgtgtcctccagacaaaaaccgcagatggcacctcccgtctcagatccagaaaacagccagggccctgctgctggttcttccgatgaacctggtaagaggaggaagagcttttgtatatctacacttgcaaatactaaagccacttcccagttcaaaggctaccggagaagatcctctcttaatgggaagggagagagctctctgactgccttggaaaggattgaacataatggagaaagaaagcagtaattgacatttcctgcagagtctgtggcaagagggaaagtaaccatctatgctgaaatgatctgtctagttcccattctctgttcaacctcagtgtttcaaaagttcctaataaataaactcatttgagttgaacct

SEQ ID NO: 44302 - DNA, 408 bp, Homo Sapiens
atgaaactgctcacccacaatctgctgagctcgcatgtgcgggggatggggtcccgtggcttccccctgtgcctccaggccaccgaggtccgtatctgccctgtggagttcaacccccaatttatgtggcatcatacgtggcacgtatcatacgtggtacatatgatacctaaggtggagtggtcggcgttcctggaggcggccgatagcttgcgcctgatccagatgcctaaagggccagttgagggatatgaggagaatgaagagtttctgaggaccatgcaccacctgctgctggaggtggaagtgatagagggcaccctgcagtgcccggaatctggacgtatgttccccatcagccgcgggatccccaacatgctgctgagtgaagaggaaactgagagttga

SEQ ID NO: 44303 - DNA, 417 bp, Homo Sapiens
atgcggaaaccgagacgggctggatgggaaactctttccaggaaggctccggggccctcagctggtctccgaccttcccctgcaacctgtgacacctgccattttcccatcttaggcgatggcaacgccacccttccgtttgctccgggcaaaacttcgagagttccctctgactctggagttttttcctcagatccaagagccaactggtcatcaattcgtaatttcccatcggctaagtgcgtgggcattgagctacacgcgagtctctccacctctgcggaatggctacttcggggtaggggaggggccctcccgtggattgtaaggggaaaccagctgctcactttggtcttgtccgcaacggacctcttgctgccaggaaagaaaggcgtcgagtcctgtcctgttgggtag

SEQ ID NO: 44304 - DNA, 702 bp, Homo Sapiens
atgtggggctacctgtcgctgatgcctgtcttcctagctgtctgggctatctctggcgtctggatcgtttttgccattgcagtgaccaacaggactgtggacctcagtaaaggctttccctacatcagcatctgcggatccttcccccctcagagctgcatcttcagccaggtgctcaatatgggagctgctctggccgcgtggatctgcattgtccgttaccaccagctccgggactggggcgtcagaaggtggcctaaccagctgatcctatggacgggtcttctgtgtgccctgggcacctccgtggtaggcaatttccaggaaaagaaccagcggcctacgcacttggcaggggccttccttgccttcatcttgggtaacgtctacttctggctgcagctcctcctgtggaggctgaagaggctgccccagcccggggctgcctggattgggcccctccgcctgggcctctgcagcgtctgcaccatcctcattgtggccatgatcgtcctccacgcctgctcgctgcgtagcgtctctgcggcctgcgagtgggtcgtggccatgctgctgttcgcgctcttcggtctcttagccgttgacttctccgccctggagagctgcaccctgtgtgttcagccgtggcccagcctcagccccccgccggcctcccccatctccctgccggtccagctgtag

SEQ ID NO: 44305 - DNA, 1515 bp, Homo Sapiens
tttttgaggaagtagacaaacctaaatatgtgtctgaactccaaggaatatgaacaagatgcctgctggtgaacaagaatgtgaatataacaaagaagggaagtactactctaaaggagttaaactggtgagaaaaaagaaaaaaattcctggttaccgttggggggacattaagataaacatcataggtgaaaaggatgatttaccaattcatttctgtgacaaatgtgatttgcctattaaaatctatgggcgaataattccgtgcaagcatgctttttgctatcactgtgctaatttatatgacaaagtcggatataaagtatgtccgcgctgtcgttatcctgtgctgagaattgaggcgcataaacgaggttctgtcttcatgtgtagtattgttcagcagtgcaagagaacatacttgtctcagaaaagcttacaggctcatatcaaacgccgccataagagagctcgaaaacaagttaccagcgcttcgcttgaaaaagttcgtcctcatattgctccgccacaaactgaaatctctgacatccctaaaagactgcaagacagggaccatctaagctatattccaccagaacagcacaccatggtgtcactaccgtctgtgcaacatatgctacaagagcaacataatcagccacataaggatatccaggctcctcccccagaactatctctaagtctgccttttcccatccagtgggaaaccgttagtatttttacgagaaaacatggcaatttaacagttgatcatattcagaataactcagattctggtgctaagaagccaacacctcccgactattatcctgagtgtcaaagtcaaccagcggtatcgtcccctcatcatattatacctcagaaacagcattatgcgccacctccatctccatcatcaccagtaaaccatcaaatgccatatcctcctcaggatgtagttactcctaactcggttcgtagccaagtgccagctctaaccacgacctacgatccatcatctggatatattattgtaaaggtgccacctgatatgaattctcctccactacgtgctccccagtctcaaaatggtaatccatctgcaagtgaatttgcttctcaccattataaccttaacattttacctcagttcaccgaaaatcaagaaaccttgagccctcagtttacacaaacagatgcaatggatcatagaaggtggcctgcatggaaacgactgtcaccttgtccaccaacgcggagtccacctccttcaaccctacatggtcgatcacatcattcacaccagagaagacatagacggtattaaggatgataacagtatttggaactgaagacctgatgggaaaaaaaccttcaagttctatactgtactgtggataagcggctcagttcagcagagctggagttgaacaactttgttcctctggtgtggtaaattgacctaaaggtgacctctgacgatttcctgaaataaatatgcaatgttacattttc

SEQ ID NO: 44306 - DNA, 795 bp, Homo Sapiens
cccgagacccgcccccagccctcctcaagtcacagactctccccggcaccccagagacaccctcagaccccagggacgccagagacctcgaccccgcctgccggggacctcggggctcctcagagaccctccccaagccctcctcagcccacagattccttcagggaccccagagacaccctcagaccccagggactccggacaccccgaccccgcctgccagagacccccacagaccctgggaccccggccctcctcggagaccctcccccaggcctcgtcagcccacagattccctcagggaccccagagacaccctcagaccccaggaactccggagaccccgaccccgcctgcccgggacaccggccctcctcagagaccctggagaccctccccctcagccctcaggccatagactcccccctgggacctcagagacaccctcagactccagggactccggagaccccaaccccacctgctggggacccccacagaccctgggcccccagccctcctcagagacccccaaagaccccgaggcactggccctccccagagaccctgagaccctccccacagccccctcagcccacaggatccccccacaaaaccccagagactcccacaggccccaaggactctggagactccgaccccacaggccagagacccccacagaccctgagaccccggccctcctcagagactcgagacacccacagaccctgggccccctcccgccggccctctttagtccacagacccctccttggagaccccagtgcaccc

SEQ ID NO: 44307 - DNA, 1119 bp, Homo Sapiens
atggagttccctgagcacggcggacggctgctgggccgcctgagacagcagcgcgagctgggcttcctatgcgactgcaccgtgctggtgggcgacgcgcgcttcccggcccaccgtgccgtgctggccgcgtgcagcgtctacttccatctcttctacagggaccggcccgcgggcagtcgcgacacggtgcggctcaacggcgacatcgtcacggcgcccgccttcggccgcctactggacttcatgtacgagggccgcctggacctgcgcagcctgcctgtggaggacgtcctggcagccgccagctacctgcacatgtatgacatcgtcaaggtctgcaagggcaggctccaggagaaggatcgaagtctggacccggggaaccctgcccctggggcagaacctgctcagccaccgtgcccctggcctgtctggaccgcggacctctgcccagctgcccgaaaggccaagctccccccgtttggggtcaaggctgccctccctcctcgagcatctgggcctcctccctgccaggtcccagaagagtcagaccaggccctggacctgtcgttgaagtctggcccaaggcaggagcgggtccacccaccgtgcgtcctccagacacccctctgcagccagaggcagccaggggcccagccactggtgaaggacgaacgggactcactgtccgaacaggaggagagcagcagctctaggagcccccacagtcccccgaagccactcctcaagctgtttcccagctcccacgtgctgcagctgcacctcagtgcccacttccgtgagcgagacagcacccgggcccggctctcacccgacggcgtggcacccacctgcccgctctgtgggaagaccttctcgtgcacatacacactgaagaggcacgagcggacacactcgggtgagaagccctatacgtgtgtgcagtgtggcaaaagttttcagtactcccacaacctgagccggcacaccgtagtgcacactcgagagaagccgcatgcctgccggtggtgtgagcgccgtttcacgcagtccggggacctctaccgccacgtccgcaagtttcactgtggcctcgtcaagtcccttctggtgtga

SEQ ID NO: 44308 - DNA, 465 bp, Homo Sapiens
atggcagatgatttggacttcgagacaggagatgcaggggcctcagccaccttcccaatgcagtgctcagcattacgtaagaatggctttgtggtgctcaaaggctggccatgtaagatcgtggagatgtctgcttcgaagactggcaagcacggccacgccaaggtccatctggttggtattgacatctttactgggaagaaatatgaagatatctgcccgtcaactcataatatggatgtccccaacatcagaaggaatgacttccagctgattggcatccaggatgggtacctatcactgctccaggacagcggggaggtaccagaggaccttcgtctccctgagggagaccttggcaaggagactgagcagaagtacgactgtggagaagagatcctgatcacggtgctgtctgccatgacagaggaggcagctgttgcaatcaaggccatggcaaaataa

SEQ ID NO: 44309 - DNA, 711 bp, Homo Sapiens
atggcggagccatcggcggccactcagtccccttccatctcctcgtcgtcctccggagccgagacgtccgcatccggcggcagcggaagcccaggagcctgccctgccctggggacgaagagctgcagctcctcctgtgcggttcacgatctgcttttctggagagatgtaaagaagactgggtttgtctttgccaccacgctgatcatgctgctttccctggcagctttcagtgtcatcagtgtggtttcttacctcatcctggctcttctctctgtcaccatcagcttcaggatctacaagtccgtcatccaagctgtacagaagtcagaagaaggccatccaatcaaagcctacctggacgtagacattactctgtcctcggaagctttccataattacatgaatgctgccgtggtgcacatcaacagggccctgaaactcattattcttctctttctagtagaagatctggttgactccttgaagcaggctgtcttcatgtggctgatgacctatgttggtgctttttttaacggaatcacccttctaattcttgctgaactgctcattttcagtgtcccgattgtctatgagaagtacaagacccagattgatcactatgttggcatcgcccgacatcagaccaagtcaattgttgaaaagatccaagcaaaactccctggaatcgccaaaaaaaaggcagaataa

SEQ ID NO: 44310 - DNA, 1537 bp, Homo Sapiens
atggagtttcttgggactactcagaccgccagttactgtggtcccaagaaatgctgtggcttgacctcactgccagctgtacaggcgccagtgatccaggaatgctatcagccctactacctgcccgggtaccgctacctcaattcatggaggcctagcctcttctacaagatagccaacgtccagacctgcccggacgagagcaccagtaccctgcggccgcccaccatcctgcccacactgcgctccgcactcttctctcgctatagcccccacgactgggaccagtccaaccagctgcaggtgcgtggggccgaggcctcccggctgtgggccagccggctgacggatgactccatgaggctcttgcaggacaaggaccagctgacgcaccagatgcaggagggcacctgccggaacctgggccagaggctgtcggacattggcttctggaagtcagagctgagctatgagctggacaggcttctgactgagaaccagaacttggagacggtcaagaggcggctggagtgcgcggccaatgaggtgaactgcccattgcaggtggccttggagtgtctgtaccatcgagagaagaggattgggattgatttggtccatgacaacgtggagaaaaaccttatccgggaagtggatttgctaaaatgttgccaagaacagatgagaaaattagctcaaagaattgatatccagatgcgggataaccgggatgctcagcacgtgctggagagggacctcgaagacaaaagctcggcccagtgtatcgatgagaagtgctttaacctgagaaatacgtcagactgcatcagcttcttccacggcatggagaaaattgacggcacgatctccgtacctgagacctgggccaagttcagtaacgacaacatcaaacactctcagaacatgcgggccaactccatccagctgcgggaggaggcggagcacctctttgagaccttgtcggatcagatgtggaggcagttcacagacaccaacctggccttcaacgcccgcatctctgaggtgacggatgtgaagaataagctgcagacgcagctggcgaagacgctgcaggagatcttccaggccgagaacaccatcatgctgctggaaaggtccatcatggccaaggagggcccgctgaaggtggcccagacaaggctggagtgccggacccggcgccccaacatggagctgtgcagggacatcccgcagttgaagctggtgaacgaggtgttcaccatcgacgacaccctgcagaccctcaagctgcggctgcgggagacacaggacacgctgcagctgctggtcatgaccaagtgccggctggagcacgagctcgccatcaaggccaacaccctctgcatcgacaaggagaagtgcatgggcatgcgtaagaccttcccctgcaccccgcgcctggtgggccacacctgagcaccgccctggcgcctcattccgcgctggcgtaaaattggaaaaggctgagaaacaaagtaaaacagtattttgtttg

SEQ ID NO: 44311 - DNA, 1619 bp, Homo Sapiens
gagccggtgccgctgcaggacttcgtgcgcgccttggaccccgcctccctcccgcgcgtgctgcgggtctgctcgggggtctacttcgagggctccatctatgagatctctgggaatgagtgctgcctctccacgggggacctgatcaaggtcacccaggtccgcctccagaaggtggtctgtgagaacccgaagaccagccagaccatggagctcgcccccaacttccagggctacttcacccccctcaacaccccacagagctatgaaaccctggaggagctggtctctgccacaactcagagctccaagcagctgcccacttgcttcatgtcgacccacaggattgtcacagagggcagggtggtgactgaggaccagctcctcatgcttgaggctgtggtgatgcacctcgggatccgctctgcccgctgtgtcctgggcatggagggtcagcaggtcatcctgcacctgcccctatcccagaaggggcccttctggacatgggagcctagtgcccctcgaactctgctccaggtcctacaggatccagccctgaaagacctcgtcctcacctgccccaccctgccctggcattccctgatcctgcggccccagtatgagatccaagccatcatgcacatcttctcaagtcttaggattgcagcaacacgctcggctgcccaaacccaaggcgaagaccttgccagagttcatcaaggatggctccagtacgtacagcaagattcctgcccacaggaagggccacaggcccgctaagccccaaaggcaggatctagatgatgatgaacatgattatgaagaaatacttgagcaatttcagaaaaccatctaagtgctggaggaaccacgcttcctaactgctgcttctcagggaatccgacaccagccaaccattttaagcctctaaaagacctcgggcaagtctcacagaaactgagctgcagacggggagtagctttgtggaaactgatttgatggacactgcaccagcttccttcaggttctagattcttgctacttagggcgggctggtttggacctaacatctcgcacgtgactccctcagcctcagagccttgggatgcagagcagctggcagggttcctctcaatcctgcaaccccagctgtcccaccggtggatgcagaggggaatccgaggccatcaaccttggtgacagcagcgcagtgccaatgctgatcacactgcatgggagattttgttaacgtctgccacccccactctcacccccaagctctaagcccccgggaggcctggactgtcttcctcatctctgtagcaccaagcctgatagatctgtatatggtaaacaggggtttaaccacatgtggttaacatggattaatgtgggaacttggcttcaagaacacaaccttaggaccttgggccccaaaagctggtggtgaaatgaggaggagccaatttaagaagacccttatggagacctgaggctgcagaaactggtaggtttcatcaggtggttaaagtcgtcaaagttgtaagtgactaaccaagattatttcattttaaaaccatagaataaaaatgacacctgagcttctctatgaatgagaa

SEQ ID NO: 44312 - DNA, 2038 bp, Homo Sapiens
tttccggcaccggcatggccgggtgagctgcaggctaccttatttaagaccgggaatttagtcagcctggtgagccgactctgaggagatggagtatcgctgaggtgatgagagagaatgtggttgttagcaacatggagagagaaagtgggaagcccgtggctgttgtcgcagttgtgactgagccttggtttacccagcgatacagagaatatctccagaggcagaaactctttgatacacagcaccgtgtggaaaagatgccggatggctcggtggcgctaccggtgctgggagagacgcttccagagcagcacctgcaggagctgaggaatcgtgttgccccaggcagtccctgtatgctcacgcagctcccggatcctgttccttcgaagagggcccagggttgttcacctgcccaaaaattgtgtcttgaggtgagtcgctgggtggagggtcggggagtcaagtggtcagccgagttggaggctgatttgccccgatcatggcaacggcatggtaatctcttgttgctgagtgaagactgtttccaagccaagcagtggaaaaatctgggaccggaactctgggagaccgttgccttggcacttggcgtccagcgtttggcaaaacgagggcgggtatcaccggatggtactcgaactccagcagtgacactgctgctgggtgaccatggctgggtagagcatgtggataatggtatccgttataagtttgacgtgacccagtgtatgttctcctttggaaacatcactgagaagcttcgagtggcatcgttgtcctgtgctggagaagtgctggtggatctctatgcagggattggttattttacattgcctttcctagttcatgctggtgctgccttcgtccatgcttgtgagtggaatccccatgctgtagttgctctgagaaataaccttgagatcaatggagtagcagatcggtgccaaatacactttggagataacagaaaactgaagctctcaaatattgcagatagggtgatcctggggctgattcccagctctgaagaaggctggcccattgcctgccaagtgttaaggcaggatgctggaggcattttgcatatccaccaaaatgtggaatctttcccagggaagaatcttcaggctcttggagtcagcaaagtagagaaagagcattggctgtatcctcagcaaattaccaccaaccaatggaaaaatggagctaccagggattctaggggaaaaatgctgtcaccagccaccaagccagagtggcaaaggtgggcagaatctgcagaaactcgaatcgccactcttcttcagcaggtgcatgggaaaccatggaagacacaaattctgcacatccaaccagtgaaatcctatgctccccatgtggatcacatagtcctggatctggaatgctgcccctgtccttcagttggctagaggaggtagatcctgggacacatgggatccacgtgcgagtggcccttaaatgtatcagttcagtccaggttgtcatcccttttgtcccctggtgatcagtttttttcatattttatagccctgaaagcaggctctagatcaattcaaattatttcatttgtctttcattgataacagaaaatgaaatacctgtttgggagaagcagcatggcccattgaaatgaggctcatctgtgcaattatgaattccaaattctgacctcagttctggaattgaagtttcagtatgttttggcctcgggtttcgttatttgcaaaatgagagtttctttgaactgtctcacgtgactattaagcaactatacacaggacatcggttattttagagtgaaagacacagtgctttttccaaattgctctggctaccatatagaaaattgactgaaggagggccaagatggaaacagagagaccagtgaggaggcttctgtggttgtccaggtctgaggtgatggtaacttggactcggatggtggtaatgggaggtagattgatatgataaataaaattgacagaccaagcaa

SEQ ID NO: 44313 - DNA, 477 bp, Homo Sapiens
atggctgcagccaacaacggcaacaagcccagagtccggaggagtatctgctttgcggcaggccacgatacagagggctcccatagccacgtctgctttgatgagaggcttcatgactcggtggtcatggccacccaggacagcgacagcagctttctggtcaaggttggcttcctgaagatcctgcgcaggtatgagattaccttcactcttcccccggtgagcaagcacgtccgtgaggcacctgttcctctgcatgtcaagctcctcagcgttgttcctgtccctgaaggttacagtgtcaagtgcgagtactcagcgcacaaagagggtgtcctcaaagccgcgatgctgccagcctgcgaaggtggcgccggcgcctgtgtgagcgtggcagtgcaggctggcgccaggggccgacaccacggcatgcccctgctggacggtgtcaagggctcgggcgccgcgctggaataa

SEQ ID NO: 44314 - DNA, 1016 bp, Homo Sapiens
agcgacctcagaggagtaaccgggccttaactttttgcgctcgttttgctataatttttctctatccacctccatcccacccccacaacactctttactgggggggtcttttgtgttccggatctccccctccatggctcccttagccgaagtcgggggctttctgggcggcctggagggcttgggccagcaggtgggttcgcatttcctgttgcctcctgccggggagcggccgccgctgctgggcgagcgcaggagcgcggcggagcggagcgcgcgcggcgggccgggggctgcgcagctggcgcacctgcacggcatcctgcgccgccggcagctctattgccgcaccggcttccacctgcagatcctgcccgacggcagcgtgcagggcacccggcaggaccacagcctcttcggtatcttggaattcatcagtgtggcagtgggactggtcagtattagaggtgtggacagtggtctctatcttggaatgaatgacaaaggagaactctatggatcagagaaacttacttccgaatgcatctttagggagcagtttgaagagaactggtataacacctattcatctaacatatataaacatggagacactggccgcaggtattttgtggcacttaacaaagacggaactccaagagatggcgccaggtccaagaggcatcagaaatttacacatttcttacctagaccagtggatccagaaagagttccagaattgtacaaggacctactgatgtacacttgaagtgcgatagtgacattatggaagagtcaaaccacaaccattctttcttgtcatagttcccatcataaaataatgacccaaggagacgttcaaaatattaaagtctattttctactgagagactggatttggaaagaatattgagaaaaaaaaccaaaaaaaattttgactagaaatagatcatgatcactctttatatgtggattaagttcccttagatacattggattagtccttaccagtagac

SEQ ID NO: 44315 - DNA, 981 bp, Homo Sapiens
atgcagccgccggtgcccgggcccctgggcctgctggaccccgcagaagggctttcgaggaggaagaagacgtcgctctggtttgtggggtctctgctgctggtgtccgtcctcatagtcaccgtcgggctggctgccaccaccaggacggagaatgtgaccgttgggggctactacccagggatcattctcggctttggatctttcttaggaattattggcatcaacttggtggagaatagaaggcaaatgctggtggcagcgatcgtgtttatcagttttggcgtggtggccgccttctgctgcgccatcgtggacggcgtatttgcagcacagcacattgaaccgaggcccctcaccacgggaagatgccagttttactccagtggggtggggtacttgtacgatgtctaccagacagaggtcacctgtcactccctggacggcaagtgccagctgaaggtgagaagcaacacctgttactgctgtgacctctatgcctgcgggagcgcagagccctcgcccgcctactatgagttcatcggcgtcagcggctgccaggacgtgctgcacctgtaccgcctgctctgggcctctgcagttctgaacgtcctgggcctgttcctgggcatcatcaccgccgccgtcctgggggccttcaaggacatggtgcctctgtcccagctggcctatggcccagccgtcccaccacagaccctctacaaccccgcccagcagatcctggcctacgcaggcttccgcctgacgcccgagcccgtcccgacctgctcgtcctaccctctgccccttcagccctgcagccgcttcccagttgcgccctcctctgccctggcttcgtctgaggacctgcagcccccttctccaagcagctctggctctgggcttcccggccaggctccaccgtgctacgcacccacctactttcccccgggggagaagccacccccctacgcaccctga

SEQ ID NO: 44316 - DNA, 1280 bp, Homo Sapiens
gtgagtcagctaggccccttcctcctccagtgcctgtctacctatgtttgatgcttggggctagaaagactgaccttgtagcccctcaccttctctccccaatgcactgggctggttcagcagctgaccaatgagggtcatgcttgcatactggccttgggtgagtggctcaggaacagtttgcaagaccgtgttgaagctacttgtaactagaccattttcccagcttgaccatgagcttcttcaaggcatctcttctcagtctccactgtagctctggtggggatgctaaccctggcttccaaggatctgaagaggaagctgcggctgtgactgtcccttttcggtctgtcttcatcctgcctgactcacgggtctcctgtcctcctgcatagcttgcggtggtgaggtgatggcagccatggacacaggccagagagctgacccaagcaatcctggtgacaaggaaggggaccttcaagggctgtggcaggaactctaccagctccaggctaaggcagaagaagctcaagagagaagtcgagaagcacaagctttttgaagactatctgattaaggtccttgagaaaatccccgaggggctgcacgggatgggaggagccggaggaggtgctggtggaggccacggtgaagcactacgggaagctcttcacagccagccaggacacgcagaagcgcctcgaggccttctgccagatgatccaggctgtccaccggagcctggagtctctggaggaggaccacagggctctcatagcctcaagatccggctgtgtcagctgcagaagaagtgctaccgcaagcaggagcagtggtggcagctgaagcacagcatcacttaccagaaggacattgactttgacacacacaccagcagcagctataatgatcagctgctcggctacatgcaaatgaccatcaccaacatggcccggcagtgctgcccctctgcccacggcgtgcccaagagcatggatctcttctccaagctcgatctgattaaggagttcatgttggacaaaatggagactgtaagactgatcgcactgctcacggaacccaaagtgtgctggtcatgggacagcttcggggaccagtggctcagaagacaccccaaacccttcaggaaatgtccaaggaggcgggtttccacccccaggaccccctttcccagcccccatgcttcagagtgctccggcctgtactgaccagcctgcgccttgcaggccccatggcatcacgacctctccttacctgcc

SEQ ID NO: 44317 - DNA, 5464 bp, Homo Sapiens
atggctggacgacccctccgcataggagatcagctggttctggaagaagattatgatgagacctacattcctagtgagcaagaaattcttgaatttgcccgggagattggtattgatcccatcaaggaaccagaactgatgtggctggcgcgagagggcatcgtggccccactgcctggagagtggaaaccatgccaggacatcacaggtgacatttactatttcaacttcgccaacgggcagtctatgtgggaccatccatgtgacgaacactatcggagcttggtgatccaagagcgggcaaagctgtcaacttctggggccattaagaagaagaaaaaaaaaaaggaaaagaaagacaagaaggacagagacccccccaaaagttcgctggccttgggttcctcattagccccagttcatgttcctcttgggggcctggctcctttacgaggtcttgtggataccccaccctctgctcttcgtggatctcaaagcgtgagcctggggagctcagtggagtctggacgtcagcttggagaactcatgctgccttcacagggtctcaagacctctgcttatacaaagggtctcttgggctccatatatgaggacaagactgctctcagcctcttgggtttaggagaagaaaccaatgaggaggatgaggaggaaagtgacaaccagagtgtccacagctcaagtgagcctcttaggaacctacacctggacattggggcactggggggtgactttgagtatgaggagtctctgagaacaagccagccagaggagaagaaggatgtttctctggattcagatgctgccggtccccctactccctgcaagccctccagcccaggtgcagacagcagtctgagcagtgctgttggcaaagggcgacagggaagtggagcaagacctggtcttccagaaaaagaggaaaatgagaagagtgaacctaagatttgcaggaatctggtgacccccaaggcagaccctacaggcagtgagcctgccaaagcctctgaaaaggaagcaccagaggacacagtagatgcaggagaggagggttccaggagggaagaggcagccaaggagccaaagaagaaggcttctgctctggaagagggcagttcagacgccagccaagaactggaaattagtgaacacatgaaggaaccacagctctcagactccatagcttctgaccccaagtccttccatggcctggacttcggttttcgcagccggatctcggagcacctgctggatgttgatgtgctttccccagtcctgggtggagcttgtcggcaggcccagcaaccactgggaatagaagacaaggatgacagccagtccagccaagatgagctgcagagcaagcagtccaaaggcctggaggagaggtaccataggttatctcctccacttccacacgaggagcgggcccagagtccccctcgcagcctggccactgaagaagagcctccccagggccccgaggggcagcccgagtggaaggaggcagaggagcttggggaggactctgcagccagcctcagcctgcagctgtccctccagagggagcaggccccaagcccacctgctgcctgtgagaagggcaaggagcagcattcccaggccgaggagctgggccctgggcaggaagaggcagaggatcctgaggagaaggtggcggtcagccccaccccgccagtctctccagaggtgcgatccacagagcctgtggctcccccagagcagctctcagaggctgcactaaaggccatggaagaggcagtggcccaagtactcgagcaagaccagaggcacctgctggaatccaagcaagagaagatgcagcaactgcgggagaagctgtgccaagaggaggaagaggagatcctccggcttcaccagcagaaagagcaatctctcagttccttgagggagcggctgcagaaagccattgaggaggaggaggcccggatgagagaggaggaaagccagaggctatcctggctccgagctcaggtccagtccagcacacaagcagatgaggaccaaatcagggctgagcaagaggcttccctgcagaaactgagagaagagttggagtctcaacagaaggctgagagggccagcttggaacagaaaaataggcaaatgctggagcagctcaaggaagagatagaggcttcggagaagagcgagcaggctgccctgaatgctgcaaaggagaaggctctgcagcagctgagggagcagctggaaggggagaggaaagaagctgtggcaacgctggagaaggagcacagtgctgagctggagcggctctgctcctcattggaggccaagcaccgggaggtggtctccagcctccagaagaagatacaggaagctcaacagaaagaggaggcccagctgcagaagtgccttgggcaagtggagcacagagttcaccagaagtcttatcacgtggctgggtatgagcacgagctcagcagtctcctgcgagagaagcgccaggaagtggaaggggagcatgagaggaggttggacaagatgaaggaggagcaccagcaagtgatggctaaggccagagagcagtatgaagctgaggagaggaagcagcgggctgagcttctggggcacctgaccggagagctggagcgcctgcagagggcccatgaacgagaactggagactgtgaggcaggagcaacacaagcgtcttgaggacttgcggcgccggcacagggagcaggaaaggaagctccaggatttagagttggaccttgaaaccagagctaaagatgtcaaggccagattggctctgctggaggtccaggaggagaccgcccggagggagaagcagcagctgcttgatgtgcagaggcaggttgctctgaagagtgaggaagccacagccacccatcagcagctggaggaggcacagaaggagcacacccacctgttgcagtcaaaccagcagctccgagaaattcttgatgagctgcaggcccgcaagctgaagctggagtcccaagtggatctgctgcaggctcagagccagcaactgcagaaacacttcagcagcctggaggctgaagctcaaaagaagcagcacctgttgagagaagtgacagttgaggaaaataatgcttccccacattttgagccagatctccatattgaggacctgaggaaatcccttggaacaaaccagaccaaagaggtgtcttcttctctctcccagagcaaggaggacttatacttggacagcctgtcctcccacaatgtctggcacctcctctctgctgagggggtagccctccgtagtgccaaggagttccttgtgcagcagacacgctccatgcggaggcggcagacagctctgaaagctgcccagcagcattggcgccatgagctggccagtgcgcaggaggtggccaaagacccaccaggcatcaaggccctggaagatatgcgcaagaacctggagaaggagaccaggcacctggatgagatgaagtcggccatgcggaaaggccacaacctgctgaagaagaaagaggagaagctgaatcagttggagtcctctctttgggaagaggcctcagatgagggcactctgggaggatcccccaccaagaaggcagtaaccttcgacctcagtgacatggacagcctgagcagtgaaagttctgaatctttttccccgcctcacctcgactcaaccccgagtctcacctcccgcaagatccacgggcttagccactccctccggcagatcagcagccagctgagcagtgtcctcagcatcctggacagcctcaaccctcagtcgccgccgccgctcctcgcctccatgccagcccagctccctccccgggaccctaagagcacccccacccccacctactatggctccctggccaggttctcagccttatcatctgctacacccacgtccacccaatgggcctgggattcagggcaggggcccaggctcccctcctctgtggctcaaacggtggacgacttcctgttggagaagtggcgcaagtattttccatctggcatcccgctgctcagcaacagccccaccccgctggagagcaggctgggttacatgtctgccagtgagcagctccggctcctacagcactcccattcgcaagtccctgaggcgggcagcaccacctttcagggcataattgaggccaaccggaggtggctggaacgtgtcaagaatgaccccaggttacctctcttctcgtcaacacccaagccaaaagctactttgagcctcctgcagctgggccttgatgagcacaacagagtgaaggtgtatcgcttctgaggccctgagcaggggcttggggcagcccagcctctcctccacccagaccaagtgcctgaggagctgcctgccttcttccatctgagaaagcaccctccttccccctttgacttgcaggagccaccagggaccagggggttgagtggaacagtaaagccacacattctgtgactatataacctatctcaggctaaaatgtgtggactcgtacgagctcttgtcattgacatggcaagctgatggcgtgcggtggctgcggggtatcagggccgggagccctttgggaggaagggaggcgttagaggagctgccttcggaggctcagggagtccctttggagctggttgtttccttggccctgcagcgcactgctcggggctcccaaggaggttgtgtgtatggttcttaattcatcaggacaaagacccccagcatgtgtgtaccctgggacccgatttctctgggcccacatctatctccaatacctcagcctcagatcagaccctttcttttttgtctttcttctcttaatttttaaatgcctcttttcttgagcattccatctctctttttgaccctctcaggactgggcttagctgtccagagccctgccggagggtgctgggggctgtccctctgcaggcactgtgttttcctcaggggctgtcctcagaacacccctcctgctccctggggctcctcagggagccatttcagctggagtctcaggtctcaaaaacaacttctccaggaggccaaaaaaagactgggttggcttctggtcctcatgatggcttttatcctcctgggacactttgggtatattcatgggcattgtttccatctgtcttttctacctgtgccacccctgccctgattccacggctgcctcaggcaggcaggcaaggagctaggccggtgcccggccctggcagcaaggggtctttgtgcagttggagatgctgccgttgtggcagagcgtcctgcagccccgcttccatcagcaggctctggggtgggggctttgcaggggatgctctctgatgtttgttccgttgtttaaataaaatgcacttatttttgtttttttttttgc

SEQ ID NO: 44318 - DNA, 1578 bp, Homo Sapiens
gtgaaaaaagccaagatgcaggaatcaggagagcaaactataagtcaagtaagcaatccagatgtcagtgatcagaagcctgaaacatcaagccttgcttcaaaccttcccatgtcagaggaaattatgacatgcaccgattacatccctcgctcatccaatgattatacctcacaaatgtattctgcaaaaccttatgcacatattctctcagttcctgtttcggaaactgcttaccctggacagactcaataccagacactacagcagactcaaccctatgctgtctaccctcaggcaacccaaacgtatggactacctccttttgcttcaagcacaaatgccagcctgatatctacttcttctacaattgccaatattccagcagcagcagtagccagcatctcaaaccaggattatcccacctatactattcttggtcagaatcagtaccaggcctgctaccccagctccagctttggagtcacaggtcagactaacagtgatgcagagagcaccacattagcagcaaccacataccagtcggagaagcctagtgtcatggcgcctgcacctgcagcacagagactttcctctggagacccttctacaagtccatctttgtcccagactacaccaagtaaagatactgatgatcagtccaggaaaaacatgactagcaagaaccggggcaagaggaaagctgatgccacttcttcccaagacagtgaattagaacgggtatttctgtgggacttggatgaaaccatcatcatcttccactcacttcttactggatcctatgcccagaaatatggaaaggacccaacagtagtgattggctcaggtttaacaatggaagaaatgatttttgaagtggctgatactcatctatttttcaatgacttagaggagtgtgaccaggtacatgtggaagatgtggcttctgatgacaatggccaagacttgagcaactacagtttctcaacagatggtttcagtggctcaggaggtagtggcagccatggttcatctgtgggtgttcagggaggtgtggactggatgaggaaactagctttccgctaccggaaagtgagagaaatctatgataagcataaaagcaacgtgggtggtctcctcagtccccagaggaaggaagcactgcagagattaagagcagaaattgaagttttaacagattcctggttaggaactgcattaaagtccttacttctcatccagtccagaaagaattgtgtgaatgttctgatcactaccacccagctggttccagccctggccaaggttctcctatatggactaggagaaatatttcctattgagaacatctatagtgctaccaaaattggtaaggagagctgctttgagagaattgtgtcaaggtttggaaagaaagtcacatatgtagtgattggagatggacgagatgaagaaattgcagccaaacagcaactctatttcttagacatggaggcattgggttgccagctagaaccaactgccctgatactcttcatccagttaagtggaaaccttagcaactataataaactatga

SEQ ID NO: 44319 - DNA, 2859 bp, Homo Sapiens
acttgcgctgtcactcagcctggacgcgcttcttcgggtcgcgggtgcactccggcccggctcccgcctcggccccgatggacgccgcgttcctcctcgtcctcgggctgttggcccagagcctctgcctgtctttgggggttcctggatggaggaggcccaccaccctgtacccctggcgccgggcgcctgccctgagccgcgtgcggagggcctgggtcatccccccgatcagcgtatccgagaaccacaagcgtctcccctaccccctggttcagatcaagtcggacaagcagcagctgggcagcgtcatctacagcatccagggacccggcgtggatgaggagccccggggcgtcttctctatcgacaagttcacagggaaggtcttcctcaatgccatgctggaccgcgagaagactgatcgcttcaggctaagagcgtttgccctggacctgggaggatccaccctggaggaccccacggacctggagattgtagttgtggatcagaatgacaaccggccagccttcctgcaggaggcgttcactggccgcgtgctggagggtgcagtcccaggcacctatgtgaccagggcagaggccacagatgccgacgaccccgagacggacaacgcagcgctgcggttctccatcctgcagcagggcagccccgagctcttcagcatcgacgagctcacaggagagatccgcacagtgcaagtggggctggaccgcgaggtggtcgcggtgtacaatctgaccctgcaggtggcggacatgtctggagacggcctcacagccactgcctcagccatcatcacccttgatgacatcaatgacaatgcccccgagttcaccagggatgagttcttcatggaggccatagaggccgtcagcggagtggatgtgggacgcctggaagtggaggacagggacctgccaggctccccaaactgggtggccaggttcaccatcctggaaggcgaccccgatgggcagttcaccatccgcacggaccccaagaccaacgagggtgttctgtccattgtgaaggccctggactatgagagctgtgaacactacgaactcaaagtgtcggtgcagaatgaggccccgctgcaggcggctgcccttagggctgagcggggccaggccaaggtccgcgtgcatgtgcaggacaccaacgagccccccgtgttccaggagaacccacttcggaccagcctagcagagggggcacccccaggcactctggtggccaccttctctgcccgggaccctgacacagagcagctgcagaggctcagctactccaaggactacgacccggaagactggctgcaagtggacgcagccactggccggatccagacccagcacgtgctcagcccggcgtcccccttcctcaagggcggctggtacagagccatcgtcctggcccaggatgacgcctcccagccccgcaccgccaccggcaccctgtccatcgagatcctggaggtgaacgaccatgcacctgtgctggccccgccgccgccgggcagcctgtgcagcgagccacaccaaggcccaggcctcctcctgggcgccacggatgaggacctgcccccccacggggcccccttccacttccagctgagccccaggctcccagagctcggccggaactggagcctcagccaggtcaacgtgagccacgcgcgcctgcggccgcgacaccaggtccccgaaggcctgcaccgcctcagcctgctgctccgggactcggggcagccgccccagcagcgcgagcagcctctgaacgtgaccgtgtgccgctgcggcaaggacggcgtctgcctgccgggggccgcagcgctgctggcggggggcacaggcctcagcctgggcgcactggtcatcgtgctggccagcgccctcctgctgctggtgctggtcctgctcgtggcactccgggcgcggttctggaagcagtctcggggcaaggggctgctgcacggcccccaggacgaccttcgagacaatgtcctcaactacgatgagcaaggaggcggggaggaggaccaggacgcctacgacatcagccagctgcgtcacccgacagcgctgagcctgcctctgggaccgccgccacttcgcagagatgccccgcagggccgcctgcacccccagccaccccgagtgctgcccaccagccccctggacatcgccgacttcatcaatgatggcttggaggctgcagatagtgaccccagtgtgccgccttacgacacagccctcatctatgactacgagggtgacggctcggtggcggggacgctgagctccatcctgtccagccagggcgatgaggaccaggactacgactacctcagagactgggggccccgcttcgcccggctggcagacatgtatgggcacccgtgcgggttggagtacggggccagatgggaccaccaggccagggagggtctttctcctggggcactgctacccagacacagaggccggacagcctgaccctggggcgcaactggacatgccactccccggcctcgtggcagtgatggcccctgcagaggcagcctgaggtcaccgggcccgacccccctgggcctggggcagcctccttcctgtaggcgagggcccaagtctgggggcagaacctgagtgtggatggggcggccaggaagaggccccttcctgccggggtgggaagagtttctctccatcggccccatgcgggtcacctccctagtcccacctttgcctcctaccagtgaacctcatctttgtatgaaagacagcaacctcctgggtaaatctgaatgaaaaacgtgctagtctctttcatgca

SEQ ID NO: 44320 - DNA, 540 bp, Homo Sapiens
gtccaccttgcgaccgtatccgctagcgcggcctgggatgcgcttgggctccctgttcgttcccacatgcagggcagcacaaggagaatgggcgtcatgactgatgtccaccggcgcttcctccagttgctgatgacccatggcgtgctagaggaatgggacgtgaagcgcttgcagaggcactgctacaaggtccatgaccgcaatgccaccgtagataagttggaggacttcatcaacaacattaacagtgtcttggagtccttgtatattgagataaagagaggagtcacggaagatgatgggagacccatttatgcgttggtgaatcttgctacaacttcaatttccaaaatggctacggattttgcagagaatgaactggatttgtttagaaaggctctggaactgattattgactcagaaaccggctttgcgtcttccacaaacatattgaacctggttgatcaacttaaaggcaagaagatgaggaagaaggaagcgaggtgctgcagaagtttgttcaaaacaagtggctga

SEQ ID NO: 44321 - DNA, 1224 bp, Homo Sapiens
caggggtcagtgacattcagagatgtggccatagacttctcccaggaggagtggaaatggcttcagcctgctcaaagagatttgtacagatgtgtaatgttggagaactatggccatctggtctcactgggtctttccatttctaagccagatgtggtttccttattggagcaagggaaagaaccctggctggggaaaagggaagtgaaaagagatctgttttcagtttcagagtcaagtggtgagatcaaagacttttcaccaaaaaatgtcatttatgatgactcatcccagtatttgatcatggaaagaattctaagtcaaggccctgtgtattccagttttaaaggaggctggaaatgcaaggatcatactgagatgctgcaagaaaatcagggatgtattaggaaagtaacagtctctcatcaagaagccctggctcaacatatgaatatcagtactgtggagaggccctatggatgccatgaatgtggaaaaacttttggtcgacgcttttccctggtgttacaccagaggactcatactggagagaaaccatatgcatgtaaggaatgtggcaaaacctttagccagatttcaaaccttgtgaaacaccaaatgatacatactggaaagaaaccccatgagtgtaaggactgtaataaaacattcagttacctttcatttcttattgaacaccagagaacgcacactggggagaaaccttatgaatgtactgagtgtggaaaggcctttagccgtgcctccaacctcactcgacatcaaagaattcacataggaaagaaacaatatatatgtaggaaatgtggtaaagcatttagcagtggctcagaactcattcgccaccagattacacatactggagagaaaccttatgaatgcattgaatgtgggaaggcatttcgccgtttctcacaccttactcgacatcagagcatccatacaaccaaaaccccagagaaaccctatgaatgtaaggaatgtggaaaattcttcagctggcgctctaatcttactaggcatcagcttattcatactggagaaaaaccctatgagtgtaaagaatgtggaaagtctttcagccggagttctcacctcattggacatcaaaagacccatactggtgaggaaccctatgaatgtaaagaatgtggaaaatccttcagctggttctctcaccttgttactcatcagagaactcat

SEQ ID NO: 44322 - DNA, 793 bp, Homo Sapiens
atgcggggccagggccgcaaggagagtttgtccgattcccgagacctggacggctcctacgaccagctcacgggccaccctccagggcccactaaaaaagcgctgaagcagcgattcctcaagctgctgccgtgctgcgggccccaagccctgccctcagtcagtgaaagcaagtgtgtgtctgcagttggccgggtcttccgctttctcggtgacagttcgctcccttcagcattagccgccccagcctccctccgcccccacagaccccgcctgctggacccagacagcgtggacgatgaatttgaattgtccaccgtgtgtcaccggcctgagggtctggagcagctgcaggagcaaaccaaattcacgcgcaaggagttgcaggtcctgtaccggggcttcaagaactcttccctcccatcacatgagccacgtggaatgtcccagcggaattgtcaatgaggagaacttcaagcagatttactcccagttctttcctcaaggagactccagcacctatgccacttttctcttcaatgcctttgacaccaaccatgatggctcggtcagttttgaggactttgtggctggtttgtccgtgattcttcggggaactgtagatgacaggcttaattgggccttcaacctgtatgaccttaacaaggacggctgcatcaccaaggaggaaatgcttgacatcatgaagtccatctatgacatgatgggcaagtacacgtaccctgcactccgggaggaggccccaagggaacacgtggagagcttcttccag

SEQ ID NO: 44323 - DNA, 275 bp, Homo Sapiens
gcctccatcacatccacttcttgcgcggtccctcacttccgcttgcctccttgactcgcatcaccgtcctggaggctgtggtgtgcttcttctctgtctggtccatcgttggcctctcaggattccacacctacttgatcagctccaaccagacaacaaatgaggacattaaaggatcctggtcaaataaaagaggtaaagaaaattacaatccctacagctacggaaatatctttaccaactgctgtgttgccctgtgtgggcccatctcacca

SEQ ID NO: 44324 - DNA, 1832 bp, Homo Sapiens
gagccacctccctgaggccgctgcatcgcttccttacagcagtcaaccacagactttaattaatacaataaggtacagacaacagggtgccacggacatttaggcccaaggaatattatgcaaaagcagtgttttaagggagtttcacgtgacagaccagcagattacactgaacaaagaaacaagaagtgatgttgtccctgcctggaaatgaacttggggaggagagagggagaattattcacaaaatctccttccccaaacagtcaacacccagaaccaacatggagctcctaccccactgggacctgctgactgaattctttctgagacccagtaaggagaactggttccggcagctgagaagccaggctgtctgctaacggcctacaaggggctctctcgctgctgttagggctggtctgctctgtgtccgtggtccagttgggtacaacaaacccattcactcaacagtgccagagacccctctggagactggggaagcagcttccttgtggtcgagagctgtgcagccgggacaggagcctgcattcgttatcacacatcacggccttcggcttggctgggggccaggtgggcatggatgctggcatgcccacaggcagatctcagctttccagtgaggtagcagcctgccgcaccaagactcagggctgtcatgaggaagagcccctgggacccccagcatcctcgcgaactccctggggcttcatcatggcccatgcgcagcacacggcagacaaccggttcagcagtccctggagcccacgtgcctccccttccttttgccttggctcccttatgcccacccaccagctcttccaggctccaaaggggaagttgaagaagaatctggtacctggcccagctgccaagccccaagatcacacagccctagaaccctgctgccaagtccgtctcgggggacctaggagaggaagtccgccagcctgggaagctgcctctccagccttggccaagcaccacctggcaaactgcagctgaaatgccgagcacactacagggggataccccctccaccccagccctgctgagaagcccagccgcactcttgatctccctgaaatccttgaatctaggtcaagggtggtgctaggggttggatgcacagggaagaggctgagcaccaagacatgtggaccagtcaggactagagacctccttccttccagacatgcacactcagccacgctggagatgacaaaaccttacacactcaaagccaatacatgcgtaggggcggccacatgccacgcactgttctaaatatcttgtacaaactcagctaatcctcaggacaattctcattttacagatgaggagaccgaggcacagcgtggtgaagtgacttgttcatggtcacataggtggtaaggcagtgaggtggaacttgaacccagacaagcagcctccactcccccgacctgctcacctctaactcaggccgctcttcgaagacaacctgaagatttttctttgcaatcgatagtctagagcaggagtctccaaggggagagaccatgtcccactgggagcccaaagcactccagggagggtaggaaaaaaatatgagagcttttgtattgattttgtttcctcactcctgtttccttctctccccttgtgggtgagggcgagtgagcagttgatcatctcttaaaccagggctgccagagccagagccagagccagaaaatggagtgccttccttccttcctttccttccttcctttccttccttccttcctccctccctctctttttttttgatggagtctagctctgtcgac

SEQ ID NO: 44325 - DNA, 648 bp, Homo Sapiens
atgctgccctcgcaggaggcctccaagctctaccacgagcactacatgcggaactcgcgggccatcggcgtgctgtgggccatcttcaccatctgcttcgccatcatcaacgtggtggtcttcatccagccctactgggtgggcgacagcgtgagcacccccaagcctggctacttcggcctcttccactactgcgtgggcagcgggctggcgggccgcgagctcacctgccggggctccttcaccgacttcagcaccatcccgtccagcgccttcaaggcggccgccttcttcgtgctgctctccatggtgctgatcctcggctgcatcacctgcttttcgcttttcttcttctgcaacacggctacggtctacaagatctgcgcctggatgcagctcttggcagctctgtgcctcgtcctgggctgcatgatctttcctgatggctgggatgccgagaccatccgggacatgtgtggggccaagacggggaagtactccctgggggactgttcagtgcgctgggcatacatcctggccatcatcggcatcctcaacgccctcatcctctccttcctcgccttcgtgctgggcaaccggcaaacagacctgctgcaggaggagctcaagccggagaacaaaggcgag

SEQ ID NO: 44326 - DNA, 909 bp, Homo Sapiens
catatttggaaacttggtttcccgaagggcggctgtgaggacggcttccagcagggagcttcccctctggcgtcaccgggaggctcccccaaggggtctccggcgcgctccctggcccggcccgggacccctctgccctcgccgcaggccccgcgggtggatctgcagggagccgagctctggaagcgctttcatgagataggcactgagatgatcatcaccaaggccggcaggcgcatgtttccagcaatgagagtgaagatctctggattagatcctcaccagcaatattacattgccatggatattgtaccagtggacaacaaaagatacaggtatgtttaccacagttcgaaatggatggtggcaggtaatgctgactcgcctgtgccaccccgtgtgtacattcatccagactcgcctgcctcgggggagacttggatgagacaagttatcagcttcgacaagctgaagctcaccaacaatgaactggatgaccaaggccatattattcttcattctatgcacaaataccaaccgcgagtgcacgtcatccgtaaagactgtggagacgatctttctcccatcaagcctgttccatccggggagggagtaaaggcattctcctttccagaaactgtcttcacaaccgtcactgcctatcagaatcagcagattactcgcctgaagatagataggaatccatttgctaaaggcttccgagactccgggcgcaacagaatgggtttggaagccttggtggaatcatatgcattctggcgaccatcactacggactctgacctttgaagatatccctggaattcccaagcaagaatacagggacttgaagacagactacatttttcctgagcgagacaatttggtctcaagggaaaccaaactgtag

SEQ ID NO: 44327 - DNA, 942 bp, Homo Sapiens
atggaaactgcaaattacaccaaggtgacagaatttgttctcactggcctatcccagactccagaggtccaactagtcctatttgttatatttctatccttctatttgttcatcctaccaggaaatatccttatcatttgcaccatcagtctagaccctcatctgacctctcctatgtatttcctgttggctaatctggccttccttgatatttggtactcttccattacagcccctgaaatgctcatagacttctttgtggagaggaagataatttcttttgatggatgcattgcacagctcttcttcttacactttgctggggcttcggagatgttcttgctcacagtgatggcctttgacctctacactgctatctgccgacccctccactatgctaccatcatgaatcaacgtctctgctgtatcctggtggctctctcctggagggggggcttcattcattctatcatacaggtggctctcattgttcgacttcctttctgtgggcccaatgagttagacagttacttctgtgacatcacacaggttgtccggattgcctgtgccaacaccttcccagaggagttagtgatgatctgtagtagtggtctgatctctgtggtgtgtttgattgctctgttaatgtcctatgccttccttctggccttgttcaagaaactttcaggctcaggtgagaataccaacagggccatgtccacctgctattcccacattaccattgtggtgctaatgtttgggccatccatctacatttatgctcgcccatttgactcgttttccctagataaagtggtgtctgtgttcaatactttaatattccctttacgtaatcccattatttacacattgagaaacaaggaagtaaaggcagccatgaggaagttggtcaccaaatatattttgtgtaaagagaagtga

SEQ ID NO: 44328 - DNA, 1089 bp, Homo Sapiens
atgcagaagcattacacggtggcctggtttctttactcagcccctggggtagatcccagccccccatgtaggtcccttggctggaaaaggaagagggagtggtcagatgaatctgaggaggagccggagaaggagctcgcccctgagcctgaggagacctgggtagtggagatgctgtgtgggctcaagatgaagctgaagcaacagcgagtgtcacccatcctccctgagcaccacaaggacttcaacagtcagcttgcccctggggtagatcccagccccccgcataggtccttttgctggaaaaggaagatggagtggtgggacgaatctgaggagtcgttggaggaggagccacggaaggtgctcgcccctgagcctgaggagatctgggtggcggagatgctgtgtggcctcaagatgaagctgaagcgacggcgagtgtcgctcgtgctccctgagcaccacgaggccttcaacaggctgcttgaggatcctgtcattaaaagattcttggcctgggacaaagatctgagggtgtcggacaagtatctcctggctatggtcatagcgtatttcagccgggccggcttcccctcctggcaataccaacgcattcatttcttcctggctctctacctggccaatgacatggaggaggacgacgaggactccaaacaaaacatcttccacttcctgtataggaagaaccgctctcgcatacccttgctccgtaagcgttggttccagttaggccattccatgaacccgagggccaggaagaaccgctctcgcatacccttgctccgtaagcgtcggttccagttataccgttccacgaacccgagggccaggaagaaccgctctcgcatacccttgctccgtaagcgtcggttccagttataccgttccatgaactcgagggccaggaagaaccgctctcagatagtcctgttccagaaacgacggttccacttcttctgttccatgagctgcagggcttgggtttccccagaggagttggaggagatccaggcttatgacccagagcactgggtgtgggcgcgagatcgcgctcacctttcctag

SEQ ID NO: 44329 - DNA, 321 bp, Homo Sapiens
tttcagttgctccgggagcgacgcatctcctcacgtgggccaggctttcaggcacccaaagcggatccgccgcggcgaaaacgattgacagccggcctcatgacccaggtagagacgcagaaagaggctcaccaaagacaggccgccatgcgacaaaccgctttgtggcgcacagggcacattcggccaaagacacacacgcacacgggcatacacacacaaacccacagagagagggaaagaaacacacagagactgagagacagagagagaagagagactgggagacacacacacagacacacacacacacactcacac

SEQ ID NO: 44330 - DNA, 1242 bp, Homo Sapiens
ggctggaccttggagagtgaggccctgaggcaagacatgggcacctggctcctggcctgcacctgcgtctgcacctgtgtctgctcgggagtctctgtctcgggggatggacgagggccaagggctggaacctccacctgcctcaccaacaacattctcaggatcgattgccactggtctgccccagagctgggacagggctccagccccgggctcctcttcaccagcaaccaggctcctggtggcacacgtaagtgcaccttgcgaggcagtgagtgcaccgtcgtgctgccgcccgaggcagtgctcctgccgtccgacagttgcatcatcactttcaaatgcgtgtctgggagggagcaggtcagcctggtggacccggagtacctgccctggagacacgtgaagctggacccatctgacttgcagggcaacatcagctctagccactgcatcctgacctggagcatcggtcctgccttggagtcgaggaccacacttctcagctatgacctattcgagaggcaggaagaggcctgggagtgggcccagcacagggatcacatcgttggggtgacctggctcatacttggagcctttgagctggaccctggctttatccatgaggccgggctgcgtgtccagatggccatgctggaggatgacggggcacaggaggagcgttacacaggccagtggagcgagtgtagccagcccgtccctgggcccttcctgcccacgggccctctgatcccaccctgggggtggccaggcaacacccttgttgctgtgtccatctttctcctgctgactggcccgacctacctcctgttcaagctgtcgcccagggtgaagagaatcttctaccagaacgtgccctctccagcgatgttcttccagcccctctacagtgtacacaatgggaacttccagacttggatgggggcccacagggccggtgtgctgttgagccaggactgtgctggcaccccacagggagccttggagccctgcgtccaggaggccactgcactgctcacttgtggcccagcgcatccttggaaatctgtggccctggaggaggaacaggagggccctgggaccaggctcccggggaacctgagctcagaggatgtgctgccagcagggtgtacggagtggagggtacagacgcttgcctatctgccacaggaggactgggcccccacgtccctgactaggccggctcccccagactcagag

SEQ ID NO: 44331 - DNA, 1299 bp, Homo Sapiens
tcacttccctggcctaggtgctgggacagtgagggcctcttttctccctactgcccttaggatgctggcagcccagctcaccactcctcacccctcaggggaataatcctctttgtgaagagatggcacctttgaagccagagaaggaaggccccataggggctgtgaaacgggattgtactatcactggctggtctgagccctttccaccttaccctgtggcctgccctgtgcctctggagctgctggctgaggagggaatcttacttctccacagtgaagattatctacaccgtgggccatagcatctctattgtagccctcttcgtggccatcaccatcctggttgctctcagggaggctccactgcccccggaactacgtccacacccagctgttcaccacttttatcctcaaggcgggagctgtgttcctgaaggatgctgcccttttccacagcgacgacactgaccactgcagcttctccactggctgcccgtgctcttcactggcacgtgggtgagctgcaaactggccttcgaggacatcgcgtgctgggacctggacgacacctccccctactggtggatcatcaaagggcccattgtcctctcggtcggggtgaactttgggctttttctcaatattatccgcatcctggtgaggaaactggagccagctcagggcagcctccatacccagtctcagtattggcgtctctccaagtcgacacttttcctgatcccactctttggaattcactacatcatcttcaacttcctgccagacaatgctggcctgggcatccgcctccccctggagctgggactgggttccttccagggcttcattgttgccatcctctactgcttcctcaaccaagaggtgaggactgagatctcacggaagtggcatggccatgaccctgagcttctgccagcctggaggacccgtgctaagtggaccacgccttcccgctcggcggcaaaggtgctgacatctatgtgctaggctgcctcatcacgccactggagtccacacttgaatttgggcagctaccacgggtctgccatgctctggaggagcaagggggccacatccccaccccagctgttacccagcccggggcaggtgcagcccttcctccctgtctctgcatctgactctcttttgaggtccctgtatgtctacctctgacttctgtggtccctctgtgtctgctctcatccattcctcttactggggcctggggctctagcccaaggctcagaggagccaataaacctgtaaatgaataga

SEQ ID NO: 44332 - DNA, 360 bp, Homo Sapiens
atttttgcataacaacaaattatctaaaattccagctgggagcttttctaatctggattcattaaaaagattgcgtctggattccaacgccctggtttgtgactgtgatctgatgtggctgggggagcttttacaaggctttgcccaacacggccacacccaggctgcggctacctgcgaatatcccaggagactccatgggcgtgcagttgcttcagtaacagtagaggaattcaattgccagagcccccgaattacttttgagccgcaggatgtggaggtaccatcaggaaataccgtctacttcacctgccgggcggaaggaaaccccaaacctgagattatttggatacacaacaa

SEQ ID NO: 44333 - DNA, 375 bp, Homo Sapiens
gagaaagcttgtggagaaggcgggcaaaaaacaaagcaggttctgaggttcactcttggttgcacccaccccatagaagatggaatcatagatgctgccaattttgagcagtttttgcaagaaaggatcaaagtgaacggaaaagttgggaaccttggtggaggggtggtgaccatcgaaaagagcaagagcaagatcaccgtgacatccaaggtacctttttccaaaaggtatttgatatatctcactaaaaaatatttgaagaagaataatcttcatgattggttgtgcatagttgctaacagtaaagagagttacaaattatgttacttccaaattaaccaggatgaagaagaggaggaagacgaggattaa

SEQ ID NO: 44334 - DNA, 1196 bp, Homo Sapiens
ttgttgttgttttgttttttttgttttttttttagagacagggtctcactatgttgtccaggctggtctcaaactcctgggctcaagcaatcttcccaccttggcctcccaaagtgctgggattataggcgtgagctgcagtgcccggccatcacttgtctttttaactgggttatgatgtcttacactttccagaagattttttaaaatatatacttagatttttaaaatatattcttaagttatttttgtgtatgatgagagatggagacttattactttctaaatacacagccacctgtctttactcaatttccattttcaacattacacttagaacacttaaaagaactaaagtgtcaactgcttcgttataaaaaaggaagttgtacaaacaaaataataaaccaacagtctaagctcagtttgataggctcttactactatgtacttaaagatcacatagcagtttcaggagcaaaaacactaccatgcctggctctcttattaccgctacagctcacaacagggtctccaaaagacatcatagactgcatagaagtctatctgcagcttactgattgccacacatgtaaattcacattcacatttaaataacccacacttaacaacaaaatcaaccgtctcaactctctatgcattccttattgctgctcctagaccacagtgctttggagacttagtaaagaaaatgaatgcactctcctgaatcacaatatcacctggaaatgtaaccagaaggtataaaaagtcagggtagtttgttaaattgtgtgtgtgtgtgtgtgtgtgtgtgtgtgtgtgtgtgtgtgtgtgtgtgtgtaatcaacaatttataaggttaccttatctctggggtcagcactttttctgtaaaggtccagagagaaaattggcttcacgggacataagggctctgtttcagctctgatgttgtattgtgaatgcggccagaaaacacataaattaatggatgtggctatattccaagagaagtttatttacaaaaaccggtggtgggcaggatttggccacaggcagtattttgccagcccctgccttataccaatgttttatctttttcaaataacaatctacttccctcactgcacacatatttgagtaaatatagtaacactgaagggacaaataatttcagtactgccttacagaaa

SEQ ID NO: 44335 - DNA, 375 bp, Homo Sapiens
acatttatctgcagccggctgaggcagagcaccgtgaaggccaccggacctgcactccgccgcctgcacacatcctcctggcgagctgacagcagcagggcctcactcactcgtgtgcaccgccaggcttatgcacgactctaccccgtgctgctggtgaagcaggatggctccaccatccacatccgctacagggagccacggcgcatgctggcgatgcccatagatctggacaccctgtctcctgaggagcgccgggccaggctgcggaagcgtgaggctcagctccagtcgaggaaggagtacgagcaggagctcagtgatgacttgcatgtggagcgctaccgacagttctggaccaggaccaagaagtga

SEQ ID NO: 44336 - DNA, 562 bp, Homo Sapiens
cgacaggagccctcaagctgatctggtcgggaccggatacattattaaccccagtgcagtagggtccccaggggcaacctgccccacagcgcccaagatgcctagcagaactgcccgctatgcccgctacagcccacggcagcggcggcggcggatgctggctgatcgcagcgtgcgtttccctaatgatgtcctgttcttggaccacatccggcagggtgacctggagcaggtggggcgcttcatccggactcggaaagtctccctggccaccatccacccctcaggcctggccgccttgcatgaagccgtgctctctggaaacctggaatgcgtgaagctgctggtcaaatacggggctgacattcaccagcgagatgaggcgggctggacacccctgcacattgcctgcagcgatgggtaccctgacatagccaggtaccttatctccctgggagcggacagggatgcaaccaacgacgatggcgacctgccctccgacctcatcgacccggactacaaggagctggtggagctcttcaaagggaccacgatggactga

SEQ ID NO: 44337 - DNA, 636 bp, Homo Sapiens
aggagagagaggtccaaggtgccctacatcgtgcgccagtgcgtggaggagatcgagcgccgaggcatggaggaggtgggcatctaccacgtgtccggcgtggccgcagacatccaggcactgaaggcagccttcgatgtcaataagaaggacatgtcggtgatgatgagcgagacggacatgaacgccatcgcaggcacgctgaagctgtacttccgtgagctgcctgagcccctcttcactgacgagttctaccccagcttcgcagagggcatcgctctttcagacccagttgcaaggaagagctgcatgctcaacctgttgttgtccctgccggaggccaacctgctcaccttccttttccttctagaccgcctggaaagggtggcagagaaggaagcagtcaataagatgtccctgcacaacctcgccactgtctttggccccacgctgctccggccctccgagaaggagagcaagctccctgccaaccccagccagcccatcaccatgactgacagcaggtccttggaggtcatgtctcaggtcgaggtgctgctgtacttcttgcggctggaggccatccctgccctggacagcaagagacagagcatcctgttctccaccgatgtctaa

SEQ ID NO: 44338 - DNA, 837 bp, Homo Sapiens
tataagaaactcctggaaatgacaataaatgtgttaagtgtatttggaaatgaagacttcgattgccatggagacttaaaaacagatcaactgaaaatgaatattctgattaagaaactaaaacataagtttgatgatcttacagcagagaaggaagctgtatcttcaaaatgtgtcgatttggctaaagacaatcaagttcttcaacaggagttattatctatgaaaaaagtacaacagcaatgtgaaaaacttgagaaggataaaaagatgttggaagaagaaatattaaatcttaagacacatatggaagacaatatggtagaacttagtaaactacaagaatataaatcggagctagatgaaagggcaatgacggcagtagaaaaattagaagaaatccatttacaggttagttttttaaatcagttaaacaagggtaatacggcttcactaaataagaaggaactcacacttaaagatgtggaatgtaaattctccaaaatgaaaactacttatgaagaggttacaaccaaattagaagaatacaaggaagcctttgcagtagcattgaaagctaacaattccatgtcaaaaaaattaacgaaatctaataagaaaatagcaatgatcagcaccaagctccttatggagaaagagcgggtgaaatattttctcagcactcttcctacaaggcgaggcccagagtcaccttgtgttgaaaatcttactagtataggactcaacagaaaatatattccccaaatgcccgtaagaattcctacttcaaaccctcagacctcaaataactgccagaactacttgactgaggttcgt

SEQ ID NO: 44339 - DNA, 516 bp, Homo Sapiens
cactgggaatggtatggagcccccacttctacactaagccttgggtgtctgctgcttccaggtcacaaatggatatttctggtcctgaccagccactaccacactgtaaccgatgctcatagtctccagggatgtgcagaacagcaatggcaggacagcaaacaactggcgatttccccaggtcccacgctgttccggagtgggcgtgttgggtccctgttcccaatgtgttccatccttacccaggtgcacagggtaccttggggccagcacagggcttgtcaagtaatgctcctggtgtccacaaaacagctccagagatacctgcattttgaaaagcctgccaagccaacaagtatggggcaggacccagattgctttggcaaatatgaaggtgagctggccacttgcctggtgagtagaagctgcctttacctggccagtgtatgcaacttgagagaaaatgacaatcgggggggttctggtgggactgggaagcctgaccttccccggagc

SEQ ID NO: 44340 - DNA, 627 bp, Homo Sapiens
atgaagctgctgccgtcggtggtgctgaagctctttctggctgcagttctctcggcactggtgactggcgagagcctggagcggcttcggagagggctagctgctggaaccagcaacccggaccctcccactgtatccacggaccagctgctacccctaggaggcggccgggaccggaaagtccgtgacttgcaagaggcagatctggaccttttgagagtcactttatcctccaagccacaagcactggccacaccaaacaaggaggagcacgggaaaagaaagaagaaaggcaaggggctagggaagaagagggacccatgtcttcggaaatacaaggacttctgcatccatggagaatgcaaatatgtgaaggagctccgggctccctcctgcatctgccacccgggttaccatggagagaggtgtcatgggctgagcctcccagtggaaaatcgcttatatacctatgaccacacaaccatcctggccgtggtggctgtggtgctgtcatctgtctgtctgctggtcatcgtggggcttctcatgtttaggtaccataggagaggaggttatgatgtggaaaatgaagagaaagtgaagttgggcatgactaattcccactga

SEQ ID NO: 44341 - DNA, 1760 bp, Homo Sapiens
gagtaatgtgtgctgtgctgatttcctttattttttaaggtgagtccactaccatgccatgctgtaggaccctactcttgtaaaagagtttgtggaagaatcttggattgtcagaatcacacatgtatgaaagaatgccacaaagtaaccaaaactgatggctgcactggaaaaaacaaggctggcccagaatgccttcattgtgaggaagggtgctccaagtcacggccactaggttgtcttcacccatgtattttgcgatgtcaccctggagaatgtccaccttgtgttcagatgcttagaataaaatgtcactgtaagatcacaagcctgtatgtggaatgtagaaaaataaccacagctgatgtaaatgaaaagaacctcctcagttgttgcaaaaatcagtgccctaaagagcttccttgtggtcatagatgcaaagagatgtgtcatcctggtgaatgtccctttaactgcaaccagaaggtaaaacttagatgtccttgtaaaagaataaaaaaggaattgcagtgcaacaaagtacgtgaaaatcaggtttcaatagaatgtgacacaacgtgcaaggaaatgaagcggaaagcatctgagataaaagaagcagaagccaaagctgctcttgaagaagaaaaacgaagacaacaggctgaactagaagcttttgaaaacagactgaagggtcgtcggaagaagaacaggaaaagagatgaagtggcagttgagctatcactatggcaaaaacataaatattatctcatttcagtgtgtggagttgtggttgtagtgtttgcctggtacatcacccatgatgtcaattaaaaaaagttttgatcttttaatgtaactcagattggatttagataagttgttaaatttgaaatattagaaaatgtatattatagaacatgatatatatttacattcatctctgtattctctcagctgttgttagaaggacagaatgttaaactttatcttaattagtatactagaaagggcagtataatactgttttaaagtgaaggcatgactgaaactaaaatatttcataaggcttagctagaggcagagtaacgtgtttttgttcattgggcttccttgtacttagttttttcatttaataattcaaaccaacacttttaaaaaaataattcagatgagactgagccatatctgcagtaagagaaatatttcttaatgttttggttacttatgatagagtacttttcttgatactgttaactttgtgctttttaaaaaaagtgattctctaacagacctcttaaattgtgacatgaaggtatgtaattagatttcagaaattggtttattagtgaggaatttttatcaataaatgtcatggggcgtgttcttcagaatatatagttattttcaacaaatgccaggctagattcctcacatgtggctatttcttatgtaagaagcttttaactgaagttggcatgtttcgtaaaacttgcgtgtcttttaaaaataataaaaggaagatgagtatttatgaagaatatgtgctgacaacagggcttatgaggtctatgtaccttaatctcgtttctccttaccacaatcttaaatagatttcagctgaaaataatcagttcttatgaaaacaaatagagaaatatcagtaagtcaaatctgtttgaattataattcctttcaaatagttttgctatttaatttatatgattaatgttttcattaaaatttttgataccaaa

SEQ ID NO: 44342 - DNA, 1994 bp, Homo Sapiens
aacgcccccgccgagcgggcggatcgagttcctctctggctggtgggctgcaagcggcagagcccgcccgcacagcccagcttttttctttctacccagactctcaacttgaccgcgcgttggtctgtgcgcccgctaacgtgccaggcacgcgccggggagctccgggatatgctccgcggtgctaccggtgacaagtgtggtatctggaatttgtgtagttctttgccccctgtctcaaccacaaaccttgacgacacagtatggccaggggccgagctcctcccttgcccactttgttctccagactgctaggagtcaagagtcagcttgtctccccagactcttcctgggagggatgagaggtttatgtgagttctactggcaggaatttggcataaaaggtttcagtgtagctcagaagccatttggagccacgtatgtatggagcagcatcataaacactcttcaaacacaagtggaagtgaaaaaacgaaggcaccgtttaaaacgacataatgactgctttgttggttcagaagctgtggatgtcattttttctcacctaattcagaataagtattttggtgatgtagatattcctcgagccaaagtggtgagagtgtgtcaagcgcttatggactacaaagtatttgaagcagttccaaccaaagtctttggaaaagacaaaaaacctacatttgaagatagtagttgcagcctttatagattcaccacaatacctaaccaagacagtcagttaggcaaagagaacaaactatattcacctgccaggtatgcagatgcattatttaagtcatccgatatcagatcagccagtttagaggacctgtgggaaaatctgagtttaaagcctgccaactcccctcatgtaaatatctctgcaaccttgtctccacaagttattaatgaagtgtggcaagaagaaacaattgggcgtctactacaacttgtagaccttccacttcttgactccttactgaaacagcaagaggctgtacctaaaattcctcaacctaagaggcagtccaccatggtcaacagcagtaactatctggatcgagggattctcaaggcttatagtgactctcaggaagatgagtggctctcggcagcaattgactgtttagaataccttccagaccaaatggtggtggaaataagcagaagctttcctgagcaaccagaccgaacagacttagtgaaagaacttctgtttgatgccattggcagatattacagtagtagggaacctctgttaaatcacttatctgacgttcataatggaattgcagaactcttagtgaatgggaagacggaaatagctttagaagctacccagctccttctaaagcttttagatttccaaaatagagaagaatttagaagactactgtatttcatggctgttgcagcaaatccttctgagtttaaattacagaaagaaagtgacaaccgaatggttgtgaaaaggatattctcaaaagctattgttgacaataaaaatttatccaaaggcaaaacagatcttctggtactctttttaatggatcatcagaaagatgtttttaagattcctggaactctacataaaattgtaagtgttaagcttatggccatacagaacggaagagatccaaatagagatgcaggatatatttattgccagagaattgatcaacgtgactattccaacaatacagagaagacaaccaaagatgagctgttgaatttactaaaaactcttgatgaggattcaaaactttctgccaaagagaagaaaaaattgctaggtcaattctataagtgtcacccagacatctttattgagcattttggagactgagtttttaatatctgtatataagttgtgtattttaagaataaattatgtatcctaaatatccaatcacatttgtaagcgtggaagctctaaatttgaaactgtacttaataaaaatttttttgtataa

SEQ ID NO: 44343 - DNA, 2465 bp, Homo Sapiens
ggccacccccgggcggcttgtagccggtgcgcggggtggctggggctacgtgcagagctgtcgcggagccggagcagcagcggtgaagcccctcggctcggccgagaccgccgtgcccattgctcgcctcggttgccgccgctttagccgcagccgctgctgccgccgccgggggagaggcagcctattgtctttctccgcggcgaaggtgaggagctgtctcggctcggcccgcgggggagccccgggagccgcacggagatggaggaggacatctggacagtgagcaggaggcgcttcggcccatgccgaacatcccaggggacctggagagccgggaggccatggtggcatttttcaactccgctggagccaatgcccaggaggaacaaagggtgtgctgccagcccctggctcacccagtggcctcgtcccagaaaaagccagaggtagcggccccagccccagagagtgggggtgagtctgtgtttggggagacccaccgggccctgcagggggccatggagaagctgcaggaaagtacatcagccagggggcagtgtcagagacgcagcactgggagaggaggacatcgtcaggctggcccaggaccaggaggagatgaaggtgaacctgcaggagctgcggggcaggtgttgcagcttgtgggagaccacaaggaggggcatggcaaattctgaccattgcccagaaccctgctgatgagcccactctaggagccccaatagcccaggagcttgggtgtgctgacgagcagggtgatcaccactggattgctgacagatagaggacgtgggaccgtgactatcacccctaatctgcagtggatttggctctcggcactcccaggctgggagctggatacctgccctggcagcatgactcagactgcatgacagtcacagactcgcctctgctcctgtggtccagtggccggacaccccctgggatggctcaaaggagtcaggacttggaagtggggacatcagggtagctgaaggaaatccacacacccagagcatctcggagttcagactctcagacctgaagtaggcgcccccgggactgggctaggagttggacggaatggaggatggaggacagcgagaagaaaggaagagaaatgcaacgtgtgggcagccgccaagagtgaaaatagagggaagtgtcatgcaagtgctggacagaaggcggcaggtgggacgagccccacagccccctcctcaaaaacgaccacctccaggactcagtgatccctggggggcaggctctgccagccctcggccacacgtggctccggcacccatggtcccagtgccttggatggagacggccagttctggcggccagatgtggtgctctggaatccagtcccatttccttcctggccacgcctgtccagcggcctcttcagccgcattcagcccctacttacctggggaccccggctggggcacgagagcaccaggggggtagggcccaaagggatcaggggaagcctctggcctggagggtatggggcacgcttccccaagggcggacccggcaggaggaagcccaggagctgggtcctgccgcccaggagctgggccctgccacccaggccgggctagggacatggcagggcctgggcatcctgacgctggacttgggcgacctgggaggcacagggaggggagagatgggcgaccccgccccagcgcagtgccggccacaccccaaggcggttgccagagcttaagccccgcccccagcagcgagaacatcccagctccacacaccccccccccccccggcagccagtgctccttgtcaagctccccccgtcactccaggtgggagccaccccggtgagggggtgtgccacttgcccccagggcactcctctgggcatcccgggtgggggattttggggccgtggggggcagtctttggtacctgtgttcgtcagggatgctctgacaaccaggtgtcgtccacgggcgggggcatgggcatggtgacagtggtcctgttgatgtcaccgatgatgctgagcgcctccttcagcgcgtggtgcatgtgcagcatctcgtcatgctgctgtgcctgctctgccaactcctccatcagtgtgttctggttcccacatgagtacatattggccagcggctccgagatgatgaactccggggtctgagagtgggcaaacagggaagaaggttgggacctggtgcctgtgccgccctggctgccttgctgggcccttctgggactgtgcgctggacttggagccccttggagtatggcttttcacacgggcttctataccgcttcgactggaagatccacctccccactgccttttctcactcagatggggacaccgaggtccagaggaaaagacacctgtcaaatgtcacagatctgggaggggacttaagacttatcatgccaagaggaca

SEQ ID NO: 44344 - DNA, 210 bp, Homo Sapiens
cccagatggatcctggacaggatgctgcaggtggtgcaggaggggaatcctgccccatttatcatcaacacagtaaaaaggggtcgaagagaccgagagcgccagaggacgccatgggctccacatccacttggattccaggaaaggcggtacatctacgaaagccctaatcatagagggaaagactcctcgttcctggcccagaaatga

SEQ ID NO: 44345 - DNA, 2071 bp, Homo Sapiens
aggcatatcacttctctttttaaatctcttagactctcctgcacacaggaaggaatctaaggtttccctatgggcaccagactccatgtaatctagtctttggccacctctgatctcatctgctaaaatcatttcaatctctccttactcagtccatcccaagccatccctggaaggtttcatcccaactggttctcacatccagtctttgcacttcagctgtctgtcccttgaatgcttccacaaaacatagcaggggaactattatttaggcctctgttcaagtatcacctccttcaagtggtctttcctgagtgtccactctaaggagcctcccttctgtcaccatttagctgtatttccctttacttacagcaaaattgtaactagataatgcattacatgtttttctgttgcatgtatattctgtttctttctcataaatgtaaaccctcctatggcccaaatcttcatttgcctttttaactcctttatctccagcatgtggagcacacttggtacacattaggagctgaaatgctccatagctgctgaatcagtagcaccaacatgtgtacccaccaccttctcaagtgtggctttataagatgttcatcatggttgagtgaggataagggaaagaatagtctgtttcttttatgatatggtttggctgtgtccccatgcaaatctcatcttgaattcctatgtgttgtgggaaggaccctgtgggaggtcattgaatcacgggggcaggcctttcccatgctgttctggtgatagtgaataagtctcacaagatctgatagttttaaaaggaggagttcccctgtacaagctctctctctttgcctgctgccatccatgtaagacgttacttgctcctccttgccttccaccatgcttgtgagatcttcccagccaagtggaattgtaagtccattacacctctttttcttcccagtcttgagtatgtctttatcagcagcctgaaaatggactaacacattttatgattggtgcaaattggctactgataaaaatcctgatgataggaaaatttcaaatttccttatagtaaaaatactacttaatttaatttttagagacaaggaaaaacattttgcagagtttggctccactattgaaaaagggatgctttaggttgaaccattgtagcctcagattctatcttttcctaaataaacacattaaagcctcatgtgtgaaattattttttaaaaatatttatctggatttaaagaataacagatcaacagatacctctcaatgtgtttgctaattaataaaaatcagtttcttacaactaatgtttgtaagaaaatgttcattttaagtgctaaatagtgaagaaaatttatcacctaaaatacacccatcaatataaggcaagaaaaaatcttaacatgcagccattcgcttttgccatgccctgtcctgtttacttcttaagaggtttatttttgtacttttgcagaataaactttagtaatctagaactggaaggtactatatatgtatgtgtgtgtatatatatatataaaagaaaaacatatatatatttcaattacttgaaatgtaaaaacttaccgaatacaaatggaaaaagtgatgtgtattatatcatattgctttttgtccatctttgtgatttatttactcacttcatgtttttcatttacaaaattgtcaagttagccaaaataattcttgttttcttaattgggagagaagagacctgacagattatctatactcttcatatgttaaaagaccatttcctgtaaaactgacctagtgcacaaactgaatttgaaatagactgtgaagtaaactataacttgtccttttaattttgtttaacatggttactgacttacatgatgtactgaatatcaagataaagaaaaatgtgtctaaaagctaattagaattctctgggtcaccaagtcaaggtgctattgatctgggttaatctgagtaacttattgtctagcctataaataagttccaaaatatcgaattcaaaaaaaaaaaaaaaaaaaaaaaa

SEQ ID NO: 44346 - DNA, 414 bp, Homo Sapiens
ctaacagatttggataaggctcaattacttgaaatagctaaagctaatgcagctgccatgtgtgctaaggctggtgtccctttcccgccaaacctaaagcctgcacctccacctactatagaagagaaagttgctaaaaagtcaagaggacctactatagaagaactaactgagaaatgtaaacagatcacacagagtaaagaagatgatgatgtagtagtgaataaacctcatgttttggatgaagaggaagaagaacctcctttttatcgtcatctctttaaactcagtgaacccaaacccatttttttcaatctgaatattgctgcagcaaaaccagcttcaccaaaaagccaggtaaccttaacaaaagaattccctgtatcatctggatctcaacattggaaaaaagaa

SEQ ID NO: 44347 - DNA, 474 bp, Homo Sapiens
atgattcacagcaagcctgtttttcctcttgcttggggtggcagcagaaagggtactttccagcctccaagggtaggggcaaaggggctggggtttctcctccccagtacagctttctctggctgtgccacactgctccctgtgagcagacagcaagtctcccctcactccccactgccattcatccagcgctgtgcagtagcccagctgcgtgtctgccgggaggggctgccaagtgccctgcctactggctgcttcccgaatccctgccattccacgcacaaacacatccacacactctctctgcctagttcacacactgagccactcgcacatgcgagcacattccttccttccttctcactctctcggcccttgacttctacaagcccatggaacatttctggaaagacgttcttgatccagcagggtaggcttgttttgatttctctctctgtagctttagcattttga

SEQ ID NO: 44348 - DNA, 615 bp, Homo Sapiens
cgcacgcgtgggtacacagcatccacacggcacacacatgagcactcatgggcacacagcatccatatggcacatgcacacacacacgggtacacagcatccacatggcacacgcaaggcacacatgggcacacagcatccacacggcacacgcacgggcacacagcatccacacggcacacacacgggcacacggcatccacacggcacacgcacgtggacacacgggcacacggcatccacatggcacacgcacgggcatgcggcatccacacggcacatgcaaggcacatggcatccacatggcacacgcacgcgcacacggcacccacacggcacacgcacggcacacgcacgcgcacgcaggggcacacggcacccacacggcacacgcacgcgcaggcacgggcacacggcatccacacgacacgcacgcacacgcatgggcacccagtcgcacatgcgtgtcagtatcagcaagcagccccactgcaggacaggcccacaaaaacacacagccacacacacacacacagccacacacacagccacacacacacacacagccacacacacacagccacacacacagccacacacacacacagccacaca

SEQ ID NO: 44349 - DNA, 5135 bp, Homo Sapiens
atggttccttccaagccacagtgtagtgaacctcatcacaacacaattctgctgggctggatttgtcccaagtgtggatcatggccaaagcagctgtgatgtggcaagctcattgaagctaacgggaggcagtgtgatgtggaggggaaagtgcaagacactaagtcaggacatctgggttctgggtcctggtcttgtgttatttcaaggtgtgcccttgagccaattgaatgaaaatgctttcagggcctcagtttcccccaagctgattcaaatttaaaaaaaaaaaaaattttttttgaaacagagtctcactctgttgtgtccggaaatggtgggttcttggtctcgctgacttcaagaatgaagccgcagaccttcgtggtgagtgttacagttcttaaaggtggtgtgtccagagtttattccttctggtgggttcgtggtctcgctgacttcaggagtgaagctgcagaccttcatggtgagtgttacaggtcttaaaggcagcacgtctggagttgttcgttctttccggtgggttcgtggtcttactggcctcaagagtgaagctgcagaccttcgcggtgagtgttacagtttgtaaaggtggcgcatccggagttgttcattcctcctgtctggcgttgttcgtccttacagagagctgattggtccgttttgacagactgctgattggtgcgtttacaatcctttagctagacacagattgctgatgggcgcatttacaatcctttagctagacagaaaagttctccaaggccccaccccacccagaagcccagtaggcttcacctctcaatagcactcgctgcgggactttgcggcacctagcccaggcactccggcagcccagagggagctcatcccccgatcaagcccagcaggcgtcggccgcgacaggcccagtccgcgcccacccggaacccgcgccggccgacgagcgagctgctgcacgcagccccggctcctgcctgcgcctctccctccacacctcccggcgagcagaggctcaggcctcgaccagccccagagaagggccccacagcgcagcggcgggctgaagggctcctccagcacgccagagcggacgcggaggccaacgaggcgccgagagtaagcaagggctgctagcacgttgtcacctctcactgtcacctaggctggagtgcagtggtaaatctcggctcactgcaacctccacctcccgggttcaggtgattcttgtgcctcagcctcctgagtagctgggattacaggcacgcgccaccactctgctaagaaatgttttaaatctgtgcaaaagccattttcaaagagaagaagatagctgagaaacaacagaaaagggaaggtcagcccacaaagaatgagtagaggcttaagttcaaaaagacaaagatacagagtcatatatggccattggctcctaaaagagctacttatgagtatcaagtatggaaagaactttttgttggacattcgtcccacagaagaaactaaacccttcgtcagtagagccatgtgcttagctaaatctattcctcaaataaacattcctttagaacattaaagttactttttttttttttttttttgagatggagtctcactctgtcacccaggctggagtgcagtggcgtgatctcagctcactgcaacctctgcctcccaggttcaagtgattctcctgcctcagcctccggagtagctgcgactacaggcgcgcaccaccacgcccggctaatttttgtatttttagtagagatggggtttcaccttgttggccagactggtctcgaactcctggcctcaagcactccacccacctcggcctcccaaagtgctgggattacaagcatgagccaccgcacctgaccaaatttactttcttaagggaaaaaaaagaaaagcaaaataaaacctatccttttgcgccatggagttttagggtcgggcagtcttggagggaaatccttactcaaaacctcactagtggtacaactttgagtgggttactataccttttgcacctcagctgccacacctatagagaacattgacaatgacaacatggaggggagtcatggccatcacacgacagccccatgctggtgtccgggtggtgccttcttcccggctggctccgcggtttccatggtttctgttagtcccctccctccatccccactttggcgtttgcctttgtttgattcatgtttccacccttcctcttgcccctccacattatgaggaaaaagggaagcctctgatctctctatttggaagtttgcagaagccttttcctacttcagtgaagtgcagtcatacaaaatttatactcaacagcatcagcagatttttttccatcaatatttcctttttaatttcagctttatctgaattttaatagcataaagaatttacttttgttcttttaaagagcaaccaaaacaagaataatatatgtttgaatataaggtcttaacactatgtttaacatggtgtttaggctatgcctatagaggttacaggtgttttttggtgagtaaattatgaatgccatgggtgtatatgtgcttataatcttacatacatatgaactaggtgtgtgtgtgtgtatggtatatataaaaagtcatgagatccagatctgaccaccttgatcttttttcctctttgattttcactacagcaaacactgaacctagagccaatcttcacatgaacctttatgaaacctcaccgttgacccaaacaacagagaagcagggagcccagcagtccttggaggcagcagctcagaagacaggagagcctcaaagttgtataaataaagcgctgatatgttcaaacagaaaagaattttacacgcgcaagctgcacatcgacatgacgccgttcctgaaggaaagtggaaatgcactggactatcaggaagaagcagggagacccctcagagaaactcaccacaacgaccaagacccagagccaaggagtatgacccttgactctcccagggcttcccggactgagcacatccagaccccagaagcagatattgtgcaaaaagtgggcagagattatgatgtacaccacctacacagaggacttctgggatacgggcctgagtcacccgagaggttgagtgctgtgtatacatctcttcttccaagagaaagagaagggaaggctgaaccaagactgtttagccaggagacatcagccaacatcagtcatgagagggatttgattaacgaggccaagagaaaggaaaaacccaagaaagacaaaaccaaaggacccaaaagcgagagagaaggaaaggtctacgggcaagcagaggctgccattggaaagtcaaaggactcaaaggctaaaaaaaaattagaaaaaaaaacaagaccccaaaggaaaaggacacagaaggaaagaaatctggagatagcggcagagctgagcgggcctgatgtcagctatgaggaaacagaagacacctcaaatagaggttcctttgcctcagactcctttgtagaggacccttggctttctcccaaatatgatgcccaggaaagccaagtttctctagatggaagatcatcaccctctcagattgcaactgtcactggcaacatggaatctaaagaagagagaagatgtgaggacccttccaaggccctcctcactaagagggagcaggagaaggcttcctgggacaggcttcgagcagaaagagccgagatgaggtggctggaggtggagaagaagagaagggagcaggaagagcaaaggcagctccagcaggagcagctggagagagcaaaaaagatggaggaggagctggagctggagcagcagagacgtacagaagagatccgcttgaggaaacagagactccaagaagaacagcagcggcaggaggaggaggagagaaagcagcagctccggttgaaagcagcccaggagagagcccggcaacagcaagaggagtttcggaggaaactgcgagaactacagagaaaaaagcagcaggaggaagccgagagggccgaggcagagaagcaaaggcaagaggaattggaaatgcagttagaagaagaacaaaaacacctgatggaaatggctgaagaggaacgactggagtaccagcggcggaaacaggaagcagaagagaaggctcggctggaggcagaggagaggaggcaaaaagaagaggaagcagcaagactggctctggaagaagccacgaaacaagcccaggaacaagccaggtactggatatttgggcaacagttgccatagggggatggttcaagggcttcactgtccagtgctagtgctagctttgcactgcctttagacaagaaaagtccccccacccccagcatggcttggaagactgaaaggcatagagggattcttttgctgcaaatgtcaaggattcctttgtagcttaatgaagttgtaatgaatctacaagggagtttggagatatctacgtcaaccccctagtttatagatgaaaaaagcaagtcccaaagagggaaaggatcttgatcacagacaaacagtgacttagggacaatgccaagaccagatctaagaccccctgatttcgaacccactgcctgtcttgatatctactgagtgcctgttatgtgccaaacactgttctagacactaggaattcaggagtaagcaagacagagaaggtctctcttcccatcatatttacattctaggggtgggaatggagacagactctaaacaaatattttttaaagctagcaataaatgctatgcagaaaaaatttaacgatgtgataggacaccgggcacagtggctcacacatgttaattccagcactttgggagaccaagaagagagaatcacttgagctcaggagttcaagaccagcctaggcaactaagtgaaacccctatccctacaaaaaaaatcaaaaaattagccaggtgtggtggtgaatgcctgtggtcccagctacatgggaggctgaggcaggaggatcacttgaacctgggaggtcaaagcggcagtgagctaaaatcaagtcaccacactccagcctgggtgacagagcaagactctcttt

SEQ ID NO: 44350 - DNA, 3715 bp, Homo Sapiens
gaagagaaaagcataggaaaggaaacagtggtaataggaattggggtaaaatgaggatccttccccacaaacattgctattattcagctcatttcaaaggattccgctgctgccatttgtgagagccgctggaggctgagtgaaagtcattttgaaagactgatccaaagaagaatggaggccagagtggagcgtgctgtgcagaaaaggcaagtcttatttctttgtgtatttctgggaatgtcttgggctggcgccgaaccgcttcggtattttgtggcggaggaaaccgagagaggcacctttcttaccaacttggcaaaagacctagggttaggggtaggggaactgagagcccggggaactagaattgtttcagaccagaacatgcaaattttactgctcagttcgcttactggtgatctacttctaaatgagaaattggaccgagaggaactgtgtggccccagagagccctgtgtgctgcctttccagttgttattggaaaaaccttttcagattttccgtgctgaactatgggtcagagacatcaatgatcacgctccagtatttctagacagagagatttccttgaaaatattagaaagtaccactccaggggcggcatttctcctagagagtgcacaggattcagatgttggaaccaacagcctgagtaactacaccatcagccccaatgcctatttccatattaatgtccatgatagcggggaggggaatatctatcccgaattggtgctgaatcaagtgctggatcgggaagagataccagagttcagtttaaccctcaccgctttagacggcggctctcctccaagatcagggaccgccctcgtgcgcattctggttctagacgtaaatgacaacgcccctgattttgtgcggtcgctctacaaggtgcaggtgcccgaaaatagccccgttggttccatggttgtctccgtgtcagccagagatttagataccggaagtaatggggaaatagcctatgcattttcttacgccactgaaagaattctcaaaacgtttcaaatcaatccaacatctggcagtcttcatcttaaagcgcaattggactatgaggcaattcaaacttacacattaactattcaggccaaagacggcggcgggctttctggaaaatgcactgtagtggttgatgtaacagatataaacgataatcgacccgagctgctcctgtcttcacttactagcccaattgcagaaaactcacccgagacagtcgtggctgtttttaggattagagacagagattccgggaacaatggaaagacagtgtgctccatccaggacgatgtccccttcatcctgaagccatctgtcgaaaacttctatactctggtaacagagaaacctttggatcgagagaggaacactgagtacaacatcaccatcaccgtcaccgacttggggacacccaggctgaaaaccgagcacaacataaccgtgctggtctccgacgtcaatgacaacgctcccgccttcacccaaacctcctacaccctgtttgtccgtgagaacaacagccccgccctgcccatcggcagtgtcagcgccacagacagagactcgggcaccaacgcccaggtcatctactccctgctgccgtcccaggacccgcacctgcccctcgcctccctggtctccatcaacgcggacaacggccacctgtttgccctcaggtccctggactacgaggccctgcaggcgttcgagttccgcgtgggcgccacagaccgcggctcccccgcgctgagcagcgaggcgctggtgcgcgtgctggtgctggacgccaacgacaactcgcccttcgtgctgtacccgctgcagaacagctccgcgccctgcaccgagccgttgccccgggcggccgagccgggctacctggtgaccaaggtggtggcggtggacggcgactcgggccagaacgcctggctgtcgtaccagctgctcaaggccacggagcccgggctattcggcgtgtgggcgcacaatggcgaggtgcgtaccgccaggctgctgagcgagcgcgacgcagccaagcagaggctggtggtgctggtcaaggacaatggcgagcctccgcgctcggccaccgccacgctgcacgtgctcctggtggacggcttctcccagccctacctgcggctcccggaggcggccccggaccaggccaactcgctcaccgtctacctggtggtggcgttggcctcggtgtcttcgctcttcctcctctcggtgctcctgttcgtggcggtgcggctgtgcaggaggagcagggcggccccggtgggtcgctgctcggtgcctgagggcccctttccacgacatctggtggacttgagcggcaccgggaccctatcccagagctaccagtatgaggtgtgcctgactggaggctccgggacaaatgagttcaagtttctgaaaccaattatccccaacctgctaccccagagcacaggcagggaagtggaagaaaatcgcccatttcagaataatttgggtttctgataaagaatgtaaactaaatccgcgtctgtgaatacgtttctgattaggaacttattgcgaggttcccttaagggagtgtctttacatcatttcaaatatgtactcttgaagtcaagcaataaatttctatacataaaataggatcctgatttagtatcaagaacccttcacaaagcatgaaatgtatatgtgtaatgttttatgtcaaacaattatgcttaatatacagtctattaaatgtaagtcttgtttgagatattttaaattgctttccattgttttcaatctctactgagacttcctgagttgattagaaagctgtatgagtgtacctaccctagtctcagaagcatagactgtagagtatctttttaagcatttttaaaaaatgcttttaatgcatcatacactattttaacacttttaatctgagaagaagcatatgaggcatggtattttaggaatgaacaaatagatggtcttagagattcagtaagttcactaagttccactaactaataagtgacaaaactgagcatccatcccagatctgtctgactctgggtcagtgaccctgctccgattccatactgttttctgtcattagatatcacctggcaagtttctgcctaattaaggagaagtcttttatcatatttatactgctgtccaatcttttctatatttagaaataataatgtacatatttatctatggttttattttcttatacaccaaaagtcctgcttttctgggtcaattttcaactattattactaatgctctgatctgtccaaactcaagcggaaaacaaaattgaaagggcaacctgtgccttctcctttcttcagaacatatgactttcatttcccagaaaaaagattaatggtcctgagtaggaatattacataattttgattgcatcattagttaattattttcttcatattgtagattttctgcagtcacccatacttaacatttgtaatacattttcctgatttgaaagtttgtttttaaaagttttctattaattatagtgcactattgaatcaggaaaatttaagaaaaagaatagttagttttaaatgcataatatcaaagagaatcatagatgatcattaaatttttagaaattctcggaagttaaggagaagca

SEQ ID NO: 44351 - DNA, 603 bp, Homo Sapiens
atgacctgccttacggacgttcctactggatgtgctgccgtcgagccgaccgcgagactcccggctgccgcctgggcctccacgataacaactgggtgctgccctgcaatgggccaggcgggggccgggccggccgggaggaggggaggtgaagccgggggaggggaggggagagcccaccacgcccacccctcccctccccgggagccgagggtccggactgggccgcctgcccattcccctactccaggcagcattgatccctcaccggaactgagctggggttcagcaggggtgacccaggaaagccctctgcttgatcctgttgattttctactcttcagaaccagggccgtggaccctctgagaaggtttttttttttttatcagcatctcactttcttctccattcagccccaaccccctccctgccatgctttccaccccaaggacccaccagcagggagcagacggcagctaattttggtaccacttaagggtccccccattctggcccccatcctctccctcaccccaattctttctcgctggagctgttatttcccaagaagccgcatcgcccaaggttggcacctctcctaa

SEQ ID NO: 44352 - DNA, 1071 bp, Homo Sapiens
atgaatggggtctcggaggggaccagaggctgcagtgacaggcaacctggggtcctgacacgtgatcgctcttgttccaggaagatgaactcttccggatgcctgtctgaggaggtggggtccctccgcccactgactgtggttatcctgtctgcgtccattgtcgtcggagtgctgggcaatgggctggtgctgtggatgactgtcttccgtatggcacgcacggtctccaccgtctgcttcttccacctggcccttgccgatttcatgctctcactgtctctgcccattgccatgtactatattgtctccaggcagtggctcctcggagagtgggcctgcaaactctacatcacctttgtgttcctcagctactttgccagtaactgcctccttgtcttcatctctgtggaccgttgcatctctgtcctctaccccgtctgggccctgaaccaccgcactgtgcagcgggcgagctggctggcctttggggtgtggctcctggccgccgccttgtgctctgcgcacctgaaattccggacaaccagaaaatggaatggctgtacgcactgctacttggcgttcaactctgacaatgagactgcccagatttggattgaaggggtcgtggagggacacattatagggaccattggccacttcctgctgggcttcctggggcccttagcaatcataggcacctgcgcccacctcatccgggccaagctcttgcgggagggctgggtccatgccaaccggcccaagaggctgctgctggtgctggtgagcgctttctttatcttctggtccccgtttaacgtggtgctgttggtccatctgtggcgacgggtgatgctcaaggaaatctaccacccccggatgctgctcatcctccaggctagctttgccttgggctgtgtcaacagcagcctcaaccccttcctctacgtcttcgttggcagagatttccaagaaaagtttttccagtctttgacttctgccctggcgagggcgtttggagaggaggagtttctgtcatcctgtccccgtggcaacgccccccgggaatga

SEQ ID NO: 44353 - DNA, 1720 bp, Homo Sapiens
gactgcagatgaaattagtaactggtggggtcgtggggtgtgaatggtgggcgggagcagctatgtcagttggtgtgtttctgcttatgttagggtaattgggcacggcctttgtgtaactggtgaatatctctgaacctgggcatgaaacagagagatgtcctaactctgggtgagaggaatcctcatttttctctgccctctcactgtggcatcctaagaaaaaagttttgggttcctgcagcatgaaggagagctctgctcccagaatttgggagctccagatttcttccagggtgtggaggcatcaatatatcagtctgggaaaggggttcctgggccactccaggagctgagttgggtggaaggtgctgagggtgtgggtgggggccacttctgagcacccatgtggcacccactgctggtccctgtttgtggctgggcactcaggaaaatgtttttggtgctaagagtaaaaagccaaccaacaaacacatctcttttttctgtctattcactggaaagtaaaagcagtctgggcgcaggctggggacccagatggaattcaaacttatgcctgctctcaaggtgctcacggttgctgataaacagctggataaaatgaagagtctatgagtgagggatgcagagccagggaaggctggtggagtgatgccaccagcacaggggtatgagtttgcagctgccaaggggccaagggatgagctggggccctccttcccaatggcatctccccctggtctggaactgaagacactgagcaatggtccccaagccccaaggagatcagctcccctgggcccagtggccccaaccagggagggtgtggagaatgcctgcttctcctcagaggagcatgagacccatttccagaaccctgggaacacgagactgggcagctcacccagtccccctgggggtgtctcctcactgccccgatcccagcgggatgatctgtcccttcattcagaggaggggccagccctggagcccgtgagccgcccggtggattatggctttgtttccgccctcgttttcctggtgagtgggattcttctggtggtgacagcatacgccatcccccgtgaggctcgagtcaatccggacacagtgacagcgcgggagatggaacgactggagatgtactacgcccgcctaggctcccacctggacaggtgcatcatcgcaggcctcgggctgctcacggtgggcggcatgctcttgtcggtgctgctcatggtctccctgtgcaagggcgagctgtaccgccggaggaccttcgtccccggcaagggctccaggaagacctacggctccattaacctgcgcatgagacagctcaatggggatgggggccaggccctggtggagaatgaagttgtccaggtctcagagactagccacaccctccagaggtcttaagaactagcccaccttatctggctgctttagctccagtgctacaaggtccaccccctgctcccgcccacctgacccctgccaaggccctggggttttaaactgagctcacatagggccttgtggaagaagtactgggtgctggagggagagctcggggcccagcccatgccccacacgggcaagcagcccactgatctgttttgtagctgaggttttgcatacggttttgtttggaggatggcttctgctgctaaaaatacaaaagtttggaaaccgc

SEQ ID NO: 44354 - DNA, 591 bp, Homo Sapiens
accattcaggacctgagggctcagatcttcacaaatactatggacaatgcccacattgttctgcaggttgacaatgctggtcttgctgctgatgactttagagtcaagtatgagacagggacagtcatgcgccggtctgtggagagagaaatccatgggctccacaagatcattgatgacaccaatgtcacttggctgcagctgaagacacagatcgaggctttcaaggaggagctgctcttcatgaagaagaaccatgaagaggaagtaaaagacctgcaagtccagattgcagctttaacagtggaggtagatggccccaaatctcaggatctcgctaagatcatggcagacatccgggcccaagaagagctggctcagaagaaccgagaggatctagaaaagtactggtctcagcagattgaggagagcaccacagtggtcaccatgcagtccgctgaggttggagctgccgaagtgacgctcatggaactgacacatacagtccagtccttggagatcgacctggacttgatgagaaataacaaggccaattgggagaacagcccgagggaggtggaggcccgctaa

SEQ ID NO: 44355 - DNA, 1494 bp, Homo Sapiens
aaaggaatagacaaggagttttacctactgttcacagtctttgatgagaatctgagcagatattttgatgaaaacattcagaagtttatctggcatcccttcagcattgacaaagaagataaagagtttgtgaaatccaaccgaatgcatgctgttaacggctacatgtatggcaaccagccaggcttaaacatgtgtaaaagggatagagtttcctggcatctgattggattgggcactgacactgacatgcatggaattgtttttcaagggaacaccatccacctacgagggactcaccgagactccctggccctgtttccccacatggccacaacagcattcatgcagccagaccatgcaggtatttttagggtgttttgtgccaccatgccccacctctcgagaggcatgggtcagatctatgaggtcagcagctgtgacaacagggacccttctgagcagcggtacgggatgataagaactttttacatcgccgctgaagaagtagaatgggattatgcccctaacaaaaactgggagttcgaaaagcagcacgtggacgcaagaggggaaagacatggagatatatttatgaaccgcactgaaaattggattggctctcagtacaagaaggtggtttacagggaatatacggatggagaatttgtggagatcaaagcccgaccaccacgagaggagcacttagaactcctgggcccaatgattcatgctgaggtgggcaacaccgtcctgatcatatttaagaacaaagccagtaggccctactccatctcagcccagggtgtggaggagatggatagtggaaagcaattccaagtgcccatgacaaaaccaggagaagtaaaaacttatagatggaatatccctaaaagatccggtccagggccttctgatcccaattgtattccatgggtttactattcaacagtaaactttgtgaaggatacgtatagtggtttgatgggtcctctgattacatgccgaaaaggagtcttgaatgaaaagggaagaagaagtgacgttgattatgaatttgctctcttgtttttggtatttaatgagaatgaatcctggtatctggatgacaatattaagaagtatctcaacaaagatccacgagattttaagcgcactgatgattttgaggaaagcaacagaatgcatgccattaatggaaagatttttgggaatctccatggcctcataatgaacgaagatacaatgacaaactggtatttgttagggataggaagtgaagtggacatacataccatccattatcatgctgagagctttcttttcaaaatagataaatcttaccgagaagatgtgtatgatctctttcctgggacattccaaaccattgaactgtttgcagatcacccagggacatggctgctacactgtcatgtgtctgaccacatccatgctggcatggagacaacctacacggtccttcgtaacataggt

SEQ ID NO: 44356 - DNA, 1187 bp, Homo Sapiens
gggaggagcccaagatgcctctgctgctccttggagagacagagcctcttaagttggagcgggactgccggagcccagtggacccctgggctgctgccagccccgacctggcacttgcttgcctgtgtcactgtcaggatttgtctagcggcgcattccctgacaggggtgtgttggggggagtcctctttccaactgtcgaaatggttatcaaagtgtttgttgctacatcttctgggtccatagcgattaggaagaaacagcaagaagtagtgggttttttggaagcgaataaaatcgactttaaggaattagatattgctggagatgaagacaacaggaggtggatgagagagaatgttcctggagagaaaaaacctcaaaatgggattcctttgcctccccagatcttcaatgaggagcagtactgtggggattttgactctttcttctctgcaaaagaagagaatattatttattccttccttggtttggctcctcctccagactcaaagggatcagagaaggctgaagaaggtggagaaactgaggcacaaaaagagggcagtgaagatgtgggcaacctccctgaagcccaggagaagaatgaagaagaaggagagacagccacagaagagacggaagaaatagccatggagggtgcggaaggggaagccgaggaggaggaagaaactgcagaaggagaagagcctggagaagacgaagattcctaggccttttcatgcttcatttcttccacttctccagaaaatggaagctatgaagcaacatttcaaatgtctctccacaaaccaaactcaacagaatactttggcttgaagccggcacacccagggttactgaggacttatgctgcctgacctggttagatgtacatggaggtatctcccgaatcatacaaaattaaatgtgaagaccgtttatgcataccttcatgtgcctgacagtcttggcttttgaagatttttttttcttttttgctctgcatagctagaccatcttattaataatactctgaaaaaaatgatttcaaggcatggaagttctctgtgatacaacaatagtatttcttcaaatgcgccttatgctacttatctcagaaacaggttttaaaatgaagtgctttccagagaaccatcatataaataaagattaatagaaaaata

SEQ ID NO: 44357 - DNA, 984 bp, Homo Sapiens
atggagtggcggaaccatagtgggagagtgagtgagtttgtgttgctgggcttccctgctcctgcgccactacaggtactattgtttgcccttttgctgctggcctatgtgttggtgctgactgagaacacactcatcattatggcaattaggaaccattctaccctccacaaacccatgtacttttttctagctaatatgtcctttctggagatctggtatgtcactgtcactattcccaagatgcttgctggctttgttggatccaaacaggatcatggacagctaatctcctttgagggatgcatgacacagctctactttttccttggcttgggctgcactgagtgtgtccttctcgctgttatggcctatgatcgctatatggccatctgctatcctctccactacccagtcattgtcagtggccggctgtgtgtgcagatggctgctggctcttgggctggaggttttggcatctccatggtcaaagtttttcttatttctggcctctcttactgtggccccaacatcatcaaccactttttctgtgatgtctctccattgctcaacctctcatgcactgatatgtccacagcagagcttacagatttcatcctggccatttttattcttctagggccactctctgtcactggggcctcctatgtggccattactggtgctgtgatgcacattccttcggctgctggacgctataaggccttttccacctgtgcctctcatctcactgttgtgataatcttctatgcagccagtatcttcatctatgctcggccaaaggcactctcagcttttgacaccaacaagttggtctctgtactgtatgctgtcattgtaccattgctcaatcccatcatttactgcctgcgcaatcaagaggtcaagagagccctatgctgtactctgcacctgtaccagcaccaggatcctgaccccaagaaagctagcagaaatgtatag

SEQ ID NO: 44358 - DNA, 630 bp, Homo Sapiens
ctcgacccgcaggccaaaggggctccgttgcaaggaagaagtgcggggtcccgccgcctcctagaccgagatcgcggtgagctggccgcggcgcacaatgggcacggcctgggcggcggcgtccgtactatcgccctgtgcctgcggatcccggtaacattgcgcggcaggccccagcctccctcagcttcgcggactgtctgggccgggggtctcaaccttgacttcagggccgggccgctggggcagacccttagtgatgttcaggtcggcccctgccagtcaagggacgctcgtcgcgcgccaattgttaagtctttcattgtttctgtaaacctgctgacgccctcccagcgcatagggagactgcgcacgtgagtccgcccccgcgcgcactgcggagaggtagaggcacgaatgtagtacaaggagccagctggtccaccagaagtctgtgttctgcctgtccctgcagcacggagggctgggctttatacctgtgccaaggacaccaacggcagcatcagcaagtccgtgttgtctcccaaataagtggtgttctccaacaagcttttagcagtaataaagctgacatttttattctcatataaccaaaaaaaaaaaaaaaaa

SEQ ID NO: 44359 - DNA, 303 bp, Homo Sapiens
atggctgggatcaccactattgaggcagtgaagcacaatatccaggttctgcagcagcaggcagatgatgcagaggagagagctgagcacctccagcgagaagctgaaggagaaaggcgcgcctgggaacaggctgaggctgaggtggcctccttgaaccataggatccagctggttgaagaggagctggactgtgctcaggagcacgtggccactgccctgcaaaagccggaagaagcggaaaaagctactgatcagagtgagagagatatgaaggttgttaaaaactggaccttaaaagat

SEQ ID NO: 44360 - DNA, 804 bp, Homo Sapiens
cagaacaatgagaacaagagcgtactacagttggagcagcaagtaaaggagctgcaggagaagctaggcaaggagcgtctggaagctgcgagccagcagaaacagcagctaacggcccagttgagcctcatggctctccctggggaaggagatggaggaggacatctggacagtgagggggaggaggcacctcggcccattcctagcatcccacaggacctggagagcagggaggccatgagcggctttatggaccacctggaggagaaggcagacctgagtgagctggtggagaaagaagaacttggattcttccagtactacagagagagatgccatcagaaagtttatcaccctataacaaagccagggggcagtgccaaagatgcagcaccgggaggaggacaccatcaggctggccctggacagggaggagatgaaggtgaagctgctggagctgcaggagatggtgttgcagctggtggcgactacaagggacacagcaaattcttggtgactgcccagaaccctgctcatgagcccagtccaggagccccagccccccaggagcttggggctgcccacaagcatggtgatccccgcctccctctctccaaagatctttgtgaggtgagcctcactgacagcgtggagcctgtgcaaggagaggccagggagggttctccccacgacaaccctactgcacagccgatcgtgcaggaccaccaggagcacccaggcttgggcagcaactgctgtgtgccattcttttgctgggcttggctgccaagaagaaggagataa

SEQ ID NO: 44361 - DNA, 939 bp, Homo Sapiens
caagagagagagagagcgtgcaagccccaaagcgagcgacatgtccctttggggagcagtccctctgcaccccagagtgaggaggacgcaggggtcagaggtggctacagggcaggcagaggaggcacctgtagggggtggtgggctggtggcccaggagaagtcaggaagggagcccagctggtgacaagagagcccagaggtgcctggggctgagtgtgagagcccggaagatttcagccatgcctcacagctccgacagcagtgactccagcttcagccgctctcctccccctggcaaacaggactcatctgatgatgtgagaagagttcagaggagggagaaaaatcgtattgccgcccagaagagccgacagaggcagacacagaaggccgacaccctgcacctggagagcgaagacctggagaaacagaacgcggctctacgcaaggagatcaagcagctcacagaggaactgaagtacttcacgtcggtgctgaacagccacgagcccctgtgctcggtgctggccgccagcacgccctcgccccccgaggtggtgtacagcgcccacgcattccaccaacctcatgtcagctccccgcgcttccagccctgagcttccgatgcggggagagcagagcctcgggaggggcacacagactgtggcagagctgcgcccatcccgcagaggcccctgtccacctggagacccggagacagaggcctggacaaggagtgaacacgggaactgtcacgactggaagggcgtgaggcctcccagcagtgccgcagcgtttcgaggggcgtgtgctggaccccaccactgtgggttgcaggcccaatgcagaagagtattaagaaagatgctcaagtcccatggcacagagcaaggcgggcagggaacggttatttttctaaataaatgctttaaaaga

SEQ ID NO: 44362 - DNA, 1842 bp, Homo Sapiens
cagtacggatttgtgaatcacgccctggagttgctggtgatccgcaattacggccccgaggtgtgggaagacatcaaaaaagaggcacagttagatgaagaaggacagtttcttgtcagaataatatatgatgactccaaaacttatgatttggttgctgctgcaagcaaagtcctcaatctcaatgctggagaaatcctccaaatgtttgggaagatgtttttcgtcttttgccaagaatctggttatgatacaatcttgcgtgtcctgggctctaatgtcagagaatttctacagaaccttgatgctctgcacgaccaccttgctaccatctacccaggaatgcgtgcaccttcctttaggtgcactgatgcagaaaagggcaaaggactcattttgcactactactcagagagagaaggacttcaggatattgtcattggaatcatcaaaacagtggcacaacaaatccatggcactgaaatagacatgaaggttattcagcaaagaaatgaagaatgtgatcatactcaatttttaattgaagaaaaagagtcaaaagaagaggatttttatgaagatcttgacagatttgaagaaaatggtacccaggaatcacgcatcagcccatatacattctgcaaagcttttccttttcatataatatttgaccgggacctagtggtcactcagtgtggcaatgctatatacagagttctcccccagctccagcctgggaattgcagccttctgtctgtcttctcgctggttcgtcctcatattgatattagtttccatgggatcctttctcacatcaatactgtttttgtattgagaagcaaggaaggattgttggatgtggagaaattagaatgtgaggatgaactgactgggactgagatcagctgcttacgtctcaagggtcaaatgatctacttacctgaagcagatagcatactttttctatgttcaccaagtgtcatgaacctggacgatttgacaaggagagggctgtatctaagtgacatccctctgcatgatgccacgcgcgatcttgttcttttgggagaacaatttagagaggaatacaaactcacccaagaactggaaatcctcactgacaggctacagctcacgttaagagccctggaagatgaaaagaaaaagacagacacattgctgtattctgtccttcctccgtctgttgccaatgagctgcggcacaagcgtccagtgcctgccaaaagatatgacaatgtgaccatcctctttagtggcattgtgggcttcaatgctttctgtagcaagcatgcatctggagaaggagccatgaagatcgtcaacctcctcaacgacctctacaccagatttgacacactgactgattcccggaaaaacccatttgtttataaggcaagtgtggagactgttggtgacaagtatatgacagtgagtggtttaccagagccatgcattcaccatgcacgatccatctgccacctggccttggacatgatggaaattgctggccaggttcaagtagatggtgaatctgttcagataacaatagggatacacactggagaggtagttacaggtgtcataggacagcggatgcctcgatactgtctttttgggaatactgtcaacctcacaagccgaacagaaaccacaggagaaaagggaaaaataaatgtgtctgaatatacatacagatgtcttatgtctccagaaaattcagatccacaattccacttggagcacagaggcccagtgtccatgaagggcaaaaaagaaccaatgcaagtttggtttctatccagaaaaaatacaggaacagag

SEQ ID NO: 44363 - DNA, 1616 bp, Homo Sapiens
ggaacatggcggaccagatcccgctttacccggtgcgtagcgcagcggcggccgcagccaaccgcaaacgcgcggcctactacagcgccgcggggcccaggccgggagccgaccggcacagcagttgctgtggttggctgataaatatttgtcgaagaaagaaagagctgaaagctcgcacagtatggcttggatgtcctgaaaagtgtgaagaaaaacatcccaggaattctataaaaaatcaaaaatacaatgtgtttacctttatacctggggttttgtatgaacaattcaagtttttcttgaatctctattttctagtaatatcctgctcacagtttgtaccagcattgaaaataggctatctctacacctactgggctcctctgggatttgtcttggctgttactatgacacgggaagcaattgatgaatttcggcgttttcagcgtgacaaggaagtgaattcacaactatatagcaagcttacagtaagaggtaaagtgcaagttaagagttcagacatacaagttggagacctcatcatagtggaaaagaatcaaagaattccatcggacatggtgtttcttaggacttcagaaaaagcaggttcgtgttttattcgaactgatcaactagatggtgaaactgactggaagctgaaggtggcagtgagctgcacgcaacagctgccggctctgggggaccttttttctatcagtgcttatgtttatgctcagaaaccacaaatggacattcacagtttcgaaggcacatttaccagggaagacagtgacccgcccattcatgaaagtctcagcatagaaaatacattgtgggcaagcaccattgttgcatcaggtactgtaataggtgttgtcatttataccggaaaagagactcgaagtgtaatgaacacatccaatccaaaaaataaggttggtttgttggaccttgaactcaatcggctgacgaaagcgctatttttggctttagttgctctttccattgttatggtaaccttacaaggatttgtgggtccatggtaccgcaatctttttcggttccttctcctcttttcttacatcattcccataagtttgcgtgtgaacttggacatgggcaaagcggtgtatggatggatgatgatgaaagatgagaacatccctggcacggtcgttcggaccagcactatcccagaggaacttgggcgcctggtgtatttattgacagacaaaacaggaaccctcacccagaatgaaatgatatttaagcggctgcacctgggcaccgtgtcctatggcgccgacacgatggatgagatccagagccatgtcagggactcctactcacagtctcaagctggtggaaacaatactggttcaactccactaagaaaagcccaatcttcagctcccaaagttaggaaaagtgtcagtagtcgaatccatgaagccgtgaaagccatcgtgctgtgtcacaacgtgacccccgtgtatgagtctcgggccggcgttactgaggagactgagttcgcagaggctgaccaagacttcagtgatgagaatcgcacctaccaggcttccagcccggatgaggtcagtcaaagcacaaaa

SEQ ID NO: 44364 - DNA, 2906 bp, Homo Sapiens
gtcgacaggaccgggttgtccggccccacccccgcttccctttgccgcgctccgggtctcgggttttaacccaaggtggagagctggattccggcgggcggcgcttggagcaggtggagaggcgtcctctttccggctgttgctgctcttcttcctccaatcctgggtctcagtcagggaagaacgaacattcttcctttgctgctggagctttagagaactgttgcccagcacctaggcacttcagacatttcatctcactcatttttgtaatttcactgtaaaaatcacctgcacatttataacactgtgactctccacttctgctcaatgctgagaaggggtccgcatactgcggggagctgtctaaggtgctgaagcttcccaagcatcagtctacaccaacaccatgcggggttagattgtacattttcattctgtctttctggttccccatgccttggataagactattttcaggatcgtgaatatctctccgtatcatggcccacgtgagacactttcggacattagtttcgggattttacttctgggaagcagcactgttactcagtttggttgccacaaaggaaacagacagtgcaagatctcgaagtgctccaatgtcaccttctgattttctggataaattaatgggcaggacatcaggatatgatgcaagaatcagacccaattttaaaggccctccagttaatgtcacatgcaacatattcatcaacagctttggctctatcgcagagacgaccatggattacagagtgaatatctttcttcgtcagaaatggaatgatccccgcctcgcgtacagtgaatatcctgacgactctttagacctcgacccctccatgttggactccatttggaaacctgatttgttctttgccaatgaaaagggtgccaactttcatgaagtcactacagacaacaaattgctaagaattttcaaaaatggaaatgttctttattcaataagattaacattaacactttcctgtccaatggatctcaagaattttcccatggatgtacaaacatgtataatgcaactggaaagctttgggtacacaatgaatgatctcatttttgaatggcaagatgaggcacccgtacaagtggcagaaggactcactttgccccagtttctgttgaaagaagaaaaagatttacgatactgcactaaacattacaatacaggaaagtttacgtgtatagaagtgcgattccatctggagcgacaaatgggatactatctgatccagatgtacattcccagtctcctgattgttattctatcctgggtttcattctggatcaacatggatgcagcaccggccagggtagctctggggataaccactgtgctaacgatgactacacagagttcaggatcacgagcttccttgccaaaagtttcatatgtcaaagctattgatatttggatggcagtatgcctcctttttgtgttttcagcacttctggagtatgcagctgtaaattttgtatcaagacaacacaaagaacttctgagatttcgacgaaagagaaagaataagacagaagcttttgcactggagaagttttaccgtttctcagatatggatgatgaggtaagggaaagccgattcagcttcacagcctatggaatgggaccatgtctacaagcaaaggatggcatgactccaaagggccccaaccaccctgtccaggtaatgccaaaaagtcctgatgaaatgaggaaggtctttatcgaccgggccaagaagattgataccatctcccgagcctgcttcccattagcttttttgatttttaatattttctactgggttatctataaaattcttaggcatgaggatattcatcagcagcaagattaagtctctgggggcatgcaaatgcaaatggtcaattcagaagaaagtgtctctgccataggtgtgtatgtgtatatgtgtgcgtgtggtatacaaatgatgaccattgtattaaaatggcatatggaaaagctttgtattttggttagctatgcaaagtcatgagaaagatgagattcttttaatgaatataaaatatttattaggggattctatttcatattaattccaggtgatttgttttttcacagtaaaccatgtaagtggaagctttactgccaatgtgtttatatgttatataatatctcataatagtagacatgaaaactactttgaaattccttgatttgtaattcaatgctattaaatcatacaaaagcaaattttgcacagtaaaccaatagtttgagatttaaaactattttcttatagtatagttacaaaatgggaaaataattagttacagtgggaaattcactcatattaatggaggattgtacatataaatactatttaaacaacatatgtaattttgaaaatttttaaataagagcattaaaagactttaatgatttggaatactaaatttaattgtttagaatattaagttttcctctgtgcaaatttaaaacaaataacaagagatcgtgttacagtcacaatctacttttcttaaactttgtatctctaggaacgaaggtggaaatacgggaaacaactttgtttttaaataagtattatagctatgtatttttagttattgccaaacattgaacaattcaagccagcacccttgtttttgttagacttttaatagctacttaactgtatgtgattgtgtttaataatttgatataacaggacaaaattcagtaagacttttatattttagtttagaatgtgactttaaaattcaatgggattaaagtatttacattttgataaaaatgaatacaatgaaaacaaaatggattcatggaagattttttaataaaaaccattttcccatca

SEQ ID NO: 44365 - DNA, 327 bp, Homo Sapiens
ctgccccgcggcttcgagccccaagctcccgaggacttggcgcagcggagtttggtggagctgcgggaaatgttgaagctccaggagagacttttgcgcaacgaaaaattcatttgcaaattgcccgacaaaggtaaaaagatctttgactcttttgccaaactgaaagccgccattgcagaatgtgaagaagttagaagaaaaaatgaactgtttcaccctgttagtttagactgtaagctaaggcaaaaagcaattgcagaagttgatgtgggtacagataaggcccggaattctgacccgatacttgatacttcatcactagtt

SEQ ID NO: 44366 - DNA, 936 bp, Homo Sapiens
atgttcctgcgacggcttggtggctggctacctcgcccttggggccgccggaaaccaatgaggcctgacccgccttacccagaacccagacgggtggacagctcctcggagaattcaggaagtgactgggatagtgccccagaaaccatggaagatgtggggcatcccaagactaaggactcgggggcattgagggtttctagggctgcttccgaaccaagcaaggaggagccccaagttgagcagctagggagcaaaagaatggattccctcaagtgggaccagcctatctctagcactcaagagtctgggagactggaggctggaggggccagtcccaaactcagatgggatcatgtggattcaggtggcaccaggagaccaggggtgtcccctgaagggggactgagcgtccctgggccaggagccccattggagaaacctggtaggcgtgagaagctgttgggctggctgcggggggaaccaggagctccctcccggtacttggggggcccagaagagtgtctgcagatctccaccaacctgaccctgcatcttctggagctgctggcctctgccctgctggccctgtgctcacgaccactgcgggcagccttggacacactgggcctgcgtggaccgctgggcctctggctacatggcctactgtccttcctggctgccctgcatgggctccatgctgttctgagcctacttactgcccaccctttgcacttcgcctgcctctttggtctcctgcaggccttggtgctggctgtcagcgggagcccaatggggatgaggcggccactgactgggagagtgaggggttggagagggaaggtgaggagcagaggggagacccgggaaaggggctgtgaccgtggggtgggggcaaagggtgaagagagtgtgggctttaggagaaaagtgtga

SEQ ID NO: 44367 - DNA, 844 bp, Homo Sapiens
gcggagcgaggctggaggcgcgggagggcagcgagaggttcgcgggtgcagcgcacaggagaccatgtccgggggcagcagctgcagccagaccccaagccgggccatccccgccactcgccgggtggtgctcggcgacggcgtgcagctcccgcccggggactacagcacgacccccggcggcacgctcttcagcaccaccccgggaggtaccaggatcatctatgaccggaaattcctgatggagtgtcggaactcacctgtgaccaaaacacccccaagggatctgcccaccattccgggggtcaccagcccttccagtgatgagccccccatggaagccagccagagccacctgcgcaatagcccagaagataagcgggcgggcggtgaagagtcacagtttgagatggacatttaaagcaccagccatcgtgtggagcactaccaaggggcccctcagggccttcctgggaggagtcccaccagccaggccttatgaaagtgatcatactgggcaggcgttggcgtggggtcggacaccccagccctttctccctcactcagggcacctgccccctcctcttcgtgaacaccagcagatacctccttgtgcctccactgatgcaggagctgccaccccaaggggagtgacccctgccagcacaccctgcagccaagggccaggaagtggacaagaacgaacccttccttccgaatgatcagcagttccagcccctcgctgctgggggcgcaaccaccccttccttaggttgatgtgcttgggaaagctccctccccctccttccccaagagaggaaataaaagccaccttcgccctagg

SEQ ID NO: 44368 - DNA, 3445 bp, Homo Sapiens
atgttacgtgaggaagcagctcagaagaggaaaggaaaggagccaggcatggctcttcctcagggacgcttgactttccgggatgtggctatagaattctcattggcagagtggaaatgcctgaacccttcacagagggctttgtacagggaagtgatgttggagaactacaggaacctggaggctgtggatatctcttccaaatgcatgatgaaggaggtcttgtcaacagggcaaggcaatacagaagtgatccacacagggacattgcaaagacatgaaagtcatcacattggagatttttgcttccaggaaattgagaaagaaattcatgacattgagtttcagtgtcaagaagatgaaagaaatggccttgaagcacccatgacaaaaataaaaaagttgactggtagcacagaccaacatgatcacaggcatgctggaaacaagcctattaaagatcagcttggatcaagcttttattcacatctgcctgaactccacatatttcagatcaaaggtgaaattggtaatcaacttgagaagtctactaatgatgctccctcagtttcaacattccaaagaatttcctgtaggccccaaacccagatttctaataactatgggaataatcccctgaattcttcattactcccacaaaaacaggaagtacacatgagagaaaaatctttccaatgtaataagagtggcaaagcctttaattgtagctcactcttaaggaaacaccagataccccatttaggagacaaacaatataaatgtgatgtatgtggcaagctctttaatcacgagcaataccttgcatgccatgatagatgtcacactgttgagaaaccttacaagtgtaaagagtgtggcaagaccttcagtcaggagtcatcccttacctgccatcgtagacttcatactggagtaaaacgttacaattgtaatgagtgtggcaagatctttggtcaaaattcagcccttctaattgataaggcaattgatactggagaaaatccttacaagtgtaatgaatgtgacaaggcttttaatcaacaatcacaactttcacatcatagaattcatactggagagaaaccttacaaatgtgaagaatgtgacaaagttttcagtcggaaatcaaccattgagacacataagagaattcatactggagagaaaccatacagatgtaaggtttgtgacacagctttcacgtggcattcacagctggctcgacatagaagaattcatactgcaaagaaaacttataaatgtaatgagtgtggcaagaccttcagtcacaagtcatcccttgtatgccatcatagacttcatggtggagagaaatcttacaaatgtaaggtttgtgacaaggcttttgtgtggagttcacaactggcaaaacatactagaattgactgtggagaaaaaccttacaagtgtaatgaatgtgggaagacctttggtcaaaattcagatcttttaattcataagtcaattcatactggggagcaaccttacaaatgtgatgaatgtgaaaaggttttcagtcgtaaatcaagccttgagacacataagataggtcatactggagagaaaccatacaaatgtaaggtttgtgacaaggcttttgcgtgtcattcctatctggcaaaacatactagaattcatagtggagagaaaccttacaagtgtaatgagtgcagcaagaccttcagtcacaggtcataccttgtatgccatcatagagttcatagtggtgagaaaccttacaagtgtaatgagtgcagcaagaccttcagtcgcaggtcatcccttcattgccatcgtagacttcatagtggtgagaaaccttacaagtgtaatgagtgtggcaataccttccgtcactgctcatcccttatataccatcgtagacttcatactggagagaaatcttacaaatgtacaatttgtgacaaggctttcgtgcgtaattcactcctgtcaagacataccagaattcacactgcagagaaaccttacaagtgtaatgaatgtgggaaggcttttaatcaacaatcacacctttcacgtcatcatagaattcatactggagagaaaccttagaaatgtgaagcatgtgacaaagtttccatttggaaatcacaccttaaagacataggagaatttatactggagagaaagcttacaaatgtaaggtttctgacaagacttgggagtgattcacacctggaacaacatactggacttcacactggagagaaaccttacaagtgtaatgagtgtggcaaagcctttggcaagcagtcaacacttattcaccatcaggcaattcatggtgtagggaaacttgactaatgtaatgattgtcacaaagtcttcagtaatgctacaacgattacaaatcattggagaatccataatgaagagagatcttacaagtgtaataaatgtggcaaatttttcagagatcgttcacatattgcaggtcatcggtgaactcatactggagagaaaccttacaaatgtcatgactgtgccaaggtcttcagtcaagcttcatcctatgcaaaacataggagaatttatacaggagagaaacctcacaagtgtgatgattgtggcaaagcctttgcttcacgttcacacgtcattagacatcagagaatctatactggacagaaatcttacaaatgtcatcagtgtggcaaggtcttcagtccaagatcactccatgcagaacatcagaaaattcatttttgagataaccgttcccaatgaaatgagtatagcaaaccatcaagcattaattgacattggagtcaattcagcattgacttgagtttgtgttgacttaacattgagttcaagcctttattgacattcaagtgtttatgttaagaggatggggccaggtgtggtggctccgacctgtaatcccagcacgtcgggaggccaaggcacataggtcacttgaggtcaggagtttgaaaccagcatggccaacagatgtgagccacttttctcagcctgttttttgtttcttattttctattatttttttgagccagtactttttaaagagatagtacttttttcagttagtactttttgaaagggatatatcatagtaatttttaaaagggatatgaggccaggcacggaggctcatgcctataatcccagcactttgggaggccgaggcaggcagatcacggggtcaggagatcgagactttcctggctaacagggtgaatccctgtctctactaaaaatacaaaaaattagctgggcatggtggctggcgcctgtagtcccagctactccagatgctgaggcaggagaatggcatgaacctgtgaggcggagcttgcagggagtcgagatcgcaccactgggctccagcctgggcgacagagtgagagtctatctc

SEQ ID NO: 44369 - DNA, 2367 bp, Homo Sapiens
gccagtggcgctgcgctgaatgcaactgcgcgcgcccgccgggtgagccagcgatctgagccaggcgggggcggcccgacctttcccgcccagcctgggtcagaggaagccgaaagcggcctcagcaagtgggttcgttccgggcctccagctatcagctcccgatctcgtgtttgagggtagcgaccccgatttctgtttgcatgcacagccagcagccctagcgccagatcctaaagctggatatcttttaactgggctaccagcccgggcctcaaagttttgagtgagggccgccaggctcaggccccagcgaagccccgagcgccatggccgacccgcaggctggctccgcggccggggactgggagatcgatgtcgagagcctggagctggaagaggacgtctgcggggcgccgcggtccacgccccccgggcccagcccgccgccggcggacggggactgcgaggacgacgaagatgacgacggggtggacgaagacgcggaagaagagggcgacggcgaggaggcaggcgcgtcccccgggatgcccggccagccggagcagcgggggggaccgcagccgaggccgccgctcgcgcctcaggcctcacccgccggcaccggtccccgagagcgctgcactcccgcgggcggcggcgcggagccgcgcaagctgagccgcacgcccaagtgcgcgcgctgccgcaaccacggcgtggtgtcctgcctgaagggccacaagcgcttctgtcgctggcgcgactgccagtgcgccaactgcctgctggtggtggagcggcagcgcgtcatggccgcccaggtggcgctccggaggcagcaggccaccgaggacaagaaggggctttccgggaaacagaataatttcgagcgcaaagctgtgtaccagaggcaagtcagagcccccagtttgctggccaaaagcattttagaagttctccttggattattctacagctattatgtgtacataatgaaccatctttagaaaataaaagtgacatcagctctaggctatcgccccattccagcggagacttatgtaggagggaccttccctctacctcccccagttagtgacaggatgaggaaaagaagagcctttgctgataaagagttggagaacattatgctggagagagaatataaagaaagggagatgttggaaacttctcaagctgctgctctgtttctgcccaaccgcatggtgcctggacctgactacaattcctacaaaagtgcctacagccccagcccagtggaaccaccaagcaaggacttctgtaattttttgcccacctgccttgatttaaccatgcagtattcagggtctgggaatatggaactaatttcttctaatgtcagcgtggccacaacttatagacagtatcccttgtcctcaagatttttagtttggcccaagtgtggccccattagcgacaccctcctctaccagcaatgcctgctaaatgccaccacctcagttcaagccctgaagcctggggccagctgggacttgaagggagcacgagtccaggatggactcagtgcagagcaggacatgatgccatcgaaattggaaggttccctggtgctgcctcacactcctgagatccagaccacgagaagtgaccttcagggtcatcaggctgtcccagagaggtccgcgttctccccaccccgacggaatttctctcccattgttgacacggactccctggcagctcaagggcatgtcttaacgaagatcagcaaagaaaacaccaggcaccctctgccacttagacataatccattccactcattattccagcaaacacttactgacaaatcgggtcctgagttgaaaacaccatttgtcaaagaggcctttgaagagacccctaagaaacacagagagtgtttagttaaggacaaccagaagtacacatttacaatagatagatgtgcaaaagacctttttgtagccaaacaagttggaacaaaactctcggtgaatgaaccactgtcattttctgttgagtctattcttaagaggccttcatctgccatcactcgtgtctctcagtgaaaggctgcttaaacagaaagctggattttctgcagtcttagagcattatagccatttgctactttttttaaaagttaagatgtttgtgtaaagaaatttctaatgtaaagatgatgattttgaaaaattttatatattcctaatatgcatgtactttttcttatcacatatatttaaacttacagatggaaattgcccaatgtgcaaattgttaagtaccacactttacacagcatttcaaaaagcaataaaattgacactgtcttctcaaaga

SEQ ID NO: 44370 - DNA, 885 bp, Homo Sapiens
gggaaggcggagcttggacgagccgagaggcggggctcaaagttcctacccgcgagagggaagaagcaggaggtgctctggtaaaacaagtataaaatgaatgtcaggatgttctccctcatggtgggcatcttctctgtccttaataccacccagttcttcatctttgacctgaaccagaagacacacatttgctatgaggccaagttcagcatctacgtggactcaaagtcggagctagtcacttggaccctgttccacagggctaatatcagcactggcctctccctcaccaccatcatcatcggctgcttcctcttttattgtatccacaagaatatctacatggggctgctgatctatgccatgtggatcatcacttacgagctcatcaacttctccatagtcctgctcctcaacgggatcatcaaagatcacttcaagacgctgagttatttgcactggatcttccaaatctcacacatgctcctgcactttttctgtctgcccttcatcgtcaagcatgcatacaacctttacaaggaatcccagactgtgggcaggaaacgccgccacaggctctgctccaccattgcagtgaactcatgactacctgtccgtctgggaatgttgtaccggaagttaaactgaaccatgccagatgccaggaaaggtgggagggaatggtgttcctcaacaatggaaccctccctaccctgcctgtcttctgttgatgctgcttggtttgtcagggcttttgagttttacgcactgaggaatgattctcgggagagggcaggttgtgcggatcaattattttacagatgtgttgtgtgacttgttttagcagttaatgatatgtggccttgtgcttacttaaccatc

SEQ ID NO: 44371 - DNA, 354 bp, Homo Sapiens
agatggtggttctcatggacccaatggaggatcccgacgacatcctgcgggcgcatcgctcccgggagaagtcctacctgttcgacgtggcctttgacttcaccgccacccaggagatggtgtatcaggccaccaccaagagcctcatcgagggcgtcatctcaggctacaatgccactgtctttgcctatggccccacaggctgtgggaaaacctacaccatgctgggcacagaccaggagcctggcatctatgttcagaccctcaacgacctcttccgtgccatcgaggagaccagcaatgacatggagtatgaggtctccatgtcctacctggagatcatgcagctgctga

SEQ ID NO: 44372 - DNA, 2137 bp, Homo Sapiens
aatagacacaaggagaggcaagaagctccacctcaccccagtgggggctgcaggtggatggagaccagagcatgcggagcgcccctgagcagccgtggctggggtgggagcagggccatgatggctctggagaaaagtggggcaggcagctgcctccctggggctgaggggctgcaaggagaagttgcatcccgatgcatggcctatgcatggtacccagtccccatggccaccctggcatttcaggcacctgctgtgcaccaggtcaggccccagaccggcatcctctctctctctgtgcacccacacctggcaggaagcggcagcaccatctggttgcctggcagccttgtcctgctcccagctgcctgtggccccactggactcagccccccagcagggaggccttcggctgcagggcaggggctgggcgggcgcaccctgtggctgggggcactcaggagccctggcttcacctctgctctcggcgcacatgtggacagctcacccttcagcaggggtccggaccaaagtccttgacccaccgggttctgagtcctgacagggctgtggacagcttccctttccaccccggcacgtgctggcaggagcttccgggccctcaccctggggcagcaactcctgcaccaccagccacgcccggccacgagaaagtgcagaacagctcaggcccttctcacaacttcctggagctcagggacagttttttgagcacaaatggtgttaggtgacagactcgggattggccttggacactcagccccctctttctggagcaaagactcatgacccacgtccaagtcaccctgcacatccctaagcctgaccgtgaagcagccctcacggatgcccaggactccctgtccgcaccaccaggcagccgaggcaggtttggaccagcttctcacactcacaccttcctagggttgccccaggccctgacctgctgaccctgcagctatgacctctgacctgtggaggatgggaggggtgagcagcagggagagtgggaaggaggaatggaaaaccgtccaggaagggaggctgcagccccgacacgaacaggagccaccaccagggggtgctgtgcagggctcccggaggacaggaccttccagggcctccctgccccgaacccataggtgccaggcttctcactgctcacgacctccgtgccgggctcatacctgccgcgccagcccctcttcagcagagcacaagtctggcagcaggagggcaccagccaggggccccgcgcccccgcctctgtacagcagggtcaccgtggggtgacatgagaacaccgacccagggaatgggctcctgccacacctgcctgggaacctgggctgtgagtcctgctcgctgcaccctctagcctgacgttgaagtaacctcgccagcggggccctctgtggcactgggcactcagggagagcacgtggcattggagaaggtcccacccccaaatgcaaagctgggaaaaccaggctgagccggggatcaggccacctccgcagggacccactgctgcctcttccaggagcccaggagacccagtgggtctcctgcccccgactccaactccctcctggcaggacacacccagctcacagtggcctttccatcctgggaaagggagtgagaggaggctcaggccagggacccgcccagctctggccggcaaccgcccttcagcctttcctgaaccactgtgtgggccccaacccatccgctgcctgccggagggagcccatggggaatggactattcttgccacccctatccatggcaggggaggggctcagcatggctcttgcccacccagaagaaggtgcagggggcctggcgtggtggttcacacctttgggaggccgaggtgggtggatcacctcaggtcaggagtttgagaccagcctggccaacatggtgaaaccctgtttctactgaaaatacaaaaattagccaggcgtggtgatgggcacctgtaatctcagctactcaggaggctgaggcaggagaatcactttcacttaaacccaggaggcggaggttgcagtgagttgagatcgcgccactgcactccagcctgggcaacagaacaagactccgtctc

SEQ ID NO: 44373 - DNA, 892 bp, Homo Sapiens
ccacatttgtgcatcacttctttagagaaagttaagtctgtgttctgcttaggagagataacactttttgtccctgtaggtggcccccctggtgtagccattagttgctaattacttgcaaacaaataaacaattaactccttaagctgctggctgggcaagtgttcattgacatgctaaaactttctaagacaggattttaattagtgacgttctaaatccagcccccttgtcagcggagctataaggtgaactgcaggaagatcccagccctatacacgtggggcagagccagcagaggccagagctgttgctctgtgcagaccacgagaggatgtctcccagccttcaggaaggcgctcagctcggggaaaacaaaccctcaacttgctccttttcaattgagagaatcttaggactggaccagaagaaagactgtgttccattaatgaaaccccacaggccctgggcagacacctgcagctcatcagggaaagatggtaacttatgtctacatgtcccaaatcctcccagtgggatttcattccctagcgtggtggatcacccaatgccagaagaaagagcttcgaaatatgaaaattacttttcagcctcagaaagactgtctttgaaaagagagttgagttggtatagaggccgaagaccaagaactgcttttactcaaaaccagattgaagtgttagaaaatgtctttagagtaaactgctatcctggtatcgatattagagaagacttagctcaaaaattgaatctagaggaagacagaatccagatttggtttcaaaatcggcgtgcaaaactgaaaaggtcccatagagaatcacagtttctaatggcgaaaaaaaatttcaacacaaatctgctggaatag

SEQ ID NO: 44374 - DNA, 481 bp, Homo Sapiens
gtagacagctctgcagggaagtctgtgacaacctggccagacatagggctcacgatctgatcagagtcatggcaccccagactctgctgcctgtcctggttctctgtgtgctgctgctgcaggcccagggaggataccgtgacaagaagaggatgcagaaaacacagctatccccagaaatcaaagtctgccagcagcagcctaaactatatctatgcaaacacttatgtgaatctcaccgagattgtcaagcaaataacatatgctgttctacctactgtgggaatgtttgcatgagcatcctgtgagtgggagagtgggctgggatgtgcatcctgcttcccaactcctctatccaagactgtgcccacatccgaagcacaaggacctcaagtcaccagcataagaacatcaacaggaatgccgccctctctactgtctgaaccccttgtccctgtcaaataaaccagaacaaatgccc

SEQ ID NO: 44375 - DNA, 808 bp, Homo Sapiens
ttgcctgtgtttctctccctcgtaggtgtggtgtcagcacagcggcaggtcaccgttcaggaaggacccttgtaccgcacagagggctcccacatcactatctggtgcaatgtgagtggctaccagggacctcctgagcagaatttccagtggtccatttacctgccttcatcgccagagcgagaggtgcagatcatcagcaccatagactcttccttcccctatgccatctacacccagcgcgtccacggagggaagatcttcatagaaagagtccaggggaacccaaccctattgcacatcacagatcttcaggcccgggatgccggagaatatgaatgccacacacccagcaccgataagcaatactttgggagttacagtgcaaagatgaacctagtggtgatcccagactccctgcagaccactgccatgccccagactctgcacagagtggagcaggacccactggaactcacttgtgaggtggcctcggagaccgttcagcacagccaggtggcctggctctggcagaaagttggcgagaagcccgtggaggtcatctccctgagccgagatttcatgcttcactccggcagcgaatatgcctggaggcagagcctgggggaggtgcggctggacaagctggggaggaccaccttccgcctcaccatcttccacctgcagccttctgaccagggcgagttctactgcgaggccgccgagtggatccagaatccggatgggtcgtggtatgctatgacccgaaagcgttccgagggagccgtggtcaacgtccagccaactg

SEQ ID NO: 44376 - DNA, 1443 bp, Homo Sapiens
atggcgaggttcccgaaggccgacctggccgctgcaggagttatgttactttgccacttcttcacggaccagtttcagttcgccgatgggaaacccggagaccaaatccttgattggcagtatggagttactcaggccttccctcacacagaggaggaggtggaagttgattcacacgcgtacagccacaggtggaaaagaaacttggactttctcaaggcggtagacacgaaccgagcaagcgtcggccaagactctcctgagcccagaagcttcacagacctgctgctggatgatgggcaggacaataacactcagatcgagagagtgaatctgtccttcgattttccattttatggccacttcctacgtgaaatcactgtggcaaccgggggtttcatatacactggagaagtcgtacatcgaatgctaacagccacacagtacatagcacctttaatggcaaatttcgatcccagtgtatccagaaattcaactgtcagatattttgataatggcacagcacttgtggtccagtgggaccatgtacatctccaggataattataacctgggaagcttcacattccaggcaaccctgctcatggatggacgaatcatctttggatacaaagaaattcctgtcttggtcacacagataagttcaaccaatcatccagtgaaagtcggactgtccgatgcatttgtcgttgtccacaggatccaacaaattcccaatgttcgaagaagaacaatttatgaataccaccgagtagagctacaaatgtcaaaaattaccaacatttcggctgtggagatgaccccattacccacatgcctccagtttaacagatgtggcccctgtgtatcttctcagattggcttcaactgcagttggtgtagtaaacttcaaagatgttccagtggatttgatcgtcatcggcaggactgggtggacagtggatgccctgaagagtcaaaagagaagatgtgtgagaatacagaaccagtggaaacttcttctcgaaccaccacaaccgtaggagcgacaaccacccagttcagggtcctaactaccaccagaagagcagtgacttctcagtttcccaccagcctccctacagaagatgataccaagatagcactacatctaaaagataatggagcttctacagatgacagtgcagctgagaagaaagggggaaccctccacgctggcctcatcattggaatcctcatcctggtcctcattgtagccacagccattcttgtgacagtctatatgtatcaccacccaacatcagcagccagcatcttctttattgagagacgcccaagcagatggcctgcgatgaagtttagaagaggctctggacatcctgcctatgctgaagttgaaccagttggagagaaagaaggctttattgtatcagagcagtgctaa

SEQ ID NO: 44377 - DNA, 1179 bp, Homo Sapiens
gggcatcccagcactgagttctgcccgggagaagccgacccctcccgcaatgcccgccccgccgtgcgcctcctgccatgctgcacgcgccgccctccgccgtccgctctcgggccaagcgctgtgcggtgcctgcttctgcgccgccttcgaggccgaggtgctgcacacggtgctcgccggccgcctgctgccgcccggcgcggtggtggccgtgggcgcctcgggcggcaaggactccacggtgctggcgcacgtgctgcgcgcgctggcgccgcgcctgggcatctcactgcagctcgtggccgtcgatgagggcatcggtggctaccgggacgcggcgttggcggccgtgcggcgccaggcggcgcgctgggagctgccgctcacggtcgtggcctacgaagacctctttgggggctggacgatggacgccgtggcccgcagcacagccggctccggccgcagccgctcctgctgcaccttctgtggagtgctgcggcgccgggcgctggaggaaggggcgcgccgcgtgggagccacgcacatcgtgacaggtcacaacgccgacgacatggcggagaccgtgctcatgaacttcctacggggcgacgcggggcggctggcccggggcgggggcctgggctctcccggcgaggggggcgccctgccgcgctgccgcccgctgcagttcgcctcgcagaaggaggtggtgctgtacgcgcacttccgccgcctcgactacttctccgaggagtgcgtctacgcgcccgaggccttccgcggccacgcccgggacctgctcaagcgcctggaggcggcgcggccgtccgcggtgctggacctcgtgcactcggccgagcgcctggcgctggccccggccgcgcggcccccgcgccccggcgcctgctcccgctgtggggcgctggccagccgcgcgctctgccaggcctgcgcgctcctggacggcctgaaccgcggccggccccgcctggccatcggcaagggccgccggggtctggacgaggaggcgacgccggggacgcccggggatccggcccggccccccgcctccaaggccgtccccaccttctagcgacttcgggcctcccgccgggatctgatgccgcggggtgggggctgcctgtaaatgacactgtgaataaacccgttacctta

SEQ ID NO: 44378 - DNA, 1053 bp, Homo Sapiens
atgatccggggcttcgaggcgcccatggcggagaacccgccgccgccgccgccgcccgtcatcttctgccacgactccccgaagcgggtgctggtgtcggtcatcaggacgaccccgatcaagccaacgtgcggcggtggaggggagccggagccgccgccgccgctcatccccaccagccccggcttcagcgacttcatggtgtacccgtggcgctggggcgagaacgcacacaacgtgacgctcagccctggggccgcgggggccgccgcctcggccgccctgcctgcagccgcagccgccgagcactcggggcttcgtggccggggcgcgcccccgcccgccgcctcggcctccgccgccgcctcgggaggtgaggacgaggaggaagcgagcagcccagacagcggccacctcaaggatggaatccgacgtggtaggcccagagcagatactgtccgcgatttaataaatgaaggagagcattcatccagcagaatccgttgtaacatctgtaatagggtgtttccacgggagaaatcgctccaggctcacaaaaggactcatacaggtgagaggccctatctgtgtgactatccagactgtggaaaagcctttgttcaaagtggacagctcaaaacacatcagcgtcttcacaccggagagaaaccttttgtttgttcagaaaatggctgcctgagcagattcacccatgcaaaccgccactgtccgaagcacccctacgccaggctgaagagagaggagcccacggacacactcagcaaacatcaggctgccgacaacaaggccgcggccgagtggctggcgaggtattgggaaatgagagagcagcgcacccccactttgaaaggcaagctggttcagaaggctgatcaggagcagcaggaccctctggaataccttcagtctgatgaagaggacgacgagaagagaggggcccagcgccggctgcaggagcagcgggagcgcctgcatggagccctcgcgctcatagagcttgccaacctgactggggcgccactccgacagtag

SEQ ID NO: 44379 - DNA, 714 bp, Homo Sapiens
atgaaaacccctgcggctccgacgcagatgcccacgttgcccaggccttcacagacccccaagccggaaccgccgggaaaacgattgccaaccggccacaacacccaggcagagacgcggggagaggctgaccagaagaaaggccgacgtgcaagaaacccagcctccggcgcacagggaacatgtgtcccaaggcgcacgcacacacagacggacagagacagaaagagagggcgacggaaagagcgagaagggagagagggagagagagagagagagagagagagacttaagagagagacggtagtgggcacacagacacgcgcgcgcgcgcacacacacacgcagacacacagacacacacacacccccataacggacacagacatacagcaggtaacacccacccccaggcagcccctgaagctgccgggttctagtctccgcgactacgagccaccggtgagacagcagcccacgggcacacagggagacctgtccttgacatcacaagggcgccacttttggggagactcacccgcacaccgtccgcgcacgcctgaggctgggatcccgcgctgcctccccggcgatctgtctgaggtttcttcctcctggggtttcttcctgctggtggaccctccgcgaatcccggcctccggagaccgtcctggtaactgccctggccagggctggtctcagccccgactctga

SEQ ID NO: 44380 - DNA, 1189 bp, Homo Sapiens
gcaccgtaggccacggcccacctgggttgccctcgcgtgaccacggcctcacctgctgtcttcatctgcaggactgggccggggtctgcagggctcagctgagcccatgagctcccagagctaacccctgaacacccaggcgggcaaagggctgatgtcggtagtccccatcctggaggggcaggtaaggccctgcctacacctcgccccacccgtgcctccaaaggccccaagccttcactctttcaccccacctccatttggctccaccttccctgtcgtggccctgcacccctgccacggccctgccccatctccatttaactcagtcatctgccgcggccccgccccaccccatctccatttggccccaccctccctgccacagccccgcccacttccatttggccccaccctccaccacagccccgcccacttccatttggccccaccctccaccacagccccacccatctccatttggctctgccctccttgccttggcccgcacccccccaacatctcttgaccccactttcatttggccccacccaccctgcctcagccccactccatctctttggctccgcatgctcctccctgtggcaggctctgcgcatctgctcctggcatggcgctgcggcacctcgccctcctggctggccttctcgtgggagtcgccagcaagtccatggagaacacggcccagctgcccgagtgctgtgtggatgtggtgggcgtcaacgccagctgcccaggcgcaagtctgtgtggtccaggctgttacaggcgctggaacgcggacgggagcgccagctgcgtccgctgtgggaacggaaccctcccagcctacaacggctccgagtgtagaagctttgctggcccgggtgcgccattccccatgaacagaagctcagggacccccgggcggccacatcctggggctccgcgcgtggccgcctccctcttcctgggcacgttcttcattagctccggcctcatcctctccgtagctgggttcttctacctcaagcgctccagtaaactccccagggcctgctacagaagaaacaaagggccggcccccgcagggtccctgccaggcagatggtccagccagcagttcggaccccaagctccggccctgcagcctggcgaagccgtaagtaacccacatcatccgggctga

SEQ ID NO: 44381 - DNA, 945 bp, Homo Sapiens
atggaatttacagatagaaactacacgttggtcactgagtttattctattaggttttccaactcgccctgaactgcagattgtcctgttcctcatgtttctgacattgtatgctataattctgatagggaacattggattgatgctgttgatcaggattgatcctcaccttcaaacccccatgtattttttccttagcaacctatcatttgtagacctttgctatttctcagacattgttcccaaaatgctggtcaatttcctctcggagaacaaatctatttcctattatgggtgtgccctgcagttttattttttctgtacttttgcagatacagaatccttcatcctggccgccatggcctatgatcgctatgtcgccatctgtaaccctttattgtacacagttgtgatgtctaggggcatctgtatgcggttgattgtcttgtcataccttggaggcaacatgagttccctggttcacacatcctttgcctttattctgaaatattgtgacaaaaatgttattaatcattttttctgtgacctccctcccctgcttaaactatcctgcactgacacaacaattaatgagtggctcctctccacatacggcagctcagtggaaatcatttgttttatcatcatcatcatctcctactttttcattcttctctcagtcttaaagatccgctctttcagtgggaggaagaagaccttttctacatgcgcctctcacctgacttcagtgacgatctaccaagggactctcctctttatttactcacggcccagctacctgtattctccaaacactgataaaattatctcagtgttctacaccattttcattccagtgctgaatccgttgatttatagtttgagaaataaagatgtaaaggatgcagctgagaaagttctaagatcaaaggtagattcttcatga

SEQ ID NO: 44382 - DNA, 993 bp, Homo Sapiens
atgcagcagcagcctctgcccgggcctggcgcccccacaactgagccaaccaagcctccctacagctacatcgcccttattgctatggccatccagagctcaccggggcagcgggccaccctcagtggcatctaccgctacatcatgggccgattcgccttctaccgccacaaccggcccggctggcagaacagcatccgccacaacctgtcactcaacgagtgctttgtcaaggtgccccgcgatgaccgcaagccaggcaagggcagctactggacgctggaccctgactgccacgacatgtttgagcacggcagcttcctacgccgccgccgccgcttcacccggcagacaggtgctgagggcacccggggccccgccaaggcacgccgtggacccctcagggcgaccagccaggacccaggagtccccaacgccacgaccggcaggcagtgctcattcccaccagagctgccagatcccaagggcctaagctttgggggtctggtgggggccatgccagccagtatgtgcccagcaaccactgatggcaggcctcggccacccatggagcccaaagagatttccacgcccaagcctgcatgcccaggggagctccccgtggccacctcatcttcctcatgcccagcgtttggctttcctgccggcttctcagaggctgagagttttaataaggcccctacgcccgtcttgtccccggaatcaggcatcgggagcagctaccagtgtcggctgcaggcactgaatttttgcatgggggctgacccaggccttgagcacctcttggcctcagcagccccctcccctgcaccacccacccctccaggctcactccgggccccactgcccctgccaactgaccacaaggaaccctgggttgcaggtggcttccctgtccagggaggctccggctacccattggggctgaccccctgcctataccggacgccaggaatgttcttctttgagtaa

SEQ ID NO: 44383 - DNA, 511 bp, Homo Sapiens
gtccgcgtcgctagctagtcgttctgaagcggcggccagagaagagtcaagggcacgagcatcgggtagccatgcctttcttggacatccagaaaaggttcggccttaacatagatcgatggttgacaatccagagtggtgaacagccctacaagatggctggtcgatgccatgcttttgaaaaagaatggatagaatgtgcacatggaatcggttatactcgggcagagaaagagtgcaagatagaatatgatgatttcgtagagtgtttgcttcggcagaaaacgatgagacgtgcaggtaccatcaggaagcagcgggataagctgataaaggaaggaaagtacacccctccacctcaccacattggcaagggggagcctcggccctgaacagagcagctgctgatgtctggaggctgattttcctgttctctgttctccactggaaaggttgtttacgacaaacctccttgtcaaagtgtgtaaaaataaaggattgctccatccta

SEQ ID NO: 44384 - DNA, 354 bp, Homo Sapiens
gtgcaaccccagagctgctgcacaacggaagaggccttggcacaccccttcttcctgcagtacgtggtggaggaagtgcggcacttcagtccccgggggaagttcaaggtgatcgctctgactgtgctggcttcagtgctgatctactgccagtaccaccgggtgaacccagtgacccgggagatcgtcatccgagacccatacaccctccagcctctgcgccggctcatcgacgcctacgctttccgaatctatggcccctgggcgaggaaggggcagcagcagaactgggcagcccttttcaagaacacacccaaggccgtgctcctctccctggccgaggaggactactga

SEQ ID NO: 44385 - DNA, 948 bp, Homo Sapiens
atggctcctgaaaatttcaccagggtcactgagtttattctcacaggtgtctctagctgtccagagctccagattcccctcttcctggtcttcctagtgctctatgtgctgaccatggcagggaacctgggcatcatcaccctcaccagtgttgactctcgacttcaaaaccccatgtactttttcctgagacatctagctatcatcaatcttggcaactctactgtcattgcccctaaaatgctgatgaactttttagtaaagaagaaaactacctcattctatgaatgtgccacccaactgggagggttcttgttctttattgtatcggaggtaatgatgctggctgtgatggcctatgaccgctatgtggccatttgtaaccctctgctctacatggtggtggtgtctcggcggctctgcctcctgctggtgtccctcacatacctctatggcttttctacagctattgtggtttcaccttgtatattctctgtgtcttattgctcttctaatataatcaatcatttttactgtgatattgcacctctgttagcattatcttgctctgatacttacataccagaaacaatagtctttatatctgcagcaacaaatttggttttttccatgattacagttctagtatcttatttcaatattgttttgtccattctaaggatacgttcaccagaaggaaggaaaaaagccttttccacctgcgcttcgcatatgatagcagtcacggttttctatgggacaatgctatttatgtatttgcagccccaaaccaaccactcactggatactgataagatggcttctgtgttttacacattggtgattcctatgctgaatcccttgatctacagcctgaggaataatgatgtaaatgttgccttaaagaaattcatggaaaatccatgttactcctttaaatcaatgtaa

SEQ ID NO: 44386 - DNA, 496 bp, Homo Sapiens
gaggtccgcggcagggtcccgcatggcggcgcacaggaagcacgtgtttgtggagaaggtgctgcagagactttttcctcctgttccaagtggccaaggaaagagggaaccccagacgctggccgtccaaaatccaccaaagaaagtgacctctgagaaagtgagccagaaacatgctgagcctttgacagacactggctctgagaccccgactgcccgacggctctacactgccagcgggcctcctgagggctacgtcccctgttggccggagcccagcagctgtgggagccccgagaacgcctccagcggggatgacacagaagatcaggatcctcatgaccagccaaagagaagaagaattaggaagcataaatcaaagaaaaaatttaaaaatcccaataatgttcttatagaacaagcagaattagagaaacagcagagtctgttacaggagaaatctcagcgacagcacacagatggcaccacaataagc

SEQ ID NO: 44387 - DNA, 507 bp, Homo Sapiens
atgaactcagtctctgtagtcatgatgctcacatccaagcccctgcacatcctaggaagattcatcactaagccattactcttcactaattccatggaaaacttcgaactaactcctagcagacatggccgtgtgcaccatcaatcatgtcatgaagcacccaggacctacaaggtggctgctgaagacagcagaaagacagaacctggtgctcagtggccaaggccatcttgtgggccacccggcagccatcttggccaagtgggttctgctgggaaggaaactggtggtccacgagggcatcaacatttctggcaatttctggagaaacaaattaaagtatctggccttcctctgcaagcagatgagcaccaacccttcccaaggcccacccgccccgccattcctgggcccccagcgcatcttttggtggccttgcagaaccaagtggggccaggctgccctggaccaccttatggtgttttatgggatctcactgccctatga

SEQ ID NO: 44388 - DNA, 567 bp, Homo Sapiens
atggactgcaggaagatggtccgcttctcttacagtgtgatttggatcatggccatttctaaagcctttgaactgggattagttgccgggctgggccatcaggaatttgctcgtccatctcggggagacctggccttcagagatgacagcatttggccccaggaggagcctgcaattcggcctcggtcttcccagcgtgtgctgcccatgggaatacagcacagtaaggagctaaacagaacctgctgcctgaatgggggaacctgcatgctggagtccttttgtgcctgccctccctccttctacggacggaactgtgagcacgatgtgcgcaaagagaactgtgggtctgtgccccatgacacctggctgcccaagaagtgttccctgtgtaaatgctggcacggtcagctccgctgctttcctcaggcatttctacccggctgtgatggccttgtgatggatgagcacctcgtggcttccaggactccagaactaccaccgtctgcacgtactaccacttttatgctagctggcatctgcctttctatacaaagctactattaa

SEQ ID NO: 44389 - DNA, 1492 bp, Homo Sapiens
agtctaagcaaaccccagcaggaaagcaggggtacagagaggagcccccttggcaccgccaccgcaccctaggccacccaccatggcgctgggcttggagcaggcggaggagcagcggttgtaccagcagacgctcctgcaagacgggctcaaagacatgctggaccatggcaagttcctcgactgtgtggtgcgggcgggcgagcgcgagttcccgtgccatcgcctggtgctggccgcctgcagcccctacttccgggcgcgctttctagccgagccggagcgcgcgggcgagctgcacctggaggaggtgtccccggacgtggtggcccaggtgctgcactacctgtacacatcagagatcgcgctggatgaggcgagcgtgcaggatttgttcgccgcggcacaccgcttccagatcccttccatcttcaccatctgcgtgtccttcctgcagaagcgcctgtgcctctccaactgcttggccgtcttccgtctcggcctcctgctcgactgcgcgcgtctcgccgtggctgcccgcgacttcatctgcgctcacttcacgctggtggcgcgcgacgctgacttcctcggactctcggccgacgagctcatcgccatcatctccagcgacggccttaacgtggagaaggaggaggcagtgttcgaggcggtgatgcggtgggcgggtagcggcgacgccgaggcgcaggctgagcgccagcgcgcgctgcccaccgtcttcgagagcgtgcgctgccgcttgctgccgcgcgcctttctggaaagccgcgtggagcgccaccctctcgtgcgtgcccagcccgagttgctgcgcaaggtgcagatggtgaaggatgcacacgagggccgcatcaccacgctgcggaagaaaaagaaggggaaggatggagccggggccaaggaggctgataagggcacaagcaaagccaaagcagaggaggatgaggaggccgaacgtatccttcctgggatcctcaatgacaccctgcgcttcggcatgttcctgcaggatctcatcttcatgatcagtgaggagggcgctgtggcctacgatccagcagccaacgagtgctactgtgcttccctctccaaccaggtccccaagaaccacgtcagcctggttaccaaggagaaccaggtcttcgtggctggaggcctcttctacaacgaagacaacaaagaggaccccatgagcgcatacttcctgcagtttgaccatctggactcagagtggctggggatgccaccgctgccctcgccccgctgcctctttggcctgggagaagctctcaactccatctacgtggtcggtggcagagagatcaaggacggcgagcgctgcctggactcggtcatgtgctacgacaggctctggggtcaccgacacagggctgaccagttctgccgaagtgtacagcatcacagacaacaagtgggcacccttcgaggccttcccacaggagcgtag

SEQ ID NO: 44390 - DNA, 339 bp, Homo Sapiens
aggaaatcttcagaggaactagacatggacaaggtgacagcagcaatggtactaaccagcttgtcgactagccctttggttcgaagtcctcccgtgcggccgaacgagagcctcagcggatcctggaaggagggcggctgcgtgccttccagcaccagcagcagcggctactggagctggagcgcccccagcgaccagtccaacccgtccacgccgtcgccgccgctctcggctgacagcttcaagcccttccgcagccccgcgcagccagacgacggcatcgacgaggcggaggccagcaacctgctcttcgacgagcccattcccaggaaaagaaag

SEQ ID NO: 44391 - DNA, 614 bp, Homo Sapiens
ggaaacccagcaggcggcgaagatggcggagaacagcggtcgcgccggcaagagcagcgggagcggcgcggggaagggggcggtgtccgcagagcaggtgattgctggcttcaaccgccttcggcaggaacagcgaggcctggcatccaaagcagctgagttggagatggagttgaatgagcacagcctagtgatcgatacactgaaggaggtagatgaaactcgtaagtgctaccgcatggttggaggagtgctggtggagcgaactgtcaaagaggtgctgcccgctttggagaacaacaaggagcagatacagaagatcattgagacactgacacagcagcttcaggcaaagggaaaagaactaaatgaattccgggaaaagcacaacattcgtctcatgggagaagatgagaagccagcagccaaggaaaactcagaaggggctggggctaaggccagctcagctggagtgttggtctcctagggaccaaggcctttgcatttttttctaccctgactcccacttctaatttctctttattgttattattattattttctctgctattgtaatatttttttgttaattaaatgttttggtcagaatctta

SEQ ID NO: 44392 - DNA, 702 bp, Homo Sapiens
atggccctagggggcagtactacctcactgagaaccactgttcagggagttagctgggtcgcagaggcaaaatgttggactacagcgtgtggggccacactgagcgatgatgaagaggagaggcatcccaacacccaccgggctaacctcttccgctggcagcaccaagcccgggtggagctcatggagcagttccagaaggagaaggaggaactggacaggggctgctgggagtacaagtgcaagatggccgagtgccagaggaagctgaaggagctggaggtgtcagagggtgccagggtggaggtggagtggctacacgaggagctgagctgggagcaaaagctggaggagatgcccaagaaaaagagcatgacctggaacgtggacacgctcagcaaaagcagtttcaggctgggtgagatggaccccaccaaggccaagttccccatgcagcagtgtatcgacgccggcctccgggtccccaactctgaggtcagcgaggccaaggagggagaggaggagtgttcagggaccggctgctggaagctgttcccaagacaggcggggatgtcagtgcgtgacccaccccagctgcagctgccacctgtgtgcaagcccctaggcgccccttttcagaaaacaaaaatagacaccatctccccagctcctggcttcctccacttccgctgctccccctag

SEQ ID NO: 44393 - DNA, 462 bp, Homo Sapiens
gccaagtccaagaaccacaccacacacaactggtcccgaatatggcacagaaattgcctcaagaaaccccaatcacaaagatacgaatctcttaagggggaccccaagttcctgaggaacatgcgctttgccaagaagcacaacaagaagggcctaaagaagatgcaggccaacaatgccaaggccatgagtgcacgtgcaaaggctatcaaggccctggtaaagcccaaggaagttaagcccaagatcccaaagggtgtcagccacaagctccatcgacttgcccacattgcccactccaagcttgggaagcatgatcatgcccacattgccaaagggctcaggctgtgtgggccaaaggccaagaccaaggatcaaaccaaggcccagcctgcagctccagcttcaattccagctcaggctcccaaaggcgcccaggccactacaaagggttcaaagtag

SEQ ID NO: 44394 - DNA, 1236 bp, Homo Sapiens
actctgtggggcccaggagcaggtagtcacccctttggggtccacaacacccagctgtccccagacttgtttccagggaagatagtgtcgagggccctcaaggagagcggggcagggatgcctgggcaggacaaggaccctagagtccaaaagaatcctgatgatcagagaagagtccccgaggtcaccggggatgcacggtctgcattttggcccctgcgggacactggagtcctctttccctttgtgcccagtcccgggcctctgcagacatacctccatgcccagagctcagaaatcagatataatcagacatcccagacctcctggacgagctcgagcaccaaacgaaatgccatctccagctcctacagctccacgggaggcttgccggggctaaagcagaggagggggccagcctcatcccgctgccagctgaccctcagttactcaaagacagtgagtgaggacaggcctcaggctgtctcttcgggtcacacacggtgtgaaaaggcggcagatacagcaccagggcagacacttgccccaaggggtggctcccccagatcccaggcctctaggccccgtagacgcaagattgccctgctgccacgcaggcgaggggagcctttgatgctgccacctcccttagagctggggtaccgggtcacggctgaagacctgcacctggaaaaagaggcggcattccagcggatcaacagtgcgctgcaggttgaggacaaggccatctcggactgcagaccctcatggccttcccacactctgtcctcacttgcaacaggggcttctggtgggcctcctgtttctaaagcacccactatggatgcacagcaggacagacccaagtcccaagactgcctgggcctagtggccccccttgcatctgctgcagaggtcccctctacagctcccatgtctgggaagaagcacagaccaccaggacccctgttctcctcctcagatccccttcctgccacctcttcccactcccgggactcagcccaggtcacctcgctgattcctgcgcccttcacagctgcaagcatggatgccggcatgagaagaacaaggcctggcacgtcggctcctgcagctgccgcggcagcccctcccccctccacattgaaccccacgtcggggtcactactccagtggatggaggcccttcacatttctgggcctcagccacagctgcagcaggtgcccagaggtcag

SEQ ID NO: 44395 - DNA, 857 bp, Homo Sapiens
ggggccggggtcgcggccgtggatggggccggggccaagaccgcggagttcgcggaggcaaggcccaggataaggagcggatgcccgtcaccaagctggacggcctggccaaggacatgaagatcaagtccctagaggagatttatctcttctcgctgcccatcaaggaatctgagatcattgactttttcctgggggcctctctcaaggacgaggttttgaagattatgcctgtgcggaaggagacccgcgccggccagcgcaccaggttcaaggcgtttgttgccatcagggactacaatggctacgctggtcgggttgaagtgctccaaggaggtggccgccgccatccgcggggccatcatcctgaccaagctctccattgtcaccgtgcgcagaggctactgggggaacaagatcggcaagctccacaccgtcccttgcaaggtgacaggccgctgcggctctgtgctggtgcccttcatccccgcgcccaggggcactggcatcgtctcagctcctgtgcccaagaagctgctcatgatagctggtatctacgactgctacacctcagccaggggctgcactgccaccctgggcaacttcgccaacgccaccttggatgctgtctctaacatctacagctacctgatcccctgaaggacttctggaaggagactgtattcaccaagtctccctatcaggaattcactgaccacctcgccaagacccacaccagagtctccgtgcagaggacccaggctccagctgtgactacaacatagggtttttatgcaagaaaaataaagtgaattaaagcctattactgtcaaaaaaaaaaaaaaaaaagacatgaa

SEQ ID NO: 44396 - DNA, 465 bp, Homo Sapiens
atggcgtggagcatctctgtctggaaaggcccgcctgaggcttgggcagccagttcagggagctcccaggcttggctctcggctagcatcctcagaggcccactccctttgtgccctgttgctattaatcgggacatatcggtttacttcgggtacagaaagtgcggtgttgaagtcctcgctgccactctgtttttagatctgccaagactgacctttgaactttcctgtagtcaatcttcctcgatctaccagatgggagagacccttggacaactttataaactcctgtttgccttttttggatcagcgacagcccccatcgctgtgactattggggaaaagacgaagctctttcataaattccatggagaggaatcaatatcccactggaaggctagaaatggacaagatagtgtatttgcaatcacaaacaaaaccctagtgatgaaaaataatttgtga

SEQ ID NO: 44397 - DNA, 396 bp, Homo Sapiens
atggagggaaagagaggagagcaaaggaaacacatccagaagtcgccacgagggctgtgtgccagcgctccattttcatgctgtttggaacaagacgtgtcaaggaagatgtttctatccaaagtcttcatggagcctctgcttcccctgtacctgtgtagctccctgaaactgaggacccacgtgtctgcaaagacctctggagatcctaagagagagaggcaccagcaggtaaccagtggtggcctggccacgaaagagtatttgaaattcaacagtgagcaagtgcagaaacagcatcccaaaccgcaggccccaccacacgcaggaaccagaaagctgaagtttcaccaaggagtttacttagtatttctcgctgggaatggggatgggtag

SEQ ID NO: 44398 - DNA, 1737 bp, Homo Sapiens
ctgtcacgcttgttacttattgccaaaactgggaagttgaaggaagcccaagcatgtgttgaagctaacagagaccccatagtaaaaatcctgggctctgattataatacaatgaaagaaaactcaattgcattaaatattcttggcaaaattaccagagatgatgatcctgaaagtgaaattaagatgaagattgctatgctgcttaagcaattggatctgcacctcctcaatcattctctaaaacatatttcattagaaataagtttaagtcccatgacggtgaagaaggatatagaactgctcaaacgtttctcaggaaaaggaaaccaaacagtcttggaatctattgaatatacctcagattatgaattttcaaatggatgtcgagccccaccgtggagacaaattcgtggggaaatttgttatgtgctggtgaaacctcacgatggtgagactctgtgcattacttgcagtgcaggaggagtatttttaaatggtggcaaaacagatgatgaaggggacgttaattatgagagaaaaggttcaatttataaaaaccttgtcacatttttaagagaaaaatcaccaaaattttcagaaaatatgtctaaattgggaattagcttcagtgaagaccagcaaaaggaaaaggatcagcttggcaaagcccccaagaaggaagaagcagctgccctccgcaaagacatttctggttcagacaaaaggtcactggagaagaaccaaattaatttttggaggaatcaaatgaccaagagatgggaaccaagcttaaactggaagaccactgttaattacaaaggcaaaggctcagcaaaagaaatccaagaggacaaacacacaggaaaacttgaaaaaccaagaccatctgtttcacacggaagagcacaattacttcggaagagtgctgaaaagattgaggaaactgttagcgatagctcctcagaaagtgaggaagatgaagaaccacctgaccatcgtcaggaagcaagtgcagatttgccatcagaatattggcaaattcagaagctggtgaaatatttaaagcaaaaggaaacaagtcaaaatggcagaaacaaaagatggatcaggaagcagaataccagagtaattagaagcatgatctttgacgttggaaagaccagttgagttgaaattctgccgcttactcaatggccttgggtgatgatgctgtaccctaattctaaaggaagcaatgaacccccttttcagctaccttactgataagcacttatgttctgccttctgctatcctgatggttcaggttgtctgtcttactatctacttcttgagtagagagaccacattaaatttattgctgtatctcgcagggcatcttgctagtgtgcacaggctcgcctccctacctctgccccgatggtgtgaaggggagagggcgaggttccttagtggcagggctttgctgttcttcactctcagccccctgaaagcagttcttcctgcctctgagcctgtctttccttctgctgttaacttctttcctacttttcttgcatccctctctcttccttttcctgccgtctttcttgtagacatactagttgattgctgtatttgctgactttatatggatattattttttcctctggccaaaattgttttaaaatcttgcaaggaaaatgtcttgcttttgatcacttccagagattaaaggagatggtttgttaatgtc

SEQ ID NO: 44399 - DNA, 1191 bp, Homo Sapiens
atggttgatggacagtcagcttttgccaatgagaccctcagtaaggctcctggcatgaatgctatagaccaagggatggcagcactgaagttgggtagcacagaagttgcaagcaatgttccaaaagttgtaggttctgctgttggtagcgggtccattactagtaacatcatgcttccatttgcctccagccaccattgctctccaaaaccagcatcttgggctgatattgctagcaagcctgcaaaacagcaacctaaaccgaagaccaagaatggcatgcagggtcttccgccacccccgataaagcataacatggatattggaacttgggataacaagggtccattgaaagcccccttacaggctttggttcagaatataggtcagccaacccaggggtctcctcagcctgcagggcaacagacacagccattgcctccacctccaccacagcctgcccagctttcagtccagcaacaggcagctcagccaacccgctgggtagcacctcggaaccatggcagtgggttcggtcataatgggatggatggtaacggagtaggacagtctcaggctggttctggatctactccttcagaaccccaccctgtgttggagaagcttcggtccattaataactataaccccaaagattttgactggaatttgaaacatggccgggttttcatcattaagagctactctgaggacgatattcaccgtttcactaagtataatatttggtgcagcacagaacatggtaacaagagactggatgctgcttatcgttccatgaacgggaaaggctccttttacttacttttcagtgtcaacagccgtggacacttctgtggcgctgcagaaatgaaatctgctgtggactacaacacatgtgcaggtgtgtggtcccaggacaaatggaagggtcgttttgatgtcaggtggatttttgtgaaggacattcccaatagccaactgcgacacattcgcctagagaacaatgagaataaaccagtgaccaactctagggacactcaggaagtgcctctggaaaaggctaagcaggtgttgaaaattatagccagctacaagcacaccacttccatttttgatgacttctcacactatgggaaacgccaagaggaagaagaaagtgttaaaaaggaacgtcaaggtcatgggaaataa

SEQ ID NO: 44400 - DNA, 1032 bp, Homo Sapiens
cccgcagcgccggacgctggttgcgcgctcccaggcgccgagcggccccgggcacgcgcgcgcgccaccggcccggcaggtgctgtccttattcccagcccagtcaagagctaccggggctggctagtcatgggggagcccagtagagaggagtataaaatccagtcctttgatgcagagacccagcagctgctgaagacagcactcaaagatccgggtgctgtggacttggagaaagtggccaatgtgattgtggaccattctctgcaggactgtgtgttcagcaaggaagcaggacgcatgtgctacgccatcattcaggttggggagagtaaacaagcaggccagagtgtcttccgacgtggactcctcaaccggctgcagcaggagtaccaggctcgggagcagctgcgagcacgctccctgcagggctgggtctgctatgtcacctttatctgcaacatctttgactacctgagggtgaacaacatgcccatgatggccctggtgaaccctgtctatgactgcctcttccggggcccagccagacagtttgagcaaggaggaggaggtggactgttttgctgcagctgcaccgggttggggagcagctggagaaatgggcagcgcatggatgagctctttgtgctgatccgggatggcttcctgctcccaactggcctcagctccctggcctgctgctgctggagatcattgagtggcggccggctggaagacaacgccagctgcccacaagtattactacagcgaagtctccgactaggcctccagatcagggcttcctcaccatggcctttcttctacccacctctaaagctggcagtggagtctctgcctcacccaaagacttttcccttccagactttgagtgtcttcccttctagactttcccatctcctggtgagatgtttcccacttatgccgtggtcctgccctgagcccctttccccaccacaacccaccacggccaggcagagaagggcaactcccaagagccactgcactgtgtaa

SEQ ID NO: 44401 - DNA, 156 bp, Homo Sapiens
agtgtccccatcccccaacccctggagtctcaccgtgaggaccatggaccggcggcggcagagtgcggcacccacaccaaaactggctaccatgaagaaggagaagccgcagaagatggcaatccaggcaccagcgaagacgtcatccttgcctga

SEQ ID NO: 44402 - DNA, 873 bp, Homo Sapiens
atggggctcctgttgcctctgcctgtcccggggctgctgctgctggaagctgagactcatcctcattttccatgcaaccacgggcaggaaggagcctgcacgcgacatgccagggtgcgcgcttaccctgggcccctcgtgcaccggaggaagaggcctgcctggctgtgggagctcgcggcccccgcctgtccgggcgccgccatggagcgcatcgagggggcgtccgtgggccgctgcgccgcctcaccctacctgcggccgctcacgctgcattaccgccagaatggtgcccagaagtcctgggacttcatgaagacgcatgacagcgtgaccgttctcttattcaactcttctcggaggagcctggtgttggtgaagcagttccggccagctgtgtatgcgggtgaggtggagcgccgcttcccagggtccctagcagctgtagaccaggacgggcctcgggagctacagccagccctgcccggctcagcgggggtgacagttgagctgtgtgccggcctcgtggaccagcctgggctctcgctggaggaagtggcttgcaaggaggcttgggaggagtgtggctaccacttggccccctctgatctgcgccgggtcgccacatactggtctggagtgggactgactggctccagacagaccatgttctacacagaggtgacagatgcccagcgtagcggtccaggtgggggcctggtggaggagggtgagctcattgaggtggtgcacctgcccctggaaggcgcccaggcctttgcagacgacccggacatccccaagaccctcggcgtcatctttggtgtctcatggttcctcagccaggtggcccccaacctggatctccagtga

SEQ ID NO: 44403 - DNA, 450 bp, Homo Sapiens
atgaaggaagcgctccatcagatagtggtccgctgcagtgagctggtttccagcacgagcctgcctagactcagcgtctcccgcctccagggacccccagactctcagcccctaggcaccctgggccagggtggttggaagcttctaggcattgtggggtctctggcaccagagacactcgggggtctggggaccgagtttgggccctgtacccacccactaccatttgacatggtgagagagagagagagagatgacgagctcaggcagggatggcttctccagtgcccacaatgtgccaggactctgctgtgccactgtgggcctttcctcacccctccctcccagacatcaagctctggtttccagctgtgttccttgaagccgtcgggctctctggtgacagccacagagcctctgagcaactttgctttcagctattttccatga

SEQ ID NO: 44404 - DNA, 6275 bp, Homo Sapiens
agatcatggaggacacccaggctattgactgggatgttgaagaagaggaggagacagagcaatccagtgaatccttgaggtgtaacgtggagccagtagggcggctacatatctttagtggtgcccatggaccagaaaaagatttcccactacacctcgggaagaatgtggtaggccgaatgcctgactgctctgtggccctgccctttccatctatctccaaacaacatgcagagattgaaatcttagcctgggacaaggcacctatcctccgagactgtgggagccttaatggtactcaaatcctgagacctcctaaggttttgagccctggggtgagtcaccgtctgagggaccaggaattgattctctttgctgacttgctctgccagtaccatcgcctggatgtctctctgccctttgtctcccggggccctctgacagtagaagagacacccagagtacagggagaaactcaaccccagaggcttctgttggctgaggactcggaggaggaagtagattttctttctgaaaggcgtatggtaaaaaaatcaaggaccacatcttcctctgtgatagttccagagagtgatgaagaggggcattccccggtcctgggcggccttgggccgccttttgccttcaatttgaacagtgacacagatgtggaagaaggtcagcaaccagccacagaggaggcctcctcagctgccagaagaggtgccactgtagaggcaaagcagtctgaagctgaagttgtaactgaaatccagcttgaaaaggatcagcctttagtgaaggagagggacaatgatacaaaagtcaagaggggtgcagggaatggggtggttccagctggggtgattctggagaggagccaacctcctggagaggacagtgacacagatgtggatgatgacagcaggcctcctggaaggccagctgaggtccatttggaaagggctcagccttttggcttcatcgacagcgacactgatgcggaagaagagaggatcccagcaaccccagttgtcattcctatgaagaagaggaagatcttccatggagtaggtacaaggggtcctggagcaccaggcctggcccatctgcaggagagccaggctggtagtgatacagatgtggaagaaggcaaggccccacaggctgtccctctggagaaaagccaagcttccatggttatcaacagcgatacagatgacgaggaagaagtctcagcagcgctgactttggcacatctgaaagagagccagcctgctatatggaacagagatgcagaagaggacatgccccaacgtgtggtccttctgcagcgaagccaaaccaccactgagagagacagtgacacagacgtggaggaggaagagctcccagtggaaaatagagaagctgtcctcaaggatcacacaaagattagagcccttgttagagcacattcagaaaaggaccaacctccttttggggacagtgatgacagtgtggaagcagataagagctcacctgggatccacctggagagaagccaagcctccaccacagtggacatcaacacacaagtggagaaggaagtcccgccagggtcagccattatacatataaagaagcatcaggtgtctgtggaggggacaaatcaaacagatgtgaaagcagttgggggaccagcaaagctgcttgtggtatctctagaggaagcctggcctctgcatggggactgtgaaacagatgcagaggagggcacctccctaacagcctcagtagttgcagatgtaagaaagagccagcttccagcagaaggggatgctggggcagagtgggctgcagctgttcttaagcaggagagagctcatgaggtgggggcccagggtgggccacctgtggcacaagtggagcaggacctccctatctcaagagagaacctcacagatctggtggtggacacagacactctaggggaatccacccagccacagagagagggagcccaggtccccacaggaagggagagagaacaacatgtgggtgggaccaaggactctgaagacaactatggtgattctgaagatctggacctacaagctacccagtgctttctggagaatcagggcctggaagcagtccagagcatggaggatgaacctacccaggccttcatgttgactccaccccaagagcttggcccttcccattgcagcttccagacaacaggtaccctagatgaaccatgggaggtcctggctacacagccattctgtctgagagagtctgaggactctgagacccagccttttgacacgcaccttgaggcctatggaccttgcctgtctccacctagggcaataccaggagaccaacatccagagagcccagttcacacagagccaatggggattcaaggcagagggaggcagactgtggataaagtcatgggtataccaaaagaaacagcagagagggtgggccctgagagagggccattggagagagaaactgagaaactgctaccagaaagacagacagatgtgacaggagaggaagaattaaccaaggggaaacaggacagagaacaaaaacagttgttagctagagacacccagagacaagaatctgacaaaaatggggaaagtgcaagtcctgaaagagatagggagagtttgaaggtagaaattgagacatctgaggaaatacaagagaaacaagtacagaagcagacccttccaagcaaagcatttgagagagaagtagagagaccagtagcaaacagagagtgcgatccagccgagttagaagagaaggtgcccaaagtgatcctggagagagatacacagagaggggagccagagggagggagccaggaccagaaagggcaggcctccagcccaacaccagagcctggggtgggggcgggggaccttccgggacctacctcagcccccgtaccttctgggagccagtcaggtggaaggggatccccagtgagccccaggaggcatcagaaaggcctcctgaattgcaagatgccacctgctgagaaggcttccaggatcagagctgctgagaaggtttccaggggcgatcaggaatctccagatgcttgtctgcctcctacagtacctgaagccccagccccaccccaaaagccccttaactctcagagccagaaacatcttgcacctccgccccttctttctccccttttaccttctatcaagccaaccgttcgtaagaccaggcaagatgggagtcaggaagctccagaggctcccttgtcctcagagctggagcctttccacccaaagcctaaaattagaactcggaagtcctccagaatgacaccctttccagctacctctgctgcccctgagccccacccttccacctccacagcccagccagtcactcccaagcccacatctcaggccactaggagcaggacaaataggtcctctgtcaagacccctgaaccagttgtccccacagcccctgagctccagccttccacctccacagaccagcctgtcacctctgagcccacatctcaggttactaggggaagaaaaagtagatcctctgtcaagacccctgaaacagttgtgcccacagcccttgagctccagccttccacctccaccgaccgacctgtcacctctgaacccacctctcaggctactaggggaagaaaaaatagatcctctgtcaagacccctgaaccagttgtccccacagcccctgagctccagccttccacctccacagaccagcctgtcacttctgagcccacatatcaggctactaggggaagaaaaaatagatcctctgtcaagacccctgaaccagttgtgcccacagcccctgagctccggccttccacctccacagaccgacctgtcacccccaagcccacatctcggaccactaggagcaggacaaatatgtcctctgtcaagacccctgaaacagttgtccccacagcccctgagctccagatttccacctccacagaccaacctgtcacccctaagcccacatctcggaccactaggagcaggacaaatatgtcctctgtgaagaaccctgaatcaactgtccctatagcccctgagctcccaccttccacctccacagagcagcctgtcacccctgagcccacatctcgggctactaggggaagaaaaaatagatcctctggcaagacccctgaaacacttgtccccacagcccctaagctcgagccttccacttccacagaccaacctgtcactcctgagcccacatctcaggccaccaggggcaggacaaataggtcctctgtgaagacccctgaaacagttgtccccacagcccctgagctccagccttccacctccacagaccagcctgttacccctgagcctacgtctcaggctactaggggaagaacagatagatcctctgtcaagactcctgaaacagttgtccccacagcccctgagctacaggcttccgcctccacagaccagcctgtcacctctgagcccacatctcggaccactaggggaagaaaaaatcggtcctctgtcaagacccctgaaacagttgtgcccgcagcccctgagctccagccttccacctccacagaccaacctgtcacccctgagcccacatctcgggccactaggggcaggacaaataggtcctctgtcaagacccctgaatcaattgtccctatagcccctgagcttcagccttccacctccagaaaccagcttgtcacccctgagcccacatctcgggccactaggtgcaggacaaataggtcctctgtcaagacccctgagccagttgtccccacagcccctgagccccatcctaccacctccacagaccagcctgtcacccccaagctcacatctagggccactaggagaaagacaaataggtcctctgtcaagactcccaaaccagttgaaccagcagcctctgatcttgagccttttacccccacagaccagtccgtcacccctgaggccatagctcagggtggtcagagcaaaacactgaggtcttccacagtaagagctatgccggttcctaccacccctgaattccaatctcctgtcaccacagaccagcctatttcccctgagcctattactcaacccagttgcatcaagaggcagagagccgctgggaaccctggctccctcgcagctcccattgaccataagccttgctctgcacccttggaacctaaatcccaggcctcaaggaaccaaagatggggagcagtgagagcagctgaatcccttacagccattcctgagcctgcctctccccagcttcttgagacaccaattcatgcctcccagatccaaaaggtggaaccagcaggtagatctaggttcaccccggagctccagcctaaggcctctcaaagccgcaagaggtctttagctaccatggattcaccaccacatcaaaaacagccccaaagaggggaagtctcccagaagacagtgattatcaaggaagaggaagaagatactgcagagaagccagggaaggaagaggatgtcgtgactccaaaaccaggcaagagaaagagagaccaggcagaggaggagcccaacagaataccaagccgcagcctccgacggaccaaacttaaccaagaatcaacagcccccaaagtgctcttcacaggagtggtggatgctcggggagagcgggctgtgctggcactggggggaagtctggctggttcagcggcagaggcttcccacctggtcactgatcgcatccgccggacagtcaagttcctgtgtgccctggggcggggaatccccattctgtccctggactggctgcatcagtcccgcaaggctggtttcttcttacccccggatgaatatgtggtgaccgaccctgagcaagagaagaactttggctttagccttcaagacgcactgagcagggctcgggagcgaaggctgctagagggctatgagatctatgtgacccctggagtccagccaccaccacctcagatgggagagattattagctgctgtggaggcacatacctacccagcatgcctcggtcctataagcctcagagagttgtgatcacatgccctcaggacttccctcattgctccattccactacgggttgggctgcccctcctctcgcctgagttcctgctgactggagtgctgaagcaggaagccaagccagaggcctttgtcctctcccctttggagatgtcatccacctga

SEQ ID NO: 44405 - DNA, 1083 bp, Homo Sapiens
gaggaatactgggacctgcaggacatgctgaccaacagacaggactacatacagatgattccggaactgtttgaccagttacacggagccgagtggttcacaaaactggagctgcgtgggaccattgtggaggaaagcgtgaacgggcaccgcaccgaagatgtgtggaaagcagcgtttggtttggagcttgaagagatgaagagctaccagccgtttgcgctctccccagaccctatcatacctcagaacgtgattcacttcatcctaaaggacatgctagggttctttgtgctttcttatggccaggaagtcctgatctactcaatgagtcaggaggagcacctccaccacgtccgccaagtcctggtccgcttccgccatcacaacgtctactgctccctggacaagagccagttccaccgccaaaccgtggaattcctgggcttcgtcgtcacccccaaaggggtgaaactgaacaagaacgtcatgaccatcataacagggtaccctacccctggctccaagctatctctgcgaaacttcatcgaattcgtcttcccctaccgccacttcgtggagcgcttcagcatcatcgcagagcccctggtgcggcagctgctgagctcctaccagttctactggggagtcgaggagcaagaggccttcgagtgcctgaagagggctttccgcaaggcgcctctcctccaccaccccaagccccagaacccattctacttggaaaccggcgtcaccggcacggccctgcacgcctccctgatccaaatcgacgaccaaaccggcaagagagcctgctgcgctttctactcccgcaacatctcccctatcgaggttgagtactctcaagcggagatgaagattcttccaatacgggctgccttcatggtgtggtgccgctacctggagaacaccgaggagcccatcatgatccttctcaacacagaggatctagcctctctgaataatgacaggctcaccgtacttctccccgggcattgggtcttcttcttctcccacttcaactttgacgtcatggagctgccagaacaagacggcggccga

SEQ ID NO: 44406 - DNA, 1878 bp, Homo Sapiens
ctcgcgcccttgcccgcgcctggcggcccgatgtggctacagcaggggctcaaggggctgccgggactgctgtcgagcagctgggcccgccgcctcctctgcctgcttggcctcctactgctgcttctgtggtttggggggtccggcgcgcagcgggcggcgggcggcctgcacctgcttccctggtcctggggtgagccgggcgccaccgagccgtctgcctgcctggaggcggccacccgcgcctggcgcggcctgcgggagcgcggcgaggcggtaccgctgggccctggagtgccggccctggtggccaacggcttcctggccctggacgtggctgccaatcggctgtgggtgactcccggggagcgggagcccgccgtggcgccggactttgtgcccttcgtgcagctgcgcccgctgagcgcgctggctgaagctggagaggcggtgctgctgctgcgggaggggctgctgcgccgcgtgcgttgcctgcagctggggtccccagccgtctctggccttgccgcggggtccggccgcgactgcgtgctgctgcaagagggctttctggcgcacaggggccgaccccacgtctacctgcagcgcatccagctcaacaaccccacggagcgcgtgaccgcgctgcagactgtggggcccactgccggcccagcccccaaggccttcaccagtaccctggagaaggtcggagaccatcagttcctcctctactcaggccggtccccgcctacgcccactgggttggtgcacctggtggtggtggccgccaagaagctggtgaaccgcctccaagtggctcccaagacgcagctggatgagacggtgctgtgggtggtgcacgtctctggccccattatcccccaggtgcccaaaagcaaagcagccaaggagctcaaggcgctgcaggacttggcacggaaggaaatgctggagctcttggagatgccagcggcggagctgcttcaagaccaccagctcctctgggctcagctcttcagcccaggagtggaaatgaagatcactgacacccacaggccgtctggcctcaccgtgaacctgacgctctattacatgctctcctgctcgccagccccgctgctcagcccctccctgagccacagggagcgagaccagatggagtcgacgctcaactatgaagatcaccgcttcagcgggcacgccaccatgcacgccgagaacctgtggccggggctgctgtcctccgtccagcagatcctgcagctctctgacctgtggaggctgaccctccagaagagtggctgcaaggggctggtgaaggtgggtgccccaggcatcctgcagggcatggtgctcagcttcggggggctgcagttcacagagaaccacctccagttccaggccgaccccgacgtgctgcagaacagctatgcattgcatggcatccgctacaagaacgaccatatcaacctggccgtgctggcggatgccgagggcaagccctacctacacgagtccgtggagtcccgtggccagcctgtcaagatctatgcctgcaaggcaggctgcctggacgagccagtggagctgacctcggcgcccacgggccacaccttctcggtcatggtgacacagcccatcacgccactgctctacatctccaccgacctcacacacctgcaggacctgcggcacacgctgcacctcaaggccatcctggcccatgatgagcacatggctcagcaggaccccgggctgcccttcctcttctggttcagcttggcctccctcatcaccctcttccacctcttcctcttcaagctcatctacaacgagtactgtgggcctggagccaagcccctctgcaggagtaag

SEQ ID NO: 44407 - DNA, 762 bp, Homo Sapiens
tgcagtggtcccggggcccctcccttcctgctcatcctggtgtgcacggctccggagaacctgaaccagagaaacgccattcgggcttcgtggggcgggctgcgcgaggcccgggggctcagggtacagacgctattcttgctgggagagccgaacgcacagcaccccgtgtggggttcccaggggagtgacctggcctcggagtcagcagcccagggggatatcttgcaggccgccttccaggactcctaccgcaacctcaccctaaagaccctcagcgggctgaactgggctgagaaacactgccccatggcccgatacgtcctcaagacggacgatgatgtgtatgtcaacgtccctgaactggtatcagagctggtcttgcgagggggcctgcctcttctgtacttgggccgggtgcactggcgcgtgaacccctctcggacaccggggggcaggcaccgcgtatcagaggagcagtggcctcacacctggggcccctttccaccctatgcctcaggcacggggtatgtgctgtcagcgtctgctgtgcagctcattctcaaggtggccagccgggcaccccttctcccattagaggatgtctttgtgggggtaagtgcccgacgaggaggcctcgccccaacacagtgtgtcaagctggctggtgccacccactacccgctagaccggtgctgctatgggaaattcctgctgacgtcccacaggctggacccctggaagatgcaggaagcctggaag

SEQ ID NO: 44408 - DNA, 384 bp, Homo Sapiens
ttggccactccgctgctactggaaggtagatccgagccgagtacgcgcgcgtgcgccgttagcggcggccaggccgctctgcctggcgctcctgtccgccctgctccggaccgggccgcgcgctgtgccccgagagccaagagggtaggagcgaacgcgggagctagagggcagggccgaggcgccgcggccggcccagagaggcccccgcacgtccagggccgccgctcggcgccccgaggggcagtcggcgcccggcgcgctcttctcggggcggtgggcaaggctggcggcctgacgcgggcgcgggagacgaggagacgcggagaggaaggtgtcccggctgcaggcacccctcgctggctccagcaggaaggggcgact

SEQ ID NO: 44409 - DNA, 991 bp, Homo Sapiens
gctctcgcgtcctttgctgggtccagacaccggtacgtccgggcgggtttttagtctcccaagcgagagcgtcgcattcacccgcgtgggtctgcgggcgccccagaccccagaggacccggcccccaacgcttacctgtcccctctcctgtccctcccccattccagccccttctctccccagccgttgcccctccccgcaccccgccgcgtccgcgcgcctctctccgcgcgcacccccaacccgcccccttttctctgggaaccgctccttccgctccgcccgcctggagtccttctggccggattccgcggcatccttccatagaccctcgttgttgcttcctccttgtggttccgttgcaaacatttttaaagggctggttattcttcctgaaatgagtttggtgattagaaatctgcagcgagtcatccccatcaggagagcgccacttcgcagtaagatcgagattgtaaggaggattttaggagtgcagaaatttgacctggggatcatctgtgttgacaacaagaatattcagcacattaatagaatctacagagatagaaatgtcccaaccgatgtgctttcttttccatttcatgagcatctgaaagcaggtgaatttccccagcctgattttccagatgactacaatttgggagacattttcctaggagtggagtatatcttccatcagtgtaaagaaaatgaagattacaatgacgtcctgactgtgacggccacccacggactctgtcacttgctgggattcacacacggcacggaggcagagtggcagcagatgttccagaaggagaaggcggtgctggacgagctgggccgacgcacggggacccggctgcagcccctgacccggggcctcttcggagggagctgagggccgcgttccttctgaaagcgggacgcgggaggggtggaggctgcggggagccggggtcgcacacgaataaataacgaatgaacgta

SEQ ID NO: 44410 - DNA, 729 bp, Homo Sapiens
atggaagaatttaaaaatgatatgctaactgagaaagatgcccgatacctggctgttaaagaagtgctttgtcatctaattgaatgcaataaagatgttccagggatctctcagatcaattgggttattcatgtggttgattccccaattattaatgccttcgtgcttccaaatggacaaatgtttgttttcactggatttttaaatagtgtaaccgatattcatcaactttctttccttctgggccatgaaatagcacatgcagtacttgggcatgctgcagaaaaggctggcatggttcatttgttggatttcctaggtatgattttcctcacaatgatttgggccatttgtcctcgagatagcttggcacttttgtgccagtggatacagtctaaattgcaggagtatatgtttaatagaccatacagcagaaaattggaggccgaagctgacaaaattggactactgcttgctgcaaaggcttgtgcagacataagagccagttcagtgttttggcagcaaatggagttcgttgatagcctgcatggccaacccaagatgccagaatggttatctacacacccttctcatggcaatcgagttgagtacttggatagacttatacctcagcttgtccgggaagagaagtttattgaacagccagaacagattgcagagttaacgctcaacagcttcatccagaacacagaaatctgtcggagttga

SEQ ID NO: 44411 - DNA, 442 bp, Homo Sapiens
gaaatgacttttaaggcatgttgagagccacaaattacactgctttacaattcgaatgtataccatcggaaaacatctcaggctagacataaatacgatgatggctctagctttggaaagagaagcttcagctgttcaagtcacgtgtggccagatgcagagcataaggaatgcaaaacagacagttgcaactgctggtttttaccagtccatctaaaatacacttcgtacactgtagtggatgctagaaatttcaaatacaaatgatgcatttatagcccctataaatatatccttccttatagctatttaagtcattcccctaaaatattcttcagttagaaaaattaattttaaaataaagatactttttaaagaacaggagacattctaaagtcatagtaaaagttgttctcatccaatggtgggtgggagggtggtc

SEQ ID NO: 44412 - DNA, 708 bp, Homo Sapiens
atgagatgggctgccccaggaaagaagacatctggtctgcaacagaaaaatattgaagtgaaaacaaaaaagaacaaacagaaaacacctggaaatggagatggtggcagtaccagtgagactccccagcctcctcgaaagaaaagggcccaggtagatcctactgttgaaaatgaggaaacattcatgaacagagttgaagttaaagtaaagattcctgaagagctaaaaccatggcttgttgatgactgggacttaattaccaggcaaaaacagctcttctatcttcctgccgagaagaatgtggattccattcttgaggactatgcaaattacaagaaatctcatggaaacacagataataaggagtatgcagttaatgaagttgtggcagggataaaagaatacttcaacctaatgttgggcacccagctactcaacaaatttgagagaccacagtatgccgaaattcttgcagattgtcccgatgcacccatgtcccaggtgtatggagtgccacatctcctgagattatctgtacaaattggagcaatgttggcctatacacctctgaatgagaagagccttgctttattactcaattatcttcacgatttcctaaagtacctggcaaagaattctgcaactttgtttagtgccagcgattatgaagtggctcttcctgagtaccatcggaaagctgtgtga

SEQ ID NO: 44413 - DNA, 1287 bp, Homo Sapiens
agactctatactctaatttctcatttaaaagaaattggactcttacaaaataaacatgatatgaacccagaatttaacttactattttcttactgttatcccaaagacattacatgatattgaacactttgaggtaattatggtactgggggagcataattgttcctactaatagaaacaaaatactaaggatttttctagaaactcttaagagccatttacctggctaaggatttttctagaaactgtcctttcaagagccatttacctggaataaaagtgatgtgtatgataaacagttggctatacagacccaagatgaaattcaaaatatgacttctgaaaattctgaattcaaaatcaagtttttgatactttaggatcagctagatgatcatcataaatttgtctcctttccacttcaattttttttcatcttcaccaatctacactatattcaagccaacttaccatttcccttactccgttttccctgcaacttccctaagctgttagtgttattgtactactcttctttatgccacttaggcttgaattcttggcccaatttctctcacttctgcatgaagtcaccaaatgccagtgattctgcttctaacatatttcagacatcatttctgtccattcccactaccagaaagaaactctgtgttagtttttcttttacctttattgactttttataatagcatttatggcgtgttgaattgtggccccccaaaaatatgtccaagtcttaaccctggtgcctataaatgtgaccttatttgggaaaagagtctcacagatgaaattaagttaaagatcttaccctggattaaccaggtagatgctaaatcgaataaaaaagtgtctgtacaggaagagaagaggagaatcacagagaagaaagccatgtgaagatggtaacagacactggagtctgtaaccccaagtgtaatgcgacgggttctccaccaggttacttaagggtgtatgtccactgcttgagccctgaagactgggtggtgagccaaggtcatggtgctcagccaaggaacaccatgtgctgtgttccctgagaacacaaacatttgggagagtacctggggacataccaagaaaaacactcatcacacacagagaagaaaagccagaaaattagcttaaaagcagcttgaagatgggtggggtaagggggtgtgtggggcaaatctccagagttgtcctgctaccacctaggaatgccctgtatgttaagtcctaataaactcacctactcatcaa

SEQ ID NO: 44414 - DNA, 2199 bp, Homo Sapiens
ttagatccttctgcggatacatgggacctcttctcacctttaatatcattatggataaacaggttttacatttatttgggctttgctgttagcattagcctttggatttgtgtccagattgtcatcaagacgcagggcaagaacttacaggaaaaatctgttccaaaagcagctcaggatttgatgacaaatggttatgtctcccttcaagagaaagacatctttgtgtctggagtgaagattttttatggttctcagactggaacagcgaagggattcgcaacagttcttgctgaagcagttacatccctggatctgcctgtggccattattaatctaaaagaatatgatccagatgatcatctgatagaagaggtgactagtaaaaatgtctgtgtcttcctggttgcgacatacactgacggcctaccaactgaaagtgcagagtggttctgcaaatggttagaggaagcatccattgattttcgatttggcaaaacttacctgaagggtatgagatatgcggtatttggcctgggaaattctgcctatgctagccacttcaacaaggttggcaaaaatgttgacaagtggctctggatgcttggcgcgcatcgtgtgatgagtcgaggggagggcgactgcgacgtggttaaaagcaagcacggcagcattgaggccgacttcagagcatggaagaccaagttcatctcccagctgcaggcacttcagaaaggggagagaaagaagtcctgtggcggccactgcaagaaaggcaaatgtgaatctcaccaacatggctcagaggagagggaggaaggatctcatgagcaggatgaattgcatcatagagacaccgaggaggaagaaccctttgagagctccagtgaagaagagtttggtggtgaggaccatcagagcctaaattccattgttgatgttgaagatttgggcaaaattatggatcatgtgaagaaagaaaagagagaaaaggaacagcaggaagagaagtctggtttgttcaggaacatggggaggaatgaagatggtgaaagaagagctatgataactcctgctctccgagaagcccttactaaacaaggttatcagttgattgggagccactcgggggtgaagctttgcaggtggacaaagtccatgctccgagggagaggaggttgttacaaacacacattctatggaattgagagccatcgctgcatggaaaccaccccgagcttggcgtgtgctaataaatgtgtcttctgttggcggcaccacaccaaccccgtgggcactgagtggcggtggaagatggaccagcctgaaatgatcttgaaggaagccattgaaaaccatcagaacatgattaagcagtttaaaggagtaccgggcgtcaaagcagaacgctttgaagaaggaatgacggtaaagcactgtgcattgtccctcgtgggagaaccaataatgtacccagagatcaacaggtttttgaagctactccaccagtgtaaaatttccagcttcctggtcacaaacgcacaatttcctgcggaaatcaggaacctcgagccggttactcagctgtatgtcagtgtggatgccagtaccaaagacagcctgaagaaaatcgaccgcccactcttcaaggatttctggcagagattccttgacagtttaaaagccttggcagtcaagcaacaacgaactgtctacagactgacgctcgtgaaagcatggaacgtggacgagctccaggcctacgcgcagctcgtgtccctggggaatcctgacttcatcgaagtgaagggcgttacctactgcggagaaagttcagcaagcagtcttaccatggcccacgtgccctggcatgaggaagtggtacagtttgtccacgagttggtggatctgatccccgaatatgaaattgcatgtgaacacgaacactctaattgcctcctgatagcacacagaaagtttaaaattggtggtgaatggtggacatggatcgattataaccgcttccaggagctcatccaggaatatgaagatagtggtggatcaaaaacgttcagcgcaaaggattatatggccagaactcctcactgggcattatttggtgccagtgaaagaggctttgatcccaaggacacaagacatcagagaaagaacaaatcaaaggctatttctggatgttga

SEQ ID NO: 44415 - DNA, 366 bp, Homo Sapiens
atgtctcacctgctgatgaaactcctgagcaagaagatcaagaagcagaacctcaaaatgcaccggaacctaaagttgccgggggcctcaaatctgaccctatcagaaactcaaaacggaggtgtgtctgaagaaacgatgggaggtggaaaggttaaaaaatcaaaacgttctgtgaatgtggggttatcagaagctcaagatggagatgtgtctcaagaaacagtggaaaatgtaaaagttcaaaaatctcctcagaaatccattgtattaacaaacggagagacagcaatgcagtctcccaattcagaatcaaaaaagaaaaagaagaaaaagggaaaaatggtgaatgatgctgggcctgat

SEQ ID NO: 44416 - DNA, 916 bp, Homo Sapiens
tgtctgtcagagctgtcagcctgcttaagcagagtaaaatggtacaggcagtgcagcctggtagcgagaaaaaaggctgcctgtgaaatcccactgtgggaccataagtggggacctcagggccccttcatggcatctccatggccatgtcatgctggagaaggaggcgtttcaagaatgtgagctgatcgctggaaactgctcatctgactccagtctcaaaagaggctatgtgcaagaatcgggtgaagttgtgagaccccatccacccctcacaagattgtatccccaccctgtctgaccttactgctgctcaaactatctgtccaaggatgaaaacccaggacaaaggaggagtaaccctcatgatgtgaagcacgtgttcacctgtgaatataacctgaggatcatgagactatctgtggatttcacagagaagacagacgagaagacaccgctgacacttctccacggaggtctccttttccaccaagatgcagatgcttcttgcaaggcaatggactatcctgtgaatcccacagagaagacaggtgtggttccaatgccggtgcacctccagggaattctccttttctaccaagctccaggccttctgccatgatcatgagactatttgtggatttcacagagaagataggtgagagtacagcatggcatccacccctcaccagaggggtatccccacccctatctgaccttattaccttattgctgttcaaagtctctatcccagactgaaatcccaagacaatggagaagttccccctgatgatgtgaagcaccaactcctctgggaatcaaattcgaggtaaatttaataggcccggtagagatgaatgatagtgtctctccttggattggctgaaagacaattaaacactggtatatttctgtt

SEQ ID NO: 44417 - DNA, 483 bp, Homo Sapiens
cccggtcccagccatgtccaacgtcccccacaagtcctcactgcccgagggcatccgccctggcacggtgctgagaattcgcggcttggttcctcccaatgccagcaggttccatgtaaacctgctgtgcggggaggagcagggctccgatgccgcgctgcatttcaacccccggctggacacgtcggaggtggtcttcaacagcaaggagcaaggctcctggggccgcgaggagcgcgggccgggcgttcctttccagcgcgggcagcccttcgaggtgctcatcatcgcgtcagacgacggcttcaaggccgtggttggggacgcccagtaccaccacttccgccaccgcctgccgctggcgcgcgtgcgcctggtggaggtgggcggggacgtgcagctggactccgtgaggatcttctgagcagaagcccaggcgggcccggggccttggctggcaaataaagcgttagcccgcagcgc

SEQ ID NO: 44418 - DNA, 1894 bp, Homo Sapiens
tatgttgccaagctttatttaggctgtaatggttacagataacacacatctaaccctatattctctgcgtcccatgcagtcccctgagcaggctcagctaccctttccctccagtctcacttcttgtcttcctccttcttgtccttcttgccatccttggtggcctggcaggccagggagcccacagcgtttcaaatggcttcattgttgggatccacacctgggaggttctccaggacactctgaaggaactcaggatcctgcatcacgtcgtaatcatcctcctccttggctggctggcaagtgtccatggctgagctggcatcaatgtctactgattccgcctggccaaactctgctcctgcagggacatcttcatgacataagcaatcccctcttccttaggtcaggaagtccggtatggccaaactcttgttggctaatggtcatcttcagcaggacctcgtctgagccttcagtcccagttgtagcaatcctggcctcagcagcagaggctgcagctgctcgtctgggctcctcatcctgccgctgctgctgctcctccatagaaacccgagggccaaggccagctgaggatcagcactgggatctactccaaattcaaagtcactggcaccgagacccagcatggcacccccttccccagccaaaatcggagaactgatgagagcatcagccaagctgggcccaggaggcactgccaccagatgagaaccgcttccatctttgccattcaacgtgtttacaaaggctgtcagcttttctctgttcacctcctcttcccccaaatttatcatgtcaacatttactttctccttcttgaggaatttagccagtttcaccagatccttctcattgcctttgggcttcccacgaaggcaatgatatgcgtcttgtgattcttgccccgtcagcgcttcagagccagatgggccatgtggatgccagtgtagaaggtgatcttgcccttgggttggacggtgtgtagcttggacaggatgcggccggtgtctagagtgagtgtggtcagcacttcacagtcattagccagtgtgatgagggccatgttgttctcagggttgctgtggattttgtttaattttttttttttttttgagactgagtcttgctctgtcacctaggctggtgtgcaatggcgcaatctcagctcactgcaacctctgcctctcgggttcaagggattctcctgtctcagcctcccaagtagctggaactacaggcgcctgccaccacacccggctaatttttgtatttttagtagggacggggttttaccatgttggtcaggctggtcttgaactcctgacctcatggtctgcctgcctcggcctctcaaagtgctgggattacaggcgtgaaccactgcgcccggcctgttgtgggttttgaatgacatactatgttgacagcgtcttgctgggcctgcagctgggtggggaagaagtcctcattctgcacatactcactgttgtccacacacaccatagcgctttccaacaccatcctgccaccctcctccctcccatttcttgaaataatccttcatgtataacttaggttaatagtgcctcatagtctacttagaaagaatcagatagaattttctttagtaaggaaatttccaaatagagaatagaaaagttaattgatggcaatgtatttaatagcgaggatcagtgaggaaatgaattaaagaggttccttttacacttttcttctctgaagctaggtacaccttagttcatgttgcagcttctttggtgctgtcagatcatagttggtatgaaatgggaagtttctgaaagtcagatgacacatttgtgaaatgcaacctcactgttatctacccggc

SEQ ID NO: 44419 - DNA, 425 bp, Homo Sapiens
taattatatagccctgggaaatggatcttcaactgaattaaggaaaagagggcctccttccttgtcctgagaaggacttccctgtcagtatccctgcaaccccctcctctcaactgtgatccaactgctgaaacaaagccaaattgctgccgaggcccagcaggcagaggctggaagctttctgagacgtttcaggcgctgccaccttccgggaagaaagagaagcattgtgttcaatggggaaaagatcctgaaattatgtaagggaacaccaaataggacccagcaagtaaaaaagtgaaggaaactacttccaatatggcaaagttgatcctcaaattcagaactattctttcccagccctgcagacaagttcaacatcttaagcatgggaaaacaaaccagataaacaaaaccacaaaaca

SEQ ID NO: 44420 - DNA, 2289 bp, Homo Sapiens
atggggtccccttcagcctgtccatacagagtgtgcattccctggcaggggctcctgctcacagcctcgcttttaaccttctggaacctgccaaacagtgcccagaccaatattgatgtcgtgccgttcaatgtcgcagaagggaaggaggtccttctagtagtccataatgagtcccagaatctttatggctacaactggtacaaaggggaaagggtgcatgccaactatcgaattataggatatgtaaaaaatataagtcaagaaaatgccccagggcccgcacacaacggtcgagagacaatataccccaatggaaccctgctgatccagaacgtcacccacaatgacgcaggattctataccctacacgttataaaagaaaatcttgtgaatgaagaagtaaccagacaattctacgtattctcggagccacccaagccctccatcaccagcaacaacttcaatccggtggagaacaaagatattgtggttttaacctgtcaacctgagactcagaacacaacctacctgtggtgggtaaacaatcagagcctcctggtcagtcccaggctgctgctctccactgacaacaggaccctcgttctactcagcgccacaaagaatgacataggaccctatgaatgtgaaatacagaacccagtgggtgccagccgcagtgacccagtcaccctgaatgtccgctatgagtcagtacaagcaagttcacctgacctctcagctgggaccgctgtcagcatcatgattggagtactggctgggatggctctgatatagcagccttggtgtagtttctgcatttcgggaagagtgtttttattatccacctgcagactggactggattcttctagctccttcaatcccattttctcctgtggcatcactaagtataagacctgctctcttcctgaagacctataagctggaggtggacaactcaatgtaaatttcaaggaaaaaccctcatgcctgagatgtgggccactcagagctaaccaaaatgttcaacaccataactagagacactcaaattgccaaccaggacaagaagttgatgacttcatgctgtggacagtttttcccaagatgtcccaagcctcatcgtgacgaggctcttatcccactccatttttccctgctcatgcctgcctctttaatttggtaagataatgctgtaactagaatttcacaatcagcgccttgtgcaggtaatttgacagagtgttggatgtgtcatgtcatcatgtcaaacccaaatatttgacctaagggatcctttattctgcccagtggctaactttaacaacatccctaatacaactgtttattcaaatgcacggtggtccctgttagagttagacctctagactcacctgttctcacgccctgttttaatttaacccagctatgggatgccagataacagaattgctgcctactagctgaacagggaggagtttgtgcagttgctgacacttcttgttgcacataaataaatacagtgggtactatagagactcagttgcaaaaattaacaaatatgctgcttgattaaaatgggtaggcttctcatgtggctcattctttaatctattctcttttatttggtttggttcatggggtctctgcctatggatcatacttcaaactcttggtgtgatcctcctgattgtcacaatattagttaccctggtgtgctgtattctctaaaacctttaaatgtttgcatgcagccattcgtcaaatgtcaaatattctctctttggctggaatgacaaaaactcaaataaatgtatgattaggaggacatcataacctatgaatgatggaagtccaaaatgatggtaactgacagtagtgttaatgccttatgtttagtcaaactctcatttaggtgacagcctggtgactccagaatggagccagtcatgctaaatgccatatactcacactgaaacatgaggaagcaggtagatcccagaacagacaaaattttcctaaaaacatgagagtccaggctgtctgagtcagcacagtaagaaagtcctttctgctttaactcttagaaaaaagtaatatgaagtattctgaaattaaccaatcagtttatttaaatcaatttatttatattcttctgttcctggattcccattttacaaaacccactgttctactgttgtattgcccagtaggagctatcactatattttgcagaatggaaactgccctgactcatgaatcacaaataaaagccaattgtatctat

SEQ ID NO: 44421 - DNA, 651 bp, Homo Sapiens
cagcagccagacaccaaggctgtggtgaatgggaagggcctcagcactggtaccctttatattgctgagagccacctgtcttggttagatggctctggattaagattctcactggaatgccccaccatttgtttacatgcattgtccagggaccaaagtgactatctaggagagcatttgtatgttatggtgaaagccaaatttgaagaaggatcaaaagaatttgttgctgacgaagaagaggaaaatagtgataatgatgtggaaattactgaatttagatttgtgcctagtgataaatcaacattggaggcaacattcactgcaatgtgtgaatgccagtacttgcatccagatgctgaagatgaagattcagatgcttacgatggagaagaatatgatgtggaagcgcaagaacaaggacatggggacatccctacattttacacctgtgaggaaggatctcatctaacggcagagggccaaacatgttggagattagaaggaacgctttctcagtctgtaagctgccagtatcatatggttggggtcaggacagaagactcaataggagatgatgaagctgggatggaggtggataccacaccaacagttgctggacagtttgaggatgcagatgttgatcactga

SEQ ID NO: 44422 - DNA, 2656 bp, Homo Sapiens
caggattcagtggcctttgaggatgtggctgtgaacttcaccctggaggagtgggctttgctggatccttcccagaagaatctctacagggatgtgatgcgggaaaccttcaggaacctggcttctgtaggaaaacaatgggaagaccagaacattgaagacccattcaaaattcccaggagaaatataagtcatattccagagagactctgtgaaagtaaagaaggtggtcaaggtgaagaaaccttcagccagattccagatggtattctgaacaagaaaactcctggagtaaaaccgtgtgaaagcagtgtgtgtggagaagttggcatgggtccttcatcacttaataggcacatcagagatcacactggacgtgaaccaaatgaatatcaggaatatggaaagaagtcatatacacgtaaccagtgtggacgagccttgagttatcatcgctcttttccagtacgtgaaaggactcatcctggaggaaagccctatgattgtaaggaatgtggagaaacctttatttctcttgtaagcattcgaagacacatgttaacgcataggggaggtgtaccttacaaatgtaaggtgtgtgggaaagcctttgattatcccagtttatttcgtatacatgaaagaagtcacactggagagaaaccttatgaatgcaagcaatgtgggaaagccttcagttgttccagttacattagaatacatgaaaggactcacactggagataaaccctatgaatgcaagcagtgtgggaaagctttcagttgttccaagtacattcgaatccatgaacgaactcacacaggagagaaaccctacgaatgtaaacagtgcggtaaagcctttaggtgcgccagttctgttcgaagtcacgagaggactcacaccggagagaaactttttgaatgtaaggaatgcgggaaggctttgacttgtcttgcaagtgttagaagacacatgataaagcacactggcaatggaccttataaatgtaaggtgtgtgggaaagcctttgatttccccagttcatttcgaatccatgaaaggacccacactggagagaaaccctatgattgtaagcaatgtgggaaagccttcagttgttccagttcgtttcgaaaacatgaaagaattcacactggagagaaaccctataaatgtacaaaatgtgggaaagccttcagtcgttccagttacttccgaatccatgaaagaactcacactggagagaaaccctatgaatgtaagcaatgtgggaaagccttcagtcgatccacttactttcgagtacatgaaaaaattcatactggagagaaaccctatgagaaccctaaccctaacgcttcagttgtcccagttctttcatgagcatgaaaggagtcacatagagaaaccccatgaaagtaagaaatttgggaaagccttcagtcctttctgtttctttcaactacgtgaaaggattcacagtggagaaagaccctgtaagataattggctttaaattacgagagacttgtgataggacagtaaaacctagagttggagttggatctctggattgtgttatgtcagtgttggtaggttaggaactagatttcccagaatccattccatttgtgattccatgatacaattcaccagtaacctatcttacatgagattcggaagtaagttaagaaggcattagtcatggtttggaagcaccatacagggagacagctgtgtgaatacaggctgtatggacacttgcttccatcccattttcctgcttctttgggttgccaatcaagagtatcctcaaaacgacttgactttaattttctcggaggtgataggcttccacacaggtctccagaagccctgcattgaatatccatccacactttggttttccttcagacattattatgtctgtactaggcaactaattcagactgtcctggttgggaatattctgtgatgctctgactcccctagtctgtagacggaattggcatacggtctaatttgtgtagtaagcacctttgttcatactagtagtgactgtattcttgattcagcctgatagctaccatgctgctgtcaaaaccaaccagaggggagcttgttcttctgctgtagtgtgcagtgactggcctcacccaggactttgatgtgagaatgagcactttcctctatcaggaaatttcaagtgtttcctgttattcgtagctcaatgtaatgcctcagttcattttcagttgtttgattatatgtgactaatatgtattttttattcaaacaagacttctgtacatgtttcttcaaaacagtttattaactgtcttcagtcttggattacatcaagtttataattttggcaaattgttaagacactgtgaagtcagcgttaaccatgtgcatacaacttaaggaattttttcctcctcatgtaaattttacttttcatgcttatatagtttcaacttttatcttcatagtaatttctcatctactcataataccaaaagttaagtcatgctgttttgtgtgctctcttgctaaagaccgcagagaccatacctgttgtcaaagagggtgtaataaactgtaataataatcatgaccacaaaccataaaggactgtgtgatgtatcagt

SEQ ID NO: 44423 - DNA, 1662 bp, Homo Sapiens
ccgatgccgagcccgcagcttctggtgctcttcggcagccagacaggcacggctcaggatgtgtcggagagactgggtcgcgaggcccggcgccggcggcttggctgccgggtgcaggccctggactcctacccggtggtgaatctgattaacgagcccctggtgatatttgtttgtgcaactacaggccaaggagacccccctgacaacatgaagaacttctggaggtttatattccggaagaacctgccctccactgccctctgtcagatggactttgccgtcctgggcctcggggactcctcatacgccaagttcaacttcgtggccaagaagctgcaccgacggctactgcagcttgggggcagcgccctcctgcccgtgtgcctgggcgatgaccagcatgagctggggcccgacgctgctgtggacccctggctgcgagacttgtgggacagggttctggggctgtacccgccgcctccgggcctcactgagatccctcccggagtcccccctccaactcggctgcccatgtccagcggttctgccaggtgctgggcctggaccctgaccagctcttcatgctgcagccgcgggagccaggtgagcccagcctcggccaccctgactctctgccctctcccgtgccctgggcccccaccccaagggctccgccgcagcccacggaggcctcccactcaccctgcagatgtctcctcccccacgaggctgccccagccctgctccatgcggcacctcgtgtcccactacctggacatcgccagcgtgcctcgccgctccttcttcgaactcctggcctgtctatccctccatgagctggagcgggagaagctgctggagttcagttctgcccaaggccaggaggagctctttgaatactgcaaccggccccgcaggaccatcctggaggtgctctgtgacttcccgcacacagctgccgccatccctcccgactacctgttggacctcatccccgttatccggccgagggccttctccatcgcctcctcgctgctgactcacccctcacggctgcagatcctcgtggctgtagtgcagttccagactcgcctcaaggagccccgccggggcctctgctcctcctggctggcatccctggaccctgggcaaggacctgtccgggtgcccctctgggtgcggcctgggagtctggccttcccagagacaccagacacacctgtgatcatggtggggcctggcactggggtagcccccttccgagcagccatccaggagcgtgtggcccagggccagactggaaacttcttgttttttggctgccgctggcgggaccaagacttctactgggaggctgagtggcaggagctggagaagcgggactgtctgaccctcatccctgccttctcccgggaacaggagcagaaagtatatgtgcagcaccggctccgggagctggggtcgcttgtgtgggaactgctggaccgccagggtgcatacttctacctggcaggcaacgccaagtccatgccagcggacgtctcggaagccctgatgtccatcttccaggaggagggtggactctgcagcccggacgcagccgcgtatctagccaggctccagcagacacggcgcttccagacagagacgtgggcctga

SEQ ID NO: 44424 - DNA, 543 bp, Homo Sapiens
atgggggtgaagttgacaccccacaacaaggagacggtgcagcacagtgatgtgctcttcctggctgtgaagccacacatcatccccttcatcctggatgaaataggcgccgacattgaggacagacacattgtggtgtcctgcgcggccggcgtcaccatcagctccattgagaagaagctgtcagcgtttcggccagcccccagggtcatccgctgcatgaccaacactccagtcgtggtgcgggagggggccaccgtgtatgccacaggacacgcccaggtggaggacgggaggctcatggagcagctgctgagcagcgtgggcttctgcacggaggtggaagaggacctgattgatgccgtcacggggctcagtggcagcggccccgcctactccatggctgaccaggagcaggtgtcaccagccgccatcaagaagaccatcctggacaaggtgaagctggactcccctgcagggaccgctctgtcaccttctggccacaccaagctgctcccccgcagcctggccccagcgggcaag

SEQ ID NO: 44425 - DNA, 507 bp, Homo Sapiens
cagtctgccagggcccaggcgcagggggccgcggagctgtttcggggtcggctgctgcctagcgcatggaaggcatcccctagcccggaggctggctttgctacagctgaccactcctgtcaggagagagagactgagaaggctatggatcgactagcccggggagcacagagtgtctctaatgacagtccagcccggagtgaaggcacccattctgaatttgctgtaaatgcggaggactcggataatacctgggagctgagagaagggacaaactgtccacccaaggaacagcctggcaatctttttaatgaagactgggacttggagttgaaagcagatcaaggaaatccatatgatgctgacgacatccaggggagcgtttctcaagatctcaaaccttgggtcagctgtgccccaaaaggagacatgatctatgaccccaggtggcactatccacctcaactgataacccattattccaagatggtctttgaaacaggatag

SEQ ID NO: 44426 - DNA, 497 bp, Homo Sapiens
aggctgcgtccgcgcgccggcgaggcgaggcggccgggccctgcgcgtcaggcctgagacctgggaggaagctggagaaaagatgccctctgaatctttctgtttggctgcccaggctcgcctcgactccaaatggttgaaaacagatatacaggtattgagtgttggtagatatgagagtccagtgtttagagctgtgttgcgtggccgggcgcagtggctcacgcctgtaatcccggcagtttgggaggccgaggcgggtggatgccctgaggtcaggagttggagaccagcctgaccaacatggtgaaaccccgtctctactaaaaatacaaaattagccaggcgtggtggtgtatgcctgtaatcccagccactcgggaggctgaggcaggagaatcgcttgaacccgggaggtggaggttgcaatgggtcaagatcatgccattgcactccagcctggacaatgagagcaaaactgtttcaaaaaaaaaaaa

SEQ ID NO: 44427 - DNA, 1201 bp, Homo Sapiens
catctggtgtattgactgtggccagtcttaaagctagtttttgctatgtggaacatgctgctctaattcagatttaaagagtttcttcctgttaattcgaagctcactgtgcctcttgtttccgagggaagaaggactgattaagtcatctaaatggatgcaatactgaattacaggtcagaagatactgaagattactacacattactgggatgtgatgaactatcttcggttgaacaaatcctggcagaatttaaagtcagagctctggaatgtcacccagacaagcatcctgaaaaccccaaagctgtggagacttttcagaaactgcagaaggcaaaggagattctgaccaatgaagagagtcgagcccgctatgaccactggcgaaggagccagatgtcgatgccattccagcagtgggaagctttgaatgactcagtgaagacgtcaatgcactgggttgtcagaggtaaaaaagacctgatgctggaagaatctgacaagactcataccaccaagatggaaaatgaggaatgtaatgagcaaagagaaagaaagaaagaggagctggcttcaaccgcagagaaaacggagcagaaagaacccaagcccctagagaagtcagtctccccgcaaaattcagattcttcaggttttgcagatgtgaatggttggcaccttcgtttccgctggtccaaggatgctccctcagaactcctgaggaagttcagaaactatgaaatatgaaatatctctgcttcaaaaaatgaggaagagcaagactgtcccctatgctgccaacatgcagtctttgtttatgtcttaaaaatgtcatgtttatgtcatgtctgtgaattgctgagtactaattgattcctccatccttgaatcagttctcataatgctttttaaataagaaaaattcagaagatgaatttcttccaatatttgaataaattaaagctcttagatacagagtagattgtattatatgctttttcctattaatactacttatagaaatccattaaaaagcaatctctgtacagtgtatttaaatatttcattgacatactgtgatctctattagtgatggatgtacaaaaaatgttttcttacccttgacttacaatgaaatgtgaaattacttgtctgaaccccgtggggagaaataaataattttcccaaagttcataaa

SEQ ID NO: 44428 - DNA, 1690 bp, Homo Sapiens
gtctttggtagtttttttgcactaacttcaggagccagctcgtgatctcaggatgtatggaaaaataatctttgtattactattgtcaggaattgtgagcatatcagcatcaagtaccactggtgtggcaatgcacacttcaacctcttcttcagtcacaaagagttacatctcatcacagacaaatgggataacactcattaattggtgggcgatggctcgtgttatttttgaggtgatgcttgttgttgttggaatgatcatcttaatttcttactgtattcgatgactgataaagggttttcatgcctctgggattgagattagaggaagaaagcaaagaaaggacatttttttacttcactgttcatggtgtaattgtgtgcctgacggctgtagctactaacttggcttacgttgactggctactaagggactctaggagtcagaaactaaatgctgagtctctcaaaggcgtagagagaatttcagagggccttaccatgacatgaggattaaactccagttctgcccgattctcatcacgaaatccttatcccatgcctcattgtgtttggtgtccccttgcctaggggacagtcctcctgggtaagatcagcaagataactcttcagtcacattccatttgatactttgaatactctgaggtccttacccaccaaatggatggaattcagctgctcaatcactgcctttctcagaactcggttgtccaaccacaattccctttcccttaggatagggctatattggcaaaatgccgcccgaacagactgctgacagtaaaccaaatattagtttctctcaccttcttgaaggcatttacagtctttgtaagcttttctcctagattttccctttcctgttcctgcttagattctaagaatgaagtgcatccttctccttttcttcattaggtgaagtgggatttacccattaccatatattcaccaccaggtcactgacgagagactccagtgaatcgctttccctctgcattcctctccttgtacagactagagggtcacattgtgtaaagcctaacatagccctgcaaagagatctggccccagcagtgaacacaaactcagtaattctctttagagtgaggtggtaatcagtgcctcttggtttcagccgtggtcctagtggctacttatggaagaataggaatagttccacaacatcctgtaacattggcttacctgtatattatatgccacccgtaaccataaaaacaccaggatttaggttccttgaaggtaatgactatgggtccctctctgtggaagaatactgaatagaagagagaaatcactcaatatgtggaatgactgatatggtttggctgtgttcccactcaaatctcatcttgaattgtagttccaataatccccacatgtcatgggaggaacccagtgggaggtacttgaatcattgcggtggtttcccctgtgctattctcatgatagtgagtaaattctcacataatctgatagttttataaaggagcttcccccttcactcagctctcattcttctccttcctgccactatgtaagaaagatgtgtttgtttcccctttggtcatgattgtaagtatcctgagaccttcccagccatgcaaaactgtagatcaataaaacctctttcctttataaattacaca

SEQ ID NO: 44429 - DNA, 354 bp, Homo Sapiens
ctgctgggtatggcagggacccaggagaagctgatcagagattttgatgaaaagcaacaggaagcaaacaaaatgctgacacagatggaggaggaactacattatgcacccgtatctttccataaccccatgatgtctaagcttcaagactatcagaaggaccttgcccaattccatctggaggcaagaagtacacctttggccatgcctggggaccgaggagacatgaaatatggcacatatgctgtagagaatgagcatatgaataggctacagtctcaaagggcaatgcttctccaaggcaccaaaagcctgggccgggccacccaagagactgaccagattggctcagaa

SEQ ID NO: 44430 - DNA, 2984 bp, Homo Sapiens
ttgttagcaaaaccatctcttgagtggagctcaaagatttgtaatttcccaatccccagaaagataacttcagactcagcttagaagtaaagatcctccagatatggcctcaactaccctccaacccatgtccccagtgcatcccgttgatgcccccttcagtggagttaaaatggagtgagtgtttttcttttcacatactcctggtgttcttccacaaatacaattttcacctcttgaatattttcaaggattctccatgctacacacagagaaatccaaactccccatcaggaccccagtcttcccaaaccctctttgcacttttctgcctccatgcttttccttgggtcatcctcttctctaatataaccttgtgtattattctaggttctccagagaaagagcagagagatagaggtagagatatacacatagagagagacagattgatttgttgtaagggatggctcacctggttatggaagctaaggagtcctggagtctgcagccagcaagctggagacccaggacagccaatgatatagttccaactcgagtccacatgtaaagtcaggagaagattgatgtcccagctcaaatataatcaggtaaaaagagcaaattctctgtgattctacctttttgttttgttcaggccttcaatggattggatgaggctcacccacattggggaggacaatctgctttattcactctaccaattaaatgttatcctcatccagaatacctcagagacacacccagaataatgtgtagccaaatatctgggcaccccacaacccagtcaaattgatacataacactaaccatcatgtcttgcttctactctctcgccatttctgcatggccaaatctttcccttatttcaaggcttagttcaaatgttacctcttaactaagccttccctgctaaccccaaatattaatagaattggtttctcccttctctgatgtctcaaaatatattgtgtttctcttttattgtatttattacaaactcccttacaaatcaagacagtgattcccagacaaattatcacaagagtataaaagaagtcttctttgagtgtgaaatatctcatggaatatagcacatggcctcttcatgaagaaactactgggagagaagaagataagctggaagaggccagggaaagggggttagtacaaagcacaatggggctgggctcatacagtggctcacacctgtaatcccagcactttgggagcccaaggccggtggatcaagagatcagcagatcgagaccatcctggctaacacggtgaaaccccgtctctactaaaaatacaaaaaagttagccaggcatggaggtgggcgcctgtagtcccagctactcgggaggctgaggaaggagaatggtgtgaacccgggaggcagagcttgcagtgagccgagattgcaccacagcactcaagcctgggtgacagagcaagactccatctcaaaaaataaaacaaaataaaataaagcacaatgaaatgtcagtggatgggtgcctataatttctaagggaaatagagtataatccaagaattttatagccagctaaattattgcccaatcaaaataggcaaaagacacatgctgaagaacttaaagaatacagtatttctgagctctttaaaaaaaagtcttcataataaaatttagtcagccaagaaattaaaaaataagcaacttgtgaattgaatgaccatgacaaaaggctagtgataggactatgattgcagaacagaaagagaaggtggtcaaccttaacaacataaaacaacctagaaataactagtttccagaggtaaagagagggactgtaggaagtagaaatgttaatgccctttattaagtcaattaatcaggtctaaaattgaaacgtgattttaaatatataacttcttgtttattttcctccctaactacctgaggatcaaccaccaacatgaatgacacagtgactacctggaccaggaagtttatgaccaatcgaccgttccagaggaaacaaatggtcaccaatgtccttcaccccggaaaggcaacaaaatgtacaagaccacaatggatgtcatcttcatattaatagttggactcagaacccattttggtggtggttaaacaatcgtcacccacattggagtgcagtggtacgatctcagctcaccaaatctctgcctcccaggcttaagcaattctcctgcctcagcctcccccgcagctaggattacaggcacgcaccactactgcctggctaatttttatgtttttagtagagatggggtttcaccttgttggccaggctggtcttgaactcctgacctcaaatgatccacccgccttggcctcccaaagtgctaagattacaggcatgggtcactgtgcccagccttttctgtattaaatttttaaaaacacaacatttaaaataatcaagtcattctttttgaatctactttgtattataggtatccaaatactcacctattctctctcacatgatgacaaactcgttgaaatgtcatttcattttgtggctccagccccagggattctgagtctgattctaaagggcctgcatgcagagcaagcaagccgcctggatgattctcttacaggtgttttaagggcatcagtttgagacaccctgatgcaaaagaacgaaccctcaaggaagttggctgtacatgtattttccttcctagcacaggaaaagacagaaagattatccaatcagtaccactcatagcacctgattatatatgtatgaggaattcagaaatggtttgatcaaggttgaagacctaaaaagtagcttttctctcggacaccaagtccccatctcatgcgtggttgagttagtagaatctgaggatgatgcttcttcctccaggattggtatcctatggtttttgttgttcagtaaatgaagtacctccatccccc

SEQ ID NO: 44431 - DNA, 597 bp, Homo Sapiens
gatgggagcagcttccattactttcaagggagatttgagctctctgggaagagcagacagtatccagcagatgcattggagccccaacctggtattggagatgttaaggtcattgaaaaagcaactaagtctatgctagacccagcacagagatctcatttttaccttgtaaccccaagcttagtatttttgtgttttatattcgatggattacacaaggcactactcagtgtcggtgtgagcaaaaggtctaatattgtgattgggaatgagaacaaggaaacaggtactctctatgctagcaaatttgaagatgttttgcctaccttcactgcccttgagatgtcatcaattctgcgtcactgctgtgatctgataggcattgctgccggatcgagtgacccgatatgcaccaacagcctccaagtacagagacaattcaaggcaatgatgatatccattggaagacctttgcatagtgaaagtgctgatttattaattagctataatgcagggccagctatagattggatcaactcaagaccatgggttggaggattaatgttcacatttctatttggagaatttgaatcccct

SEQ ID NO: 44432 - DNA, 216 bp, Homo Sapiens
atggcttatgtctttaatctcagctgtttgggaagccaagtggaaagattgcttgaggccaggagttcaagaccaacctggataatacagcccagtcccaaaaaagcacctgaagcttgttttagttttcattcttcttatgaaattgggcctgatgctgaaggagaactcttctgtccactgcaagtccacttacatgagcagctaaataaatga

SEQ ID NO: 44433 - DNA, 588 bp, Homo Sapiens
atggccctcctgttccctctactggcagccctagtgatgaccagctatagccctgttggatctctgggctgtgatctgcctcagaaccatggcctacttagcaggaacaccttggtgcttctgcaccaaatgaggagaatctcccctttcttgtgtctcaaggacagaagagacttcaggttcccccaggagatggtaaaagggagccagttgcagaaggcccatgtcatgtctgtcctccatgagatgctgcagcagatcttcagcctcttccacacagagcgctcctctgctgcctggaacatgaccctcctagaccaactccacactggacttcatcagcaactgcaacacctggagacctgcttgctgcaggtagtgggagaaggagaatctgctggggcaattagcagccctgcactgaccttgaggaggtacttccagggaatccgtgtctacctgaaagagaagaaatacagcgactgtgcctgggaagttgtcagaatggaaatcatgaaatccttgttcttatcaacaaacatgcaagaaagactgagaagtaaagatagagacctgggctcatcttga

SEQ ID NO: 44434 - DNA, 618 bp, Homo Sapiens
agtaaatgtgtcaaatactggcctgatgagtatgctctaaaagaatatggcatcatgcgtgttaggaatatcagagaaagcaccgctcacaactatatgctaagagaacttaaactttcaaaggttgggcaagggaatatggagagaatggtctggcaataccacttttggacctggccggaccacggagtgcccattgaccccaggggtgtgctggacttcctggaggaggtgcaccataagcaggaacgcatcatgcatgcaaggccagtcgtggtgcacggcagtgctggaattggccggacagggacatacgttgtgattgatattctgactgacatcaacagagagaaaggtgttgactgcaacattgacgttctcaaaactatccagatggtgcagtctcagaggtcagggatggtccagacagaaacacagtaccgatttatctatatggcggtccagcattatactgaaacactacagcgcaggattgaagaagagcagaaaagcaagaggaaaggtcatgaatatacaaatattaagtattctctagcggaccagacgagtggagatcagagcccccccccccgccttgtactccaactccacgctgtg

SEQ ID NO: 44435 - DNA, 1457 bp, Homo Sapiens
agaatgatttcactacagactctctggaaagcctgggagctgaattccggaagatccccacatcgatgaaagcaaagcgaagccaccaagccgtcatcatgtccacgtcgctacgagtcagcccatccatccatggctaccacttcgacacagcctctcgtaagaaagccgtgggcaacatctttgaaaacacagaccaagaatcactagaaaggctcttcagaaactctggagacaagaaagcagaggagagagccaagatcatttttgccatagatcaagatgtggaggagaaaacgcgtgccctgatggccttgaagaagaggacaaaagacaagcttttccagtttctgaaactgcggaaatattccatcaaagttcactgaagagaagaggatggataaggacgttatccaagaatggacattcaaagaccaagtgagtttgtgagattctaacagatgcagcattttgctgctaccttacaagcttctcttctgtcaggactccagaggctggaaagggaccgggactggaaagggaccaggactgaacagactggttacaaagactccaaacaatttcatgccctgtgctgttacagaggagaacaaaatgctttcagcaaggatttgaaaactcttccgtccctgcaggaaaggattgatgctgatagaagagcctggacagatgtaatgagaactaaagaaaacagatggctggagatgacatttatccagggtcactttgtcaggccctaggacttaaatcgaagttgaacttttttttttttttttaaccaaatagataggggaagggaggagggagagggaggacagggagagaaaataccatgcataaattgtttactgaatttttatatctgagtgttcaaaatatttccaagcctgagtattgtctattggtatagatttttagaaatcaataattgattatttatttgcacttattacaatgcctgaaaaagtgcaccacatggatgttaagtagaaattcaagaaagtaagatgtcttcagcaactcagtaaaaccttacgccaccttttggtttgtaaaaggttttttatacatttcaaacaggttgcacaaaagttaaaataatggggtcttttataaatccaaagtactgtgaaaacattttacatattttttaaatcttctgactaatgctaaaacgtaatctaattaaatttcatacagttactgcagtaagcattaggaagtgaatatgatatacaaaatagtttataaagactctatagtttctataatttattttactggcaaatgtcatgcaacaataataaattattgtaaactttgtggcttttggtctgtgatgcttggtctcaaaggaaaaaataagatggtaaatgttgatatttacaaacttttctaaagatgtgtctctaacaataaaagttaattttagagta

SEQ ID NO: 44436 - DNA, 996 bp, Homo Sapiens
attaatcccctggcccaacccgtcatctactctaccatctttgcaggcacactcatcacagcgctaagctcgcacttttacctggtaggcctagaaataaacatgctagcttttattccagttctaaccaaaaaaataaaccctcgttccacagaagctgccatcaagtatttcctcacgcaagcaaccgcatccataatccttctaatagctatcctcttcaacaatatactctccggacaaataaccaataccaccaatcaatactcatcattaataatcataatggctatagcaataaaactaggaatagccccctttcacttcccagaggttacccaaggcacccctctgacatccggcctgctccttctccaaaaactagcccccatctcaatcatataccaaatttctccctcattaaacgtaagccttctcctcactctttcaatcttatccatcatggcaggcggtggattaaaccaaacccaactacgcaaaatcttagcatactcctcaattacccacataggaacagcagttctaccgtacaaccctaacataaccattcttaatttaactatttatattatcctaactactaccgcattcctactactcaacttaaactccagcaccacaaccctactactatctcgcaccaaacaagctaacctaacacccttaattccatccaccctcctctccctaggaggcctgcccccgctaaccggctttttgcccaaatgggccattatcgaagaattcacaaaaaacaatagcctcatcatccccaccatcatagccatcatcaccctccttaacctctacttctacctgcgcctaatctactccacctcaatcacactactccctatatctaacaacgtaaaaaaacagtttgaacacacaaaacccaccccattcctccccacactcatcgcccttaccacactgctcctacctatctccccttttatgctaataatcttatag

SEQ ID NO: 44437 - DNA, 273 bp, Homo Sapiens
atgcccaagagaaaggctgaaggggatgctaagggagataaagccaaggtgaaggacgaaccgcagagaagatccgcgaggttgtctgccaaacctgctcctccaaagccagagcccaagcctagaaagtcccctgtaaagaagggagagaaggtacccaaagggaaaaagggaaaagctgatgctggcaaggaggggaataaccctgcagaaaatggagatgccaaaacagaccaggcacagaaagctgaaggtgctggagatgccaagtga

SEQ ID NO: 44438 - DNA, 1083 bp, Homo Sapiens
gtggaccccaacaaccagggcatgtgcatccaggagaaagagcagatcaagacccttaacaagtttgcctccttcatcaacaaggtacggttcctggagcagcagaacaagatgctggagaccaagtggagcctcctgcagcagcagaagacagctcagagcaacatggacaacatgttccagagctacatcaacaaccttgggtggcagctggagacactgggccaggagaagctgaagctggaggcggagcttggcaacatgcaggggctggtggaggacttcaagaacaagtatgaggatgagatcaataagcctatagagatagagaatgaatttgtccccatccgttcagcggatgaagcttacatgaacaaggtagagctggagtctcgcctggaagggctgactgacgagatcaactttctcaggccgctgtatgaagagaagatccgggagctgcagttccggacacctgtggtgctgtccatggacaacagctgctccctggacatggacagtatcatctctgaggtcaaggcacagtacaaggagattgccaaccgcagccaggctgaggctgagagcatgtaccagatcaagcatgaggagctgcagacgctggctgggaagcacagggatgacccgcgtcctgcaaagacggagatctccgagatgaattggaacatgagccaactccaggctgagactgagggcctcaaacgcctgagggctttcctggaggccgccatcgcagatgccgagcagctcggggagctggtcgttaaggatgccaacaccaagctgtccgagctgaaggccgccctgagcaggccaagcaggatatggcatggcagctgcgtgagtactctgatgaacattaagctggccctggacattgagatcgccacctacaggaagctgctggagggcgaggagagccagctggagtctgggatgcagaaaatgagtatccatacgaagaccagcagtggccatgctggtgggctgagctcagcttatgagggcctcacaagccccggcctgggctccagcattagctctggcacgggctccagctcc

SEQ ID NO: 44439 - DNA, 4097 bp, Homo Sapiens
aaatttgcaattttatattttgcaaatattttgagagacattgatttttctccccgtgctcccccgttcttccctgcggagtgcgctgcgccgcccagccctgtcgccccccggaggtgatccctccctcctgcctgcccgccagcctgacctgtgcccggctcgcgggccgcagcctcggccccggcgcgcccccggcagctctcggcgcgatgagcatagagacgctactggaggcggcccgcttcctggaatggcaagcgcagcaacaacagagagcacgtgaggagcaggagcggcttcgcttggagcaggagcgagagcaggaacagaagaaggccaatagcctggccaggctggcacatacccttcctgtggaggaaccccgcatggaggcgccacccctgcctctgtctccaccggctcccccgccggcacccccaccaccacttgccacccctgccccactgactgtcatccctatccctgtggtgaccaactcccctcagcctctacccccacccccacccttgcccgcggcagcccagcctctgcccctggcgcctcgtcagccggccctggttggcgcccccggactcagcattaaggagcctgcccccctgcccagcaggccgcaggtgcccacccctgctcccctactgccggactcgaaggccaccattccacccaatggcagccccaagcctttgcagcccctccccacgcctgtcctgaccatagcgccacaccctggagtccagcctcagctggccccccagcagccgcccccacccacgctggggaccctgaagttggcaccagctgaagaagtcaaatccagtgaacagaagaagaggcccggggggatcggaaccagagaagtccacaacaaattggagaagaacaggagggcccatctgaaagagtgctttgagaccctgaagcggaacatccccaacgtggatgacaagaagacgtccaatctgagcgtgctgcggacggcgctgcggtacatccagtccctgaagaggaaggagaaggaatatgagcatgaaatggagcggctggcacgtgagaagattgccacgcagcagcggctggcagagctcaagcacgagctgagccagtggatggacgtactggagattgaccgcgtgctgcggcagacgggccagcccgaggatgaccaggcctccacctccaccgcctctgagggtgaggacaacatagacgaggatatggaggaggaccgggcgggcctgggcccacctaagctgagccatcgtccccagccggagctgctgaagtccaccctgccaccccccagcaccacccctgcgcctctgcctccacacccacaccctcacccccactccgtggccctacctcctgcccacctccccgtgcagcagcagcagccacagcagaagacccctctgccagcccctcctcccccaccggctgcccctgcccagacactggtgccagctccagcccatctggtggcgacggctgggggtggctccacggtcatcgcccacacagccaccactcacgcttcagtcatccagactgtgaaccacgttctgcaggggccaggcggcaagcacatcgcccacatcgccccctcggcccccagccctgcggtgcaactggcgcctgccacaccccccattgggcacatcactgtgcaccctgccaccctcaaccatgtggcccacctgggctcccagctgcccttgtacccgcagcccgtggcagtgagccacatcgcccacaccctctcgcaccagcaagtcaacggcacggccggcctggggcccccggctactgtcatggcaaagccggccgtgggggctcaggtggtgcaccacccccagctggtgggccagaccgtgctcaaccctgtgaccatggtcaccatgccctccttcccagtcagcacactcaagctggcttgaggacgaggccactcagaggcccccagtggggacagggagggggacctgtcccccactctctcacccaccagctccacacattccagccaggcccaggccagcccccccacccacccccaggcctcctaggggaagggggtgcaaagactctgagccaagggagggaagggccaccctgctgcactaggacttggtaagatgactctgagaaaatgcgagactctgatggaatgtgccacctgtccggcccagtgccagctccagtgccgctcctgcttcccctccctaccctcggaaatcagtgcgatgtggacgtcacgctccctgacttctcccccgccctgccccgccttcgtgtgctgctgctgctattgctgtctggtgaggtggcccaggcccccggctttcctccggagcctcatgttctcttcccaggcctttggaggggaaatggggaaagcagaactgaagccacttggcccagaaagctgcggattggggtgataaggggccttgctctgagcacaggtgacagatcataggaagtggctggtctggagtcccacccggacaggtggggcctcagcctggggctctctgacccggttgcagtcactgtgattcgttaccgtagatactacttaaaatgattctctaccaacaataaaccaaacccagccactgccaagcttcctgtgccctcaccccaatccctgccactgggctctggacctcaggagggcaggctgaggtggggaaggagggacttggctgtccttccccttccccgtcccctgcagcctgggtctggatgggaggagagccactgggcccctgtccccagtccccagtccccagccctgggcttggctcttggcttccagaaggcagcaaagaggggcgctgtcctgcgttcagcccctgatctctgacctctgctgagtgctgggcactgctccaagggacaggtgggcctggcggcctgtgggtttgggtgcctcctgcagtttgggagacatggaccagcatctggtcttgtttccaggagcatagaagccacatcgttgagacatcaggaaggtaaaaacccagcggcttagccaagccctaagcctgtccccagaccaaccctgggacctatacagaacagagggccagagctagggctgctgcttctgctccagcccctttgcctctgtcctcccatcccctcaacaccctgcttctcccggggacgcttttgagtgggccctgcccggggagctgcagagcagcagcacctttctctgagaagaggtccttggttgggtcaaggacagggctgagcgtggaagggggaggagtcaggggctctgtgttaggatgcggctttctctgcctctgggcagcctgctttggcctttccttgtatgtgggtgtttattacaagtggctttgtgtcagacacgctcggctccccacctggacacacactcaccagtggcctttcagtgtagcgggaggaagccggtgtccctggatgtgaagctcacactgatgggctggggcaggggcctgggccggcgagggggccggggggaggggacagagctgaggatttcctggagtgccctgcaggcacagaggaggtcagcaaaggtcttgaatagattttctctggaaataaagaatccttagatgcctaaaaattcccttcctgttccctcctggtcctggacacctcccaggggactgttccttatttctctctcctggtgtgggtaaagggacagttacaaaccaggtcaccatcctcagaggctgagccctgtacccaccccagcacagccacctccgccagaccccgtggctctgggagagccagctttgctattcccattgtgacagcgatggcaggcctgacccacggggcagttagagcagcctcgtggagctcgcccctcccctcagcctgcccacctctccctgcatcctgaggccagtggcccccgggcctgcacagatacctcatcatccacccgctgcccctccccgtccctgtcccccagcatcgggggcctgcaaatctagtgccgaatgactatgtccagattggtgacgatgggtgttgctgtttttcttgtcgtttgtgaacgc

SEQ ID NO: 44440 - DNA, 2010 bp, Homo Sapiens
caaagactcacccgtgagccagctctcaaagaaagcagcttgcgttgacagcctgggggcagcaaggatgcagtctcccaggagaggatgcactcggtggtgggaagccaggctggaggggcctgagtgaccctctccacaggcgggcagggcagtgggagaggtggtgtgtggatacctctgtctcacgcccagggatcagcagcatgaaccagcttggggggctctttgtgaatggccggcccctgcctctggatacccggcagcagattgtgcggctagcagtcagtggaatgcggccctgtgacatctcacggatccttaaggtatctaatggctgtgtgagcaagatcctagggcgttactaccgcacaggtgtcttggagccaaagggcattgggggaagcaagccacggctggctacaccccctgtggtggctcgaattgcccagctgaagggtgagtgtccagccctctttgcctgggaaatccaacgccagctttgtgctgaagggctttgcacccaggacaagactcccagtgtctcctccatcaaccgagtcctgcgggcattacaggaggaccagggactaccgtgcacacggctcaggtcaccagctgttttggctccagctgtcctcactccccatagtggctctgagactccccggggtacccacccagggaccggccaccggaatcggactatcttctccccaagccaagcagaggcactggagaaagagttccagcgtgggcagtatcctgattcagtggcccgtggaaagctggctactgccacctctctgcctgaggacacggtgagggtctggttttccaacagaagagccaaatggcgtcggcaagagaagctcaagtgggaaatgcagctgccaggtgcttcccaggggctgactgtaccaagggttgccccaggaatcatctctgcacagcagtcccctggcagtgtgcccacagcagccctgcctgccctggaaccactgggtccctcctgctatcagctgtgctgggcaacagcaccagaaaggtgtctgagtgacaccccacctaaagcctgtctcaagccctgctggggccacttgcccccacagccgaattccctggactcaggactgctttgccttccttgcccttcctcccactgtcacctggccagtcttagtggctctcaggccctgctctggcctggctgcccactactgtatggcttggaatgaggcaggagtgggaaggagatggcatagagaagatctaataccatcctgcccattgtccttaccgtcctgcccatacagactgtggctccttcctccttcctgtgattgctccctcctgtgtggacgttgcctggccctgcctcgatgcctctctggcgcatcacctgattggaggggctggtaaagcaacacccacccacttctcacactagccttaagaggcctccactcagcagtaataaaagctgtttttattagcagtagttctgttgtccatcatgttttccctatgagcacccctatgcccactctaatattcaacaattatagacaatttgccctatcatttatttacatctatgtatctaccatctaatctatgcatgtatgtaggcaatacatgtatctaaacaatgtatttgtcaatgcatcaatttacctactctatgtatgcatctatatgtgtattatgtatgcgtgcatgcgtgcgcgcacacacacacacacacacacacactgacattatatcatggcattttattcctaaatcttccagcatgcatccccaaaaaacaagaaacttgtcttacataatcacaataatatatccacatctaagaaaatttactgtaacttcttaatctaagaaaattatgtatttttgtcatatgtattttgtcatatgtattttgtatttgcatatgtattttgtatttgcatatgtatttttgtcatagcagcaaacagagtgaaatgccatttttcatattct

SEQ ID NO: 44441 - DNA, 828 bp, Homo Sapiens
tcacctcgtggcgtaggggagaggtaacaccgagaagaggcagcggcggtggcgccaagacgattggtgccaaacagggcagaacgcaactcagctctgggtttgtgaatagcacaatggaagaagctggactttgtgggttaagagagaaagcagatatgttgtgtaactctgaatcacatgatattcttcaacatcaagactcaaattgcagtgccacaagtaataaacatttattggaagatgaagaaggccgtgactttataacaaagaacaggagttgggtgagcccagtgcactgcacacaagagtcaagaagggagcttcctgagcaagaagtagcccctccgtctggtcagcaagctttacaacaacaggaacaaagaaaaagtcttaggaaaagaagttttattattgatgcaagccctaaacactttcgactccagaggagaagctggcagctctctgtaagaaatatgctgatcttggaaattcacctcttctatagaagagtttgttttgaactatacgatttgaaacaaaattctttttttggagactatggaaacattctcaacagggaaaccctactagactttgtaaagcaaataatggaaaagatacagaactttttgaagaatcatgggaaatttttataattaaataaatgctaaaattctgttttgtgaaacatttatgggaattatcactgacagtttttgtacactttcaaatagtgttaaagcagcaactccatgttgtaaatgcacaaaacaaatatttagttaataatcaactccaagaataaagctgtaacaataatagtta

SEQ ID NO: 44442 - DNA, 588 bp, Homo Sapiens
atggacccacagtccaggtccctgaagaatgcgggctctcgatcctcctcgagagagaacagggccacctcgggagagggggctcagccatgccaggggacggatgacggtcccagcttgggggctcaggaccagaggagcacgcccacgaaccagaagggcagcatcattcctaacaacattcgccacaagtttgggagcaatgtggtggaccagctggtctccgaggagcaggctcaaaaggctattgatgaagtcttcgagggccagaaaagggcaagctcatggcccagcaggacccagaatcctgtggaaatctcctccgtcttctcagactactatgacctcggctacaacatgcggtcaaacttgtttcgaggggctgctgaggagacaaagagcctcatgaaggcttcttacacaccagaggtcattgagaaatcagtgagggacttagaacactggcatggcaggaagacggatgatctggggcggtggcaccagaaaaatgctatgaacctgaacttgcagaaagcactggaagagaaatatggagaaaacagcaaatccaagagctccaagtactag

SEQ ID NO: 44443 - DNA, 1667 bp, Homo Sapiens
gagtgccgcagtcggccagccatggagcggagcttgctggcggcgaggccgcggcgacaaggtagccacccccgcagcatgcctcgaccgcggtccgcagctgcaccgcctctccccgccccccagggtgcgctggtcccggtcgcgcgctcagacctccgcatcccgggcgtggtcggttaagtccccggccgtgacccaggcccggggagctagtctccgcccttcgctcttacggatcccctcggagtacgccgcaccatgcagctcaggctcttccggcgcctccttctcgccgctttgctgctggtgatcgtctggaccctcttcgggccttcggggttgggggaggagctgctgagcctctcactagcctccctgctcccagcccccgcctcaccggggccgcccctggccctgccccgcctcttgatccccaaccaggaagcttgcagtggtcccggggcccctcccttcctgctcatcctggtgtgcacggctccggagaacctgaaccagagaaacgccattcgggcttcgtggggcgggctgcgcgaggcccgggggctcagggtacagacgctattcttgctgggagagccgaacgcacagcaccccgtgtggggttcccaggggagtgacctggcctcggagtcagcagcccagggggatatcttgcaggccgccttccaggactcctaccgcaacctcaccctaaagaccctcagcgggctgaactgggctgagaaacactgccccatggcccgatacgtcctcaagacggacgatgatgtgtatgtcaacgtccctgaactggtatcagagctggtcttgcgagggggccgttgggggcaatgggagagaagcacggaaccccagagagaggctgagcaggaaggaggccaggttttgcacagcgaggaagtgcctcttctgtacttgggccgggtgcactggcgcgtgaacccctctcggacaccggggggcaggcaccgcgtatcagaggagcagtggcctcacacctggggcccctttccaccctatgcctcaggcacggggtatgtgctgtcagcgtctgctgtgcagctcattctcaaggtggccagccgggcaccccttctcccattagaggatgtctttgtgggggtaagtgcccgacgaggaggcctcgccccaacacagtgtgtcaagctggctggtgccacccactacccgctagaccggtgctgctatgggaaattcctgctgacgtcccacaggctggacccctggaagatgcaggaagcctggaagctggtgggtggctctgacggggaaaggactgcgcccttttgctcctggttccagggagtcctgggcatcctgcggtgtcgagcaatagcctggcttcagagctgagagtgcctggggccacaggaaaggcaggaacaggaccttctctctcccaggcccaacgcaggggccctcactggctgcagctgatctgtttccttataccagatcctcagtctcactaaagacagcgatatgggagacacccaggggcctggcccgccagcccaaaagatggtcatcgggaagagaaaaagaaaaaaatgctgcagttgttctctcaagctagggcagaagaggggtgtcaagctcctcaataaacttgtctccacttc

SEQ ID NO: 44444 - DNA, 369 bp, Homo Sapiens
tgtgaggagacgagtgaaaaacccaaaaagaagaaaaagcaaaagccccaggaggttcctcaggagaaaacagaagacccatctatctctttctccaaacccaagaaaaagaaatctttttccaaggaggagttgatgagtagtgatcttgaagagactgctggcagcaccagtcttctcaagaggaagaagtcttcacccaagacggaaacagttaatgaccccgaagaggcaggcaacagaagtgtctccaagaaaaagacgaaattctccaaagaggagcctgtcagcagtggacctgaagaggctgctggcagcaagagcagctccaagaagaaaatgttccataaagaagcccaggaagattag

SEQ ID NO: 44445 - DNA, 1704 bp, Homo Sapiens
tctggtttcgggttttattttagaatttataaaattccagtgtcatccatattcatgagcctttacacatgtttgcatataatctccaaattccaaagttaaggccaagggatggattgtagctatggaaacagatgatatggaagacatccaacaaggaggaaaagcacacgcacgcctcacccctgcctcatctctgcccagggctgtcctgacagcacagacgcttcagggagacaggcctggggacagtcatgtcatcacccttgcaacaaccacccaaaggaaaagagagcgctgaacagtttaggaaagggctcgcgtctaagacatcaagcgacatacagagatgtgcaaaacttggtgagaattaaaattgacctttgggagagggtaggggcaggatgttttatgacactgtagaaaagacaggaggaacccgctgcgatggagattggggggagctggaagcaagcagccaacaggacagagttccagaactcatgcagatggggaagaggtgacagcccttccccactggcctcccccgtggaggtggagtagacagatcccgggaaaggcaggaaaagggccttgctttctttccctgtttcctaagccgtggtcaccctagcctatgaagctggaagctatattccttccaatcccaatttaccattcctgtaaacaggcccattcagggctgcctgagcaaatggggacttgccgaggcagctgcaactagacttgggctaagccgtctgggtctactcaagaattcgagtctgaagatgaccaagcttgagttattcaactgagagtgaggtgtcaaggcggaagcgactgtccccagggaagggctgtgagatggatgggcgtgagtcagcttttccaaaactcaagtacctgggacaggacaactcgctagcagctcagtcacctccgtggcggacacagataaggatgttaagaccagaaaaccagagactagggccccgtcctcagccctcacagcatgacacagatgcctccctcggagagcagggtctctcggcatccagcggcgtggtctgcattctgctctacctcatgctctaggccccatgccatcgtctcggccctagaccgtgaaaactgccagtcacccgggacctgctcctaggggctggcctgcacagccggatggcctgtgggcggggtggaagtgcccactcccactccagatgggcctgctggccactgacccacctgtgctgagggagagcgccagcctccagcttaggtacacggcgcccacccccagctccacgggaaacccataaccaccagaaacatctcaatcaagagacgggtgtgtggggtggcactaactgcacagagaccactccacgccggctgaggtagaaagaaggcaactgaacacacagcagctagggcaggggcagggaggggctgcaggtggtgtgaagaagagcccagctgtcatctaaggcaaactgcccccactgaggacaagcgtaaggccctacctcccccaacctgtgcgcatctcaatcacagcagacactgtgacggccacaggggacccagatggtgcctaccaccttgcctccaggctccactcaccagacctcaggctgagggtctggcagtggaggtaggggcagggacccttggtgctttcagaccccacggcaggtaaaa

SEQ ID NO: 44446 - DNA, 231 bp, Homo Sapiens
aatgcccaggaaaaccatgggctggctgtgcccaccccctcggttccagatgattttgcagacaaagaagtgacaggtaccagctcactagtcaatggcaacctccgactgtacagctctgtgggtgacctgaggcctggacaatatggccaggatctactcatccccccacctcccccaggcccagccccagggccccctcaggacatttcagaacctccaggggggtcg

SEQ ID NO: 44447 - DNA, 2331 bp, Homo Sapiens
tttctgcaggattcaattactggacttgtcaactctgccagtgtacatttctcttccactatgagaggaccgattgtattgcacatttgtctggctttctgtagccttctgcttttcagcgttgccacacaatgtctggccttccccaaaatagaaaggaggagggagatagcacatgttcatgcggaaaaagggcagtccgataagatgaacaccgatgacctagaaaatagctctgttacctcaaagcagactccccaactggtggtctctgaagatccaatgatgatgtcagcagtaccatcggcaacatcattaaataaagcattctcgattaacaaagaaacccagcctggacaagctgggctcatgcaaacagaacgccctggtgtttccacacctactgagtcaggtgtcccctcagctgaagaagtatttggttccagccagccagagagaatatctcctgaaagtggacttgccaaggccatgttaaccattgctatcactgcgactccttctctgactgttgatgaaaaggaggaactccttacaagcactaactttcagcccattgtagaagagatcacagaaaccacaaaaggttttctgaagtatatggataatcaatcatttgcaactgaaagtcaggaaggagttggtttgggacattcaccttcatcctatgtgaatactaaggaaatgctaaccaccaatccaaagactgagaaatttgaagcagacacagaccacaggacaacttcttttcctggtgctgagtccacagcaggcagtgagcctggaagcctcacccctgataaggagaagccttcgcagatgacagctgataacacccaggctgctgccaccaagcaaccactcgaaacttccgagtacaccctgagtgttgagccagaaactgatagtctgctgggagccccagaagtcacagtgagtgtcagcacagctgttccagctgcctctgccttaagtgatgagtgggatgacaccaaattagagagtgtaagccggataaggacccccaagcttggagacaatgaagagactcaggtgagaacggagatgtctcagacagcacaagtaagccatgagggtatggaaggaggccagccttggacagaggctgcacaggtggctctggggctgcctgaaggggaaacacacacgggcacagccctgctaatagcgcatgggaatgagagatcacctgctttcactgatcaaagttcctttacccccacaagtctgatggaagacatgaaagtttccattgtgaacttgctccaaagtacgggagacttcacggaatccaccaaggaaaacgatgccctgtttttcttagaaaccactgtttctgtctctgtatatgagtctgaggcagaccaactgttgggaaatacaatgaaagacatcatcactcaagagatgacaacagctgttcaagagccagatgccactttatccatggtgacacaagagcaggttgctaccctcgagcttatcagagacagtggcaagactgaggaagaaaaggaggacccctctcctgtgtctgacgttcctggtgttactcagctgtcaagaagatgggagcctctggccactacaatttcaactacagtcgtccctttgtcttttgaagttactcccactgtggaagaacaaatggacacagtcacagggccaaatgaggagttcacaccagttctgggatctccagtgacacctcctggaataatggtgggggaacccagcatttcccctgcacttcctgctttggaggcatcctctgagagaagaactgttgttccatctattactcgtgttaatacagctgcctcatatggcctggaccaacttgaatctgaaggtattcatgctttgaaggggatcttttcaaggactgactcgctggatgagggcttggatggtgacactgagctgccaggttttaccctccctggtatcacatcccaggaaccaggcttagaggagggaaacatggacctgttggagggagctacctaccaggtgccagatgccctcgagtgggaacagcagaatcaaggcctggtgagaagctggatggaaaaattaaaagacaaggctggttacatgtctgggatgctggtgcctgtaggggttgggatagctggagccttgttcatcttgggagccctctacagcattaaggttatgaatcgccgaaggagaaatggcttcaaaaggcataaaagaaagcagagagaattcaacagcatgcaagatcgagtaatgctcttagccgacagctctgaagatgaattttga

SEQ ID NO: 44448 - DNA, 1497 bp, Homo Sapiens
cagggactgttgacattcagagacatagctatagaattctctctggaggaatggcaatgcctggattgtgctcagcggaatttatatagacatgtgatgttagagaactacagaaacttggtctccctgggtattgctgtctctaagccagacttgatcacctgtctggagcaaaataaagagtcccagaatataaagagaaatgagatggtagccaaacgcccagttacgcgttcccatttcacccaagaccttcagccagagcagggcatcaaagattcactccaaaaagtaataccaagaacatatggaaaatgtggacatgagaaattacaatttaaaaaatgccgtaaaagtgtgggtgaatgtgaggtgcccaaaggttatagtgaagttaaccaatgtttgtcaactacccaaaacaaaatatttcagactcataaatatgtcaaagtctttggtaaattttcaaattccaatagagataaaacaagatatactggaaagaaacatttcaaatgtaacaaatatggcaaatcattttgcatgctttcacacctaaatcaacatcaggtaattcatactagggagaagtcctacaaatgcaaagaatgtggcaaatcctttaactgctcctcaaaccatactacacataaaataattcatactggagagaaaccatatagatgtgaggaatgtggcaaagcctttagctggtccgcaaaccttactagacataagagaattcatactggagagaaaccctacacatgtgaagaatgtggccaagcctttaggcgctcctcagcacttactaaccacaagagaattcatactggagggagaccctacaaatgtgaagaatgtggcaaagcctttagcgtatcctcaaccctcactgaccacaagagaattcatactggagagaaaccctgcaggtgtgaggaatgtggcaaagcctttagctggtcctcaaaccttagtagacataagagaattcatactagagagaaaccctatgcctgtgaagaatgtggccaagcctttagcttatcctcgaaccttactagacataagagaattcatactggagagaaaccctacacatgtgaagaatgtggccaagactttaggcgctcctcagcacttactatccacaagagaattcatactggagagagaccctacaaatgtgaagagtgtggcaaagtctttagcttatcctcaaccctcactgaccacaagagaattcatactggagagagaccctacaaatgtgaagaatgtggcaaagcctttagcttatcctcaaccctcactgaccacaagagaattcacactggagagagaccctacacatgtgaagaatgtggcaaagcctttaattgctcctcaacccttatgcaacataagagaattcatactggagagaaaccctacgtgaagaatgtgaccaagcttttaagtggcattcaagtcttgctaaacataagataa

SEQ ID NO: 44449 - DNA, 1979 bp, Homo Sapiens
cccttgctgccgcctctcgcctcacgcccccagagaagagtttctccaccaggcagcaggtgaaggtttttttccaagtcacatgattcaggattcagggggagaatccttcttggaacagagatgggcccagaactgaatcagatgaagagagataaggtgtgatgtggggaagactatataaagaatggacccagggctgcagcaagcactcaacggaatggcccctcctggagacacagccatgcatgtgccggcgggctccgtggccagccacctggggaccacgagccgcagctatttctatttgaccacagccactctggctctgtgccttgtcttcacggtggccactattatggtgttggtcgttcagaggacggactccattcccaactcacctgacaacgtccccctcaaaggaggaaattgctcagaagacctcttatgtatcctgaaaagggctccattcaagaagtcatgggcctacctccaagtggcaaagcatctaaacaaaaccaagttgtcttggaacaaagatggcattctccatggagtcagatatcaggatgggaatctggtgatccaattccctggtttgtacttcatcatttgccaactgcagtttcttgtacaatgcccaaataattctgtcgatctgaagttggagcttctcatcaacaagcatatcaaaaaacaggccctggtgacagtgtgtgagtctggaatgcaaacgaaacacgtataccagaatctctctcaattcttgctggattacctgcaggtcaacaccaccatatcagtcaatgtggatacattccagtacatagatacaagcacctttcctcttgagaatgtgttgtccatcttcttatacagtaattcagactgaacagtttctcttggccttcaggaagaaagcgcctctctaccatacagtatttcatccctccaaacacttgggcaaaaagaaaactttagaccaagacaaactacacagggtattaaatagtatacttctccttctgtctcttggaaagatacagctccagggttaaaaagagagtttttagtgaagtatctttcagatagcaggcagggaagcaatgtagtgtggtgggcagagccccacacagaatcagaagggatgaatggatgtcccagcccaacctctaattcactgtatggtcttgatctatttcttctgttttgagagcctccagttaaaatggggctccagtaccagagcagctagcaactctgccctaatgggaaatgaaggggagctgggtgtgagtgtttacactgtgcccttcacgggatacttcttttatctgcagatggcctaatacttagttgtccaagtcgcgatcaaggactctctcacacaggaaacttccctatactggcagatacacttgtgactgaaccatgcccagtttatgcctgtctgactgtcactctggcactaggaggctgatcttgtactccatatgaccccacccctaggaacccccagggaaaaccaggctgggacagccccctgttcctgagatggaaagcacaaatttaatacaccaccacaatggaaaacaagttcaaagacttttacttacagatcctggacagaaagggcataatgagtctgaagggcagtcctccttctctaggttacatgaggcaggaataagaagtcagacagagacagcaagacagttaacaatgtaggtaaagaaatagggtgtggtcactctcaattcactggcaaatgcctgaatggtctgtctgaaggaagcaacagagaagtggggaatccagtctgctaggcaggaaagatgcctctaagttcttgtctctggccagaggtgtggtatagaaccagaaacccatatcaagggtgactaagcccggcttctggtatgagaaattaaacttgtatacaaaatggttgccaaggcaacataaaattataagaattc

SEQ ID NO: 44450 - DNA, 402 bp, Homo Sapiens
ggggccggtgtcctccaccagcatttctcctctggtcacatctacgtcctgatgggacttctccctcctccttggaccatcagctttacagtccagaccaccctgcagccacccggtggtctcccagctgccccagtctcgggcaggatggcttttgagcctgttgggagagaccttgccaggagaatggtgcccagggcaggcaagaggacacagactctgggagctagaagagttgcggcccagggggccaggccactcccagaggacaggaggcccaaaagcggggaaaggctccatgttacggtggccccatgctgggagtttgtgctgccttctgtctccctgactgcccaagcgtggggtggtgtggggcaggaggcatcctctggtgttccctag

SEQ ID NO: 44451 - DNA, 3202 bp, Homo Sapiens
ctctctcacacacacccccgcttgggcctcctctctctctccggctccattttctccgccgccgggggccggggtctcctgtggggggcccagccggtatcccaggtctcccttcagtgccggggtgaacccccgggggagccgggagccgggggcagacgggcgggggttggggcggagggagcagcggccccagcgagtttggggggagaagtaaccaggcggggggaggggcggagcagggagggggcctcagggcccccccccagctatggacgaacggctactggggccgccccctccaggcgggggccgggggggcctgggattggtgagtggggagcctgggggccctggcgagcctcccggtggcggagaccccggtgggggtagcgggggggtcccgggaggccgagggaagcaagacatcggggacattctgcagcagataatgaccatcaccgaccagagcctggacgaggcccaggccaagaaacacgccctaaactgccaccgaatgaagcctgctctctttagcgtcctgtgtgaaatcaaggagaaaactggcctcagcattcggagctcccaggaggaggagccggtggacccacagctgatgcgcttggacaacatgcttctggcagagggtgtggctgggcccgagaaagggggcggctcagcagcagcagctgcagccgctgcagcctctggtggtggtgtgtcccctgacaactccatcgaacactcggactatcgcagcaaacttgcccagatccgtcacatataccactcggagctggagaagtatgagcaggcatgtaatgagttcacgacccatgtcatgaacctgctgagggagcagagccgcaccaggcccgtggcccccaaagagatggaacgcatggtgagcatcatccatcgaaagttcagcgccatccagatgcagctgaagcagagcacctgcgaggctgtgatgatcctgcgctcccgtttcctggatgccagacgaaagcgccgtaacttcagcaaacaggccactgaggtcctaaatgagtatttctactcccacctgagtaacccatatcctagtgaggaggccaaggaggagcttgccaagaagtgtggcatcaccgtgtctcaggtctccaactggtttggcaacaagaggattcgctataagaaaaacatcggaaagttccaagaggaggcaaacatctatgctgtcaagaccgccgtgtcagtcacccaggggggccacagccgcaccagctccccgacacccccttcctctgcaggctctggcggctctttcaatctctcaggatctggagacatgtttctggggatgcctgggctcaacggagattcctattctgcttcccaggtggaatcactccgacactcgatggggccagggggctatggggataacctcgggggaggccagatgtacagcccacgggaaatgagggcaaatggcagctggcaagaggctgtgaccccctcttcagtgacatccccaacggagggaccagggagtgttcactctgatacctccaactgatcttgcccctcagggtcacaggggtgggggctctcacaaggcgacttgaagaggacgcaggcttccagaggacaaaccccaatacaggagaagcacaagacagagaagggccaatggggtcatcccctccctaacgagactctctgtgctgggggtgctaattacatggcaggaagaatggggcctctaaggggagtgtggggtctgtctctcccttttttccatctttttcctctctcgctttctttcttacacagaaacatacacataccgagaaacctatttctcagacccctttttctcctctgtctttctctctccctctcccacacctcacacacacatactcccacttgcaactattctgtttctctcctgggctcccccactttcccttccccaccccacttgtatgctctggaatctgtggagacgccagccctgcccaatcagagatgccaaaaatggggacatgacttctggacagaggacatgggccacgcccccatgcatccccacccccgcccctccggacggcttacttacctcatacgcagctcatcttaaaccaatagaatcgctcggtggacgagagtgtctgactcagatatctacctcggagggagtttctgctactttagggaattattgactgggctttggggttgaacttttttttttttaaagaaagaaaaagaaaccctgggatccatctgttttttttgttgttgttgttgtttttgttgttgttgttggtggtggtggtggtggttcttaatttttaatttagtttggggaagtagcttgtttttttttttataaatatgttgatttcttgtcttttttttttatttcttactttcccatattaggggtgatagccaaaggggttctggtaagagaaagggggacaaacagaactggtaaagaggcccccctggctccaggcctgtccatcaggaagtaaattttacagggcaccaagctttgccccctaaaatcccttaggtgttctttgttcatgcaggcaggtttctgccgcatttgatgtggaggcagtgaagggcttgccctgctggcctctcatcccccttcttcccacaacccttgggcagggctggactcagtaattttgaggaaattgaagatgccatcttcccctgtgagtgacatgtctttaattttttaaaaaactactatttgaaaattggagggggaagaatgggaagggagttattgccaaatatgttaaatatgggttggggtgcttgtatatgtatcttcctcaatttccccataaatgaggtatctttttgtcacaccaaaatcaaggggtagggagagggaggaggttgcaaaaagccagatgtgggggaaaagtaacatcaacactgtcccatcctcagccctgaactagctaccatctgatcccctcagacattctcaggattttacaagactgtcagagtggggaacccctcccattaaagatccgggcaggactggggacaggttggaagtgtgatgggtgggggggtgggaggcatgggccgggggcagttctctcctcacttgtaaacttgtgtagtttcacagaaaaaaaacaaaatgcagttttaaataaagaaatttcttttt

SEQ ID NO: 44452 - DNA, 612 bp, Homo Sapiens
caggtctccagccacatccaggtgctggctcgtcgcaaagctcgcgagatccaggccaagctaaaggaccaggcagctaaggacaaggccctgcagagcatggctgccatgtcgtctgcacagatcatctccgccacggccttccacagccagccctctcctcctccctcctccctgttcagaagagccagaagcattggccagcccagatttctctcacctgagtcctcttggccagggcatgtgaagcctttctctcagcaaacctatgctgtccagcctccgctgcctctgccagggtttgagtctcctgcagggcccgccccatcgccctctgcgcccccggcacccccatggcagggccgcagcgtggccagctccaagctctggatgttggagttctctgccttcctggagcagcagcaggacccggacacgtacaacaagcacctgttcgtgcacattggccagtccagcccaagctacagcgacccctacctcgaagccgtggacatccgccaaatctatgacaaattcccggagaaaaagggtggactcaaggatctcttcgaacggggaccctccaatgccttttttcttgtgaagttctgg

SEQ ID NO: 44453 - DNA, 1682 bp, Homo Sapiens
actgcgccgagggccgccatcgctattgcggcattctccctcggctccggaggtaggggcaactcttctcttcctgtctgggaaaaagaccatagctcaaaaggaaggccgagggagaagttagaaagggatgatgaacgaagcgttttgaggggactgcaacgccgcggcaatacccgcccctgagctgcgcgcactaccgcctcggtagctatcatggccgccgggtcacgtgactccggcttggcgccgtcctggttttccgtcaccctggttctgtagtctcggttctccgactccctctttttctcgcttgtggactccgatatattgcccttcttcccttagaagaactgctgaaccgactctgagaaatttgaaaacatctggagaaaatgacccattggtttcataggaacccattaaaagccacagctcctgtgtcttttaattactatggtgtagtcactggcccttctgcttcaaaaatatgcaatgacttgaggtcatccagggcacgactccttgaactgttcactgatttgagctgtaatccagaaatgatgaagaatgcagcagattcatatttctcacttttacaaggtttcataaattctttggatgaatctacccaagaaagcaagttacgatatattcaaaatttcaagtggactgatacattgcaaggacaggttccaagtgcccagcaggatgctgtttttgaattaatttccatgggatttaatgtagctttatggtataccaaatatgcttcaagactggctggaaaagaaaatataacagaagatgaagcaaaagaagttcatcgaagcctaaagattgcagctgggatttttaaacatttaaaggaaagtcatctcccaaaactcattacacctgcggaaaaaggaagagatttagagtcacgactcatagaagcatacgttattcaatgtcaggctgaagctcaagaagtaacaattgctcgagcaattgaactaaaacatgctcctggactaattgctgcactggcgtatgaaacagccaatttctatcaaaaagctgatcatactttatccagtttggagcctgcatattctgccaaatggagaaaatatcttcacttgaagatgtgtttctacacagcttatgcttactgttaccatggtgagactttattggctagtgataaatgcggtgaagcaatcaggtctctccaagaagcagaaaaattgtatgcaaaggcagaagcactgtgtaaagaatatggagaaaccaaaggacctggaccaacagtcaaaccttcaggacatctgttctttaggaaacttggaaaccttgtgaagaacaccctagaaaaatgtcagagagaaaatggatttatttactttcaaaaaattccaacagaagccccacagctggaactcaaagcaaattatggtctcgtagagcctatacctttcgaatttcctcctacaagtgttcagtggacaccagaaacattggctgcatttgatctcaccaaaagacccaaggatgacagtactaaacccaaaccagaagaagaagtgaaacctgtgaaagaaccagacatcaaacctcaaaaggacactgggtgctacatctcctaaaatacaacttgcacttagaatttctctagcagtaaataagataaaccacag

SEQ ID NO: 44454 - DNA, 180 bp, Homo Sapiens
cagagttacatgctccaagactccctggagcacgtgcagctgtttgacctgatgaggaggatgttagaatttgaccctgcccggcgcatcacactggccgaggccctgctgcaccccttctttgctggcctgacccctgaggagcggtccttccacaccagctgcaacccaagcagatga

SEQ ID NO: 44455 - DNA, 762 bp, Homo Sapiens
atgtatttcttccttaattacctcgcactctcagatctttgctacatatccactgtggcccccaagctaatgattgacctactaacagaaaggaagatcgtttcctataataactgcatgatacagctatttatcactcacttccttggagacattgagatcttcatactcaaagcaatggcctatgaccactacatagccatctgcaagcacctgcactacaccatcatcacgaccaagcaaagctgtaacaccatcatcatagcttgttgtactgggggatttatacactctgccagtcagtttcttcttaccatcttcttaccgttctgtggtcttaatgagatagatcagtacttctgctatgtgtatcctctgctgaagttggctcgcattgatatatacagaattggtttcttggtaattgttaattcaggcctgatttctttgttggcttttgtgattttgatggtgtcttattatttgatattatccaccatcagggtttactctgctgagagtcataccaaagctctttcaacctgtagctctcacataatagttgtggtcctattctttgtgcctgccctcttcatttacatcagaccagccataacttttccagaagataaagtgtttgttctcttctgtgccatcattgctcccatgttcagtcttcttatctacatgctgagaaaggtggagatgaagaacgctgtaaggaaaatgtggtgtcatcaattgcttctggcaaggaagtaa

SEQ ID NO: 44456 - DNA, 1428 bp, Homo Sapiens
ttaaagtctatcacagaaagctttgccacagcaatccatggcttgaaagtgggacacctgacagatcgtgttattcagaggagcaagaggatgattctagacactctgggtgctgggttcctgggaaccactacggaagtgtttcacatagccagccaatatagcaagatctacagttccaacatatccagcactgtttggggtcagccagacatcaggctcccgcccacatatgctgcttttgtgaacggtgtggctattcactccatggattttgatgacacgtggcaccctgccacccacccttctggggctgtccttcctgtcctcacagctttagcagaagccctgccaaggagtccaaagttttctggccttgacctgctgctggctttcaatgttggtattgaagtgcaaggccgattactgcatttcgccaaggaggccaatgacatgccaaagagattccatcccccttccgtggtaggaacgttgggtagtgctgctgctgcatccaagtttttaggacttagctcgacaaagtgccgagaagctctggccattgctgtttcccatgctggggcacccatggccaatgctgccacccagaccaagcccctccacattggcaatgctgccaagcatgggatagaagctgcatttttggcaatgttgggtctccaaggaaacaagcaggtcttggacttggaggcaggatttggggccttttatgccaactattccccaaaagtccttccaagcatagcttcctacagttggctgctggaccagcaggacgtggcctttaagcgttttcctgcacatttatctacccactgggtggcagacgcagctgcatctgtgagaaagcaccttgtagcagagagagccctgcttccaactgactacattaagagaattgtgctcaggataccaaatgtccagtatgtaaacaggccctttccagtttcggagcatgaagcccgtcattcattccagtatgtggcctgtgccatgctgcttgatggtggcatcactgtcccctcattccatgaatgccagatcaacaggccacaggtgagagagctgctcagtaaggtggagctggagtaccctccggacaacttgccaagcttcaacatactgtactgtgaaataagtgtcaccctcaaggatggagccaccttcacagatcgctctgataccttctatgggcactggagaaaaccactgagccaggaggacctagaggaaaagttcagagccaatgcctccaagatgctgtcctgggacacagtggaaagccttataaagatagtcaaaaatctagaagacctagaagactgttctgtgttaactacacttctcaaaggaccctctccaccagaggtagcttcaaactctccagcatgtaataattctatcaca

SEQ ID NO: 44457 - DNA, 957 bp, Homo Sapiens
atggtagaagcagattgtcatggcaagcttttcattggtggcctcaatagagaagccaatgaaaaggtgcttaaagaagtatttgcaaaacatggtccccttttggaagttcttttgataaaaggtcgaaccagtaagtccagagattttgtggtcattatttttgagaatgctgcagatgctaagaatgctgccagagatatgaatggaaagtctttggatggaaaagaaataaaagtagaacaagcaaagaaaccatcttttccaagtggtggtaggcggagaccaccaccttcttcaagaaacagaagcccttcaggaagtctgagatctgcaagaggaagtagtggaggaacaagaccgtggctgccctcacatgaaggacacttggatgatggtggatacgctcttgatctcaacacgagttcttctaggggagccattccaattaaaagaggtccatcttcacgaagtggaggtcctcctcctaaaacatctgctccttctgctatggcaagaagcaatagttggatgggaggccaaggtcccatatcacgtggaagagagaattatggaggtcctccatgcagagagccaatctcttcctggagaaatgaccgtatgtcaccaagagatgatggttatgcaattaaggaaagaaatcatccactttcccgagaatctagggattatgctccactgtctagagactatgcataccatgattatggtcattctagttgggatgaacatttctctagaggatatagtgattgtgatggctgtggtgaggtgatgttagagatcattctgaacgtccaagtggaagttcttatagagatgcatttcagagataggggacctctcatggtgcaccatctgcaggagtgcctctgttgtcttatggtggaagcagccaccatgattatagcaataaatgagatagatatggcataa

SEQ ID NO: 44458 - DNA, 486 bp, Homo Sapiens
atgttacatattttatcaccgatgtattttttcctctggggctcatgctttttttctctctcttgttcagatggtttgtcaacagtgaccctggttggaatcatagttggggtcttactagccatcggcttcattggtgcaatcatcgttgtggttatgcgaaaaatgtcgggaaggtacgtaaatagcttacacccatgtgataggcaaatgaaagccatcgtgtctagaactcaaatctttgaactaatagaaatctctgatataagctgggtgtggtggctcgtgcctgtagtctcagctgctgggcacctgcagaccagcctgggcaacatagtaagaccctgtctcaaaaaaataatctctggtacaatggtcatgttccaaagttccttacttgggcctcttgagtgcagtggctcacacctggaatcccagtgctttgagaggctgaggcaggaggttcacttgtgcccaggaatttga

SEQ ID NO: 44459 - DNA, 186 bp, Homo Sapiens
atggagcctcacactgttgcccaggctggagtgccacagcacgatctcggctcactgcaatctctgcttcccaggttcaagcgattctcctgcctcatcctcccgaagatctgggactacagaaacatgaacacagccctgatcaagcggaaccgatacactcccgaaacaggcagaaaatcctaa

SEQ ID NO: 44460 - DNA, 741 bp, Homo Sapiens
atgagacagaaaattaacaaggatattcaggacttgaactcagctctggaccaagcagacctaatagacatctacagaactctccaccccaaatcaacagaatatacattcttctcagcaccacatcacacttattcaaaaattgaccacatagttggaagtaaaacacgcctcagcaaatgcagaagaatggaaatcataacaaacagtctctcagaccacagtacaatcaaattagaactcaggattatgaaactcactcaaaagctcacagctacatggaaactgaacaacctgctcctggatgattactgggtaaataacgaaattaaggcagaaataaataagttatttgaaaccaatgagaacaaagacaaagtgtactggaatctctgggacacagctaaagcagtgtttagagggaaatttacagcactaaatgcccacaggagaaagagggaaagatctaaaattgacaccctaatgtcacaattaaaagaactagagaagcaagagcaaataaattcaaaggctaggagaaggcaaataataactaagatcagagcagaaatgaagcagatagagacacaaaaaactcttcaaaaaatcaacggatccaggagctgtttttctgaaaagatcaacaaaatagatggactgctagccagactaataaagaagaaaagagagaagaatcaaatagacacaataaaaaatgataaagggggatatcaccactga

SEQ ID NO: 44461 - DNA, 1074 bp, Homo Sapiens
atgggaattggacagctaccccattatgctctggtggtccccgctgacgggggagactgggaggttaggccaatgtggagcagatgcttgtttcttcaccatcaaccggacctacctccatcatcacatgaccaaagcattcctcttctatggtcccaagaagaatcaccacctttggcagaaaatgatggtactgactttaacatagatagcttacctctgcctcggaaagcccatcatgactgggctgtttttcatgaagagtccccgaaaaacaattataagctctttcataaaccagtgatcaccttgttcaactacactgccacgttcagcaggcattcccacttgccactaactacccaatacttggagagcattgaagtcctgaagtcactccgatacctagttcctttgcagtccaaaaacaagcttagaaaaagacttgctccgctggtgtatgtacagtcagactgtgacccaccatcagacagggacagctatgttcgcgagctgatgacttacatcgaggtcgattcctatggtgaatgtttacgaaacaaagacctccctcagcagctgaaaaatccagcctctatggatgccgatggcttttataggatcattgcacagtataagtttatcctagcttttgagaatgcagtttgtgatgactacatcactgagaagttctggaggccactgaaactgggggtagtccctgtatattacggatcccccagcatcacagactggcttccaagtaacaaaagtgctattcttgtatcagaattttctcaccccagggaactggcaagttacatcagacgactggattctgatgacagattgtatgaggcctatgtagaatggaagctgaagggtgagatctctaaccagcgacttctgacagctctcagggaacggaaatggggagtgcaagacgtcaaccaggacaattacatcgatgcatttgagtgtatggtgtgcaccaaggtgtgggctaatatcaggcttcaggaaaaggtaagcaaatcaaaggtgggcatagagccagcaggctggccatcttga

SEQ ID NO: 44462 - DNA, 402 bp, Homo Sapiens
atgaaaagattggattccgaaatgatgtttgactggcaaaatgtggcagatttcagggatgcaggtggatccttaactgaggtcaaggtggaagaggaagaaagggatccgcagagtcctgaatttgaaattgaggaggaggaagaaatgttgtcatccgtcataccagattccaggagagaaaatgaacttcccgatttcccccacattgatgagttttttacccttaactcaacaccatctagatctgcatatgatgagcctcatttgctcgtaaatattgagaaacagaaactagagttggaaaaacgacgactggatatcgaggccgaagctgcaggtagaaaaggaacgcctacaaatcgagaaagagaggctgcggcatttagacatggaacatga

SEQ ID NO: 44463 - DNA, 351 bp, Homo Sapiens
cccactggccatggctgggccctatcgcagagagcctgtcagcacggccatttccacacccaggctggctgggaagcaagctacgaggtgctcaaaggccctctatgtctgcaggtagccccgtcccacacaggcgaggatcgttgggcctccttagtagccaaaggaactgaggtccagagcagggaatgtgttgcccagtgtcagcatggtctgctctggggtcaggcgtcttgccctggtcctaagccaccccaagccaaggcatgtccctgggcccatttcctctctcgaggtcttgggttccctatttctgatgtgtgtgaaaggaaggcctgtcctctggggtga

SEQ ID NO: 44464 - DNA, 956 bp, Homo Sapiens
gagcccggggtgctggagggaggcggcaggcccgggtcaggggcctcgagatcgggcttgggcccagagcatgttccagatcccagagtttgagccgagtgagcaggaagactccagctctgcagagaggggcctgggccccagccccgcaggggacgggccctcaggctccggcaagcatcatcgccaggccccaggcctcctgtgggacgccagtcaccagcaggagcagccaaccagcagcagccatcatggaggcgctggggctgtggagatccggagtcgccacagctcctaccccgcggggacggaggacgacgaagggatgggggaggagcccagcccctttcggggccgctcgcgctcggcgccccccaacctctgggcagcacagcgctatggccgcgagctccggaggatgagtgacgagtttgtggactcctttaagaagggacttcctcgcccgaagagcgcgggcacagcaacgcagatgcggcaaagctccagctggacgcgagtcttccagtcctggtgggatcggaacttgggcaggggaagctccgccccctcccagtgaccttcgctccacatcccgaaactccacccgttcccactgccctgggcagccatcttgaatatgggcggaagtacttccctcaggcctatgcaaaaagaggatccgtgctgtctcctttggagggagggctgacccagattcccttccggtgcgtgtgaagccacggaaggcttggtcccatcggaagttttgggttttccgcccacagccgccggaagtggctccgtggccccgccctcaggctccgggctttcccccaggcgcctgcgctaagtcgcgagccaggtttaaccgttgcgtcaccgggacccgagcccccgcgatgccctgggggccgtgctcactaccaaatgttaataaagcccgcgtctgtgccgcc

SEQ ID NO: 44465 - DNA, 1139 bp, Homo Sapiens
gcaggagttgctgatatttattcaaacgtcatccatacaataaagaactctgcttttaaaattccatttacatcagcagttaaaaaaaagtgacagtggatgaaacatgaagctgtaaagtgcctttatggggagggtcacacaagggcgcgcagctgtgcgacgagacggaggcaccgcgcctgcacagtacatcagggacatcgcgggacacagcacgcgttccaaataacttacacatcagaggaaaagctgccgagtctctgcatgcttcctatttgattccgcaccctggaggtctgattgaggacagtgggaacaaaaaaaggggggctgctgtgtgtgcacaggagctggtgtggcgtgggcaggaccttacacacgaacctgtccacaggggcagcgaggccggcctgtgcggggtgaaacccaagcgactctgcccctggcaccaccagagacacaaaaggattcttgagctgccctggccgtgggtgctcagtgctccccagagcctctctgcgggccatcaagagcgctgtgctggaacagggcgcgggggaggccaacagcaaaacgcagaggtctgaccatgatgggaacggcagtgcctgggagtgggcagccacaggccaggccagcactgctgcaccaggagctgggggattctgtgtgaaggcaggaggccgggtgatggccaggaaggtgccctctgttttctgtaaaacagccattggcctttgctcattggagtcaccacctgcagggcttggggagtgggtgctgggcagcgctcaggccacccagaaccacctgggctcactaccaccaaccacagcagaaatgacccacgggcagtggcccggcttcgacgccacactggccacggtggaaatgacccacaggcagtggcccggcttcgacaccacactggccacggtggaaatgacccacgggcagtggcccggctctgacaccacactgaccacggtggaaatgacccacgggcagtggcccggcttcaacaccacactggctttctcgagaccctgcaaggctgtactgtcttcattcatggatgacgagacggaagcagaggctgagcttggccaaagtgcagcagaagcggcatttggccc

SEQ ID NO: 44466 - DNA, 1910 bp, Homo Sapiens
ccaaatataattattttaaaacaaacaaaaaaagagaatgtaagcagtataagactttaaaacacacaaatgaaatatacatgactacatgcttcagtgaactaaaactttcatctgtgatctttattttgcaacattctgaagtaacattacagtcttttcagtgtgctgtgtcatttatatcccttactttatcctaggaatcctgtattgccattgagcatatgcaaattgagacatgtgcatagcttctccccgttgagcccatcagtggggaggagctatgtaccggggacatttggcaaagattttcatgagtctcttggatgtaacagctccttaagaaaacctcagtttaccttccctattttttaccatttgtaaaactaaggctcagtgatgtaaaatataacacattctgtgctgtggcataactgcagcttaggtttttatattcaagacaagcagaggtatagctgaaaaggtatgaacacttactatgcttcaagatcccttcgttggtttagttgtggcattttagaacagctgacttgggactaaagcatctttctatctgggatcagtatttctaagttgcctttaagctgaataaacatttggtttttatatttaattgcttcgatgtgaaacactgcaatttaaaaaattacacatatgtaatatagtattttacactaaataatagtgactggcagtccactggccgaagaagtattatttttcagatattctgctctgtcatcagctgtagacactgacaggtatttatctggaaaggcttgctgtcaggggttcacagtgctgcttgtgggttatctccagaccctttacattcggcactttaggacagcgtgagtcacaggttgcactagaagttgcctttgaaattagacctaaactatgtggaactggaacccttgtacacaaagctctctatcatccaaatcctgctgaactctcttaggaaagaacagttttacagattcattctttccacacacaagatttccccactgcccagttactctcacctttttattttcttgactgttatgttttacttgactctggaatcttaccttgtactctcacatttacatggaagtatagcttatttcaccaattatactatcaaaagcagaagtagttacttacacctgaaaatttgtactgagaatgtagctgtgaatatgtttaagaaagtatacttaaagcacaaatccaaggaagtatatttaaatcaaagcaagaaatcccatttccaaatggcaataaagcatgtgttacatagaatcagtgcatgaaagtgttttagtagcccagattagattgtaccctggcgaataagcaagagttctttttcattttcatcttgcaattcaactgggtatttgggttctttttctattcactcatgtcagatagagacatgcatgttgtaaattattttgtcagaatgaaagcctggcagattaaatgctttcttctcttcttgctttacttgatatcaatctcttgttcatttcttgataatatgtttggttatttttgttttcattgcttttagtgtcagagatggctttggattccccgttctgtgtgctgctgtctggctcctgaacccagctgtagaggtgtgtgtcaatcccaactggtgaagtactgagaagaagctacacaaaaggcagcaaagtattagtaagtgtacctctgacattttaaccacctctgacttttccatggaatggacaagtagtagtctctgtcagagctacattttaaaggagaaaaagaaacgtgaagtcatgaactgtttatttatgctgttatttttgtgtttactcacctcatttatattgacttgtaaattagtaatttctgaactatta

SEQ ID NO: 44467 - DNA, 5065 bp, Homo Sapiens
gagggaggcggggcggaaaggcgagaggtgtctcctccaccggagccaggggagacccgagcaagctccgtgacagcacgtcggccgccatgtcgccgagtggggctggaaacagacccggcgcccagcggtagccctccttgcgcctccgattcccagacatggaaggtctttaatgtaactttaaatggttcaccaaaggatgctctaatggatgacagcgatactcctacatattatctgcaaatagaaccacaagatggatgtcatcctggtgacagcgtggaaaggagtgtgacctgtctgccttctgcatcagatgaaaatgaaaatcagcttgacggggacgggcatgagcatctgaccagcagtgacagtgcgatgggaaagccccaagtgtctgagcaggacagtctcaataataatgaaagctgcacattgagctgcgaggtggctgcaggtgagaacttgcaaaacaccctttgtgaagcctccagagatgaacaggccttcttgggaaaggacaaaaaaattcctggaaaaagaagtccaagaagcaaaaaagggactgctaagaagataccaccaggacttttttcaggagatattgcacctttaatgcaagaaaaagtactaagcgcagtcacatatgctgttgatgatgaagaagctgctgaagtaaatgctaatgagcagccagaggcgccaaagcttgttctgcagtctctgttttcacttatacgaggtgaagttgagcagttggattcaagagcacttcccctttgccttcatcagatagcagaatcctatttccaggaggaggactatgagaaagcaatgaaattcattcagctagaacgattgtatcatgagcaattgctcgcaaatctttctgccattcaagaacagtgggaaacaaaatggaaaactgtgcaaccacatacagttacggctctaaggaattcagaaaagggatttaatggtgaagattttgaacggcttacgaaaatttgtgcaacacatcaagatcctcttttatccaaacataagatagcagctgtggagaagtcccaggaaaggaaatgctccacgcagttactagtgtctgaagatccaaaggaaggaggagctaccaccaaagagtcagagagtaaaacttgtctcggcacagagtcaagtaaagaaagccaacatacagtggagcccctggggagcagtccctgctgtcatcagatggacgtgcaaacagattccccaagcctttcggtaactgcaggaaaggaccacatggaggagctgctctgcagcgctgaagccacgttagcgctccacacccagtcctccgagacagcagggagcccgtctgggccagactcttctgaggatgcttgtgaggatgacagtcgcttgcagctggctcaaacagaggcctgccaggatgtggccagaatagagggcattgctgaagaccctaaggtgtttctttccagcaagtcaaagacagagccgttgatttcaccaggctgtgaccgtatacctcctgcattgatttctgagggtaaatattcacaggctcagaggaaagaactccgtttgccacttcgggatgcttctgaggcgttgcccacagaccaacttgagaacaatgaattaaatgagctgcagcagcctgatcttacagacagtgatggaaaatcaccacaggcgcaggctgactcagacggttctgagaatgtgctctgtggaaataatcaaatatctgacttaggcatactgcttccagaggtgtgtatggccccagaggaaaagggagataaagacgaccaactcaacaaagaaacagaagactatttgaacagccttttagaaggatgtttaaaagatactgaagattccctttcctatgaagataaccaagacgacgactccgatctccttcaagatctctctcctgaagaagcatcctatagtctccaggagaatctgccttctgatgagagctgtctttctcttgatgatcttgccaaaaggatagagattgcagaggttgttcctactgaaggattggtctccatattaaagaagaggaatgatactgtaggagatcatcctgcccaaatgcaacacaaaccatctaagcgaagagtgagattccaagaaatagacgatagcttggatcaagatgaagttggaggtggctcctgtattttgctggtcttgctgtgcatagcaacggttttcctcagtgttggaggaactgcattatactgcactttcggtgacatggagtcacctgtttgtactgactttgcagacaacatggacttctattacactaagttacttcagggagtggcagaactgaagcactggatctacctctcctagcagcattccagacacagacatgctggcagtgagagtgaaaggcgggagactttctaaacagtttttctttcaggaattctgtagcattcccccttccctctgttaggaaccaaggacatcagaaatagcaactttaagtggcaagccggaggaactctgttagaataatccacacagtgaggcaaatatcaatctaagcattgtggatggaaggaatggtctttggagagagcatatccatctcctcctcactgcctcctaatgtcatgaggtacactgagcagaattaaacagggtagtcttaaccacactatttttagctaccttgtcaagctaatggttaaagaacacttttggtttacacttgttgggtcatagaagttgctttccgccatcacgcaataagtttgtgtgtaatcagaaggagttaccttatggtttcagtgtcattctttagttaacttgggagctgtgtaatttaggctttgcgtattatttcacttctgttctccacttatgaagtgattgtgtgtttgcgtgtgtgtgcgtgcgcatgtgcttccggcagttaacataagcaaatacccaacatcacaaagatgatctttcttcttttaacttgatgatgatgtgcaggcacaaatctttggagaaggcttaactgtggaatagatgaattctagaactcttgaccctgcaatgagaaactgtgacagatctgtgtcaattaacttgattagccagaaattaatcacaggcctagagaccaaagaaaaagctcccctgagtctcaggcaacagttttgtcacggatgcaaagcttcctgaaatcatgaatgctggactcagtttggcaaacgcttacacctattatgttctgagattctgagaaccagaatgcaaacttaagtaagatacagttcccactgtaggtgttttaatcctggtcttatatagaataaaccagtactttgctgagtgaaatcaccatatagaattcagtattaacagatcatgcattcagatgcttgaatgtgcattcttgttgtgggcttgatttagatcctattgcggggtcattacgcaaaaattcaatcataccttccatagacaaatgtctgatttttgtttaaatctgtccgttaggtggcctttccttatctgaggtgtagtggtctaacatttaggaagccttgctttgactttatcgggcagcattaaaaaaaaaacaacaaagaaaaaccaaacatgaattatagtttttaacaagtgatctttatttcctgtcttctgttaggatcatttgaaagaaaaagggagaacttactttctagttgttactggctggcacagtacctccctttgtgtttctgcttatttatttagattatgtgaatcttaaagggctttttatatcagttgaaagtgtgttactgcgcatgcatttggtgattccagtgctagatatttaattactgtgtatttagtgttttgattttctataatttcagttccgcgtgtttttacacttgttcattttaaattgatgtttcattttcacttataatactgtttgacttgtctctatcatgtcaccataaactgtaatattttcaagggttatagatcaaagatatttatttagaaatgtacaagataatgaaatttagattccttatacttaaggctgattttattagaagattattttaatgttctattataaattttaagaatttgtattcaaattgtatgtaaaatatgtaaaatgttgacggtactatattaagtggttctataaaagctattcacaagttctactgtgatggacatcctcatcatagacaaacctcctctgttttatcctcaatttctagttacagaaatttggtgatgcttatttttgccaattttatgtcaaaataagttaaaacttccctcctgttcacctcttgggtctctatcctgtgtaacctctggtgtagtatttgcccataggcaaccagagccacttcctctgaacccaacatctcctggggaccttcgcagcaagaggaaagcactgagacaatagcttgctaagcaggggcccagtggtgtctcagagaaaccatgggtgtcctcgccacttcccagggagggtgaggtgagctcgggaacataacgatgttttgacttacaataggcatgaaatcgcaactagaaaaattagggcagtttttaaaaatgtcatagttatctattgcatgaactggagtaattccacctggtggtgaaaggattgttatttcacacatgaaaaattcatccagttttactaaaatgtaattttttctgtcatttgaaagtactgacaactatttgtaactaatcttccttaagaactgtatttgagggtatcaaatcaagcttgtaatttaaaatctgtaccaacaaagtgtctcagagagtttatttgaaccattgggtgctgagaaaaaactgctttaaagtgaaactttgatttcagaagttgatctggccctacaagtagacagtcatctactttgggaagactaataggtccttaggtaacggctcttctgctttaaaatacctcccccatctgctgacagtagctgaagattattctaaacattcattcttttagatttaaaaataaaaatcttctggagga

SEQ ID NO: 44468 - DNA, 2334 bp, Homo Sapiens
atggaggagcctggtgctacccctcagccctacctggggctggtcctggaggagctaggcagagttgtggcagcactacctgagagtatgagaccagatgagaatccttatggttttccatcggaactggtggtatgtgcagctgttattggattttttgttgttctcctttttttgtggagaagttttagatcggttaggagtcggctttatgtgggaagagagcaaaaacttggtgcaacgctttctggactaattgaagaaaaatgtaaactacttgaaaagtttagccttattcaaaaagagtatgaaggctatgaagtagagtcatctttagaggatgccagctttgagaaggcggcagcagaagaagcacgaagtttggaggcaacctgtgaaaagctgagcaggtccaattctgaacttgaggatgaaatcctctgtctagaaaaagacttaaaagaagagaaatctaaacattctcaacaagatgaattgatggcggatatttcaaaaagtatacagtctctagaagatgagtcaaaatccctcaaatcacaaatagctgaagccaaaatcatctgcaagacatttaaaatgagtgaagaacgacgggctatagcaataaaagatgctttgaatgaaaattctcaacttcagacaagccataaacagctttttcagcaagaagctgaagtatggaaaggacaagtgagtgaacttaataaacagaaaataacatttgaagactccaaagtacacgcagaacaagttctgaatgataaagaaaatcacatcaagaccctgactggacacttgccaatgatgaaagatcaggctgctgtgcttgaagaagacacaacggatgatgataacctggaattaaaagtgaacagtcaatgggaaaatggtgctaacttagatgatcctccgaaaggagctttgaagaaactgattcatgctgctaagttaaatgtttctttaaaaagcttagaaggagaaagaaaccacattattattcagttatctgaagtggacaaaacaaaggaagagcttacagagcatattaaaaatcttcagactcaacaagcatctttgcaatcagaaaacatatattttgaaagtgagaatcagaagcttcaacagaaacttaaaataatgactgaattctatcaagaaaatgaaatgaaactctacaggaaattaacagtggaggaaaattaccgaatagaggaagaagagaagctttctagagtggaagaaaagatcagccatgccactgaagagctggagacctatagaaagctagccaaagatcttgaagaagaattggagagaactgttcatttttatcaaaagcaggttatttcctacgagaaaagaggacatgataattggttggcagctcggactgctgaaagaaacctcagtgatttaaggaaagaaaatgctcacaacaaacaaaaattaactgaaagagagttgaaatttgaacttttagaaaaagatcctaatgcactcgatgtttcaaatacagcatttggcagagagcattccccatgtagtccctcaccattgggtcggccttcatctgaaacgagagcttttccctctcctcaaactttgttggaggatccactcagactctcacctgtgcttccagggggaggaggaagaggcccaagcagcccagggaatcccctggaccatcagattaccaatgaaagaggagaaccaagctatgacaggttaatcgatcctcacagggctccttctgacactgggtccctgtcatctccggtggaacaggaccgtaggatgatgtttcctccaccagggcaatcatatcctgattcaactcttcctccacaaagggaagacagattttattctaattctgaaagactgtctggaccagcagaacccagaagttttaaaatgacttctttggataaaatggataggtcaatgccttcagaaatggaatccagtagaaatgatgccaaagatgatcttggtaatttaaatgtgcctgattcatctctccctgctgaaaatgaagcaactggccctggccttattcctccacctcttgctccaatcagcggtccattgtttccagtggatacaaggggcccattcatgagaagaggacctcctttccccccacctcctccaggaaccatgtttggagcttctcgaggttattttccaccaagggatttcccaggtccaccacatgctccatttgcaatgagaaacatctatccaccgaggggtttacctccttaccttcatccgagacctggattttaccccaaccccacattctga

SEQ ID NO: 44469 - DNA, 5697 bp, Homo Sapiens
atgtcggataccaaggtaaaagttgccgtccgggtccggcccatgaaccgacgagaactggaactgaacaccaagtgcgtggtggagatggaagggaatcaaacggtcctgcaccctcctccttctaacaccaaacagggagaaagtttaatattttgttctttcattcaggtatttgcctttgattattgcttttggtccatggatgaatctaacactacaaaatacgctggtcaagaagtggttttcaagtgccttggggaaggaattcttgaaaaagcctttcaggggtataatgcgtgtatttttgcatatggacagacaggttcgggaaaatccttttccatgatgggccatgctgagcagctgggccttattccaaggctctgctgtgctttatttaaaaggatctctttggagcaaaatgagtcacagacctttaaagttgaagtgtcctatatggaaatttataatgagaaagttcgggatcttttagaccccaaagggagtagacagtctcttaaagttcgagaacataaagttttgggaccatatgtagatggtttatctcaactagctgtcactagttttgaggatattgagtcattgatgtctgagggaaataagtctcgaacggtagctgctaccaacatgaacgaagaaagcagccgctcccatgctgtgttcaacatcataatcacacagacactttatgacctgcagtctgggaattccggggagaaagtcagtaaggtcagcttggtagacctggcgggtagcgaaagagtatctaaaacaggagctgcaggagagcgactgaaagaaggcagcaacattaacaaatcgcttacaaccttggggttggttatatcatcactggctgaccaggcagctggcaagggtaaaagcaaatttgtgccttatcgagattcagtcctcacttggctgcttaaggacaacttggggggcaacagccaaacctctatgatagccacaatcagcccagccgcagacaactatgaagagaccctctccacattaagatatgcagaccgagccaaaaggattgtgaaccatgctgttgtgaatgaggaccccaacgcaaaagtgatccgagaactgcgggaggaagtcgagaaactgagagagcagctctctcaggcagaggccatgaaggcccctgaactgaaggagaagctcgaagagtctgaaaagctgataaaagaactaacagtgacttgggaagagaagctgagaaaaacagaagagatagcacaggaaagacaacgacaacttgaaagcatggggatttccctggagatgtccggtatcaaggtgggggatgacaaatgctacttagtcaatctgaatgcagaccctgctcttaacgaacttctggtttattatttaaaggatcacaccagggtgggtgcagatacctctcaagatatccagctttttggcataggaattcagcctcagcactgtgagattgacattgcatctgatggagacgtcactctcactccaaaagaaaatgcaaggtcctgtgtgaacggcacccttgtgtgcagtaccacccagctgtggcatggtgaccgaatcctatggggaaataatcacttttttagaataaacttacctaagaggaaacgtcgagattggttgaaagactttgaaaaagaaacgggcccgccagagcatgacctggatgcagccagtgaggcttcctctgaaccagactataactatgaatttgcacagatggaagttatcatgaaaaccctgaatagtaatgacccagttcaaaatgtggttcaggtcctggagaaacaatacctagaagaaaagagaagtgccctagaggagcagcggctcatgtatgagcgggaactggagcaactccgccagcagctctcccccgacaggcagccacagagtagcggccctgaccgcctggcctacagcagccagacagcgcagcagaaggtgacccagtgggcagaagagagggatgaactcttccgacaaagcctggcaaaactgcgagagcagctggttaaagctaataccttggtgagggaagcaaacttcctggctgaggaaatgagcaaactcaccgattaccaagtgactcttcagatccctgctgcaaacctcagtgccaataggaagagaggtgcaatagtgagtgaaccagctatccaagtgaggaggaaaggaaagagcacccaagtgtggaccattgagaagctggagaataaattaattgacatgagagacctttaccaagaatggaaggaaaaagttcctgaggcaaagagactctacggaaaacgaggtgaccctttctatgaagcccaagaaaatcacaacctcatcggggtggcgaatgtattcttggaatgcctcttctgtgatgtgaaacttcagtatgcagtccctatcatcagccagcagggggaggttgcagggcgtctccacgtggaagtgatgcgtgttacaggagctgttccagagcgtgtggtggaggatgactcttcggagaattccagtgaaagtgggagccttgaagtcgtagacagcagcggggaaatcattcaccgagtcaaaaagctgacatgtcgggtaaaaattaaagaagcaacggggctgcccttaaacctctcaaattttgtcttctgtcaatacacattctgggaccagtgtgagtctacggtggctgccccggtggtggaccccgaggtgccttcaccacagtccaaggatgcccagtacacagtgaccttctcccactgtaaggactatgtggtgaatgtaacagaagaatttctggagttcatttcagatggagcactggccattgaagtatggggccaccggtgtgctggaaatggcagctccatctgggaggtcgattctcttcatgctaagacaagaacactgcatgacaggtggaatgaagtaacgcgaagaatagaaatgtggatctccatattagaattgaatgagttaggagagtatgctgcagtggaacttcatcaggcaaaagatgtcaacacaggaggcatctttcaacttagacagggtcattcccgtagagtacaagtcacggtgaaacctgtgcagcattcagggacactgccacttatggttgaagccatcctgtcagtatccatcggctgtgtaactgccaggtccaccaaactccaaagagggctggacagttaccaggaagaagacttaaactgcgtaagggagaggtggtcagatgcactcattaaacgacgagaatacctggatgaacagataaaaaaagtcagcaataaaacagagaaaacagaggacgatgtggagcgggaagcccagcttgtggagcagtgggtagggctgactgaggaaaggaatgctgtgctggtgccagccccaggcagtgggattcctggggcacctgccgactggatcccacctcctggaatggaaacccacataccagttctcttcctcgatttgaatgcggatgacctcagtgccaatgagcagcttgttggcccccatgcatccggcgtgaactccatcctgcccaaggagcatggcagccagtttttctacctgcccatcataaagcacagtgatgatgaggtttcagccacagcctcttgggattcctcggtgcatgattctgttcacttgaatagggtcacaccacagaatgaaaggatttacctaattgtgaaaaccacagttcaactcagccaccctgctgctatggagttagtattacgaaaacgaattgcagccaatatttacaacaaacagagtttcacgcagagtttgaagaggagaatatccctgaaaaatatattttattcctgtggtgtaacctatgaaatagtatccaatataccaaaggcaactgaggagatagaggaccgggaaacgctggctctcctggcagcaaggagtgaaaacgaaggcacatcagatggggagacgtacattgagaagtacactcgaggcgtgctgcaggtggaaaacattctgagtcttgaacggctccggcaggcaatcaaagaagcactttccaccaaagcccggcacattcggaggagcctcagtacaccaaatgttcataatgtctcttccagccgaccggacctttctggctttgatgaagatgacaagggttggccagagaaccagttggacatgtctgactatagctccagttaccaagatgtagcatgttatggaactttacccagggattctcctcgaaggaataaagaaggttgtacatcagagactcctcatgccttaaccgtcagcccttttaaagcattctctcctcagccaccaaagtttttcaagcccctaatgcctgtaaaagaggagcataagaaaaggatagccctggaagcaaggcctcttctaagccaggaggactctgaggaggaagaaaatgagctggaagctattaacaggaagctaataagttcacagccttatgtacctgtggagtttgctgacttcagtgtttacaatgccagcttggagaacagggaatggttttcctctaaagtagatctgtcaaactcacgggtcttggagaaagaagtgtcccgtagccctaccaccagcagtattaccagtggctacttttcccacagtgcctccaatgccaccctgtctgacatggtggtcccttctagtgacagctcagaccagctggccattcagacgaaggatgcagactccaccgagcactccacaccatcgcttgtgcatgatttcaggccgtcctcaaacaaagagttgacagaagtcgaaaaaggcttggtaaaggacaagataattgtggtgccactcaaggaaaacagtgccttagccaaagggagcccatcatcccagagcatccctgagaaaaactccaaatcactgtgcaggactggctcatgttcagaactagatgcctgccccagcaaaattagccagccagccaggggattctgccccagggaggtgacggtagaacacaccaccaacatccttgaagaccattctttcacagaatttatgggagtgtcagagggaaaagattttgatggtttgacagattcttctgctggagagctttccagtaggaggagtctaccaaataaaacaggcggcaagactgtctccgatgggctccaccaccccagccagctgcattccaagttagagaatgaccaggtaataattccagaggcagccttttgggttctgtgctgtcaatgagtatgtctaactgtatgtcaaccccagaggcccttcaccgcaacaacttggtaggaaagattcatccagttgtttgtgacagcaaagatgagcccacagagaagcaggctcacttcctgcacagctgtctctgtcggagagcaagtctgttttgggaactagaacgcaattgtgaaattataagaccagtggatttttttacctggcacatgggttggtgttgaatgaagtgttcagatggataaggatcaatctcatattcattccctgggatgtttagttaccagttttcccaaagtgttctggtagcatctaccatatttcatcaaatctgtgattcctttgattattatatgaaccattattttatgtatcattaagaaaaaatactgccaattaaactctgtcatatcaaca

SEQ ID NO: 44470 - DNA, 810 bp, Homo Sapiens
acttttaaaaataacaccacactatctctatttagacttttcaacagtttcccactgcacaagggatacattaccacaaggttacaccaacttgcccttgcaaatctcatctttatgttcaactgtgctgatcttcattttcctcctcagatgcgcaaatgctttcccatcccagggacttcatgtttgttctgccccaaaactaaaacactcttccctgttcttcatctggctaaccaatatttgtgctttctgtgtcagcataaacactgttttcctcagacaagatttcctgactcccagcctcaggccacttcaaggtgtgtgctctccataaagtttacttcttctatatacatcaattcacataattatactttaatacttacttgtataattgttcgtgtgcccccagttggctgtaagtcctataaagacagaggccacatccatcttgcacatccctctgttcctagcacctgccatgggtcctatcagctgacaagcactcaatatattgtagtaaatgattctaatttccaacatcctagacttgtttacagtcccacggagcctgctcaggtagagcacatgcaatgcttcctatgcatgtgtttgcagagagaagagagagaagcccttctgcttctcccacgtgttaccattttgaccagactcagtgctgaaactgatgaaagggatggagacagtgagcctgtgaatgccgtgtgcagaacagcacttgcctttgtcccccatgaaagtaatgtgatgctcggtatccacaatcttttaatctggctgctgtag

SEQ ID NO: 44471 - DNA, 667 bp, Homo Sapiens
tgcctatttggcaagatagaattcacctttcaggacaattaaatgaaagtcagagcctgggccggctccggagaagttagaccctcggagctggtctcggactgctggggcgtcaccccttcagcaacccccgctgaccatggcagtatttcatgacgaggtggaaatcgaggacttccaatatgacgaggactcggagacatatttctgtccctgcccatgcggagataacttctccatcaccaaggaagagctggagaatggggaaggtgtggcaatgtgtccaggctgctctctcattataaaagtgatttatgacaaagatcagtttgcgtgtggagaaacagtgccagtgccttcagtcaacaaagaatgagttaaatgctaaggaagccttcaggaatccgaaccctgaacagctggaaatgagcccagatagaaacttcaaatgcaaagctcctggcttcgtggagacacagccatttgtgatttgctgttctgtaggcgtgttgtggattctttccatcaactgctgatttcatcttcaggaagcaagtccataacatgacgtatctggagtttgtgcttagaaccttaaattggaagcattcttaattatccatctaaatttaaaagacgataatttaaaaaaaaagaaggaaggaag

SEQ ID NO: 44472 - DNA, 1860 bp, Homo Sapiens
gaggcgccccgcccctcggcggctccaggtgcggctgtgggacctcggaccgcggcggggccggggccagggccggggccggggccggggcgccatggccgagtcccagctgaactgcctggacgaggcgcacgtgaacgagaaggtgaccgaggcgcaggccgccttctactactgcgagcggcggcgggccgcgctggaggcgctgctgggcggcggcgagcaggcctaccgcgagcggctcaaggaggagcagctgcgggacttcctctccagcccggagcgccaggccctgcgggccgcctggagcccctacgaggacgccgtccccgccgccaacgcccggggcaagagcaaggccaaggccaaggcccccgcgccggcgccggctgagtccggcgagtccctggcctactggcccgaccgttccgacaccgaggtgcctcctctggacctgggctggacggacactggtttctaccgcggcgtgagccgggtcacgctcttcacccacccgcccaaggacgagaaggcgccgcacctcaagcaggtggtcaggcagatgatccaacaggcccagaaggtcattgctgtggtcatggacctcttcactgatggtgatatctttcaagacattgtggatgctgcctgtaagcgccgggtcccagtgtacatcatcctggacgaggcaggagtgaagtatttcctggagatgtgtcaggacctgcagctcactgacttccggattcggaacatccgtgtccgctctgtgacaggcgtcggcttctacatgcccatggggaggatcaaggggaccctgtcatcaaggttcctgatggtggacggtgacaaagtggccactggatcttacaggttcacctggagttcctcccatgtggacagaaacctcctcctgctcctgacaggacagaacgtagagccctttgacacggagttccgggagctgtacgccatctccgaggaggtggacttgtaccggcagctgagcctggcgggcagggttggcctccattactcctccactgtggctcgaaagcttatcaaccccaagtacgccttggtgtcaggctgccgccacccgcctggggagatgatgcgctgggctgcccggcaacagcgggaggcgggcggcaacccggaggggcaggaggagggcgccagcggtggcgagtcggcctggcgcctggagagcttcctgaaagacctggttacggtggagcaggtgctgccccccgtggagcccatccccttgggagagctgagccagaaggatggcaggatggtctctcacatgcacagagacctgaagcccaaatcccgagaggcacccagccgaaacggcatgggagaagcggcccggggggaggccgcccccgccaggcgcttcagcagcaggctcttcagtcgccgagccaagaggcctgcggcgcccaatggcatggccagctctgtctccaccgagacctctgaagtggagtttctgacggggaagaggcccaacgagaattccagtgctgacatctcaggtaaaacaagtcccagttctgccaagcctagcaactgtgtgatttcctgagctgcgggatggtggtgggcaggacgtgtggatgcctgcctgccctgccctgtgctgtggagagcgcaggtcgcacactgcaccagtttgcacatcagacgccaactggccttctgccctgcagcctccgtcctggcctcagggacgctggatcccaaatgagagggtccgaagcatctcagtcacacgcctccaccggactgtcggtggctgggcaggggtcagtgccacggcctccttgtttacatgaagtggaagcttga

SEQ ID NO: 44473 - DNA, 3131 bp, Homo Sapiens
ccaaagctagtgccatacagcggaaaggcagggcagggcgatgtagacctggaatttgttttcgtctgttcagtagactccgattccagaatatgttggaatttcagactccggaacttttgagaatgccattacaggaactttgcttacataccaagctgttagccccagttaattgtcccattgctgattttcttatgaaagctcctgaacctccaccagctttaattgtaagaaatgctgtacaaatgcttaagacaatagatgcaatggatacatgggaagatctgactgaacttgggtatcatttggctgacttgccagtagaaccacatcttggtaaaatggtcttgtgtgctgttgttttaaagtgtctggaccccatccttacaattgcttgcacactagcttatcgagatccttttgtactacctactcaggcctctcaaaaacgtgcagctatgctttgtaggaaacgttttactgcaggagctttcagtgaccatatggcacttctcagagcattccaggcctggcaaaaagcacgaagtgatgggtgggagcgagccttttgtgaaaagaattttctttcacaggctactatggaaataatcataggcatgagaacacagttgcttggtcaacttagagcatcaggttttgttagagcacgaggtggtggtgacattcgggacgttaacacaaactctgagaattgggctgtcgttaaagctgcattggtggcaggcatgtatcctaatttagtccacgtggacagagagaatctagtgttgacagggccaaaggagaaaaaagtacgatttcatcctgcttcagttctcagtcagcctcaatataaaaagattcctccagccaatggtcaagctgcagcaattaaggcactgcccacagattggcttatttatgatgaaatgaccagagcccatagaatagctaatattagatgttgttcagcagtgacgcctgtcactatattggtattctgtggaccagctagattggcaagtaatgctcttcaggaaccttcatcctttagagtggatggcattcccaatgacagtagtgatagtgaaatggaggacaaaactacagctaatttggcagccttgaaacttgatgagtggctccatttcacactggagccagaggcagctagtttattgctgcagctcagacagaagtggcatagcttatttttacgccgaatgagagctccatctaaaccttggtctcaagttgatgaagctaccataagagcaattatagctgttttaagcactgaagaacagtctgcaggtttacaacaaccatctgggattggccaaaggccaaggcctatgtcttcagaagagcttcctttggcctcatcttggaggtcaaataatagtaggaaaagttcagcagatactgaattttctgatgagtgtactactgcagaaagagtactgatgaaatctccatctccagcattacacccacctcagaagtacaaagatagaggaattttacatcctaaacgaggtactgaggaccgatcagatcagtcttctctgaaatctacagacagcagtagttacccaagtccttgtgctagtccttctcctccatcctcaggaaagggctcaaaatctccttcgccaagaccaaacatgcctgttcgatacttcataatgaagagtagcaatttgagaaaccttgaaatttctcaacagaagggtatctggtctacaactcctagtaatgaacggaagctaaatcgagccttttgggaaagcagcatagtttacttggtattttctgttcaaggatctggacatttccagggattttctaggatgtcttctgagattggaagggaaaagagtcaggactggggctctgctggactaggaggagtatttaaggtggagtggatacgaaaagaaagccttccctttcaatttgcacaccatttactcaatccatggaatgacaacaagaaagtgcagataagcagggatgggcaggaactagaacctctggttggtgaacagttgctccagttatgggaacgtcttcccttgggagaaaaaaacacaactgattgacactcagaactcttagctgtggaagaacatcatgcctatttataaccactgaatgcactgactttcaaaaactgaggtggggtgtgtgttacgaatgggctttttaacacttttagagtgttgctttagaactaccatcttcatatacaggagaaaggaagcatttaaatttttatagtgattatagagaatgattatatgatgtttgtaatgaataaaatagtagtttcattatttggcacaatagcagtttattttaaacaaacaatttgaagttaaacatttcatttttaaaaacactgaattacagttcttattgatgactttttaatgcagagtaagttgtttaagaaaggcctgaatatatcagaacatctgagcaccattttagaagagtcaactcttaagattatcattagaaaacaaatacgtcaacacctatgaaaagaagcggggaaaacaacaacaaggacaacaacaaaaaaccagtgaaattctacaagtgtcccttttaaaaatagtgtgtgctaactaagggctattcattctgccatttttaacttgagacacatttaagaataaagttggatgttctttttctgtgattatgaaatgcaataaaatctgaataaagggcaaagtttcttcctgatcagattagattaagtgcttagttttattcctaattctgccccttttaacctgatgtgtaccttactctttcctccctctcttcctcccttcctcctctccccgctcctttcctgcatttctccctccctccttccctcgtcacatctcttatatgagcacagtaattatgacctttttgttttggctacaacttgattgaaacaagttcaaaatttaaacaagttcatacaagtttttaaaaattctcaactggtagcttgcttgctgtgcgtcttccaaactaaagcctgcaagcgccacaattctaagtgccgccttccattttttttcagtatgttttcactggcttatgttttcagatatgatttt

SEQ ID NO: 44474 - DNA, 2368 bp, Homo Sapiens
aacaggcaggaagaaagctttctgtactacaccagagggttggggctgtggatttagctactctcacctgaggctactgagcaagttgtcatgcaccatgagacaaagcccaagctgtcccaccaggcagtaagtatggagaggttcaggcacatggcatagctgctatttcgcacaattttcactacaccagtggtgacaaaatagaagaggttcatccatacacagaacctggtgaagagctggaggcagaaagaagtgtctatgtggagacgcaactgaaacaaaggtggcacagcaactgttccaatcccgtgtctttcctcatggcttcccaggagtttgaggttgaagctattgttgacaaaagacaggataaaaatgggaatacacagtatttggttcggtggaaaggttatgacaaacaggatgacacttgggaaccagagcagcacctcatgaactgtgaaaaatgtgtacatgattttaatagacgacagactgaaaaacagaaaaaactgacatggactacaaccagtagaattttttcaaacaatgccagaagaagaacttccagatctacaaaagcaaactattctaagaactctcctaaaacgccagtgactgataaacaccacaggtccaaaaaccgcaagttatttgctgccagcaagaacgttaggagaaaggcagcttcaattctctccgacacaaagaatatggagataataaattcaactattgagacccttgcacctgacagcccctttgaccacaaaactgtgagtggctttcagaaacttgagaaactggaccctattgcagcagatcagcaggacacggtggtcttcaaggtgacagaagggaaactcctccgggaccctttgtcacgtcctggtgcagaacagactggaatacagaacaagactcagatacacccactaatgtcgcagatgtctggctcagttactgcttctatggccacaggttcagctacccgaaagggtatagtggtattaatagacccattagcagccaatgggacaacagacatgcatacctcagttccaagagtgaaaggtgggcaaagaaatattactgatgacagcagagaccagccttttatcaagaagatgcacttcaccataaggctaacagaaagtgccagcacatacagagacattgtagtgaagaaagaggatggattcacccagatagtgctatcaactagatcgacagaaaaaaatgcactgaatacagaagtaattaaagaaatagttaatgctctgaatagcgctgctgcagatgacagcaagctcgtgctgttcagtgcagctggaagtgtcttttgctgcggtcttgattttgggtactttgtgaagcacttaaggaataacagaaacacagcaagccttgaaatggtggacaccatcaagaactttgtgaatacttttattcaatttaaaaagcctattgttgtatcagtcaatggccctgcgattggactaggtgcatccatcctgcctctttgtgatctcgtgtgggctaatgaaaaggcttggttccaaaccccttatacgacctttggacagagtccagatggctgttcttctattacattccccaaaatgatgggtaaagcatctgccaatgaaatgttaattgctgggcgaaagctgacagcaagggaggcatgcgccaaaggcctggtctctcaggtatttttgactggaactttcacccaagaggttatgattcaaattaaggagcttgcctcatacaatccaattgtactggaagaatgtaaggccctcgttcgctgtaatattaagttggagttggaacaggccaatgagagagagtgtgaggtgctgaggaagatctggagctcagcccaagggatagaatccatgttaaaaatacctctgttgggatataaagcagccttccctcccagaaagacacagaatgatcagagatggtgcccttgactttatagtggcacaaacgcttcagagacacacaattataagagacttatcttttagcataaatacttatggctcaaaatccactgacgatcattctcctaaactgaacacatgactagaattggtggtgagatatcgcttgattttcttttcctttataaatgtctagttcttacccagttaacaaaagaaaactttatcgctctaaagtaaaacttgttacaccacattagtgaattatggaatgattttggtggaaatatccaggttctaatgtgtggaatgtgcagatttaggttactttagtgtatgttctagttaataagttaaaattctggacacattattaaaggcagaaacttctttcaaagcaaaca

SEQ ID NO: 44475 - DNA, 459 bp, Homo Sapiens
attcctccaacgggcaggtctcagcgctcctccccctgctccgctcctctgcagggcccaggcgcccttggccttaggacccaacttctcttaccgccatggagttcgacctgggagcagccctggagcccacctcccagaagcccggtgtgggggcgggccacgggggagatcccaagctcagtccccacaaagttcagggccggtcggaggcaggggcaggtccgggtccaaagcaaggacaccacagctcttccgactccagcagcagctccagcgattcggacacggatgtgaagtcccacgctgctggctccaagcagcacgagagcatcccgggcaaggccaagaagcccaaagtgaagaagaaggagaagggcaagaaggagaagggcaagaagaaggaggctccccactgaagggccctggacagggctcattaaaccttcctctctgcct

SEQ ID NO: 44476 - DNA, 468 bp, Homo Sapiens
aggaggatccacctggagctgaggaactggaccccgtcagctgttcgagaacttgtcttggacaattgcaaatcaaatgatggaaaaattgagggcttaacagctgaatttgtgaacttagagttccttagtttaataaatgtaggcttgatctcagtttcaaatcttcccaagctgcctaaattgaaaaagcttgaactcagtgaaaatagaatctttggaggtctggacatgttagctgaaaagcttccaaatctcacacgtctaaacttaagtggaaataaactgaaagatatcagcaccttggaacctttgaaaaagttagaatgtctgaaaagcctggacctctttaactgtgaggttactaacatgaatgactacgagagtgtcttcaagctcctgccccagcttacctacatggatggctatgaccaagaggaccaggaggaacctgactcagatgctgag

SEQ ID NO: 44477 - DNA, 547 bp, Homo Sapiens
ggggcgttgggaacggttgtaggacgtggctctttattcgtgagttttccatttacctccgctgaacctagagcttcagacgccctatggcgtccgcctcgacccaaccggcggccttgagcgctgagcaagcaaaggtggtcctcgcggaggtgatccaggcgttctccgccccggagaatgcagtgcgcatggacgaggctcgggataacgcctgcaacgacatgggtaagatgctgcaattcgtgctgcccgtggccacgcagatccagcaggaggttatcaaagcctatggcttcagctgcgacggggaaggtgtccttaagtttgctcgcttggtcaagtcctacgaagcccaggatcctgagatcgccagcctgtcaggcaagctgaaggcgctgtttctgccgcccatgaccctgccaccccatgggcctgctgctggtggcagcgtggccgcctcctgagagttggccctcccttgtgccactgccaggggaggaaaggccttgatgttccagacaataataaatgcgcctgtgactta

SEQ ID NO: 44478 - DNA, 1647 bp, Homo Sapiens
gcgtgaggcgagcgccggggctcccggagcggatccctacctgtttcaaggacctgccagtctgagaagcttcttgtcataaggccatccaggggccacgcacccctaccttgccagcctccagcatgcaggataccgtaacgacatcagcattgttggaccccagccactcctcagtctccacccaggacaattcctccactggaggacacacttcaagcacaagcccacagctctcaaagccttcaatcacaccagtccctgcaaagtccaggaacccacatcccagggccaatatccgtcggatgcgccggatcattgctgaggatcctgagtggtcactggccatcgtgcccctcctcacagagctctgcattcagcacattatcaggaacttccagaaaaaccctatcctgaagcagatgctcccggaacaccagcagaaggtcctgaaccacctgtcccctgacctaccactggctgtgaccgccaacctgatagacagtgagaactactggctccgctgctgcatgcatcgctggcccgtgtgccacgtggcccaccatggcggcagctggaaacgcatgttcttcgagcggcacctggagaacctgctaaagcactttatcccaggcaccacagaccctgcggtgatcctcgacctgctgccgctctgccggaattacgtgcgcagggtccacgtcgatcagttccttccgccggtgcagctcccggcccagctccggccgggcgaccagtccgactcaggcagcgagggagagatggaggagcccaccgttgaccactaccaactgggcgatctggtagctggcctgagccacctggaggagctggacctggtgtacgatgtcaaggactgcggcatgaatttcgagtggaatctcttcctcttcacctaccgtgactgcctctccttggcagccgccatcaaggcatgccacaccctcaagatcttcaagctgacccgaagcaaggtggatgatgacaaggcacgcatcataattcgaagccttctggaccacccagtcctcgaggagctggacttgtcacaaaacctcattggagaccgtggtgcacgaggtgctgccaagctgctgagccacagccgcctgcgtgtgctcaacctggctaacaaccaggtgcgtgcacccggtgcccagtccctggctcacgctctggcacacaacaccaacctcatttccctcaacctacgtctcaactgcatcgaggatgagggtggccaggctcttgcccatgccttgcagaccaacaagtgcctcaccacgctgcacctcggtggcaatgagctgtctgagcccaccgccacactcctgtcacaggtgctcgccatcaacaccacactcaccagcatcaacctgtcctgcaaccacatcgggctggacggtgggaagcagctcctggaaggcatgtcagacaacaagaccctcctggaatttgacttgcgcctgtcagatgtggcccaggaaagcgagtacctcattggccaggccctctacgcaaaccgagaagcagcccgccagcgggccctgaatcccagccacttcatgtcaaccataactgccaatggccctgagaactctgtgggataaaatgacctgacttgga

SEQ ID NO: 44479 - DNA, 855 bp, Homo Sapiens
gtatcagccaccacgatgctgactctctgggccctggctgtcatgttggcggtcgaggaagcacttggccagctggagctcgcagataggccttccctaatacccactttgcctgtccgttttccacctggattgctccctggaagtctgtcagtctcaaaagtccctctaaccggaaaatacccagcgaggaccaaaggaggcaggtgtccacccgtcaccaagtacttcatatctgacagcaaactcgaagactatatgaatgccaccttgcccctgcagattgagaagattctgaagtgtgagaaggttaacttggctggtttgcttgggaccgtattatccacagtgagcgacttggacctgctgtctctattagacctcacttcaccccttgatatacttggaggtgccagcctcagtggtatcctaggtgagggaagtggcggcaagtcctcgaaacttccattgctctcagaactcactggtgctgtcagtggtctgctaccccaggggacggagggtctggtgagcctactacccactggttcagacaagaaccctgtaaaaggactcctcggtggcactggtctctccactctccagcggcctctgaaggatgtgaccgacaaagtccaagacctcaaagagtctgctcagggcgtgctgaacagcaccctgccctcaggcatcagcgatgcactcccagacctgctgaaaaatgctgacctggaacagctcttgctgggattacaggttgaaaaagtaactgtggagagcatgaagtcaaccacgacaggcgatgggatccatgtccaagccacgactacggccttcataggtggaaaagggtga

SEQ ID NO: 44480 - DNA, 1435 bp, Homo Sapiens
attccagtgaataatcagaagtcagtttgggagaagtcaaaatggacacaatcttcttgtggagtcttctattgctgttttttggaagtcaagcctcaagatgctcagctcaaaaaaataccgaatttgcagtggatctttatcaagaggtttccttatctcataaggacaacattatattttcaccccttggaataactttggttcttgagatggtacaactgggagccaaaggaaaagcacagcagcagataagacaaactttaaaacaacaggaaacctcagctggggaagaattttttgtactgaagtcatttttctctgccatctcagagaaaaaacaagaatttacatttaatcttgccaatgccctctaccttcaagaaggattcactgtgaaagaacagtatctccatggcaacaaggaattttttcagagtgctataaaactggtggattttcaagatgcaaaggcttgtgcagagatgataagtacctgggtagaaagaaaaacagatggaaaaattaaagacatgttttcaggggaagaatttggccctctgactcggcttgtcctggtgaatgctatttatttcaaaggagattggaaacagaaattcagaaaagaggacacacagctgataaattttactaagaaaaatggttcaactgtcaaaattccaatgatgaaggctcttctgagaacaaaatatggttatttttctgaatcttccctgaactaccaagttttagaattgtcttacaaaggtgatgaatttagcttaattatcatacttcctgcagaaggtatggatatagaagaagtggaaaaactaattactgctcaacaaatcctaaaatggctctctgagatgcaagaagaggaagtagaaataagcctccctagatttaaagtagaacaaaaagtagacttcaaagacgttttgtattctttgaacataaccgagatatttagtggtggctgcgacctttctggaataacagattcatctgaagtgtatgtttcccaagtgacgcaaaaagttttctttgagataaatgaagatggtagtgaagctgcaacatcaactggcatacacatccctgtgatcatgagtctggctcaaagccaatttatagcaaatcatccatttctgtttattatgaagcataatccaacagaatcaattctgtttatgggaagagtgacaaatcctgacacccaggagataaaaggaagagatttagattcactgtgaatgaaaagcacagcctcagaataaaagatgatttctcaaaaatagctgattggcaaaatatcgtcatcttgacaatatttgctctatatcttatgtcttttctgttttaaactgtgcctgtagtaatagatatctgtcttgatgaataagtaaaattaggtatgcatttgtttcca

SEQ ID NO: 44481 - DNA, 1859 bp, Homo Sapiens
cccaggggtccatgatgccgagctgcaatcgttcctgcagctgcagccgcggccccagcgtggaggatggcaagtggtatggggtccgctcctacctgcacctcttctatgaggactgtgcaggcactgctctcagcgacgaccctgagggacctccggtcctgtgcccccgccggccctggccctcactgtgttggaagatcagcctgtcctcggggaccctgcttctgctgctgggtgtggcggctctgaccactggctatgcagtgccccccaagctggagggcatcggtgagggtgagttcctggtgttggatcagcgggcagccgactacaaccaggccctgggcacctgtcgcctggcaggcacagcgctctgtgtggcagctggagttctgctcgccatctgcctcttctgggccatgataggctggctgagccaggacaccaaggcagagcccttggaccccgaagccgacagccacgtggaggtcttcggggatgagccagagcagcagttgtcacccattttccgcaatgccagtggccagtcatggttctcgccacccgccagcccctttgggcaatcttctgtgcagactatccagcccaagagggactcctgagctgcccacatggcctaagatgtgggtcctggatccttccccccttctcaccataaccccctctcagtgtttccccaacttctcccttttagcagggtccctttagagcccaactccaggtcaaatctggagctcaaatcccagtgctccctccccaggagtggggccccaactcttccaagataccagcattcctcaagtcctcccaaaacttcctacccacaccctcttcccaaggccctcaggggcagaaaacatctccttcaacccgtccccactccttcctctgcatgaccttgggcaaacccttgccctttcaagccatcagctcctgcctctctgccatgagggctttggatcagattcctcttctcgccaggatgaggacacgcactgccctccatagacacagatgaaggggtgggggtcattcagctcgaatgggtcccagatgctcacttggcctttccctgcaggatgagtgaagacgtttgcctctcacagtgtgtcttctacctgcattttggcatcagagccccccagcccacccaccacaggcaattactagccctagttgataggtgaggtgggtgaagaaggctggaggtgacatgtccgaggtcacacaacaaagcagcatgcaggaactagaaacacatcttcagcctcctcctgggccagctcttgtgctacaggtggggcggagccagcccctcaccttcctggttccctgagggtcctcagggtggaggacaggtttggcccagaaagactagccagaggcctgatggtcccaggtggctctggatatactttggatatggatttaaatggtctctaagagccgggggtagggggcaggaaaagtgggttgtctttgcccctcaaagtccacctacctagaaaccaagcccacggtcttggccgtgaccctgataataaatgggctctctcagaggcgccagcccctccctccccagccggaggcgtcatctctcttctgtaccactagagggagctctgatgcagctggagagcagcgctcaaggctctcgcccctcccctccctaacccttaccttcagtctccaccagcctgaagggcctcctaggggatcctcaggcggcccccaccagggcacaccctactgtccttgtgcctcacgccccctcctcatcctgcaccccttccatcccaccttccctttcaataaacagctgggatggatactga

SEQ ID NO: 44482 - DNA, 873 bp, Homo Sapiens
atgctcggacaacgtgccggcgacggggagcgcccgggcctcccgggcgacggcgaaggcggagtcccggcccggccagggaggcgcgcggagaggcccccccagcggccagccaaggtaaacaaggccgtgacgtgcgccgcgcacttaccgggagctgcggcctcgcggccgctgagcccgaacaagccagaccgggtcaggccgggccagagggaccggattggggcgaagcggcagcggaggcggcgggccgacgccggtcaagcccgcgctgcttcctccagaagagtcgtccccacagctccggaagtgcttggcgccgttgcgtcacttccggatcggggtcgacccacggtcgctcgggtcgcgacaggctcccggctagagggcctgtttagcgccgcctccttgaaacttagcgctctgacccagagtctgaccagggtacggcaggcgccgaccgcgtctggagccactattcgcctaccagcgtctcccgtcgagatgtttttaaccagcgcgtttctcaccggcttctcatttcactgtttgtactccgggatcgggcacggagaagacatcctggcgtcagtggagcagataaccattgtttctcggccgctatctggtcagaggggagctgggccgggaaattctgcctacaccccgaggcggtcgcagggtggccccagagccgcaaccacaccaggctttcgcttcccctgccgaggcctcgttcgccgcgcagttctccgacttacggtcaccgtgcaagattgcatcttaactgccttgcttgcagtttcttttcacagtataggagttgtcatcatgacttccagttaccttctgggaccggttgtcaaatga

SEQ ID NO: 44483 - DNA, 939 bp, Homo Sapiens
atgagctgtgtctttctatccatagctgttaaggttgctgagaccatgtttgaagatggtagcctcctcttcttcattccattgtttgttatctacatattcattgtcattgggaatcttattgtattttttgcagtcagggtggatacccgtctccacaaccccatgtataattttatcagcattttctcatttctggagatctggtacacaactgccacaattcccaagatgctctccatcctcatcagcaggcagaggaccatctccatggttggctgcctcttgcagatgtacttcttccattcactgggaaattcagaggggattttgttgaccaccatggccattgataggtacgttgccatctgtaaccctctccgctacccaaccatcatgacccccgggctctgtgttcagctctctgtggggtcctgcatctttggctttcttgtgttgctcccagagattgcatggatttccacactgcccttctgtggacccaaccaaatccaccagatcttctgtgattttgaacctgtgctgcgcttggcctgtacagacacgtccatgattctgattgaggatgtgatccatgctgtggccattgtattctctgtcctgattattgccctttcttatatcagaatcatcactgtaatcctgaggattccctctgttgaaggccgccagaaggccttttctacctgtgccgcccatcttagtgtctttctgatgttctatggcagtgtatccctcatgtacctgcgtttctctgccactttcccaccgattttggacacagctgttgcactgatgtttgcagttcttgctccctttttcaaccctatcatctatagctttagaaataaggacatgaagattgcaattaaaaagcttttctgccctcagaagatggttaatttatctgtagattaa

SEQ ID NO: 44484 - DNA, 1977 bp, Homo Sapiens
gagaagacagtgaaaagcgtgctgggtttctcagagcctacagtggtcacagcagcattgaactgcgggaagagcatggacaagaagaaggcagccgatcatctgaaaccttttcttgatgattctactccccgatttgtggacaaactggctgtagaggaaggcggaagctctaggcattccaagtctagcagtgacggaagcagaaaacgaaagctaaagaaggtgtttggtgatgacgagctctccaaggaatcatcaggagtaaagaagcagcaaataccccattttgagaaggtggaagaagagccagaggtgatccctgggcctccatcagagcctggcatgctgactaagctccacatcaaacagatgatggacgcagcaaaatggcaaatccaggagaggaaaaaacagctgtgcttcattagcccccctacacctcagccaaagactccttcttcctcccaaccagagcaacttccaattggccacactattcagccctcccagggtgccactttcatgaatgatgccattgagaaggcaaggaaaacagctgaactacaagctcgaatccaagccgggctggcactgaagccaggactcatcagcaatgccaacatggtgggcccgtctaatctccatgacatgggcattgcttccccaaagggggagttaaaagaccaaattaaacctacaccactgatcctagatgagcaagggtgcattgtagatgcaacaggcaaggagattgagctgacacactgcatgtctactcctgccaatattcgtgctgttcggagggaaccattcaagcaacagctaaaagaaaagccatcagaagacatggagtccaataccttttttgaccccgtctccactgtcgcttcccagcgccagaaacgcacttttaaattccatgacaagggcaaatttgagaagactgctcagcgattaaggacaaaggctcaactggagaagcttcaggcagagatttcacaagcagctcaaaaaacagacatccatactttgactaggcttgcccttattgctcctaggaaggagctaaaggaaggagatatccctgaaattgagtggtgggactcttacataatccccaatggctttaaccttagagaggaaaatcccaagagagaagattattttggaatcacaaatcttgttgaacatccagcccagctcaatgctccagttgacaatgacacaccagttactttgggagtgtatcttaccaagaaggaacagaaaaaacttcagagacagacaaggagggaagcacagaaggaactactagaaaaagtcaggctgggcctgatgcctcctccagaacccaaagtgagaatttctaatttgatgcgagtattaggaacagaagctgttcaagaccccacgaaggtagaagcccatgtcacagctcagatggcaaaaagacagaaattgcatgaagaggccaactctgccaactcacagcaaaacacagaaaggtcaagaaaatttaaaagcttagacatttcacagggggtacacgtatctgtatatggagttagaaatttgagcaccccagccaagaacaccccagccaagaagttcaagattgaggccaatgctgggcaactgtacctgataggagtggtgttactgcacaagggtgtcaacgtggtagtagtggaagggggccccaagacccagaagaaattgaagcatcttatgctgcatcggataaagtgggatgaacagacatctaacacaaagggagatgatcatgaggaacctgatgaggaagctgtgaagaaaaccaacaaatgtgtactattctgggagggtacagccaaagaccggagctttggagagatgaagtttaaacagtgtcctatagagaacatagctcatgagcatttcagaaagcatggggctgaacattactgggaccttgcgctgagtgaatctgtgtag

SEQ ID NO: 44485 - DNA, 1722 bp, Homo Sapiens
actcattctttgacacacatttttgatgtaacttctcacaccatagtaaatctgtgttttctcagcatttctcttctttcaggttgctggtgtggagcagtagatgaggggacgccttctgcagagagcgtttctgtggaagaactgtcacagggcaggactccaaaggcagatacatccactgataagagtcacccctgtgagatttgtaccccagtcctgagagacattttacaaatgattgagctccaagcctcaccctgtggacagaaattgtacttgggtggagcatcaagagatttctggatgagttcaaaccttcaccagctccagaagcttgataatggagagaagctctttaaagtggatggggaccaggcctcatttatgatgaactgcaggttccatgtgtcaggaaaacccttcacgtttggggaagtcgggagggacttttcagccacctcaggacttctccagcatcaggtgactcccaccattgagagaccacacagcaggattagacacttgagagttcccactggacgaaagcctctcaaatacactgaatccaggaaatcttttagagagaaatctgtattcattcaacaccaaagagctgactctggagaaaggccttacaagtgcagtgaatgtgggaaatcctttagtcaaagttctggctttcttcgacacaggaaagcacacggtagaacaaggactcatgaatgtagtgaatgtgggaaatcatttagtcgcaaaactcacctaactcaacaccaaagagttcacactggagaaaggccttatgactgcagtgaatgtggcaaatcctttcgccaggtatctgtcctcattcaacatcaacgagttcacactggagaaaggccttatgagtgcagtgaatgtgggaaatcttttagccacagcactaacctctatcgtcacaggagtgcccacactagcacaaggccttatgagtgcagtgaatgtggaaaatcctttagccatagcactaacctctttcgacactggagagttcacactggagtaaggccttatgagtgtagtgaatgtgggaaagcatttagttgcaatatctaccttattcaccaccaaagatttcacactggagaaagaccttatgtgtgcagtgaatgtgggaaatcatttggccagaaatctgtcctcattcaacaccaaagagttcacactggagaaaggccttatgagtgcagtgaatgtgggaaagtttttagccaaagctctggcctctttcgacacagaagagctcacactaaaacaaagccttatgagtgcagtgaatgtgaaaaatcatttagttgcaaaactgacctcattcgacaccagacagttcacactggagaaaggccttatgagtgcagtgtatgtgggaaatcttttatccgaaaaacccacctcattcgacaccagactgttcacactaatgaaaggccttatgagtgcgatgaatgtgggaaatcctatagccaaagctctgccctccttcagcataggagagttcacactggagaaaggccttatgagtgcagagaatgtgggaaatcttttacccgcaaaaatcacctcattcaacacaagacagttcacactggagaaaggccttatgaatgcagtgaatgtggaaaatcctttagccaaagctctggcctcttaagacacagaagagttcatgtgcagtga

SEQ ID NO: 44486 - DNA, 1599 bp, Homo Sapiens
cactgcttattaaagtacactattcaggcatatcatgtaggtttactttctgtgtttctagagaccaagaagcgggacgttcaccatgggaagaaaatcgctgtaccttctgattgtggggatcctcatagcatattatatttatacgcctctcccagataacgttgaggagccatggagaatgatgtggataaacgcacatctgaaaactatacaaaatttggctacatttgtggagctcctgggacttcaccattttatggattcctttaaggttgtcgggagctttgatgaagtcccaccaacctcagatgaaaatgtcactgtgactgagacaaaattcaacaacattcttgttcgggtatatgtgccaaagagaaagtctgaagcactaagaagggggttgttttacatccatggtggaggctggtgcgtgggaagtgctgctctaagtggttatgacttgctgtcaagatggacagcagacagacttgatgctgtcgtcgtatcaaccaactacagattagcacctaagtatcatttcccaattcaatttgaagatgtatataatgccttaaggtggttcttacgtaaaaaagttcttgcaaaatatggtgtgaaccctgagagaatcggtatttctggagatagtgcaggagggaatttagctgcagcagtgactcaacagctccttgatgacccagatgtcaagatcaaactcaagatccagtctttaatttatcctgcccttcagcctcttgatgtagatttaccgtcatatcaagaaaattcaaattttctatttctatccaaatcactcatggtcagattctggagtgaatattttaccactgatagatcacttgaaaaagccatgctttccagacaacatgtacctgtggaatcaagtcatctcttcaaatttgttaattggagttccctgctccctgagaggtttataaaaggacatgtttataacaatccaaattatggcagttctgagctggctaaaaaatatccagggttcctagatgtgagggcagcccctttgttggctgatgacaacaaattacgtggcttacccctgacctatgtcatcacctgtcaatatgatctcttaagagatgatggactcatgtatgtcacccgacttcgcaacactggggttcaggtgactcataaccatgttgaggatggattccatggagcattttcatttctgggacttaaaattagtcacagacttataaatcagtatattgagtggctaaaggaaaatctatagtaaaacatgtagctataacatattttaaaaataaaatctgaaaacctcagaaaatttgcattagaaattggtctttcttagaatggtctagttaagttccacatgtagcataattcttaaataggcacttttctgttttttttttcttactgtgggatttcatttcaattttctacattgtctatctgctttttctgagattttccttcttacactgttaatcttattttaaaaaatattacattcttgtatactttatttttgtgagttggctactatttacgatgcaagagaataaatgtgagcaaatattg

SEQ ID NO: 44487 - DNA, 1320 bp, Homo Sapiens
atgctaataaattgtgaagcaaaaggtatcaagatggtatctgaaataagtgtgccaccatcacgacctttccaactaagcttattaaataacggcttgacgatgcttcacacaaatgacttttctgggcttaccaatgctatttcaatacaccttggatttaacaatattgcagatattgagataggtgcatttaatggccttggcctcctgaaacaacttcatatcaatcacaattctttagaaattcttaaagaggatactttccatggactggaaaacctggaattcctgcaagcagataacaattttatcacagtgattgaaccaagtgcctttagcaagctcaacagactcaaagtgttaattttaaatgacaatgctattgagagtcttcctccaaacatcttccgatttgttcctttaacccatctagatcttcgtggaaatcaattacaaacattgccttatgttggttttctcgaacacattggccgaatattggatcttcagttggaggacaacaaatgggcctgcaattgtgacttattgcagttaaaaacttggttggagaacatgcctccacagtctataattggtgatgttgtctgcaacagccctccattttttaaaggaagtatactcagtagactaaagaaggaatctatttgccctactccaccagtgtatgaagaacatgaggatccttcaggatcattacatctggcagcaacatcttcaataaatgatagtcgcatgtcaactaagaccacgtccattctaaaactacccaccaaagcaccaggtttgataccttatattacaaagccatccactcaacttccaggaccttactgccctattccttgtaactgcaaagtcctatccccatcaggacttctaatacattgtcaggagcgcaacattgaaagcttatcagatctgagacctcctccgcaaaatcctagaaagctcattctagcgggaaatattattcacagtttaatgaagtctgatctagtggaatatttcactttggaaatgcttcacttgggaaacaatcgtattgaagttcttgaagaaggatcgtttatgaacctaacgagattacaaaaactctatctaaatggtaaccacctgaccaaattaagtaaaggcatgttccttggtctccataatcttgaatacttatatcttgaatacaatgccattaaggaaatactgccaggaacctttaatccaatgcctaaacttaaagtcctgtatttaaataactcctccaagttttaccaccacatattttttcaggggttcctctaa

SEQ ID NO: 44488 - DNA, 3185 bp, Homo Sapiens
ggagtctcgcgaggatcttgtgacttatcgcggcatcgcccagcggttgccgggaaacggcgtggcttccgggggcgggcgccctggtcccggagtcgccgctgggcctgtccgctggcgtcatggcaccgaaaaagaaagggaagaaaggcaaagccaaaggcaccccgattgtcgatgggctcgctccagaggacatgagcaaggagcaggtggaggagcatgtcagccgcatccgggaggagctggaccgcgagcgggaggaacgaaactacttccagctggagcgggacaagatccacaccttctgggagatcacacggaggcagctggaggagaagaaggctgagctgcggaacaaagaccgggagatggaagaagccgaggagaggcaccaggtggagatcaaggtgtacaagcagaaagtgaagcacctgctatatgagcaccagaacaacctgacagagatgaaggctgagggcactgtagtcatgaagctggcacagaaagagcaccgcatacaggagagtgtgctgcgcaaggacatgcgggcactgaaggtggagctcaaggagcaggagctggccagtgaggtggtggtgaagaacctgcggctgaaacacaccgaggagatcaccaggatgcggaatgattttgagaggcaagttcgagaaattgaggccaagtatgataagaagatgaagatgctgagggacgaactcgacttgcggagaaagactgagctccacgaagtggaggagaggaagaatggccagatccacacgctgatgcagcgccacgaggaggccttcaccgacattaagaactactacaacgacatcaccctcaacaacctggccctcatcaactccctcaaggagcagatggaggacatgcggaagaaggaggaccacctggagagggagatggcagaggtgtctgggcagaacaagcgcctggcagaccctctccagaaggctcgggaggagatgagcgagatgcagaaacagctcgcaaactacgagagggacaagcagatcctgctttgcacaaaagcccgtttgaaagtcagggagaaagagctgaaagacctgcagtgggagcatgaagtgttagagcagcgattcaccaaggtgcagcaggagcgggacgagctctatcggaagttcaccgcagccatccaggaggtgcagcagaagacagggttcaagaacctcgtgctagaacgcaagctgcaggctctgagcgccgctgtggagaagaaggaggtgcagttcaacgaggtcctggctgcctctaacctggaccctgcagccctgacgctggtgtcccgcaagctggaggatgttcttgagtcgaagaacagcaccatcaaggacctgcagtatgagctggcccaggtctgtaaggcccataacgacctgctgcgcacgtatgaggcaaagctgctggccttcgggatccctctggacaacgtgggcttcaagcccttggaaacagctgtgatcggacagacactgggccagggccccgcgggactggtgggcaccccgacgtagctgcccccctggggggccacagcccagagaaccagcctaggaacactcgggatgacaccccttatcacaccaaggacagcaagttttttagattttatcatcagcaaatgaaagcttttcacatgttcttgccatcctctttcctggctctgtggaggagaaccacctgcaggaccctcacccatggtgtccctgtcgctcccttccctgggtgccgcacgtccagcctgtgtccaggcctactccctggtctcacctccgaccacagtcggcggcaccttctcagagtgccccgcactcacctgggggttggggcagtgccgcgctgtgctgcctgtcttcgcgccactgttgtcccaccgaatggacagctttgcaggtgctggcactaacttcattgacacctgagtcacagctgcccagtgggattctccagggggccgggacttccctaggaagtggtgagccaatgctccctgatgagcacaaagcccgctctgttgagggctgggtgggtgcagccagcgtgcgggaacgggcaggcagcctcccgctgccagtcttcgctctaactccctcggtaggtgatgtaggaccaggggcacgtggaacttctgggccttgctggtgatggttaaaacaacctgagatggagaggccaggagagagtataaggggatagcagcaaaccacctatctggccccaacacacctgagagaattcagcagcccagactgagggtctgggatggggtgaaccttccgcaccagagggacactccacagaagccacagcccagtaagtcaggcgcttctgcggcggctccagtgtggggtgaggcagtgaggttaggcccagagagctggagttggctcagatgaaaacctctgtcaacaaagaggggatgaatcacccttggcccagcctccccacaaagcctgaccctgggcaggtgagtgacgggtgtgtcctcgtagagtctattgctgcctggacacctttcttttgggagctcaaagcaagtgagctcacctacctgccaccgcccaggaccagtctgcccactgcctaaatgatgcccggccagcaggacctggcctgcagatcccagtgagtcatgagcctcagccccctccagcccactggggctctcacctccacatgtgggtagaagctttcctgccccctcttcctccagtagccctcagtgtcgaaggtgagcttgtaggtgcctgccttcatctggtccaggacagtgaccatctgggtctgtgtagctggggagaggatgaggctgcagagatggggaccagaagccccccaccccagctttcctgggtctgcatcccagtgggcctcagacactgccctgccacctgtcagacttgggtgagcagacacagtgaggctgttaggtcctgcagttccagagcagtctagggacaccactgccctgtctttaggaaatcacaacacagagaagcaaaaagggaaaaagtctcccacaatttatcccatgagcaagaaccactttatagctggcatatatttttccagattttctctatgcataagtatatttgtttaaaaacttataaagtggattatactatttgtattgtttt

SEQ ID NO: 44489 - DNA, 84 bp, Homo Sapiens
atgagtgcaatgaccacccataaagccatacagaccagcaagaagaataagcaaaactataccaaacccacaacctcggtctag

SEQ ID NO: 44490 - DNA, 390 bp, Homo Sapiens
atgaagttgtcagcggcgccccgagtgtggcagagcctgatattcaaatcgccctgcccgctccgcctgctcccgcccgctggtcccgggagccccaggctgcgcgcgcccgcaccgcatcgccgctttgccccgcgaccgcgcgcgcctcctcgtcctcccccgcgcctttgtttccgtctccttctcctttccctcctcttttgtgtcgggccagactcagccccagaaaccagccaccctgccgcgtccgactgccagggatccctcacgccgcgaggtggagtctcgctctgtcgcccaggctggagtacagtggtgcgatcttggctccctgcaacttctgcctcccaggttcaagcgattttcctgcctcagcttcctgagtag

SEQ ID NO: 44491 - DNA, 387 bp, Homo Sapiens
atgtataagtcttggactttgggagacccaaaagagaaggaaggtgttggcaatatccttgaagagactaaaagaactcagaacaacactgaacaagccagcagagccatcaactcacccctacagtctccatacacagactccatgaaagcattggccatcagctctcactggtttctgccccaaattcacacactccctcctatcaccaaagccacccgccaccgctggcctcctgcatgctgtgggaggagaggagggcagacaacgttgcctcccctgactcccatcgcgcgggcttgtgagtccatggagcgcagttgtccagggaactatccgatgcagcatgagaggaaggtgatgcagcggcatcccaccttgagatga

SEQ ID NO: 44492 - DNA, 276 bp, Homo Sapiens
gtggggggcgccaaggaagagcccaagaggagatcagcacggttgtcagctaaacctcctgcaaaagtggaagcaaagccgaaaaaggcagcagcgaaggataaatcttcagacaaaaaagtgcaaacaaaagggaaaaggggagcaaagggaaaacagactgaagtggctaaccaagaaactaaagaagatttacctgcagaaaatggggaaacgaaaactgaggagagtccagcctctgatgaagcaggagagaaagaagccaagtctgattaa

SEQ ID NO: 44493 - DNA, 2112 bp, Homo Sapiens
agggtcacaagggagatgtccgcccccagtcgtagcctcggacggtttctgagcgttggtgtttggcacgcgccaccctctcttgctttggttccgccatgccgatgtaccaggtaaaaccttatcacgggcgcggcgcgcctctccgtgtggagcttcccacctgcatgtaccggctctctaacgtgcaaggcaggagcggcggcccagcgcccggcgttggccacctacaggtctttggtagatgagtggctggatagctacaagcaagaccaggatgcaggatttctggagcttgttaactttttcatctgatcttgtggatgtaaaggactcgggggactatcctctgacagctccaggtctatcctggaagaagttccagggcagcttctgtgagtttgtggggacattggtctgtcggtgccagtacatcctcctccatgatgacttccctatggacaacctcatctccctgctcactggcttctcagactcacaagtctgcgccttctgtcacactagcaccctggctgctatgaaactgatgacctccctggtaagagttgccctccaactgagtctgcacgaagatatcaatcagcgtcagtatgaggctgaaagaaacaaggggccagggcagagggcacctgagcggctggagagcctgttggagaaacacaaagagctgcattaatactacattgtcaaagacaaagacgaacatgagacatgcgatatgagttttaaaaggagagaagagcaaaaaaacaatacagctatccaaggagcaagtgctgagcttgtgaaaaaacagcttctattttattaaataatagtgttcctgcagggatgtctgaagtactctgcaaggctaattaggacagatcaatgtacacttacctctccagaaggctgaaaggtgtgtagtgactatgtgtcattaaaaatttacttgaccatgggcaacagatgtccatgaaagaatgaccctggtgagtgctctaagttttcattttactcatgtcatcctcaatgcatcataaatgccatagacaccattactatcacgtaggctcatagcagctgatgtgctgtatatgcttgagagggtggtatcaattaactatattatctataaagccatacttgcaattactaccacttcacaatttatcattaacgcatttggcagatttttttttctccaaagtaacatttatttaaaggtttatcaaaattcttagaacagcatttattataatgtgatttttgataattgactaaatcagtggctcttaaaaacaccctcatctcagtcccgctcagtatacaccacagtgccatttggggaaaagaaatacatattagaaatgttcatttcagacctcgtcatggaagatcatatattaatgtaatcaggtggtacgtttacatgctcattagtaatccatcattagtccaaatgctcactattaggaataaatgtacaacgagttattcagaatacccagaaagagtatttcttatttaaacattcaggacaagctgactgaaataagtgcacaccttgaatttgaactttcaaggcacatcactaaagtcaatcagttatgtcaggacactcttctataataatctcaattataaaattcctgcctctccctaacacaggagttggagggagttccaatatctgaatctttctaattcactgtaactgcaaaaaaatcttgatgaagtgtgtatttaaatttcatgccttaatacatagcatgccactaaaaccacattagttatgctttatgctgcttaatcatacgtcaaaatctgtaaaatctgctcttgcatgctaaggtaatttaactgcaattaatcaattaagaaaaataaaatgtaataaatgccaaataatgtaacttcttttaaacagaccactatctacacatttattccccaaatacttattagctgacaccatataaggaaaacataataaaaagtagacttcactgagcctttctcccattagtagcttgctctaaacttacaaatgttttagagaattctttggcatgatctgactttccaactaaaatgtgagcaacttga

SEQ ID NO: 44494 - DNA, 120 bp, Homo Sapiens
ttgcatcaggaaatgcccatgaccttcatcgcagcagcgtatgtgcgttggtcttctccagggatgccgaaagtagacatacagggagtcgcagtacggataccaccagtgccagcctga

SEQ ID NO: 44495 - DNA, 475 bp, Homo Sapiens
ggcggatcgggtattgagtccatggagcgagctgagagctagagaacctgctaaggccatcaaacctatcgatcggaagtcagtccatcagatttgctctgggccggtggtactgagtctaagcactgcggtgaaggagttagtagaaaacagtctggatgctggtgccaccaatattgatctaaagcttaaggactatggagtggatctcattgaagtttcagacaatggatgtggggtagaagaagaaaactttgaaggcttaacgatgtcaccatttctacctgccacgcatcggcgaaggttgggactcgactggtgtttgatcacgatgggaaaatcatccagaaaaccccctacccccaccccagaccacagtcagcgtgaagcagttattacactacctgtgcaccataaggaatttcaaaggaatattaagaagacgtgcctgtttccccttcgccttctgccgtga

SEQ ID NO: 44496 - DNA, 2619 bp, Homo Sapiens
ttacatttacagtgtagcaaaagagaaagtaactatgttgctgctggagatcaatgaagccgagtgaatgggggctgaatgtgcgagtccatagctgaagaggagcgccagatggtggaggaatacacttatttatgaaactgtcttgagttcttcttgaattgccagttttcagcctcctcatgcctccgtctcctttagacgacagggtagtagtggcactatctaggcccgtccgacctcaggatctcaacctttgtttagactctagttaccttggctctgccaacccaggcagtaacagccaccctcctgtcatcgccaccaccgttgtgtccctcaaggctgcgaatctgacgtatatgccctcatccagcggctctgcccgctcgctgaattgtggatgcagcagtgccagctgctgcactgtggcaacctacgacaaggacaatcaggcccaaacccaagccattgccgctggcaccaccaccactgccatcggaacctctaccacctgccctgctaaccagatggtcaacaataatgagaatacaggctctctaagtccatcaagtggggtgggcagccctgtgtcagggacccccaagcagctagccagcatcaaaataatctaccccaatgacttggcaaagaagatgaccaaatgcagcaagagtcacctgccgagtcagggccctgtcatcattgactgcaggcccttcatggagtacaacaagagtcacatccaaggagctgtccacattaactgtgccgataagatcagccggcggagactgcagcagggcaagatcactgtcctagacttgatttcctgtagggaaggcaaggactctttcaagaggatcttttccaaagaaattatagtttatgatgagaataccaatgaaccaagccgagtgatgccctcccagccacttcacatagtcctcgagtccctgaagagagaaggcaaagaacctctggtgttgaaaggtggacttagtagttttaagcagaaccatgaaaacctctgtgacaactccctccagctccaagagtgccgggaggtggggggcggcgcatccgcggcctcgagcttgctacctcagcccatccccaccacccctgacatcgagaacgctgagctcacccccatcttgcccttcctgttccttggcaatgagcaggatgctcaggacctggacaccatgcagcggctgaacatcggctacgtcatcaacgtcaccactcatcttcccctctaccactatgagaaaggcctgttcaactacaagcggctgccagccactgacagcaacaagcagaacctgcggcagtactttgaagaggcttttgagttcattgaggaagctcaccagtgtgggaaggggcttctcatccactgccaggctggggtgtcccgctccgccaccatcgtcatcgcttacttgatgaagcacactcggatgaccatgactgatgcttataaatttgtcaaaggcaaacgaccaattatctccccaaaccttaacttcatggggcagttgctagagttcgaggaagacctaaacaacggtgtgacaccgagaatccttacaccaaagctgatgggcgtggagacggttgtgtgacaatggtctggatggaaaggattgctgctctccattaggagacaatgaggaaggaggatggattctggttttttttctttctttttttttttgtagttgggagtaagtttgtgaatggaaacaaacttgtttaaacactttatttttaacaagtgtaagaagactataacttttgatgccattgagattcacctcccacaaactgacaaattaaggaggttaaagaagtaatttttttaagccaacaataaaaatataatacaacttgtttctcccccttttccttttaagctatttgtagagtttatgactaaatagtctgtgcaggttcatagaccgaagatactacacactttaaaccaattaaaaagaaccaaaagtaaatagaaaagacattgaatcaccaaggcctgggatcaacctgggctgtccacacagaaaacaaaaacccaaccaaaccaagccctgttgtgctcactggtgcaaagagaagatcagggcagcttaagtggtctaagaatccttcaggcattctttaaggagaaaaaggatacctttgattttgtgtgtttcatgctctggattttttttttttttccttctctgggtttaagagattttttttgaaatagtgaggaactgaccattatatgccttcactggcttcttgtgcaataatatgatgttttaagtgtgcaaacaagttagagctggcagctgaatgatagacaaatagtgcaaatttgccagcttggagatagaaaggaattcaacaatatatcaaatactttccttcccacctttttccttttttttttttttttctgatttgattctggttacagtgccataaaccttgttacatatgtatatcagaatgtaagaaaaaaaaatttatttaaaaatatttttcgcaaaaaaaaaaaaaatcttggtgtgtttctgttgattgtgtaaaaatttattttcattatataaatgaaactgg

SEQ ID NO: 44497 - DNA, 378 bp, Homo Sapiens
gcggcactcattgacaatggctctagcatgtgcaaagctggctttgctgggggagctgttttcccctccatcatctggtgcccccggcaccagcacgtgaaggggggcatgagccagaaggattcctacgtgaatgacaaagcccagagcaagcatggcatcctgaccctgaggtaccccatcgagcatggcatcgtcactaactgggacgacatggagaagatctggcatcacaccttctacaaggagctgtgcatggccctggaggagcacatgttgctgctgactgaggcccctctgaaccccaaggccaacagagaagatgactcagatcatgagaccttcaacaccccagccatgtatgtggccatccaggcc

SEQ ID NO: 44498 - DNA, 1509 bp, Homo Sapiens
actcgattgtaatttcatccccgggccggtcgagcctccctccctcccgcggccagcccttccctcccagtcggcctccttcgtcgcccccgcccccgcgaaaagccctgcagcttgcagccggcttcactcgcgcacgccgacctcccggctgcagtcctacctcttggaactacccgtgtttccgggcccagccctcgcagccccccacctcctcgccccggcccggggatccgttggggccgcgtcccccacgcgcccccggagacgccctttccgtgtgcgcccgggacttggtgaaactttgcaggcgccggctgcgaaatggatttaatccgaggcgtcttgctccggctcctgctcctggcttccagcctcggacccggcgcggtgtcgctccgagcggccatccgaaaaccaggcaaggtagggcctcctcttgacatcaagctgggcgcattgaactgtacggctttcagcatccagtggaaaatgccaaggcatcctggaagtcccatccttgggtacactgtcttttactctgaggttggcgcagataaatccctgcaggagcagttgcacagcgtgcctctcagccgggacatcccgaccacggaggaagtgattggagatttgaaaccaggcactgaatatcgtgtgagcatagcagcttacagccaggctggcaaagggcggctgagctctcctcggcatgtcaccactttgtcccaagattcctgcctgcctcctgcagctccccagcagccacatgtcattgtggtttcggattctgaggtggccctgtcttggaaacctggagcgagtgaaggaagcgcccctattcagtactattctgtggaattcatcaggccagatttcgacaagaagtggacctcaatccatgagcggatccagatggactccatggttatcaagggcctcgatccagataccaactaccagtttgccgtgagggcaatgaattcccatggccccagcccccgcagctggcccagtgacatcatccggaccctctgccctgaggaggcgggaagtggccgctatggaccccgttatatcaccgacatgggagctggtgaggatgatgaaggatttgaagacgacttagatttggatatttcctttgaggaggttaaaccacttcctgctaccaaaggagggaataagaaatttttggtggaaagcaagaagatgtctatatctaacccaaagaccatttctaggctcatcccccctacctcagcatctctccctgtgaccacggtggctccccagcccattcccatacagagaaaggggaagaatggtgtggccataatgtcaaggctctttgacatgccttgtgatgaaactctctgctctgctgacagcttctgtgtcaatgactacacctgggggggctcgcgatgccagtgcaccctgggcaaaggtggtgagagctgctcagaagatattgttatccagtatcctcagttctttggccactcc

SEQ ID NO: 44499 - DNA, 984 bp, Homo Sapiens
atgccgtggccagcagtggttgggatttcacggactttagacagctgccagtgtcagggtcccgggggcttttcccggccgccacccccgccaaatggagccatcagctccctctccccagtcatggagaccgcactgctgtccttccttccaggccaggaggagcccccgccatgtgatgagctgggacggaaaatcaaatctcctggggagaaacggcttctgtgtccaaatgagctttccgagtccaggtgcaaatggtttggggagctccaggagcaaaaatacggtttcaattttccaaagcaggccgagatccccgagtttaacccacatggccgagaagcgagcccccgcgcaggctgtgtggtaaccgagggcaccgtggcagtgaggcaggagcagtcggcgcccacacgccggatctgccgcacccgctgccacccacagtcctctggcgagctctcagatgggaggaacaggtgcccccacgatgcctcggaaagtaaccatggccgccctcatggcagctcacctgttttggggtattttattcgcatctgcagagtagagaggaacattccagaatgtgaagacttcagaacgtggaccctgggttctggagagcagcccagctcgggaaacaaatgctccttccagcagcagcagagagctgtagagccggggctccgggcagcttctgaatccagctcccaggccacagatcacagggacaggacgggagcctcccacacagacgccaggcagcaggaccccggaaattcacactcggattttgtccggcattcccactccctgccctgcttggagaggcaggaccgcaggtctgccggccccaacggcagcgccacagtgcccggcacagaggcctgccgcgcatacaaagcacccgccggccattatcattccggagccggccagagcctcccggctgcatctcatcggtcattcagcagcccgtaa

SEQ ID NO: 44500 - DNA, 1571 bp, Homo Sapiens
caagaagaggtactcggagctggagcagcagctgctggagagatccggagagctggagcagcagcggctaagggacacagagcacagccaagacctgcagagtgccctcatccggctggaggaggagccgcagaggagtgccagcctggcccaggtgaaagccatgctccgagaacatctggaccaggcaggctcggccaaccaggctctgagtgaggacatacaaaaggtgaccaatgactggacacgcagccgcaaggagctggagcagcgggaggcggcatggaggcgcgaggaggagtctttcaatgcctacttcagcaagaagcacaatcacctgctcctgctatggaggcaggtggtggggttccggcggctggtcagcgaggtgaagatgttcaccgagagagtgacagagctgggcctggcagtgaagcgtcttcagaagcagaatccggagaaggatcaggtcaacacggacctcactgagaagcttgaggccctgtccgtcctgtcggacacagagcggcgtccagctgagcggctccgagcgcaccgcggatgactccttcggcagcctgcgggggctctcggcccagcagaccccgtccccaccgcggcgctcctcgcccggccgaggccgttcaccccgccgaggcccctccccggcctgctcagactcctccacgctcgccctgatccactccaccttacacaagcacgagctgcaggtccaggacatgcgtgggcgctatgaggcaagccaggacctgctgggcaccctgcggaagcagcttagcgacagcgagagtgagcggcgggccctagaggaacagctgcagcgcctgcgggacaagaccgacagcaccatgcaggcccacgaggacgcccagcgcgaggtgcagcggctgcggagcgccaaagagctcctgagaagggagaagagcaacctggcccacagcctgcaggtggcccagcagcaggccaaggagctgcggcaggagcggaagaagctgcaggctgcccaggaggagctgcggcgccagcggtactggctgggggaagagcaggaggacgcagtgcaggatggtgtgcgggtgcgccgggagcttgagcacagccatagacaactggagcagctggaagggaagcgctcagtcctggccaaggagctggtggaggtgagggaggcgctgagccgcgccacactgcaacgggacatgctgcaggccgagaaggccgaggtggccgaggcgctgaccaaggctgagggcagaggaggcctccctgcaggactccctgtccaagctgagcgccctcaacgagagccttgctcaggacaagttggatctgaaccgccttgtcacccagctggaggaagaaaagtgcgccctgcagggccggcagcggcaggcgaagcaggaggccacagtggcacgggaagagcaggagcggctggaggcgctgcggttggaacaggaggtggcgcggcagggcctggagggctccctatgagcggcggagcaggcccaggaggcagtggagcagcagctccccacgctgcatcatga

SEQ ID NO: 44501 - DNA, 2713 bp, Homo Sapiens
agtcagaggcaccaatgtgaggttccacctgctttccagcacattcttggtttcctcacttctgctagacaacgtttgatcagaaggaacagggaacgagaaggagctgctggatgacgataagcctgggaaagggaggctgggtgagcagagacagaaaagaaacacctacctgctgtgacctcacaaacacccaggctgagttttgataagacaggttgaatcacactggggtgacagcctcatccctccaggtacaaacaagaacaggccatggttaaccaaagctcccccatgggcttcctccttctgggcttctctgaacacccagcactggaaaggactctctttgtggttgtcttcacttcctacctcttgaccctggtgggcaacacactcatcatcctgctgtctgtactgtaccccaggctccactctccaatgtactttttcctctctgacctctccttcttggacctctgctttaccacaagttgtgtcccccagatgctggtcaacctctggggcccaaagaagaccatcagcttcctgggatgctctgtccagctcttcatcttcctgtccctggggaccactgagtgcatcctcctgacagtgatggcctttgaccgatacgtggctgtctgccagcccctccactatgccaccatcatccacccccgcctgtgctggcagctggcatctgtggcctgggttatgagtctggttcaatcgatagtccagacaccatccaccctccacttgcccttctgtccccaccagcagatagatgactttttatgtgaggtcccatctctgattcgactctcctgtggagatacctcctacaatgaaatccagttggctgtgtccagtgtcatcttcgtggttgtgcctctcagcctcatccttgcctcttatggagccactgcccaggcagtgctgaggattaactctgccacagcatggagaaaggcctttgggacctgctcctcccatctcactgtggtcaccctcttctacagctcagtcattgctgtctacctccagcccaaaaatccgtatgcccaagggaggggcaagttctttggtctcttctatgcagtgggcactccttcacttaaccctctcgtatacaccctgaggaacaaggagataaagcgagcactcaggaggttactagggaaggaaagagactccagggaaagctggagagctgcttaatatactttcgaaagtaagaagagtttcttcaagatttatgaacatgttaagttttccagactactacccttcccacatacacctgagccactgtggtgggtcacagtgtggctatgttatctatgagagggagaatgagaaagagagggacagagagataaaagaaattgggtgagaggagataggtagctccataaggcacacaaattcaaatattatcattcctatcactgtccattcttaatatttctatcctccattctgttctttttactgtcatcacttctatagatttcctaactccaccatgcctatttctggttatataattgctctccaattgtcatgtcagtgtaggggaactactccatcatagcattctggacaccttgcatgtatctacgtaggtcatgtaagcaaaggcttgaagaacagctaatctgagatttagaagaatgctttttgatcctcctggaatatgagaggatgggaggccctttagaacctgcctcaatgccatctctcactctccttcttatatccctgggagtatgtcatgtgacaagtctttactgtctcccaggttttggatggagcatggggttttctgccccacaccctttaggatatagctgaagaatataatgaggaatagctggattctagaactgactcctcaccagtggtatattccacaacagtgtcacagtcgtctggcccctttggtttccgtgtcatcctttttggtgtgtaggacaaggagccagggaattggcacgtttggcttttacttcttttttatatgtaaataataagccatctaagtgtaaaagtggctcatatcttctccagccaaatcagctaggccatggccttgccttgcttctcatgagtgtgcttgacagtcatcaccgtcactctatcttcatttctggttcttaccgtgttagcttagttcattcaagctactatcacaagctacacataaattgggtggtttataaataacaaacatttctttcttacagttctggaggctggaaactccaagattaaggcagatttcatgcctattgagggcctgctttctgattatagaaggtgacttcttgctgtgcccacacatggtgaaagggactaccaactctctggagtctcttttatgagggcactaattccaattatgaagcctcttccctcgtgacctaatcactgcccaaaggccccatgttctaatgccatcatcttggtggtttaggatttcaacatatgaattttggaaggacataagcattcaaccccctgcacatgtcttctttcctacttcctcaaggttctttctgtccagttgctccttcttctattgacccttttttgccttctctttctccttcactgcctcaagttacagccagaggaaaggaggaactaaaacttagcaaatctataatcacatgcaaatacacagaatggattgttacaaccaaaa

SEQ ID NO: 44502 - DNA, 1940 bp, Homo Sapiens
atttacagctggaagggcagacggaggcatcttggtgtatacacagccctgctgggccacatcccgggtctcctccctctgcgatgccatagcaggggcgccttccgaaagccctctggattgaggcagcaggatctatggtggaacctgccccggcgtcgccaacgcccctaggaccccagcacactgactggggagcatccctgtgtcgtttctgcccggagaggagcagaggccaggctgctgctctgggagatgagactttctggtgcacctgcacttccacatgagacttccgggtgcacctgcactcccagatgcagacttcctggtgcacctgcacttcctggtgcagacttcttggttcatctgcaacttcctggtgagaatcccttgggcatctgcacttcctgatgcacctgcacttctagttattttagagaaaacgttccctgaacatgccacatgcagaggatgctgggtatcaggctacctttgctggacagctccaggtaactgcatttgctctgccaatgttggctttttaaaaatagaaaacacatatagacaaatccatcacacacacatgcacagacacacacacacacacgacaaatccatcacacacacatgcacagacacacacacacagagtcaacgacataggctcacaagtagagctcttcgtctgtttatacttaatgcaattactgatacatctaagtttggagctgctgttttcttttacgtatactgtttgtttgcagattctgtgtataaattctttcctttcttgccgccttttagatgatttcccccagcttaccttgaggactttcgagcaaacagacacgttgaaagaatagacaaggaccacttgcatgcccctcagttagattcaccaactgtcaatattttgcactgtatgtatacacgtacatgtctgtgtatacacatatacacatacagtcacacatcgcccgatggcagggatggttctgaggaaggcgctgttaggcgatttcgtcgctgtgcgagcatcatagtgtgaacttactcaaacctagatggcacagactcatcgcctcccacacgcctgggctgtatggcaggacctcctgctaccgggctacaaacccaggcagggtggtactgtactgaatggtgcaggtgattgtaacacaatggtaagtatttgtgcatgtaaacatacctaaacatagaaacagtgtagtaaaaatatggtataaaagatcaaatacagtacacctgtacaaggtctgctctgttctaatcttatggggccaccactgtatatgccgtctattcttgacagaagtgctttatgtggcacatgactgtacatggaaatacacacacactcacacacatccacacacaagcatatgcatacacacatatatacatgtatatacacgtgcatataacatatgtagatatctgccaattgctatccaacgtgaattccataaatttacactcctaccagcagcatttgggtatctgaggtgtcacacatccttgccagcactggatattatcccggcttggagattttgccagcctggtgggtgtgaagtggatcttgttgtggttttaatttccatttctctaattatgcagaggctgagtgccaggcttcctctcctgggaagagcctgccggcttgcgggctgtcagcgctcactgtgggtgcgggtggcgtgcctgcctgcacggcccttgcctctcttagtctacagggtctccactcctgagttcccggaaacaagatacagatttcagaatggcacctgaacattgtttactgatttccggctggaagtgagggtccgagggattcttctatggaattgtatgactcagcatctttctgattgcaagcagcagcatcgcagcctaaatgaatctattggctt

SEQ ID NO: 44503 - DNA, 975 bp, Homo Sapiens
atggaagcgagaaaccaaacagctatttcaaaattccttctcctgggactgatagaggatccggaactgcagcccgtccttttcagcctgttcctgtccatgtacttggtcaccatcctggggaacctgctcatcctcttggctgtcatctctgactctcacctccacacccccatgtacttcttcctctccaatctctcctttttggacatttgtttaagcacaaccacgatcccaaagatgctggtgaacatccaagctcagaatcggagcatcacgtactcaggctgcctcacccagatctgctttgtcttgttttttgctggcttggaaaattgtctccttgcagcaatggcctatgaccgctatgtggccatttgtcacccccttagatacacagtcatcatgaacccccgcctctgtggcctgctgattcttctctctctgttgactagtgttgtgaatgcccttcttctcagcctgatggtgttgaggctgtccttctgcacagacctggaaatcccgctcttcttctgtgaactggctcaggtcatccaactcacctgttcagacaccctcatcaataacatcctgatatattttgcagcttgcatatttggtggtgttcctctgtctggaatcattttgtcttacactcagatcacctcctgtgttttgagaatgccatcagcaagtggaaagcacaaagcagtttccacctgtgggtctcacctctccattgttctcttgttctatggggcaggtttgggggtgtacattagttctgtggttactgactcacctaggaagactgcagtggcttcagtgatgtattctgtgttccctcaaatggtgaacccctttatctatagtctgaggaataaggacatgaaaggaaccttgaggaagttcatagggaggataccttctcttctgtggtgtgccatttgctttggattcaggtttctagagtaa

SEQ ID NO: 44504 - DNA, 210 bp, Homo Sapiens
atgtcccttcgactttcctttcacttcgaaatgaatgtggaaatgctgtcacgccttatttttctaattcctcgatgttgggttttttctcttctttatatctcaacttttaatgctcttcttcctatgacctttcatctaaaaactgaccactcctttacaggtttttacggtaaaaaaaaaaatctgtctttctttaatcttacatag

SEQ ID NO: 44505 - DNA, 2261 bp, Homo Sapiens
tgaattattgacaattttaatacatgttgcacagtacatattaatatagaaaaatacatgttatcagcagcatgatgttgaccatgttctaatccattccacctgctcaaatattagtgcaaataattatatatttgtaatgcatcactgctgtctagcaaaatctatgccttctgaataaatgactttcctctgaggttgactgctatgtgaagtatgatgtgatatattcctatttaaactggctttgtatggtgaggcagactgcaaccttctaaaccacttagaaaatgggcgagtgtgtttaattactcatctttccccccaaaagtcgataatcacaaaacaaaggttaatggtacctatcaaataataatgataaaatacctcgggtctagttcaaaaataggaattttgttaagcccaggggcagcctagctgctttaatttggcaattaaaatttctgttctctaaatgtcaggtttctgtcccctatacatttgaacagttgtttcctccctaaatttgtaaagagaaatgattgatcactggtagaaataaaaggtaagagttatgacagcttttaaaacccttaacatgcaattctgattacatgaaaatgactatctactgttaatatactaaatattttgccttacattttcactccagcattagtcatttaaaaactaccaatgtactaaatagttaacacaattggcaagcctatgacatttaaaatagtttttgaacataaaaacactgatttcttcatatcttccaaggtagagttgtcatttacttctatgtcacaaaatatagtacaaaatatttggtctctttctattgtgaaaattatcaagctggaaaagtatataaaataataccaataaagatttgtgatagacatatttctattaggtacaaacttaacattaaaatttcatgaccacttataatatttaaaaaatcaaatttaaaaagtatgaccatacattgaacatattaagaaaaacacaacagtaaattagatattgaccctgtatgccaactttgtaatataaatactacaataagaatcatattggaagcaacgattaagcaaaactaatgaacctatcaaactaaaggatctatttaacgttacgtaaggagaatagcatatagaacctaaaagtgagtgagaaaagatttaggtttcaatctgagcattttactagctgtagaccttgactggtctacttatctttctatgcattaggtttttcatctgtcaaatggaaataatagtacccaaatcctagggttgctctagaatccaataatatgtgcaaaggacttattagcacagtgtgtgagacttaaatcaatacatgtaactataattatctttattatgcagcaaaattttttaaattgctaacttttaacttcatgtagaattattcagtctaacaatatgaactgatcttttcttctaaagtatagaataattacaggatagatcagagagaaataatacagaaactgaatatagttaaactaattgaatgaaagcacaaaatgctttgtatgtaaaattcaacaatatatgggtaatgtgcagaatatttttgcgttaaaaaaagttaatctcccagatgtgagctttgttagtcaccaacaaattatgtactgactgaactgctgtctctcaaacacagttcaagcatgccttagccactaccttaggtacttgaccactttaaggggttttgtggcatttcaaaaatcaaaatctctttatccagatccttgtaaatattcaccattacaggtaagaaaaacgcattttagggaagcagtgaattctccacttggaatcaatctactgattgataattaaattatttcactgtgaaccagaaggctagtatttagaaagcaaaatatttagaagtgaaagaggggggaaaaaagaatgatctacaatgtaatataaattaacctaatttaaattagattttaatttaacctactttgatagttttttaaaacaaggaagatcctaaggacttgcaactatggcaatcctcaaaatgggaccaaaaattgtcctggaatggtcaggtggtcatccatctaaagatccatccagctactatttaataattcttcataaggacacttcatctactctggttgactgtcattttcaacatcataatttacataaggtaggcttcctttattaaattcgtattctgtatttcagatattt

SEQ ID NO: 44506 - DNA, 111 bp, Homo Sapiens
atgaaagccttcagtcccgtgaggtccattaggaaaaacagcctgttggaccaccgcctgggcatctcccagagcaaaaccccggtggatgacctgatgagcctgctgtaa

SEQ ID NO: 44507 - DNA, 741 bp, Homo Sapiens
atgctggatacattgaccagtgtgtttgctcttcatcaatccaccagtcctcacaagcttagagagtgtctccccctcatcattttcctaaggaacagacttaagtatgccctggaagaaatgaaaaagatttgcatgcagcagttcattaagatagatggcaaggtccaaactgatataacctaccctgctagatttatggatgtcatcagcattgacaagggacacaatttctgtctgatctatgacaccaagggttgctttggtgtacattgtattacacctgaggaggtcaagtacaagttatgcaaagtgagaaaaatcttagtgggcacaaaaggaatccctcatctggtgactcatgatgcttgtaccatctgctaccctgatcccctcatcaaggttaatgaaaccgttcagattgactcggagactggcaagactgatttcatcaagcttgatgctggtaaccagcatatggtgactggaggtgctaacttgggaataatttgtgtgatcaccaacagagagaggcaccctggatattttgccatggttcacgtgaaagacgccaacggcaacagcattgccacctggctttccaacatttttattggcaagggcaacaaaccatggaaccatggcaacaagccaagggcaacaaaccttccccgaggaaagggtgtccacctcacctttgctaaagacggagacaagagactggtggctaaacagaacagt

SEQ ID NO: 44508 - DNA, 561 bp, Homo Sapiens
gagaaaatgcactttcttctgagagttggttgctggcagtaccaccagctctctgctctccacagggctccccaccccatctggcttgataaagcgcaccagctgggctacaaggccaaccaagtttatgttatatataggattcgtgttcgccatggtggccgaaagcacccagttcctaagggtgcaacttatggcaagcctgtccatcatggtgttaaccagctaaagtttgctcaaagtcttcagtccattgcaaagcggcaagctggatgccactgtggggctctaaaagtcctgaattctcactgggttggtgaagattccacatacaagttttttgaggttatcctcattgatccattccataaagctatcagaagaaatcctgacacccaatggatcaccaaaccagtccacaagcataggaagatgcatgggctgccatctgcaggccgaaagagccatagccttggaaagggccttaagtgccaccacactattggtggttctcaccagggagcttggagaaggcgcaatactctccagctccaccgttac

SEQ ID NO: 44509 - DNA, 1611 bp, Homo Sapiens
atgtcagaagaaacagtaagtgaatcacagttttccttgaagacagcagcgctaagagtgtttgatcttcctctgacttggtactattctctctcccagatcaaattttctccggtggctaaaaagttgtttgtggtaactgcagtgagtgctatatctgtaatttttctggctcatcactttaaaagaaaacgtggaaagaagaaaggaaaaatattaccatgggaaccagagcacctcatacttgaatacactaaaagagcagcatcagacaaaggttcaagttgttccagtagcagacagaatttgacattatctttaagttctaccaaagacaaaggatctcaagtttgtaactatgctaatggaggacttttcagtaaatattcaggttctgcacagagtttggcctctgtccagagtgtcaattcttgtcatagctgcgcttgtggcaattctaattcctgggacaaagcagatgaagatgatattaaacttgttaatattcctgtgactactccagagaacttatacttaatgggtatggaattgtttgaagaggcattgcgtcgatgggaacaagctctgacctttcgcaatagacaggctgaagatgaagcctgtggttccattaaactgggtgcaggagatgccattgctgaagaaaatgtagatgatattattagtactgaatttatccataaactcgaagctctgctgcaaagagcctatcgtctccaagaggagtttgaagctacccttggggcatctgatcctaattcccttgctgatgatattgataaagatacagatatcaccatgaagggtaatgtggaagactttggcctgcgagacaccttgagcatcgcatccacggattcctttgcttccgcagcagaggtaattctttcagaatcagctaacaggatattcctcgctgagagcggaaggaaaattttatcagctttaattgtgaaagcacgaaagaatccaaagaagtttgaagatgtttttgatgaaatgatctattttttagagcagaccgatcactggggtagtactgaaatggaacttgctgctagaggggtgaaaaatctaaatttttatgatgttgttctggattttatattaatggactcctttgaagatttggaaaacccacccacatccatacagaatgtagtaaataatcgatggctaaactcatccttcaaagaaacagctgtggcttcaagttgttggtcggtgctgaaacagaaaagacaacagatgaagatcccagatggattttttgcccatttttatgccatttgtgaacacatcagtcctgtcctagcctggggctttttgggtcctagaaattctctgtatgatttatgttgcttttttaagaatcaagttcttttatttctcaaagacatttttgactttgagaaggtgcgctattcaagtacagagactttagctgaagacctcatgcagttactcattcgccgcactgagcttttaatggcctatcttgaagcagatgccctgaggcatacaagtagttgtctaagcagtcatggtcatgttatgtccactgggctactggaagccaaagtacaataa

SEQ ID NO: 44510 - DNA, 2139 bp, Homo Sapiens
gccggagccagcagtggcaacccgctggggtccctttccacactgtggaagctttgttctttcgctctttgcaataaatcttgctacttctcactctttgggtccacactgcttttaccagctgtaacactcaccgcaaacgtctgcagcttcactcctgaagccagcgagaccacgagcccaccgggaggaacgaacaactccagacgcgccgccttaagccttaagagctgtaacactcaccacgaaggtctgcagcttcactcctgagccagcgagaccacgaacccgccagaaggaagaaactccgaacacatccgaacatcagaaggaacaaactctagacgcgccaccttaagagctgtaacactcaccacaagggtccgcggcttcattcttgaagtcagtgagaccaagaacccaccaattccggacacagttggaaatgcagaagggcacttgagtttggctgcagtctcccacacggagaccttctggaggaagatgagccctaaacgcgatgggttggggacaggtgatggtctgcactcacaggttttacaggagcaggtctccacaggagacaatctccatgaatgtgactcccagggaccaagtaaagacactttggttcgtgaggggaagacctacaaatgcaaggaatgtgggagcgtgtttaacaaaaacagcctccttgttcgacatcagcagattcacactggggtgaagccttatgaatgccaggagtgtggaaaagcctttcctgaaaaggtcgacttcgttcgacccatgaggattcacacaggggagaagccctgtaagtgcgtggagtgcgggaaggtcttcaaccgcaggtcgcacctcctgtgctaccgccagattcacactggagagaagccctatgagtgcagcgagtgtggaaagaccttcagctatcactctgtcttcatccagcatcgtgtgacccacactggagaaaaactctttgggtgcaaagaatgtggaaaaaccttttactacaactcttccttaacccggcacatgaagattcacactggagagaagccctgcaagtgcagtgagtgcgggaagaccttcacctaccgctctgttttcttccgacatagtatgacccacactgcaggaaagccctacgagtgcaaagaatgtgggaaaggtttttactacagctattccctcactcgacatacaaggagtcacactggagagaaaccttatgagtgccttgaacatagaaaggactttggctaccactctgcttttgcccaacagagtaagatccactctggaggaaaaaacctttgagtgcaaatgatgtgggaatttgtgggttttctttttttttttttctttgatacatagagagccacactgaggagaagcactctgaattcagtggcagtaggaaagctgtgacctgcagctcatcctcacttggcattgaagaattccttccagagataaactctatgagatatgtgggaaggccttttgcaagtgggcccacatcagtcaacgtcagagaacttaaactgcgaaaagacattttgacaaaaactagtgaagaaaatcttttggccacaggaaatatcttcctcagcatctgagaatttttccaggagggagacctgttggttattgtgcacttaaaagaaccacccacacctctctccatagtttatatcactaagccacttcaggattttttttttttaagtaagaagggaactgtaaaagagaaaaaaagaaattcatgcatagcttctgtcagacttctctgaaagccatgcctatcaaaatttgaattcagttcttcattttgcagatggctgaaagggacgagagaatgatggtgaagctgtgttgctttcccaggtgagccttgattatttcctctgtgctttctcagcttctttggccttctgtaagaggggcttctccaagagcatgtcactagttttctagaagttaaacaagagctaagacaaacaaaacaaaacacagcttatctaatctaatgagaaactcagaaaaaaatgttttgatgaatacaatgtattaaaatataaaacatgtagatcctttgacatgttaattcaattctagaaatcctcagaa

SEQ ID NO: 44511 - DNA, 196 bp, Homo Sapiens
caggttctaaatccattttatatatttcaactcttcagtgtctgtttgtggtttagtgaagactataaggaatatgcttttgccatcataatcatgtccataatttccatatctttgacagtatatgatctcagagaggtgagtttttctattaattctatggtttcaggaaggataatgactttattaaaaattt

SEQ ID NO: 44512 - DNA, 1831 bp, Homo Sapiens
atgccctccatgttggaacgcattagcaaaaatttggtcaaagagattggaagcaaagacctgacacctgtcaaatacctattgagtgccaccaaattacgtcagtttgttatattacgaaagaagaaggattctcgttcatcattttgggaacaatctgactatgttccagttgaattctccctcaatgacatcctggagccaagttcttcagtcctagaaactgttgtgacaggaccgttccacttcagtgacattatgatccagaagcataaggctgacatgggtgtgaatgttggtatagaagtgagtgtgtcaggggaggcctctgtggaccatggatgctccctcgagtttcaaattgttaccatcccatcaccaaacctggaagactttcaaaaaaggaaactgttggatccagagccatcatttctgaaggagtgccggaggagaggggacaacctgtacgtggtgacagaggctgttgaactgatcaacaatactgtgctgtacgatagcagtagtgtgaatattttagggaaaattgctctttggattacctatggcaagggtcaaggccaaggagagagtctcagagtgaagaagaaggcgctgactcttcagaaaggcatggtgatggcttataagagaaagcagctggttatcaaggagaaagccattctcatctcagatgatgatgaacagagaacctttcaagatgagtacgaaatttccgaaatggtaggctactgtgctgcgaggagtgaggggttgctaccatcatttcataccatctctccaaccctcttcaatgcctcatccaatgatatgaagttaaaaccagagctatttctgacacagcaatttttgagcgggcatttgccaaaatacgaacaagttcacatcctcccagtaggaagaatagaggaacccttctggcaaaatttcaagcatctacaagaggaggttttccagaaaataaagacactggctcagctctcaaaggatgttcaggatgtcatgttctacagtatcctggccatgctcagagacagaggggctctacaggacctgatgaacatgctggaattggacagctcaggtcatttggatggccctggtggtgccatcctaaagaaacttcaacaggattcaaaccatgcatggtttaacccaaaggaccccattctttatctccttgaagccataatggtgctgagtgacttccaacacgatttgctggcctgttccatggagaagaggatcctgcttcagcaacaggagctggtaaggagcatcctggagccaaacttcagatacccctggagcattcccttcaccctcaaacctgagctcctcgccccactccagagtgagggtttggccatcacctatggcctgctggaggagtgtggccttaggatggagctggataaccccaggtcaacctgggatgtagaagcaaagatgcccctgtctgccctctatgggactctctcgttgctgcagcagctggctgaggcctaagccctccctgatgggcagtcagtccagagatgctggccctcgcccagtctatgctgtgagtgtccttatgggtgcaagagatagggctgtgcctctctgcgtttccaggtggagtagagacagtaatgggtagagactttaggaaatgttttggggtggtggaatactctatatattgacaagagtttatatattgacaagagtttatatatttgtcaaaactcctcaaatagtatgttaaagacgtaagcgtttcactatgtataaattttacttcaaaataataaaaacaaatactgactct

SEQ ID NO: 44513 - DNA, 405 bp, Homo Sapiens
atgtcactgtgtttccttcgcaaattctctaaaatagtctgctgtgtcccggggcatagtagatattcaagaaatggtggctatgagttttatcacaattctctcctactgggtgagcagctgtttgcaagactaaaattcgggcgaggcacaggcttccccttggtcttagcagctagcacaagacgagtgtcccttcagccagtctcagagctctttggcaattcaactgacccttgtccttcagtccagacaatgccccagggcccacctgcattcaaactcggactgttctccttcccacccctattatcttttcaactttatggacagtacatgcaattttctcattcattttctcatttaacatctaacagcttcatgatatccccattttacagataa

SEQ ID NO: 44514 - DNA, 345 bp, Homo Sapiens
atggctttggagcacctggtagtgtggcatgtccacagtgaagaccagagtttcgttgtccttaagactgacctggggagacgtggctgcaggccattgaggaagacggcaccgaaagcgaaggaagctcctgctcctcctaaagccgaagccaaagtgaaggctttaaaggccaagaaggcagtgttgaaaggtgtccgcagccacacgcaaaaaagaagatccgcatgtcactcaccttcaggcggcccaagacactgcgacttcggaggcagcccagatatcctcggaagagcacccccaggagaaacaagcttggccactatgctatcaagtttccgctga

SEQ ID NO: 44515 - DNA, 912 bp, Homo Sapiens
tccggccgagctcagcaccgaggcgccccccaacctgcccagcccccagcccaccagcccagcccagtcccggggagccagctggcctggggttcggtcccggggggaggggagtttcgggggtactgggcggggtactcgtgagccagaggggagggggccgcgggttttcatgtacccagcatgagctcctacttcgtcaaccccctgttctccaaatacaaagccggcgagtccctggaaccggcctattacgactgccggttccctcagagcgtgggcaggagccatgcgctggtgtacgggcccggcggctcggcgcccggcttccagcacgcttcgcaccacgttcaagacttcttccaccacggcacctccggcatctccaactcaggctaccagcagaacccgtgctcgcttagctgccacggagacgcctccaaattctatggctacgaggcgctccccagacagtccctttatggggctcagcaagaggcgagcgtggtgcaatatcccgactgtaaatcctccgccaacactaacagtagcgaaggacaaggccacttaaatcaaaactcgtctcccagcctcatgtttccatggatgagaccccacgctccggggaggcgcagtggacggcaaacttacagccggtatcagaccttggaactagaaaaggagtttctctttaatccttatttgacacgaaaacgtcggattgaagtctctcatgccctgggactgaccgagagacaagtgaagatctggttccagaaccgaaggatgaagtggaaaaaggagaacaacaaggataaactgccgggagcccgagatgaggagaaggtggaggaagaaggaaatgaggaagaggagaaagaagaggaggaaaaggaagaaaacaaggactaa

SEQ ID NO: 44516 - DNA, 324 bp, Homo Sapiens
gtggtgggtaccacacgcattgctgatgaggggcacatctgtgaacagctgcctagttgtggtgatccctttggccacatccttcagttggcagaaccatacttactttctcttaaccctcaaactagagttgtattagaaatacagaggcccccaaatttaccttctcagacctttaaatccaagcaacatctgatgtttttatccaaaatgaagaactcaaaagaagggagaaggagaactggtacttcttgctctacccctctccatgagactttctgtccctatttctggttttctcactctggtggtataggacagatc

SEQ ID NO: 44517 - DNA, 2509 bp, Homo Sapiens
cccaaacagccttctgaggttggtaagggtattcagccatcttcgctttgcatatgagaagacaatctcaaagatttgaagtgtcccagtggtaactggcagaaggagaactcttagatctcctgacttgcacatcctgtcatctgctgtgttacattctcatctagagtctgctctccacacttgatccttgctacccctctacctgctgctgttcctctgagagttcatcttgcctttattttgagggagggaggggcaagcccagtgttagtgttgattttgccctcaaggaccctggcggggaagcagtagtgttcccattgtagaggccagaaaagctgcccagtgacacagccaggatcagtcatggagccatgataggccagagcctgagctcccagccactgaggaggggtggcagaggattgtttggccaggtctgtgtgggctgaaggcttggtgaccagggacgacatgatcatctgcaagaccaatgctatcactgccctgaggatgttcttcccccgaaagtttgcctccaatagcacaggcacctgcgtctcagatggtggtgacatctgagtacttggacttcatcagctgcctgtaggaggtgaggtagcaggaggtgagggcaatactcccttcagcttcagcaggtgaaaagtgtggttctcaatgaagttgagctagtgtgtgccaggtctccttctacagtgggtacgcgtcatacaggatcccatcaaagcgaccacctggcaggggagcgccacctccttccacaggactttcaaggggatgaccttgtgtggctgctgctgggtccagtcctggagcagctggaagatgctgtcattgcactccatgatccagtgttcctggatggcgacctcctgcaccttccatattcttgtggccatgccgaagcccacctctaagactcggccccctttggaggtggtgaaggcagcgaagggggttgcagtaggggcgctcttgctgcagatggagccccaacttggaacccgacgtgccagggcccagtccctgcagccatctcacttttcacatacctcatttctgcttgccaaacccacccagccacttaataaggaagcagagagtatgggatagagaaattgtgggaatagtggcccagccagatgttcattgctccactgggactctgataggaggcttggccttcaagctctgcagtttcctgtctggcaccctggcagctgggctcaagtctaaaatgtgcagaagtgttttatagataaatagaacattccaaagagatggcctcatcagcagtgagacatcttagggaaggagacaccacagtattaaagagaattacctcaatggcagtgcctgtgagctggcttgagccaccttctttacctctgagctttctgccttctgaagccctttttgctctttctgttcagatgagaggcattatggttcctatttgggtaacattagggaggtggtcaaagcccccagtatagcccattcctgtagtcctaatccaagatggtcatcactgatagtaggattctcctctccccatttcagtcacaggaaatggggtggtgaccaaacaagctcaagtgataaactgctggtgatatgtatatatgtttgttgttttctccacctctgaggtgctgggttgcctgataccaaagtgttccagtttgtgtactaaagttgtttttctggcagcctgagacttcgctttttaaaaaatgcagcaattggttgatttttgttgttcctgaaggacccatcacactacccacggtatctgagtttcaagtctagcatggcttgggtaatctgtgattgtacctgtttcttcctgggattctgcacatagccaggagcatctcattgcttcattccgtgttttcttgcagttatgcctgggatatgcagatggaaatgcatattttattgtaaatttcattttatatctagcttatattacccttagggcattaagtgggtcttttaaacttatgtctgttaagtaggttgtctgtgacttgacgtcgggcagtaaaggtagatgctaagcaagtatttattatcaaaaggaaatgttgagtcaacattaagggtgagaactgctcttcgtggttaaggataaaaccaagaaggaaagaagtgatgggaatgcagagacaggaggcagcccagctcttcttggggttgtttacgcccatccttgcgttggtctgcggcgtttccccagcagacaccactgtgggctactctaatgacttctctttcctcctcgaacaacttctggagaagtcgcaccgttgcagagtggtgccgctacacattgatcatctaaccttacctgggtcctcagctatagggccgtctgtctcgagtcagctgtcacttaaaagtttcaccattttctctggtttgacttgctgaaaaaaaaaaaagaaacattaaaaaatttcactattttcttaaaata

SEQ ID NO: 44518 - DNA, 450 bp, Homo Sapiens
atgaagtgcatcttggtggccattgagggcacagaggccctcttctactggacggatgaggagtttgaagagagtctccagctgaagttcgggcagtcagagaatgaggaagaagagctccctgccctacaggaccagctcagccccctcctagccccggtcatcatctcctccatgacgatgctggagaagctctcggacacctacacctgcttctccatggaaaacagcaactccctgtatgtccttcacctgtttggagaatgcctgttcattgccatcaatggcgaccacaccaagagcgagggggacctgcagcggaagctgtacatgctcgaggcgctgcggcccccagacctggggcagcgtgtccagctgtgggagcactttcagagcctgctgtggacctatagccgcctgcgggagcaggaacagtgcttcgccatggag

SEQ ID NO: 44519 - DNA, 1996 bp, Homo Sapiens
gcagaggagcggaaagcatggtccggggggcggcggacgcctggtaggcgctcgggccgttgttgtggggctgcgcgctggcgctgcagggcgggatgctgtacccaagagagaggccgtcgcgggagcggaagaagctggaccgcctctggagcttccgcgccgacttcttcgacaaactgtgccttggcttctaggagtagtggtatcggcgtctgctgcgagagtcgggctccaccatggacataccggttccctccagcttcaacgacgttggccaggactggcggctgcggcattttgtagaccagatgtggtacgaacgggaggtgaccttcctggagcaatggacccaggacctgcacacaagagtggtactgaggattgtcagtgcccactcctatgccatcgtgtgggtgaatggggtcgacgcgctagagcatgagggatctacctcccctttgacaccgacatcagtagcctgttccaggtggggcccctgccctcccgcctccgcatcactatcaccatcggcaacatgctcatctcctccaccctgccaccagggagcatcctcgacatggccgacacctccacgtgggtaccatcctgcttccaccgcagacacccaccttcctgtcccaccccgtggggcattacattagggtaattacattaggtaagtcacatatcagtgacttacaaattttgtaagtaattaagaaattttcaataagtgtggagctgaatatttacatgagcccttcaaaaactgatagttaatggaataaatgaaaataacaggagagactttgttgaaagaagacaaaatagtcaaggaagtgatagaggatacaaaagaaagatgaaaacttacattcatttaatgtctaaccgtgtgccaaaagacaatattattatttagttttcataaccacaacatttggtggatatgattgcttccattatataggttaggaaagtaaagcttaggggtttgtgaacccactagtttaaagttgtgtagccaataggtggttgagtgagaattcaaaactggaacagatttgcttgatccagaatggtataactttattgtccatgcattgtcttctacattttactgcctgtaaagtgggagtcagttatgggaggagacccagaatgtcacaggttttgaaagctgctgtggaaaatttggaaggaggcattggatttaatgactgatacaggtcagtgcagattgaccttggagagaacagttttcttcagtggcatggtagtgttcaaaacaggatctgatggtaaagaaaatgtagaaccagtgtgtgtagactccttgatggaaaagtttatttgtaaaatatcagaggaaaattataatatagatttgtccattcaaaccccaaagtccagattcttactgcaatatttgatgtagccaatatacagcagttgagttcaattttggcccctgtttatgtgtatgctaaagaaaaataacaatcctaagcctatgccacttaaacaagaggatgtgattatactatgaaacacttgtgaccataggaatatagcagtgctaaggcaaaataggtcttaacttgacttttcctgtcatttgctgccattgtttgccaaaggtctagcacctatcttcagaggaaagtcaagaaattagtgctcagatggtgggatgaattcctgaattattgttggctctagtagtttcttcagatcaattttatagtttctttagaactagaaaattaggtctcagaatggcagttggccacccaatgtgtataatacaattactcaaccagctgcttgaaagcaaggggcaacagagaagtcagctactggctcaggcaacaggaaatttgatgatactccttggtcaaatccttcatttaacatacatttatatagaacctttctgtatcaggcaccattctaggtaccacagataaaacaataaagagaactgacaaaa

SEQ ID NO: 44520 - DNA, 768 bp, Homo Sapiens
atgatcctaaacaaagctctgctgctgggggccctcgccctgactgccgtgatgagcccctgtggaggtgaagacattgtggctgaccatgttgcctcctatggtgtgaacttctaccagtctcacggtccctctggccagtacacccatgaatttgatggagacgaggagttctacgtggacctggagacgaaagagactgtctggcagttgcctatgtttagcaaatttataagttttgacccgcagagtgcactgagaaatatggctgtgggaaaacacaccttggaattcatgatgagacagtccaactctaccgctgccaccaatgaggttcctgaggtcacagtgttttccaagtttcctgtgacgctgggtcagcccaacaccctcatctgtcttgtggacaacatctttcctcctgtggtcaacatcacctggctgagcaatgggcactcagtcacagaaggtgtttctgagaccagcttcctctccaagagtgatcattccttcttcaagatcagttacctcaccttcctcccttctgctgatgagatttatgactgcaaggtggagcactggggcctggacgagcctcttctgaaacactgggagcctgagattccagcccctatgtcagagctcacagagactttggtctgcgccctggggttgtctgtgggcctcatgggcattgtggtgggcactgtcttcatcatccaaggcctgcgttcagttggtgcttccagacaccaagggctcttatga

SEQ ID NO: 44521 - DNA, 951 bp, Homo Sapiens
atgaagatagcaaacaacacagtagtgacagaatttatcctccttggtctgactcagtctcaagatattcagctcttggtctttgtgctgatcttaattttctaccttatcatcctccctggaaattttctcattattttcaccataaggtcagaccctgggctcacagcccccctctatttatttctgggcaacttggccttcctggatgcatcctactccttcattgtggctcccaggatgttggtggacttcctctctgagaaaaaggtaatctcctacagaggctgcatcactcagctctttttcttgcacttccttggaggaggggagggattactccttgttgtgatggcctttgaccgctacatcgccatctgccggcctctgcactgttcaactgtcatgaaccctagagcctgctatgcaatgatgttggctctgtggcttgggggttttgtccactccattatccaggtggtcctcatcctccgcttgcctttttgtggcccaaaccagctggacaacttcttctgtgatgtccgacaggtcatcaagctggcttgcaccgacatgtttgtggtggagcttctaatggtcttcaacagtggcctgatgacactcctgtgctttctggggcttctggcttcctatgcagtcatcctctgccatgttcgtagggcagcttctgaagggaagaacaaggccatgtccacgtgcaccactcgtgtcattattatacttcttatgtttggacctgctatcttcatctacatgtgccctttcagggccttaccagctgacaagatggtttctctctttcacacagtgatctttccattgatgaatcctatgatttatacccttcgcaaccaggaagtgaaaacttccatgaagaggttattgagtcgacatgtagtctgtcaagtggattttataataagaaactga

SEQ ID NO: 44522 - DNA, 2013 bp, Homo Sapiens
gggagttggcggacggtccctggctgggttctggaggccctgggaccgcggaagaggcttcagacgctgcagcgatgcctcgcccacggcgggtcagtcagctcctggatctatgcctttggtgcttcatgaagaatatttccagatatctcacagacattaagcctttgcctcccaacataaaagacagactgattaaaataatgagtatgcagggacagataacagattcaaatataagtgagattttacatcctgaagtccaaactctagatctacggagctgcgatatatcagatgctgctctcctgcacctgtctaactgtagaaaactgaagaaattaaatttaaatgcttcaaaagggaaccgagtttctgtaacttcagaaggaataaaagctgtggcttcatcttgttcatacctacacgaagcttctttgaaaagatgctgcaatctcactgacgaaggagtcgttgctcttgcactcaattgccagctgctaaagatcatcgatttaggtggctgcttaagtattactgatgtgtccttacatgcattaggaaaaaactgcccatttttgcagtgtgtcgacttttcagctactcaggtatctgacagtggtgtgattgcacttgttagtggaccttgtgcgaagaaattagaggagattcatatgggacattgtgtaaatctgactgatggggctgtcgaagctgtccttacttactgtcctcaaatacgtatattactcttccatggatgccccttgataacagatcattcccgagaagtgttggagcaattagtaggcccaaacaaactaaagcaagtgacatggactgtttattgatgcttttttgaagatgatcaatgctaggaaagcttatcaaaactactttcccaggaaaccatctatagagatttgcattctacttaatgttaacactatttttaattattttattgtcttaagttataactctcagagaattagctaagtcttggtatatacatggtttgtgctttactcttaaacatctttaaagtgctattattctatatctgttggatgagtcattatttttgaaatgataatcctagcatgaactctgatctatggtgttggattctgtttcttaaataactttaaaattaactgttttcccttgagatttccttctcctatgtaggtatttgagctattgttctaagtttacctgtaagtataaaccttgggagaatctaagtaaacatatttctaaaagcatagttaccttcctattttctggctcttaccttcttggagtatttaaatgcccatttgccaaaagcagacctgaacatcaagcctgttaattcttcaaagaatttaggtatttgtttcaccgaaatgaagtgacttattagccattcagcgtattagtattacagaggctcttgcccagccacatccattcattgatttttatggctactcttcccagttacattttatgcatctgtaagctttccttccttagcaaaattgcattcaaaaatgtgtaaaaatgagtaaatacagaatatcactacagagacttgtatcctcaggtttattgatttcacattgtgaaataaacagcaaaggtcttagttttcaagtgaaaactttttggtaatcacaaaattacctgacacataccacgcttaaaccaacccccaaatttagcatattcattttgccatgagccagtcttgagattttcttaaaagatttcttattttgcctctgatgtagtgaaaaacggggtaagtatgctaactttcttgtatatgttggggggtacttattcaactccatttcttgtccttacaagatttataaatgtggtatgtttatagtgtggatatatatgttgccactgcaaaggtggtgcatatgtatatatgtgcaaaatgggtaaggcctgttctaactatgaaatttttctaaagacaaattcaataaaatttaatactgaatatttaaccaa

SEQ ID NO: 44523 - DNA, 378 bp, Homo Sapiens
atgcctgagcctgcaaagttcgcgccggctcccaagaagggctccaagaaagccgtcaccaaagcccagaagaaagacggcaagaagcgcaagcgcagccgcaaggagagctactccatctacgtgtacaaggtgctgaagcgggtccaccccgacaccggcatctggtgcaaggccatgggcatcatgaactccttcctcaacgacatcttcgagcgcatcgcgggagaggcgtcccgcctggcgcactacaacaagcgctccaccatcacgtcccggatccagacggccgtgcgcctgctgctgcccggcgagctggccaagcacgccgtgtccgagggcaccaaggcggtcaccaagtacgccagctccaagtga

SEQ ID NO: 44524 - DNA, 1502 bp, Homo Sapiens
caagatggcggcaggaggcagtggcgttggtgggaagcacagctcgaaaagcgataacgattctggtttcctggggctgcggcccatttcggcggacccagcgctgaggcggcggcggcggcgaggcccaagaaataagaagtgggactggcggaggcttgcgcaggagccgctggggctggaggttgaccagttcctggaagacgtgcggctacaggggcgcatgagcggtggcttgttgagagaggccccaaatgaaaaactcttcttcgtggacaccggctccaaggaaaaagggctaagaagagaaccaaagtccagaagaagtcactgcttctcaagaaaccccttcgggttgacctcatcctcgagacacatccaaagtccctgcccccaaagacgtcctcgcccaccaggtcccgaacgccaagaagctcaggcggaaggagcagctatgggagaatctggccaagcagggcgagctgccccgggaggtgcgcagggcccaggcccggctcctcaaccctcccacagccggggccaagcccgggccccaggacaccgtggagcggcccttctacgaactctgggcatcagacaaccccctggactggccattgtttggccaggatgagtttttcctggagcagaccaagaagaaaggagtgaagcggccaccacgcctgcacaccaagccgtcccaggcacccgccgtggaggtggcgcctgccggagcttcctacaacccgtactttgaagaccaccagaccctgctctcagcggcccacgaggtggagttgcagcggcagaaggaggcggagaagctggagcggcagctggccctgcccgccacagagcaggccgccacccaggagtccacgttccaggtagccgtgcgaggggctgctggaggagtcagagggtccgggggagccaggccagggcgaggggccggaggctggggatgccgaggtctgtcccacgcccacccgccgccacagagaaggagacggagcagcagcggcgagaaggctgcgcgcaggctgcgggtacagcaggccgcgttgcggactgccaggctccggccccggcaccgggaggtgttcctgctgcgcgggatcaccaggtggccctgaggctggcggagcgcggcggcggaggcagcggcaggcacggcggaaggccgaggctgacaagccccgaaggctggggcggctcaagtaccaggcacctgacatcgacgtgcagctgagctcggagctggcagactcgctcaggaccctgaagcccgagggcgacatccttcgaggccggttcaagagcttccagaggaggaatatgatccagcctcgacagagagccaagttcaaacccaggtacaaggtgaagctgggggagaagcgggcgttccgcgagatccagttgtagctcccatcagaggccggagcctcgcctttcaataaaaagtcccttctagctaaaaaaaaaaaaaaaaaaaaaga

SEQ ID NO: 44525 - DNA, 3474 bp, Homo Sapiens
atgaggaagaggatgatgatggctgtgaccttttcgctgactctgagaaggaggaggaagatattgaggacattgaagaaaatactagacctaaaagaagcagacctacatcgtttgcagatgagctggctgcccgcatcaagggggatgccgtgggtcgagtggacgaggagccgacaaccttaccctcaggagaagcaaaacctcggaagacactcaaagagaagaaggaaaggagaactccttcagacgatgaagaggataacttattcacaccccccactgaccgacgaggacttctcgccatttggctctggaggtggcctgttcagtgggggcaaggggctatttgatgatgaggacgaggagagtgacctcttcacggaagccccccaggatcggcaagctggagcctctgttaaggaggagtcttcatcatccaaacctggaaagaaaatcccagcaggagctgtttctgtatttttaggagacacggatgtgtttggtgctgcctccgttccatcaatgaaggagccacagaagcctgagcagcccactccaaggaaaagcccctatggtccccctcccactggcctctttgatgatgatgatggtgatgatgatgacgactttttctcggcaccccacagcaaaccttctaaaacaggcaaagtccaatccactgccgatatctttggtgacgaagaaggagatctgttcaaagaaaaagccgtagcatcgccagaagccactgtgagtcagacagatgaaaataaagcaagagcagaaaaaaaggttaccttatcttccagcaaaaatctcaagccctcatcagaaacaaagactcaaaaaggcttattttcagatgaggaggactctgaggatttgttttcttctcaaagtgcgagtaagttaaaaggtgcatctctgctgcctggcaagctccccacgtcggtttccctgtttgatgatgaagatgaagaggataatctttttgggggtacagctgctaagaagcagacattgtgtctacaagctcagagagaagagaaagcaaaagcctccgagctctccaaaaagaaagcatctgccctgttgttcagcagtgatgaggaggaccagtggaatattcctgcttcacagacccacttagcatctgacagcaggtctaaaggagaacccagggattctgggaccctccagagccaggaggccaaggctgtgaaaaagaccagtctctttgaggaagacgaagaagatgatctttttgccattgccaaggacagccaaaagaagacccagagagtgtcactcctctttgaagacgatgttgatagccgaggctctctgtttggctctcctcccacatctgttcctcctgcaacaaagaaaaaagagactgtctctgaggcaccacctttgctgttcagcgatgaagaagagaaggaggcacaacttggagtgaagtctgtggataagaaggttgagagtgccaaggagtcattaaaatttgggagaactgatgtggctgagtcagaaaaggaaggacttttgactagatctgctcaggaaacagtcaagcattctgatttattttcttcatcatccccatgggacaaaggaaccaagcctagaaccaaaactgttcttagcttgtttgatgaggaagaggataaaatggaagatcaaaacattatccaggctccacagaaagaagtaggaaagggccgcgatcctgatgcccaccccaagagcacaggtgtcttccaggatgaagagctgcttttcagccacaagctccaaaaggacaatgacccagatgttgacctttttgctggcaccaaaaaaaccaagctgttagagccaagtgttgggagcctgtttggggatgatgaagatgatgatcttttcagctctgccaagtcccagcctttggtacaagagaaaaagagagtagtgaaaaaagaccactctgttgactctttcaaaaaccagaaacatcctgaatccattcaaggtagtaaagaaaaaggcatatggaagccagaaacacctcaggactcatcaggtctcgctccatttaaaaccaaagaaccatccactcggatcgggaagatacaagcaaatttagcgatcaacccagcggccttgctgcccacagcggcttcccagatctctgaagtaaagcctgttttgccagaattggcttttccttcatctgaacacagaaggagccacggtctggaaagtgtgcctgtccttcccgggagtggggaggccggtgtgagttttgatcttccagctcaggcagacaccttacacagtgcaaacaagagccgtgtcaagatgagagggaagcgtagaccgcagacccgtgcagctaggcggctggctgctcaggagtccagcgagactgaggacatgagcgtccccagaggacccattgcacagtgggctgatggcgccatttccccaaatggccatcggccacagctcagagcagccagtggagaagacagcactgaggaggccctggcagctgccgctgcaccttgggaaggtggtcctgtgcctggagtggacagaagcccctttgcaaagtctctgggtcattccagaggggaggctgacctttttgattctggggacatcttttccacgggcactggatctcagtctgtggagagaacaaaacccaaggcaaagatagcagagaatcctgccaacccaccagtgggtggtaaagcaaagagccccatgtttcctgctctaggtgaggccagcagtgatgatgatctctttcagtctgctaaaccaaaaccagcaaagaaaacaaatacctttcctctcctggaagatgaggatgacctctttacagatcagaaagtcaagaagaatgagacaaaatccaatagtcagcaggatgtcatattaacaacacaagatatttttgaggatgatatatttgctacggaagcaattaaaccctctcagaaaaccagagagaaggagaaaacattggaatctaatttatttgatgataacattgatatctttgctgacttaactgtaaaaccaaaagaaaagtccaaaaagaaagtggaagccaagtctatatttgatgatgatatggatgacatcttctcctctggtatccaggctaagacaaccaaaccaaaaagccgatctgcacaggccgcacctgaaccaagatttgaacacaaggtgtccaacatctttgatgatcccctgaatgcctttggaggccagtagagcacacagggtatccacaggttaccctgcagctacattgttgagttagtgatgatgttgtatatgctgatggtcttaactggattacaaaaagcaaatactagaacagctagctcatcgttcacccaatgtacttggtatttttctgcactggtttaatcatgcttaatactacaaaacaaaaataaatatttcacagtg

SEQ ID NO: 44526 - DNA, 703 bp, Homo Sapiens
gcctggggtcacagggatgccgcggctcctccgcttgtccctgctgtggcttggactcctgctggttcggttttctcgtgaactgagcgacatcagcagtgccaggaagctgtgcggcaggtacttggtgaaagaaatagaaaaactctgcggccatgccaactggagccagttccgtttcgaggaggaaacccctttctcacggttgattgcacaggcctcggagaaggtcgaagcctacagcccataccagttcgaaagcccgcaaaccgcttccccggcccggggaagaggcacaaacccagtgtctacttcttgggaagaagcagtaaacagttgggaaatgcagtcactacctgagtataaggataaaaagggatattcaccccttggtaagacaagagaattttcttcatcacataatatcaatgtatatattcatgagaatgcaaaatttcagaagaaacgtagaaacaaaattaaaaccttaagcaatttgttttgggggcatcatccccaaagaaaacgcagaggatattcagaaaagtgttgtcttacaggatgtacaaaagaagaacttagcattgcatgtcttccatatattgattttaaaaggctaaaggaaaaaagatcatcacttgtaactaagatatactaaccatcttagaattttttctaacctaataaaagcttaatacattta

SEQ ID NO: 44527 - DNA, 1350 bp, Homo Sapiens
tgccaggcgccatgttggagggctggtggtagcggcttggggaggtgctcactctgtcggtctcactctctcacacgcttcccctggctcccttcgttcccccccaccccacttggcctgcgtgctggagggtgtgcgagggagtgggaggacgtcgggggggggggaggcgttccggtccccaagagacccgcggagggaggcggaggctgtgagggactccgggaagccatggacgtcgacaggctccaggaggcactggaagattttgagaagaggaaaaagaaagtctgtcctgtcctggatcagctcctttgtcatgtagccaagactggagaaacaattccgtggtcccaatttaaaggctattttattttcaaactggagaaagtgatggatgatttcagaacttcagctcctgtgccaagaggtcctcccaaccctaatgtcgaatatattccctttgatgcaacaaagggaagaatactgaaaactgtcactggatttaaccgtatcccttttactattcagcgactagaattgttaacagatccaaggagaaactatacaggaacagacaaatttctcagaggagtagaaaagaacgtgatggttgttagctgtgtttatccttcttcagagaaaaacaattccaatagtttaaatcgaatgaatggtgtgatgtttcctggaaatgcaccaagctatactgagaggtctaatataaatgggcctgggacacccaggccacgtaatcgaccaaaggtttctctgtcagcccccatgacaacaaatgggtggcctgatagcacagacagcaaagaggcaaatttgcagcaaaatgaagagaaaactcacagtgactcttcgacatctgaatcagaagtttcctcagtgagccctttgagaaataaacatccagatgaagatgctgtggaagctgaggggcatgaggtaaaaagactcaggtttgacaaaggcgaagtcggagaaatagccagtcaagcgacttgcagcgaaatttcttcagttgtggtagaagaaacagaagcatcaccttcatcccatgataaagacaaagaaagccgtgaattcatgaaacttaactgtggaggtattttgaaaataaaatttaagtacaacaacatttgcttagttttagagtcttttatgacatcaagagaaatgatcccagaaagaaataaacaagaaaaagaatctgatgatgcctcaactgtgaatgaagagacttctgaggaaaataatgaaatggaggaatctgatgtgtctcaagctgagaaagatttactacattctgaaggtagtgaaaacgaaggccctgaaagtagt

SEQ ID NO: 44528 - DNA, 2582 bp, Homo Sapiens
gcaggccctggactccccgacctgtcctgtgctctggtcctccagcccagcctccgagactgcctgtcagggctgcggatcgaggagcgggccttcagctacgtgctcacccatgccctgcccggtgaccctggtcacatcctcaccaccctggaccactggagcagccgctgcgagtacttgagccacatggggcctgtcaaaggtcagatcctgatgcggctggtggaggagcccctgcttgtgtgctggaattgggaacctactgtggatactctaccctgcttattgcccgagccctgccccctgggggtcgccttcttactgtggagcgggacccacgcacggcagcagtggctgaaaaactcatccgcctggccggctttgatgagcacatggtggagctcatcgtgggcagctcagaggacgtgatcccgtgcctacgcacccagtatcagctgagtcgggcagacctggtgctcctggcacaccggccacgatgttacctgagggacctgcagctgctggaggcccatgccctactgccagcaggtgccaccgtgctggctgaccatgtgctcttccctggtgcaccccgcttcttgcagtatgctaagagctgtggccgctaccgctgccgcctccaccacactggccttccagacttccctgccatcaaggatggaatagctcagctcacctatgctggaccaggctgaggtccaggcccaggggtacttactgatgcccacccccacccccacccaagcagggacctcaaaatcccctccctttcctgtttggggccttgacacacgctgggctcagggctagggagtctctcttcccacctctgacctctttcagcctctacactgacctcaagtgtcaagttctatcaggctgcttggtctcactaggccccctctttccagagagaaccatggactgacagcaagaagcctgagctcccgacccagctctgtcactgatttgctgagtgactccaagggaatccccaccttgctctgagatttaatcttctctcttaacacgaaggaagctggatgggagagctccaggggcctcccagttctcggcctcagaaagcctcccatcctcagcccatgccattctgggtgggatcagaggaagtggcaatgagttagacgccctgcaggaatagctggatgcaagctgggccagagaaaatggcacagaaccctggacccagggccagggatgccctggccttccctaactctggcccacctagccaattaggtgtggctgatgtcccttgagtgccctcttcctaaagcccaaaagaagatgctggactcctctgggccccaccaacaaatagggaatagacatgggtggaaaatcactcctttgtctttattaaagaaacttagaccagacctggcaatcaaggggtgaggtactggccaggaaggtggagtaggtttcaggccctggggatttcaagtgcagactgatggcctgggaggggccaaagagaccagatcctggcagcagctgaggaggtgcccaagggcactttcaggcactggggccatcagctggttctgtgggcaggggttgggggttgggatgcagggtagtttgggctggcctggaatctccctgaggccaccctgccttgtctacctagatcatccactggtcctgatcctgttcgttgccttccatgtccacctggagaggaggctgggtgtgggtggggaggggcctcagccagcctcagccccagatcctgcccctggctggatccagggtttctgtaccccttggccatcaactgggtcaggagcaagggtccaggaacagaggccctcccccataccccttgcctacctcattgacctctccatcatccggtgactcattgtagtcattcatctcgtccatgtcctgcatatcctcatcatcctctgagtcctcttcactatcctcatcatcttcatcatcctcttcttcctcgtcatcatagtgctggtgggcaggacagagcctgtaagccctacaggcctgcatggaccagttcaagaactgacccacttgagcctctctctagggccaatgaatgaccccctaccccgacactccctccttgagtctagcaggctggtgcatgttctgcaggaccttaatgctaggcccaatgcccaccccttctatctccccttttaggcttttacccagatctgagaaccacaactgctctgggtcagagacaggacattcagaattagagcagagcctcggtccactgcggcccccacacaggccccacctgctagagccactcacctctgaggctggcttgccaataggaaccaggttgttgtctttctccgcgatgctttggagctgtgggcaaaggcacagaggaacaaggccagagcccaagtagggcaggtcaggggcatgggactggcccattctgcccagaagacaacccacacgtgttggggagaagcttcctcccagttctcagggagatacaatccctttcttgtcatctgccatttatgaacttgatccaaatacttaaa

SEQ ID NO: 44529 - DNA, 4071 bp, Homo Sapiens
ccggagctcggggaggcgaggcgggagccctgagctgaggccgggcagcgcggacccgcgcaggaggaggcggcggggacaccggcgagtccccagcagggcccctgggctcccggaagggtctccagccacctgcccttcccgagaagagagagctctgggccttcttcctgccagtctggtcttcgagtgcgttcaggacagatagaccttggcacaggctgccccgagattcctgcgacgctgtctgttcctgccttctgtggagcatggcacccacaggcttccaggacggatcatagacccgagcctccaggagggcgccctgtgcggctcactgcgcggtccctctcagctcccctgccacccagcctctgaggccggctcctgtcccggaaatgccctcgggcacctggatgaggccatcccagagcgggacccaactgtgccacccaccaagcctccccctgcgccccccgtgccctcgcatgtccggctgccagggcagactgtagaatgtctgtgccccagatccacgtggaagaagtgggtgcagaagagggggcgggagcagccgcaccacccgatgaccacctccggagcctgaaggccctcaccgagaaactgaggctggagacccgcaggccctcctacctggaatggcaggccaggctggaggagcatacctggcccttcccgaggccggctgcggagccacaggcgagcttggaggagggggagcgtggggggcaggagcccttgctccccctgagagaggctgggcagcaccccccttctgccaggagtgccagccaaggtgccagacccctgtccactggcaagctggaaggctttcagagcatcgatgaagctatagcctggctcaggaaggaactgacggagatgcggctgcaggaccagcaactggccagacagctcatgcgcctgcgtggcgacatcaacaagctgaaaatcgaacacacctgccgcctccacaggaggatgctcaacgatgccacctacgagctggaggagcgggatgagctggccgacctcttctgtgactcccctcttgcctcctccttcagcctctccacaccactcaagcttattggcgtgaccaagatgaacatcaactctcggaggttctctctctgctgaggagccctcagactgggcggaggggctggagcggagggcttgggctggaggggtgtcagaggaagctgaggccaagttactccagtgggtctcccggaggcaggggtccctgggactggcgactcaagggccccaggacctattcagtggtgctctcccacccaggggccctgggtgtggatgccagtgtctctgtgactggctcttgcttactacccaaagagctctgcagaagggccgctccaaccaagatgttaaaggagacctgggttcccaccataatccatccctccacggtcacgttcctgtttcctggaatcactggtgctatgaactgggattcccaaagggaggccccccaacaaagctgtcatttttgcagaaggctgtcccgcaagggccttgggggaaattaggcatgtcagatgtgcctgtctcacgtgctgttgctgtcctctaagtattgtctcaaattcaccctaagtacatgactcagcaacattgacagggagctactaggaagggaaaatcgaaaggcatgacaaatgggcacttggggacgcagccccagtggctggcagccagtgtctctggtgagcctgacactataaggctgtgtaaattgtaaattctggcgtgtgctgggacatgtgatgggggcactagcgtagcttgggtgcaacaagcacagatgtccccattgtctcccctggccacatgcatctccaaagagcctcttcactgccacccacaccccagggtgacagcctgggagaccactggtgactgaaccaggcaggtcctgaaagcattttccataactgaattctcctgcaggggcgtgaccggggcctcctggtggattctggtggtgtcaccttactgccctctctggaaagacaatctagggagcccagaggcccatcctgagcctcctctgagattttgtgcctgacctaaacaactagttttaataagactgttactgatgtgttgttcacttgttagtaactgatttttgtccaaatgcggaagccacttgtgtaggtcaactacagtgcgtaggatttgattttaagagtttctccctcccaacaggcttgaggatcagcaagttaagaccccagcaggttagggaggtcagtctggggtcatacggcatggcaggggtccctcggccagacccgtagaatcctgagataaggagtgtttctgacctttggtgtcatctagtcgagtcctctcattagtaaaggagcaaagtgaaacctgggggaggagaaggacttccctcaggttgcacagctgtttaggctatagaatattgatgtgtgaaaccattattgataatgcctagtagatcacatgtcaatgaacttgaaccccaaagatggtcgtgatgctttgccaaacccgcacactgccaacccctctactctccacctcagcccccacccacatctcccagagtattgcaattcagaacatttgggtcaaggtggagcaaggcactgacagtggccccacagggcatgtgtcactaatcactgtcccatggtctacgcacggcatctggctgctctgtctactgtgacttcttcctgtgtaatctcagtggggcccgtgtccacccacacatcgtgacccacataggggagaggttgcttttcttttgtgggctgagagtaggacaatgcaaatgaatgatctctagtagacagaaaagaacttggtctcttttttaaaatttcaaagagccagaagttctatgcctccttcaaagtaggcagaacaacgcagccaagatctactgtctgccatgctctgtgcaatgaagtctgcaggcctgaggaccatgtactgctgtccttcctcagagctctgcacaaacactgccaagtcctgaagacgcattcctttcctgccaacctctttccagataagcccttgaggtctcgggctgacctacacacacacacacacacacacacacacacacccccacacacacacacacgacagagaacatgccataaacatccttgaacccatgcaggaaagcccatcccatattctgaaaaaatgccaaattaggtttttctttctttttggaaatcagtcattacagtaaccgaaaccattgggttcagcgaaaatggaaagatttagctgaatgtagtcagtccaattaagttggatgcaactgagtgatttagttgcttgggtaacccagtgcttgcttgctttcttcattctctgggtggaaactaagatcaagacacatgtttggggataagttaaatgtctgagctattttgctcggtttatcctaagagaactttattatgggatgaggaggtgacccaagatgagaagtggagggggacagcgatgttttctaaacatcgtccagtgttgactggcttccttactttgcacagtgaacacaactaaccacattaattcagctttgtgaagtccctgctctctgtgggtctatgagtcagcagcaacattggcctaacctccgtcccagcctcctggctcaccacatgtgtacagtgctgtttgcagttgtactcattatccatccatctctctgccatccccaagcatcgctgggtgtaaaacgcaaactctccaccgacactgccatgcgtggtcatgtcttgatgccttcaggggctcagtagctatcaaagaggcctggagggcctgggcaggcttgacgatgcctgaccgagttcaagacccacaccctgtagcaataccaagtgctattacataatcaatggacgatttatacttttattttttatgattatttgtttctatattgctgttagaaaaagtgaaataaaaatacttcaaaagaagatatccatataaaaataaaaggagagaaaaatg

SEQ ID NO: 44530 - DNA, 1515 bp, Homo Sapiens
atgacgccgagccccctgttgctgctcctgctgccgccgctgctgctgggggccttcccgccggccgccgccgcccgaggccccccaaagatggcggacaaggtggtcccacggcaggtggcccggctgggccgcactgtgcggctgcagtgcccagtggagggggacccgccgccgctgaccatgtggaccaaggatggccgcaccatccacagcggctggagccgcttccgcgtgctgccgcaggggctgaaggtgaagcaggtggagcgggaggatgccggcgtgtacgtgtgcaaggccaccaacggcttcggcagcctgagcgtcaactacaccctcgtcgtgctggatgacattagcccagggaaggagagcctggggcccgacagctcctctgggggtcaagaggaccccgccagccagcagtgggcacgaccgcgcttcacacagccctccaagatgaggcgccgggtgatcgcacggcccgtgggtagctccgtgcggctcaagtgcgtggccagcgggcaccctcggcccgacatcacgtggatgaaggacgaccaggccttgacgcgcccagaggccgctgagcccaggaagaagaagtggacactgagcctgaagaacctgcggccggaggacagcggcaaatacacctgccgcgtgtcgaaccgcgcgggcgccatcaacgccacctacaaggtggatgtgatccagcggacccgttccaagcccgtgctcacaggcacgcaccccgtgaacacgacggtggacttcggggggaccacgtccttccagtgcaaggtgcgcagcgacgtgaagccggtgatccagtggctgaagcgcgtggagtacggcgccgagggccgccacaactccaccatcgatgtgggcggccagaagtttgtggtgctgcccacgggtgacgtgtggtcgcggcccgacggctcctacctcaataagctgctcatcacccgtgcccgccaggacgatgcgggcatgtacatctgccttggcgccaacaccatgggctacagcttccgcagcgccttcctcaccgtgctgccagacccaaaaccgccagggccacctgtggcctcctcgtcctcggccactagcctgccgtggcccgtggtcatcggcatcccagccggcgctgtcttcatcctgggcaccctgctcctgtggctttgccaggcccagaagaagccgtgcacccccgcgcctgcccctcccctgcctgggcaccgcccgccggggacggcccgcgaccgcagcggagacaaggaccttccctcgttggccgccctcagcgctggccctggtgtggggctgtgtgaggagcatgggtctccggcagccccccagcacttactgggcccaggcccagttgctggccctaagttgtaccccaaactctacacagacatccacacacacacacacacacactctcacacacactcacacgtggagggcaaggtccaccagcacatccactatcagtgctag

SEQ ID NO: 44531 - DNA, 543 bp, Homo Sapiens
gtggcatttctggtggtgctgaccatctttgggatacaatctcatggatacgaggtttttaacatcatcagcccaagcaacaatggtggcaatgttcaggagacagtgacaattgataatgaaaaaaataccgccatcattaacatccatgcaggatcatgctcttctaccacaatttttgactataaacatggctacattgcatccagggtgctctcccgaagagcctgctttatcctgaagatggaccatcagaacatccctcctctgaacaatctccaatggtacatctatgagaaacaggctctggacaacatgttctccagcaaatacacctgggtcaagtacaaccctctggagtctctgatcaaagacgtggattggttcctgcttgggtcacccattgagaaactctgcaaacatatccctttgtataagggggaagtggttgaaaacacacataatgtcggtgctggaggctgtgcaaaggctgggctcctgggcatcttgggaatttcaatctgtgcagacattcatgtttag

SEQ ID NO: 44532 - DNA, 291 bp, Homo Sapiens
atgccgttcctggagctggacacgaatttgcccgccaaccgagtgcccgcggggctggagaaacgactctgcgccgccgctgcctccatcctgggcaaacctgcggaccgcgtgaacgtgacggtacggccgggcctggccatggcgctgagcgggtccaccgagccctgcgcgcagctgtccatctcctccatcggcgtagtgggcaccgccgaggacaaccgcagccacagcgcccacttctttgagtttctcaccaaggagctagccctgggccaggaccggtgcgta

SEQ ID NO: 44533 - DNA, 856 bp, Homo Sapiens
gcggccactatgaggactgagcttcctctccccaggacccgcatgggagagaccgcggcttcgagacacctggggacacctggggacacctggggcggcgtccgcggtgaggactgggagacgctgctgcatctccgggacaccacttggggccgaggccaaggacccacccaggaggggccatggcttcgagacacctgaggagacctggggccacgtccgcgatgaggacatctctgggacacctggggctgcatctccgggacacctggggctgaccctggtacggggaaaggaggaggaacacagagatgccctcgtgaggtcggggaccagcaggcaccgcagtctaaggccaatgaaacaggcgcccctagatgagtgctcggtgtttgttttgttttgttttcttttgagaaggagtttcgctcttgctccccaggctggagtgcgatgtcgcgatctcgactcactgcaacctctgcctcccgggttcaagcgattctcctgcctcagcctcccgagtagctggggttacagtcatgcgccatcacgcccggctaattttgtagttttagtagagacggtgtttctccatgttgatcaggctggtctcgaactcctgatctcaggtgatccacccacctcggcctcccaaagtgctggaattacaggcgtgacccactgggcccggccagtgctttgtgttttaaggctcttttgttaacgcagtggaaacaacacaggaaatggaaaagcaggcacattatcattctcaggccactgcatttagcctgggcgacagagcgagaccttgtctcaaaaaacaaaaacaaatgaaaacaaaaacaaacca

SEQ ID NO: 44534 - DNA, 2767 bp, Homo Sapiens
gggaggtaagagacggtagcacctgcggggcggcttgcacgccgagtgcctgtgacgcgccggcttgacttaactgcttccctgaagtaccttgaggttcctgatgtgcgggcggtagacggtaggcttatgcggcacgctttcgtttccaccgtggctactgcgctttgggaaggccatgacctcctcctttggggaggtccttaggatctcagcttggcagtcgagtgggtggcgaccttttaaaggaatgggacccacccggagttcttctttctcctgtctctctctctctctctctctctctctctctctttctctctctctctctctgtctctccgtctctctgtgtctgtctctgtctctctgtctctctctctgtctctctctctctctctctctctctctctctcctctctctctgtctctctctctctttccctctctctctctcttcccccccccccgcctctccctcgctcttttggtttcccccaccccctcccaagttctggggtacatgtgcaggacgtgcaggtttggaacataggtacacgtgtgccacggtgctttgctgcacctatccaccagtcgtctaggtttgaagccccgcatgcgttggctatttgtcctaatgctctctctccccttgccccccacgccccgtcagggcccggcgtgtgatgttcccctccctgtgtcccatgtgttctcgctgttcaactcccacttaggagcgagaacatgcggtgtttggttttcgcttcctgtgtcagtttgctgagaatgaggccttccagcttcatccacgttcccgcagaggtcatgaactcatccttttttatggctgcgtagtaattccatgctgtatacgtgccacactttctttatccagcctatcattcatgggcattcgagttggttccaagtctttgctattgtaaatagtgctgcagtaaacatacgtgtccacgtgtcttcctagtaggaacttcttcctcttcagcccgctgagtagctggcactttaaggcaggtgccaacgcaccggcagcaagcttccttttttgcccgggaaaaactgaggtgcaggtagtataagccattgatcacggaacgcacaggagcagagctcgagtccaagcatcgtggctccacccgtcatgctggatgcatctttaggctccgctctaggtatgtgtatcctttacgggatcagccaccggcagttgccttgcgagcacgatgacaaacctctgccggctcttttgggtctcatccctgtatctatacgttgcatcccaacataaagaccggaatgttcctttcgctgacccagtctctcaccctttccaaactccagaaatcttgtctgtcctcggaagaactccccctgcttctttctctaaaggctgtcttcaggccgggcacagtgggaggatcgcttgagcccagaaggccgcagtgaggtgagatcgcgccattgcactgcagcccccggcggcagagccggagccccgtctcgaaacaaacaaacaaaaaccaaccaaccaaccaaccaaccaacaaacaaacacagacaaagaaagaaagagcccaggcaacctagtgaaaacctgttcgggctggggcatacctgtaccccagctgttccggaggctgaggccaggaggatgggtggacgctgggaggtggatgctgcagtgagcagtgattgcaccactgcactccagcctgggtgacagagccagaccccgtcccaaataaataaacataaaaataaaggaaccagtttgtagaaagcgggagagggtcccattgaacttcaagccttcgagcaacagctgtggctggacaggttggaccagcaggctggagcagtcgccatcttggcagggatcattgaccctgatctatcgtcgggaggaggaagagctgatcttacgcagggagggcaggtggactatgtgtggactctggtgacctgtttgggtgccaggtgttactcccagggccacccgtaactgtgaatgtgcaggaaccctgacttgagaagggcctggccacggggggcttaggcccctggggaatgagagtttggttcccggtacccagggaaaccaccagcatcggcagaggtgatagctgaggaggagcggggatttggacgagagacacaggatgagtaccggggggcagccccgtgatcaacaactgctgcaagaggggccgtttgttcgactcgctagtcttctgcggctctatgcggtactaaagagcagaagacagaagatacaaaaaccacaaaaagtagccgggcgtggtgctgcccgtcaataatcccagctactcgggaggctgagacaggagaatcgcttgaacccgggaggcggaagtttcagcgagccgagatcacgccgttgcagtccaacctgagcgtccgagcgagactctatctcagaaaataaagacagaatgaaagagcccggcgcggtggcttacgcctgtaatcccagcgctttgggaggccgaggcgggcggatcgcctgaggtcaggagctcgagaccagcctggccgacatggcgaaaccccctaaaaatacaaaaattagccgggcgtggtggcctgcgcctgtaatcccagctacccaggaggctgaggcaggagaatcgctggaacccgggaggtagaggctgcagtgagccgagatcgcgccactgcactccagcctgggcgacagagcgagagtttgtctggaaaaaaaaa

SEQ ID NO: 44535 - DNA, 447 bp, Homo Sapiens
atgggagggaggcaccacctccaaaggcaggttagtgagagcatgtctgccctgttccaggcagtgcgcctggagagcgcctgggcggaccgggtccggtacatggtggtggtgtacagcagcgggcgccaggacaccgaggagaatatcttgctgggagtggacttttccagtaaggaaagtgggttcagcgtgagcacagcaggaaggatgcacatatttaagcctgtgtctgtccaggccatgtggtctgccctgcaggtgcttcacaaggcctgcgaagtggcccggaggcacaactacttccccgggggtgtagctctcatctgggctacctactatgagagctgcatcagctccgagcagagctgcatcaacgagtggaacgccatgcaggacctggagtctacgcggcccgactcccccgcgctatttgtggacaagtaa

SEQ ID NO: 44536 - DNA, 3010 bp, Homo Sapiens
gccattctctcacatcccgtgcggtcaggaagcccttcctgaactctgacttcagttcttgctgcggtttctgcccatttttttcatatcctctgacagctgcgaggtcatctctgctctggcttttctccaagcagaacaagtgggggctctggaaaggttaagggacctcagtggccaccattatactttgcatctttcctgagaagtgagagttgaaagggaagcaggaaggcccatggtcagattgaaggaaggactttttagtttcttttttttttttttttttttttgagatggagtctcgctctgtcattcaggctggagtgcagtggtgcgatctcagctcactgcagcctccacttcctgggttcacatgattctcctgcctcagcctcccaagtagctgagactacaggcacatgccactacacccagctatcttttgtatttttagtagagacggggtttcaccatgttggccaggctggtctcaaactgctaacatcaagtgatctgctcccctcagcctcccaaagtgctgggattaccggtatgaaccaccacaacctgccaggaatttttagtttttagcttttgcaggagacttcaaggaaaggagacattcctctgtccaggaaacgggtaaggggaccatttctgcattgctggtttcccctcttggcagggtgggcatgaggcatcactgttcctgctccctcactcctgctcctcatgctcagcctgccagctcggcctcaactttgtgtgtctaaagtggaactgaatagtaggctgtgagaagataggaaagaggtagtgccaatctccttgcccagatcataaatccagactcagcagggtaaccacatgggcaagcacaaggtaggtgcttggggaaaggggaagtaattggcattctgtgtgataccaaggagaccatttggattttggcttctaccaaagagaatggagaattggttgacctaaatggaaccagtccctttaagtaaggggaggaaagggggtgctggaagatggccctcttcccaccacctagatcatagcttgaactgaagccaaggacagagtgctgcccccttcggcatttactgatgtgccctctttaaatcatgatgttatctaacccaaacccagacccaggacctagtcacagctccaacctacacttcctattaatcttaaaacaaagcaaaacaaaacaaaaagatatcagcattgtagcctccaatctgagcccatttcccttctctggctaccatacctccttctcctatatgataccattcactactttgttcaattatccagtctagacctgcatcttgaggccacacccagccttctcactccccacacccctctttcctctctcactgctccttcctggtctcttctcatctggccccacctctaaggagtcctcctgccttctgggttgccctggaaaacagactatcccccctcctagtgaagggagtgggtaggggtttcagccccaccctcaggaagatgcgtcttccctgtcctctgctctgtggtacttcctctctggctgatttagcaaacagcacctagacctggggccaggcctttggcagtgggacagatccagggataggctacaccaccctgccctgaccctgggattggcatcagcttccaaccagttcctgccaaagcttgtaagtcctcccgacggccatgaacactacatcttctgcagcacccccctcactaggtgtagagttcatctctctgctggctatcatcctgctgtcagtggcgctggctgtggggcttcccggcaacagctttgtggtgtggagtatcctgaaaaggatgcagaagcgctctgtcactgccctgatggtgctgaacctggccctggccgacctggccgtattgctcactgctccctttttccttcacttcctggcccaaggcacctggagttttggactggctggttgccgcctgtgtcactatgtctgcggagtcagcatgtacgccagcgtcctgcttatcacggccatgagtctagaccgctcactggcggtggcccgcccctttgtgtcccagaagctacgcaccaaggcgatggcccggcgggtgctggcaggcatctgggtgttgtcctttctgctggccacacccgtcctcgcgtaccgcacagtagtgccctggaaaacgaacatgagcctgtgcttcccgcggtaccccagcgaagggcaccgggccttccatctaatcttcgaggctgtcacgggcttcctgctgcccttcctggctgtggtggccagctactcggacatagggcgtcggctacaggcccggcgcttccgccgcagccgccgcaccggccgcctggtggtgctcatcatcctgaccttcgccgccttctggctgccctaccacgtggtgaacctggctgaggcgggccgcgcgctggccggccaggccgccgggttagggctcgtggggaagcggctgagcctggcccgcaacgtgctcatcgcactcgccttcctgagcagcagcgtgaaccccgtgctgtacgcgtgcgccggcggcggcctgctgcgctcggcgggcgtgggcttcgtcgccaagctgctggagggcacgggctccgaggcgtccagcacgcgccgcgggggcagcctgggccagaccgctaggagcggccccgccgctctggagcccggcccttccgagagcctcactgcctccagccctctcaagttaaacgaactgaactaggcctggtggaaggaggcgcactttcctcctggcagaatgctagctctgagccagttcagtacctggaggaggagcaggggcgtggagggcgtggagggcgtgggagcgtgggaggcgggagtggagtggaagaagagggagaggtggagcaaagtgagggccgagtgagagcgtgctccagcctggctcccacaggcagctttaaccattaaaactgaagtctgaa

SEQ ID NO: 44537 - DNA, 708 bp, Homo Sapiens
atgtctgacccccacagcagtcctctcctgccagagccactttccagcagatacaaactctacgaggcagagtttaccagcccgagctggccctcgacatccccggatactcacccagctctgcccctcctggaaatgcctgaagaaaaggatctccggtcttccaatgaagacagtcacattgtgaagatcgaaaagctcaatgaaaggagtaaaaggaaagacgacggggtggcccatcgggactcagcaggccaaaggtgcatctgcctctccaaagcagtgggctacctcacgggcgacatgaaggagtacaggatctggctgaaagacaagcaccttgccctccagttcatagactgggtcctgagagggaccgctcaggtgatgttcatcaacaatcctctcagcggcctcatcatcttcatagggctgctgatccagaatccctggtggacaatcactgggggcctggggacagtggtctcgaccttaacagctctcgccttgggccaagacaggtctgccattgcctcaggactccatgggtacaacgggatgctggtgggactgctgatggccgtgttctcggagaagttagactactactggtggcttctgtttcctgtgaccttcacagccatgtcctggatggagacggattttaactggagtaagagtggatgctggaagcatctgctacaataa

SEQ ID NO: 44538 - DNA, 1305 bp, Homo Sapiens
gctgcagccctcagaagtaagcaaggtttcctgccgggagaaaaggatttgaagcattccagccaaaatgacggacagaagccccttcgaaaccgacatgctcaccctgacccgctacgttatggaaaaggggcgtcaggccaaagggactggggagctcacccagctgctgaactcaatgctgacggccatcaaagccatctcctcggctgtgcgcaaggccggtctggcccacctgtatggaatcgcaggaagcgttaacgtgacgggagatgaggtgaagaaactggatgtgctatccaattccctggtgatcaacatggtccaatcctcctatagtacctgcgtcctggtctcagaagagaataaggacgccatcatcaccgccaaggagaagcgggggaaatacgtggtctgctttgacccactggatggatcttccaatattgactgcctggcctccatcggaaccatctttgccatctatagaaagacctcagaggatgagccttctgaaaaggatgccctgcagtgtggccgcaatattgtggccgcaggttatgcgctgtacggtagtgcaaccctggtggctctctccacagggcaaggcgtggacctcttcatgcttgacccggctcttggtgaatttgtcctggtggaaaaagatgtcaagattaagaagaaaggaaagatttacagcctgaatgagggctatgccaagtattttgatgcggccaccactgaatatgtgcagaaaaagaaattccctgaggatggcagtgctccctatggggccaggtatgtgggctccatggtggctgacgtgcaccgcaccctggtctatggaggaatcttcctgtacccagccaaccagaagagccctaagggcaagctccggctcctgtatgaatgcaatcccgtggcctacatcattgagcaggcaggaggcttggcgaccacggggacccagcctgtactggacgtgaagcccgaggcaattcaccagcgagtccccctcattctggggtcaccagaggatgtgcaggaatatctcacctgtgtgcagaaaaatcaggcaggcagctagcgagtttgaccccacatgccctcttctgtttgtcttgcaccttgtctaaggaccctaaatgaacgataaacagagatggtagctatgagtatacaaaaggtaaatccacttaatcacatacagaagagcaacaacaaactgcttacgacaggtttggaagccacaggcgattctatggtcaatgtgaaggactagaaataaaaacccacatgtggaaa

SEQ ID NO: 44539 - DNA, 1676 bp, Homo Sapiens
tgaggctacagcagactcctcctatctcatagaaaagaggcctcagcttcccagcctccagcaaagggaattttctaggtcccagtccccctgctttgattttaaccctctctgtgtctctctcctctgacttctacttccttgctctccatctaattccccctcctcctcgagctctttgaagttgagggagtctatactgccaggcactatccttgctcttctaatttcttaattcatttcaccttcctcctagccccatggggcaggcattgttattatcatccccatgttgtgtgtaaggaaatgggtcatgcaggagttaaaaacctgcctaactttcacgcagctagtaagtggcagaactgcaaattgaacagccagtccctgctccacagagatatgcaatgctacctcttgagctaaaacagaaattcagaccccactttgtagacacaatggctcagatttaggagacgaccctgcagccaaacctagacaaacatgaggtggttctgctgtcctgagcttgctgctcaccgtctctgcccacatggctctagctgggctcaggactttcctcttcacagcaggctgaacagcaaacccagaggccattgcagctgcctcggtattctacaccccccttgggtctggaagttgttggaggcaggcataccagactgtttataatatggatgctttctccttcacctagctggagccaagaggggtgggggaagactgagagagacagagacagggagagagagagagcctgcctaactgcctatttatcccaaatccatatattattttggaacattcagtattgcagaaatacatggagggataaatcatttcttctgccatctggtctcggagaaccttcccaagaactgtagcttcgtttaattttgctgcgttcctttcccaccctctttgtgctttccatcatcttttcttggctgtatttttgggtttgttttgcttcagtttcttgctcttttagctgtttctggatttcaatttttaaaaagaaataacggatcgcacttatccaagtcgtgccagattctttatttgggataatgctacctcatggctattttttaactttaatccggaaccttggagtgacgtgtggatttttttttaatgccccaaccagatgcactaagcagcttgatggtcagtaatgaggcagcaccaggaccctgtggtcctagagtttcttggcagtgccttcatggcaaatgtttcagtgagatgagcgtggcagacccagcccagccattgctctatggttccaaagtccttttaaatgaacaaatgggttggcattcatctagtgggactgcaactccagtgaggttactcaaaacatactgggcaaaggtttctcactgtttgagtgggaggttacaagggaagaagtctagagcgatccatggcatgatggatgggggttggcatcagaatgaatcatgtttagcttaattgggacacagatggttaagtatagaaatacctacagacatacatacatccctgggttactgtacacatagatcttcttgttccgtcagtttagaggtcctggaagccacaaccccccagcagcaatgagcatgcctactacccagatctcagtttctaataccattctccaaaaa

SEQ ID NO: 44540 - DNA, 2630 bp, Homo Sapiens
ccattggccaatgagaagaccacactatccccagcagagcctacagaaaatggagaaaggaccccatttaccaatgagaagaccacaccatcctcagcagagcctacagaacatggagaaaggaccccactggccaatgagatcaccacaccatcccgagcagagcctacagaacatggagaaaggatagccaatgagaaggccacaccatccccagcaaagcctacagaacatggagaaacgacagtcaatgaggacaccacaccatcctcagcagagcctacagaaaatggagaaaggaccccactggccaatgagaacaccacaacatccccaacagagtctacagaacatggagaaaggacagccaatgagaagaccacaccatccccagcagagcctacagaacatggagaaaggacaccatcagccaatgagaagaccataccatctccagcaaagcctacagaacacgaagaaatgaccccatcggccaatgagaacaccacaccatccccagtaaagcctacagaacatggagaaaagactacattggccaatgagaagatcacactatccccagaagggcctacagaacatggagcaaaaactacgtcggccaatgagaagatcacaccatccctagcaaagcctacagaacatggagaaaggaccacatcacccaatgacaagatcacctcatctgcagcagagtctacagaacatagagatagggctacatcagccaatgtgatcacaccagccccagcagagcctataaaacatgcaaaaaggaccacattggcccatgagaagatgacacaagtcacagaaaagtccacagaacacccagaaaagaccacgtcaaccacagagaaaaccacaagaaccccagaaaagcctacgctatactcagagaagaccatatgcaccaaagggaaaaacacaccagtcccagaaaagcctacagaaaacctggggaacaccacactgaccactgagaccataaaagccccagtaaagtccacagaaaacccagaaaaaacagcagcagtcacaaagactataaaaccttcagtcaaggtcacaggagacaaatctctcactactacctcttctcatctaaataaaactgaagttactcatcaggtgcccactggttctttcaccctcattacatctagaacgaagctgagttctatcacatcagaagccacaggaaacgagagccatccatacctcaataaagatggctcacagaaaggtatccacgctggacagatgggagagaatgattcattccctgcatgggccatagttattgtggtcctggtggctgtgattctcctcctggtgttccttggcctgatcttcttggtctcctatatgatgcggacacgccgcacactaacccagaacacccagtacaatgatgcagaggatgagggtggccccaattcctacccggtctacctgatggagcagcagaatcttggcatgggccagatcccttccccacggtgatcttggagtaggcgcccagccctggctcttccatgctctgcccctttcctggatgaggaaccggactcacaatttctatttccgggactacaggaagggcagagaatactgacggttaccagtattaacccttcatctgttcttgaaactggttggggaatgaggtgataagcaaggagggtgtaagtttaggggacaaagaagaaagaatgaataatacgagcagacattctctgtagaaggtaatggtctgagaatgaaaaggtgtttgatggacatgttgtgggggcaccaatgcagaacactgcactgagtcctaaaggaaggacaggagccttataggcaatgccccagactgacttgtgagtggggtttatggggaaagggagggactgagggcagagtctctgggtttcaggacagcattatgttatttccattcactattacttaagagtttgtgtgtaaacaggctcatctctgagttctcaggacccttgcccccacccccatttttttaatgaaaaaaaaaaacaaaaaaaacggatccaagaagaaaagagaatttatttccttctccactctctccatgccctggagaaaaaaaagtccagaagaaatcataaatatctctcatctacatggttgcttcctcttcctcccaaatcccttagttttcctaaatgtctacagtggacgccctgttggtttggcttgctgggttgtgggtggacacgcaaggaggggatttttatttggccagcagtctcacccactgatctccaccccagaccttccctgattggtgtctcagcatttattttcctgtctcttccaccaaaagccagctgtagctttatctcgtaaaagttacccatcttctctactgtccccattctctctcctcccaccttcaccccagattcaagttttcctccttgtaggcatttcatctgtgtgtgttttctggattttctctctctcttcttatggccatttcaccttattactgattgggtagagggggaaaaggagaatgatgatgatagtttccttctgtctattgaccttttttataataaagtataacatgtttataaagggca

SEQ ID NO: 44541 - DNA, 354 bp, Homo Sapiens
gaagagctaaacaaggccaagttcatctggaccagaaaccctcatgatgtcacccaggagaaatatggagaattttacaagagtctcaccaataactgggaagaccacttggcagtcaagcatttctctgtagaaggtcagttggaatttagagcattgctactcatccctcaacgggctccctttgacctctttgagaacaagaagaaaaagaacaacatcaagcatcgtgtgttcatcatggacagctgtgatgagttgacacaagagtttctcaattttattcatggtttggttgactctcagtatctgcccctcaacatctctcgagaaatgcttaagcagagcaaaatc

SEQ ID NO: 44542 - DNA, 772 bp, Homo Sapiens
gggtcgaggctgcgccgcgtggagtggcttggcttaacagcagggagggcagagcgatgctctttgacctcccagaagagtcacgtgggctgacccagagccggggcggaaaggctgcgtttgtttcttccgggtcattgacagaagcgtcaattcctgggagtagttcgttggttttctttcccctcatccttttgcctgctcccggcgaggggtggctttgatttcggcgatgagctcccagaaaggcaacgtggctcgttccagacctcagaagcaccagaatacgtttagcttcaaaaatgacaagttcgataaaagtgtgcagaccaagaaaattaatgcaaaacttcatgatggagtatgtcagcgctgtaaagaagttcttgagtggcgtgtaaaatacagcaaatacaaaccattatcaaaacctaaaaagtgtgttaaatgtttacaaaagacagtgaaggattcttatcacataatgtgcaggccatgtgcctgtgaacttgaagtttgcgcaaaatgtggaaagaaagaagacattgttattccatggagtctccctctgttgcccaggctggagtgcagtggcaggatcttggctcaccacaacctccgcctcccttgttcaagtgattctcctgcctcagcctctcgagtagctgggactacaggcgcacaccaccatgcccagctaatctttgtatttttagtagagatggggtttcactatgttggccaggccggtctcgaactcctgacctcatga

SEQ ID NO: 44543 - DNA, 621 bp, Homo Sapiens
atgtcggggcccgggacggccgcggtagcgctgctcccggcggtcctgctggccttgctggcgccctgggcgggccgagggggcgccgccgcacccactgcacccaacggcacgctggaggccgagctggagcgccgctgggagagcctggtggcgctctcgttggcgcgcctgccggtggcagcgcagcccaaggaggcggccgtccagagcggcgccggcgactacctgctgggcatcaagcggctgcggcggctctactgcaacgtgggcatcggcttccacctccaggcgctccccgacggccgcatcggcggcgcgcacgcggacacccgcgacagcctgctggagctctcgcccgtggagcggggcgtggtgagcatcttcggcgtggccagccggttcttcgtggccatgagcagcaagggcaagctctatggctcgcccttcttcaccgatgagtgcacgttcaaggagattctccttcccaacaactacaacgcctacgagtcctacaagtaccccggcatgttcatcgccctgagcaagaatgggaagaccaagaaggggaaccgagtgtcgcccaccatgaaggtcacccacttcctccccaggctgtga

SEQ ID NO: 44544 - DNA, 1182 bp, Homo Sapiens
atggaccatcctagtagggaaaaggatgaaagacaacggacaactaaacccatggcacaaaggagtgcacactgctctcgaccatctggctcctcatcgtcctctggggttcttatggtgggacccaacttcagggttggcaagaagataggatgtgggaacttcggagagctcagattaggtaaaaatctctacaccaatgaatatgtagcaatcaaactggaaccaataaaatcacgtgctccacagcttcatttagagtacagattttataaacagcttggcagtgcaggtgaaggtctcccacaggtgtattactttggaccatgtgggaaatataatgccatggtgctggagctccttggccctagcttggaggacttgtttgacctctgtgaccgaacatttactttgaagacggtgttaatgatagccatccagctgctttctcgaatggaatacgtgcactcaaagaacctcatttaccgagatgtcaagccagagaacttcctgattggtcgacaaggcaataagaaagagcatgttatacacattatagactttggactggccaaggaatacattgaccccgaaaccaaaaaacacataccttatagggaacacaaaagtttaactggaactgcaagatatatgtctatcaacacgcatcttggcaaagagcaaagccggagagatgatttggaagccctaggccatatgttcatgtatttccttcgaggcagcctcccctggcaaggactcaaggctgacacattaaaagagagatatcaaaaaattggtgacaccaaaaggaatactcccattgaagctctctgtgagaactttccagaggagatggcaacctaccttcgatatgtcaggcgactggacttctttgaaaaacctgattatgagtatttacggaccctcttcacagacctctttgaaaagaaaggctacacctttgactatgcctatgattgggttgggagacctattcctactccagtagggtcagttcacgtagattctggtgcatctgcaataactcgagaaagccacacacatagggatcggccatcacaacagcagcctcttcgaaatcagagccttaggactgttacagctgagcattatgatgttaacaactcagccatctggcacaggggaagaggcacctaa

SEQ ID NO: 44545 - DNA, 540 bp, Homo Sapiens
aacaacttcagcacagaaataaacaccacttccattttaataggacctcttgtttccaatctggaaataacccatacctcaaacctcacctgtgtaaaatttagcaatactatagacacacccaactcccaatgcatcaggtgggtaagtcatcccacacgaatagtctgcctaccctcaggaatattttttgtctgtggtacctcagcctatcgttgtttcaagggctcatcagaatctatatgcttcctctcattcttagtgccccctatgaccatctacactgaacaggatttatacaatcatgtcgtacctaagccccgcaacaaaagagtacccattcttacttttgttgtgggagcaggagggttaggcggattaggtactggcattggcggtatcacaacctctactcagttctactacaaactatctcaagaactaaatggtgacatggaatgggttgctgactccctagtcaccttgcaagatcaacttaactccctagtagcagtagttcttcaaaatcgaagagcttta

SEQ ID NO: 44546 - DNA, 577 bp, Homo Sapiens
atgaagtccagcggcctcttccccttcctggtgctgcttgccctgggaactctggcaccttgggctgtggaaggctctggaaagtccttcaaagctggagtctgtcctcctaagaaatctgcccagtgccttagatacaagaaacctgagtgccagagtgactggcagtgtccagggaagaagagatgttgtcctgacacttgtggcatcaaatgcctggatcctgttgacaccccaaacccaacaaggaggaagcctgggaagtgcccagtgacttatggccaatgtttgatgcttaacccccccaatttctgtgagatggatggccagtgcaagcgtgacttgaagtgttgcatgggcatgtgtgggaaatcctgcgtttcccctgtgaaagcttgattcctgccatatggaggaggctctggagtcctgctctgtgtggtccaggtcctttccaccctgagacttggctccaccactgatatcctcctttggggaaaggcttggcacacagcaggctttcaagaagtgccagttgatcaatgaataaataaacgagcctatttctctttgcaca

SEQ ID NO: 44547 - DNA, 337 bp, Homo Sapiens
gcatcaactgtgaaataaatctagatgaatgcctatcagagccctgtctccatgatggagtttgtatcgatggcatcaatcattatacctgtgactgcaagagtgggttttttggaacacactgtgaaacaaacgccaatgattgcctttcaaatccttgtctacatggaaggtgtcagaagtcagcacatggatttacttgcatttgcccacgtggatacactggtgcatactgtgaaaaaagcattgataattgtgctgagcctgaacttaattcagtcatctgtcttaatggagggatctgtgttgatgggcctggacatacttttgactgcag

SEQ ID NO: 44548 - DNA, 663 bp, Homo Sapiens
tccagcactggttttgaccgccaccttataattttttcacccaaggtccagctctaccaagtacaatatgcttttaaggctattaaccagggtggccttacatcagtagctgtcagaaagaaagattgtgcagtaattgtcacacacaagatagtacctgacaaattattggattccaggactcacttattcaagatgaccaaaaacactggccgtgtgatcacaggagtgacagctgacagcagatcccgggaacagagggcgcaatataaggcagctaattgcaaatacaagtatggctatttcctgtggacatgctgtgtaaaaggaattgctgatattactcgggtctatacacagaatgctgaaatgaggcctcttggttgttgtatgattttaattagtatatttgaagaactaggccctcgggtgtacaagtgtgatgctgcaggttactactgtgggtttaaagccactgcagcaggagttaaacaagccgagtcaaccagcttccttgaagtgaagaagaaatttgcctggacatttgaaacagtggcaaccgcaattacatgcctttctactgtgctatcagatctaaaatcttcagagacagaaattcgagtagttacagttgaaattcctgaattcaggattcttacatga

SEQ ID NO: 44549 - DNA, 2184 bp, Homo Sapiens
atggcccagatccaaaaggataaagcaaatatttcagagaaaagtgtaatgcatcccgagtacatagctgtaaaggcagagaaatcacccctttcccatatactaaaaacaaaggaactgcaggtgaacatcagtcaacaaggggaaaaggcacaagaaggtgaggtggaaatagttgtacttctgagcaaaacttgtccttttgtcacttcttcagctttccttgagttagactcaataaaagaagaggaaggtgaaccacgaataacaagaagctttatgccacatcttgagatccaggaatcattgccttcaaggcaaacagcacctacaaagccaacagagagccttgtaaagaaagagaaacaactccttccacagaaagaagacagagtacaaacagtatccatgcatggcctgatgcaccccaatggtgccgttttcaaggcaaagacatcagcacctccacaagtgttcagcatcactgagcacagtcctctgagtaagagaaaggagccacagtggggcatgaaagagagagcaggacagaagcaggacaggacaggacgtcctcatgtgattctgacaaaaactcatccattcatgccttctctctctcaccatagattctctccttcacaaccaaagcttcctatatcatcaggtgcaggaaaaagcagacttgcaaattcaaatgaaggtattagctcacataaagtaatactaaaagcaaaccaacaaatgccatataaagaggcaaaggacagagtaaaaatagaaggcagggaaggtagaatactccccaaaaggatacatttgagggcagaggcactcccacttgcacttctatgcaatggaaagaactactctttgcacattgaagagcaaggggaaggagtacaggaaagcaaaaaggaacctggagtggttccgaggaaatctgcttcattccctcctcctccattttacctgaattgtgacactagaaggaatgaaaaggaaggcacattaggaaaaacacaattcagttttccaccactaaagattcaggattcatcagattcaggcaaaaaagcatatactgagtcactgcatggttacacattaagcaactcaaaaggaccagtgcaacccacagcacagggagaagagaaaggtggactcagaatagatatggaagacaaaatgctccccaaatgtacagacctgaaagcaaagcaattactactctcagatatactcaataccaaaaaattgcagtggaaaagtaaagaacaaaagagaaagattcaggaagataaaaataaacaagttaaaggactgccaagcattaatacttctttacttactccaccatatcttaagtttgatacaacagaaggacaggagaacgtgataagaattgcaaaagtgtctctcccacagtcacggtccaaggaatcatcagatgcagggagaatagcatgtccagaagcaacccatggagaactttcaagtgatgtaaagcaattaaaagcacacctgctacagaaagaagagaaggatagagaaaaagttgcggatatgaccagtgtactggatcccaacaaaatgtatttgaaggcaaagaaatcgcctgtcttacatacgcacagtttcagtgatcttcagtggaaaactagagagcaagaggaggaaaaggtccagaaagttaaaagtgggccaggtgtcatgttgtctaagagtccttctagatcctccccacttcaccttaatgtgaatacagggtttcaggaggaaagcataccaatattaacaagaccctcttttcccctagtaaaactccaggtatcaccagatactgagggaggcacatgtataaggccaattgctggtgatattttaatctatctacaaaaaggaaaacatgtgtcacagaacaaggaagaggatgacgtgcaaatagtaagcatcttaatattccccaaacatcaggaagagaaggtgcaggaatgtgaaggtgaaccaggtgtggttctgaccaaatctacttcattgccatctctatctcaactagaattggataaagaaacacatttaggtaatgaaatgctaagacttaaaagacctattttgcggagaatatcacacataggggagactgtacatagagagtccgtcgttggtgatatcccaaaagatgtt

SEQ ID NO: 44550 - DNA, 1893 bp, Homo Sapiens
accagaggtttcccagagaggaaggcgtggctccctcccgggccagtgagccctggcgccgccgcggccgcggtcccagcagcggagtagggcggcggctgcgccccgcaccatggggggcagcccagccccagccgcggtaaacgccgacctccgccgccgcccgcgccgcgtctgccccctcccgctgcggctctctggacgccatcccctcctcacctcgaagccaacatgaaggagacccggggctacggaggggatgcccccttctgcacccgcctcaaccactcctacacaggcatgtgggcgcccgagcgttccgccgaggcgcggggcaacctcacgcgccctccagggtctggcgaggattgcggatcggtgtccgtggccttcccgatcaccatgctgctcactggtttcgtgggcaacgcactggccatgctgctcgtgtcgcgcagctaccggcgccgggagagcaagcgcaagaagtccttcctgctgtgcatcggctggctggcgctcaccgacctggtcgggcagcttctcaccaccccggtcgtcatcgtcgtgtacctgtccaagcagcgttgggagcacatcgacccgtcggggcggctctgcacctttttcgggctgaccatgactgttttcgggctctcctcgttgttcatcgccagcgccatggccgtcgagcgggcgctggccatcagggcgccgcactggtatgcgagccacatgaagacgcgtgccacccgcgctgtgctgctcggcgtgtggctggccgtgctcgccttcgccctgctgccggtgctgggcgtgggccagtacaccgtccagtggcccgggacgtggtgcttcatcagcaccgggcgagggggcaacgggactagctcttcgcataactggggcaaccttttcttcgcctctgcctttgccttcctggggctcttggcgctgacagtcaccttttcctgcaacctggccaccattaaggccctggtgtcccgctgccgggccaaggccacggcatctcagtccagtgcccagtggggccgcatcacgaccgagacggccattcagcttatggggatcatgtgcgtgctgtcggtctgctggtctccgctcctgataatgatgttgaaaatgatcttcaatcagacatcagttgagcactgcaagacacacacggagaagcagaaagaatgcaacttcttcttaatagctgttcgcctggcttcactgaaccagatcttggatccttgggtttacctgctgttaagaaagatccttcttcgaaagttttgccagatcaggtaccacacaaacaactatgcatccagctccacctccttaccctgccagtgttcctcaaccttgatgtggagcgaccatttggaaagataatgaaagaacggagttggacattttattgcaattcctgcttccctgaatttgcatatttcttcccacctgagaaggataattatatattttaatttggattatttcttcatttttatctttttattttaatgattgttttgtcagtaatacccatggagatcaactttattattataatccatgcctctgaatattagattggtttcttggatgggattttgaatatgcatttaagaagttgggaagaatttcacagatgatgattggaggaaaagtgatgaaaagaaagacctgtgttccaggagttttctccaacttcaaacctttacgtgaatcttaaccaaagtggacatctttacatttcatgatagcttgcttttgcaatatgagtttgaaaaatcagtataagcttatgatggtgaaaagtcaacatattgagagtgataattcaattaataggatatgaacttaacgacatataaaagcaaa

SEQ ID NO: 44551 - DNA, 546 bp, Homo Sapiens
ggtgagaagggtgaggccggcgtccgaggtcgggccggcaggagcgggaaagaggggccgccaggcgcccggggcctgcagggccgcagaggccagaaggggcaggtggggccgccgggcgccgcgtgccgacgtgcctacgccgccttctccgtgggccggcgcgagggcctgcacagctccgaccacttccaggcggtgcccttcgacacggagctggtgaacctggacggcgccttcgacctggccgcgggccgcttcctctgcacggtgcccggcgtctacttcctcagcctcaacgtgcacacctggaactacaaggagacctacctgcacatcatgctgaaccggcggcccgcggccgtgctctacgcgcagcccagcgagcgcagcgtcatgcaggcccagagcctgatgctgctgctggcggcgggcgacgccgtctgggtgcgcatgttccagcgcgaccgggacaacgccatctacggcgagcacggagacctctacatcaccttcagcggccacctggtcaagccggccgccgag

SEQ ID NO: 44552 - DNA, 1621 bp, Homo Sapiens
ggtcaagccaggggggatttgctctgccacaggctactggaaagcagctttttgcctcacagatgtccacaaaatgccttattttacaagactcattttgttcttgttttgcttgatggttctcgtggagagcagaaaacccaagaggaagcgatggacagggcaggtggaaatgcccaagccaagtcacttatataagaagaaccttgatgtgaccaagatccggaagggaaagcctcagcagcttctcagagtggacgagcacgacttcagcatgagacccgccttcggaggccctgccatcccggtgggcgtggacgtacaggtggagagcctggacagcatctccgaggtggacatggacttcactatgaccctgtacctgcggcattactggaaggatgagaggctagctttctccagcgccagcaacaagagcatgaccttcgatggccggctggtgaagaagatctgggtccctgatgtcttctttgttcactccaaaagatcgttcactcatgacaccaccactgacaacatcatgctgagggtgttcccagatggacacgtgctgtacagcatgaggattacggtcactgccatgtgcaacatggacttcagccactttcccctggactcccagacctgttctttggagctggagagctatgcctatacagatgaagatctaatgctgtactggaagaatggggatgaatccctaaaaacagatgagaagatctccttgtctcagtttctgattcagaaatttcacacaacttccaggctggccttctacagcagcactggctggtacaaccgtctgtacattaacttcacgttgcgtcgccacatcttcttcttcttgctccaaacatatttccctgccactctgatggtcatgctgtcctgggtgtccttctggatcgaccgcagagctgtgcctgccagagtttcactgggtatcacgacggtgctgaccatgaccaccatcatcacgggcgtgaatgcctccatgccgcgcgtctcctacgtcaaggccgtggacatctacctctgggtcagctttgtgttcgtgttcctctcggtgctggagtatgcggctgtcaactacctgaccaccgtgcaggagcgcaaggaacggaagctgcgggagaagttcccgtgcatgtgtggaatgcttcattcaaaaaccatgatgctggatggaagctacagtgagtctgaggccaacagcctggctgggtaccccagaagccatatcctgacagaagaagaaaggcaagacaaaatagtggtccacctgggcctgagtggtgaagccaacgctgccagaaagaaggggcttctgaagggccagacgggttttcgtatcttccagaatacccatgccattgacaaatactctaggttgatattccctgcctcctacatatttttcaacttaatttattggtcagtgttttcctaggggctccaaggctgttcctagaagagggcatagacatcgagggggcctggccagtcattgacagacggacttgttgaccacacgcccctcaccaaacaatgcagcagctactggaccaccctgagcagcactcatctctcagagaagccc

SEQ ID NO: 44553 - DNA, 1021 bp, Homo Sapiens
gcagttgggagcctgatggaggacaagtagggcctcgaggacaggtgcgtgacagaagcacaggaaaaaaaagaaaaatgaagaaataaaaacacgagttcatcagtaaagaggtaccctggcagcataaatattatgataagctaaaagctggaatcatctggaaaaataaataagactcctcatgtccttttcggtccataaccagaagggcagcaaaaggcctttgccactggaacctcttctttttctccaagtcccacgtagcaattacctgcactttcaagaagagaaacaacgactacacctaaagaaattccttcttgataggatgtttctagtggccaagatacaagcaaatgtagaaagaaaagatgttgctgactactatgaacaaatgtttcagtcagttttgaaacatcacctaggagaagcagtgacaggattgctgctcatctatcccacttccattctgcatatcctcgagtcctccagcgacactctctacaaagttcttttagattatattggccatgtcaaagatgaaacagtattttttattcaacaaatgaaaattatagtcatttctcataacattccaatgaggctttttatgcaatggcatgtttcagtgataaaagttccagttatgtatctcgacgatgtgacacagtcacagtccctaaaggaggtcatcacagattttctcacacaaactcataaactgtcactctacctttgccagactatgaaagtaggcactaaaggaccaggcgataacttacaccaagttgcacctgacctactcctcccagaacaaatcataaagtacttgtgcaaatccgaagaattcatggacccggcaacatttataaacatgtataatagacccatacacatcactctggattctgaggtggtatggcctgctccttcacgtttctaggattgagagggataatgtgcccatgtctcttaaggagtttgtgctacttaaataaaaaaaacatttttaaagtta

SEQ ID NO: 44554 - DNA, 1146 bp, Homo Sapiens
gcaggtgcccagcagagtgccaccgtggccaacccagtgcctggtgccaacccggacctgcttccccacttcctggtggagcccgaggatgtgtacatcgtcaagaacaagccagtgctgcttgtgtgcaaggccgtgcccgccacgcagatcttcttcaagtgcaacggggagtgggtgcgccaggtggaccacgtgatcgagcgcagcacagacgggagcagtgggctgcccaccatggaggtccgcattaatgtctcaaggcagcaggtcgagaaggtgttcgggctggaggaatactggtgccagtgcgtggcatggagctcctcgggcaccaccaagagtcagaaggcctacatccgcatagcctatttgcgcaagaacttcgagcaggagccgctggccaaggaggtgtccctggagcagggcatcgtgctgccctgccgtccaccggagggcatccctccagccgaggtggagtggctccggaacgaggacctggtggacccgtccctggaccccaatgtatacatcacgcgggagcacagcctggtggtgcgacaggcccgccttgctgacacggccaactacacctgcgtggccaagaacatcgtggcacgtcgccgcagcgcctccgctgctgtcatcgtctacgtggacggcagctggagcccgtggagcaagtggtcggcctgtgggctggactgcacccactggcggagccgtgagtgctctgacccagcaccccgcaacggaggggaggagtgccagggcactgacctggacacccgcaactgtaccagtgacctctgtgtacacactgcttctggccctgaggacgtggccctctatgtgggcctcatcgccgtggccgtctgcctggtcctgctgctgcttgtcctcatcctcgtttattgccggaagaaggaggggctggactcagatgtggctgactcgtccattctcacctcaggcttccagcccgtcagcatcaagcccagcaaagcagacaacccccatctgctcaccatccagccggacctcagcaccaccaccaccacctaccagggcagtctctgtccccggcaggatgggcccagccccaagttccagctcaccaatgggcacctgctcagccccctgggt

SEQ ID NO: 44555 - DNA, 603 bp, Homo Sapiens
atgaatgacatggtcctgactgtgatggcctatgaccagtttgtggccatttgtcaccccctacgctacccagtcatcatgaatccccatctctgtgtcttcttagttttggtgtcttttattcttagcctgttgaactcccagctgcacaatcagattgtgttacaattcacctgcttcaagaatgtggaaatctttaattttttctgtgagccatctcaacttctcaaccttgcctgttctgacagtgtcatcaataacatattcatgtatttagatagtgttatatttggttttcttcccatctcagggatccttttgtcttactataaaattgtctcctccattctaagaattccatcatcagatgggaagtataaagccttctccacatgtggctctcacctggcagttgtttgcttattttatggaacaggacttggagcctacctcagttcagctgcgtcctctttccccaggaagggtgcggtcacctcagtgatgtacactgtggtcatccctatgctgaaccccttcatctacagcctgagaaacagggacattaaaagtgccctgtggaggctgcacagcagaacagtctaa

SEQ ID NO: 44556 - DNA, 393 bp, Homo Sapiens
atgtctggtcgtggcaagcaaggaggcaaggcccgcgccaaggccaagtcgcgctcgtcccgcgctggccttcagttcccggtagggcgagtgcatcgcttgctgcgcaaaggcaactacgcggagcgagtgggggccggcgcgcccgtctacatggctgcggtcctcgagtatctgaccgccgagatcctggagctggcgggcaacgcggctcgggacaacaagaagacgcgcatcatccctcgtcacctccagctggccatccgcaacgacgaggaactgaacaagctgctgggcaaagtcaccatcgcccagggcggcgtcttgcctaacatccaggccgtactgctccctaagaagacggagagtcaccacaaggcaaagggcaagtga

SEQ ID NO: 44557 - DNA, 1395 bp, Homo Sapiens
aggcccatcttgacgattccaagaccacccccttgagcaagaatgccatcccctctgggtcccccatgcctgcccgtcatggacccagagaccacccttgaggagcctgagactgcccgcctccgcttccgagggttctgctaccaggaggtggcaggtccccgagaagccctggcccggctgcgtgagctgtgttgccagtggctgcagcctgaggcacactccaaggagcagatgctggagatgctggtgctggagcagttcctgggcacactgcctcccgagatccaggcctgggtgcgcggtcagcggccaggcagtcctgaggaggccgctgccctagtcgaaggactgcagcatgaccctgggcaactgttgggctggatcacagcccatgtcctgaagcaggaggtgctccctgcagcccagaagacagaggaaccacttgggagcccccacccctcagggacagtggagtcccctggggaaggtccccaggacaccagaatagaggggtctgtccagctcagctgcagtgtgaaggaggagcccaatgtcgatggacaggaagtggcaccctccagccctccacttgcagcacagtcccctgaggggaaccatggacaccaagaaccagcctccacatccttccacccacccaggattcaggaggagtgggggctgctggaccggtcacagaaggaactgtactgggatgcgatgctggagaagtacggcacagtggtctccctggggttaccgccccaccagccagaggcacaggcccagtcagagctggggatgctgctcacggggacaggcgtctgcagaagcctgcgctcgggaaatgagagtgagggtccacctggctgcccagaggcccagccgccccagggcccagggccggcagcctgggagggcttgtctggggctgccactcctgcccccactgtgcgcccagggacaccgccagtgcccactcagcccacacctgcagagacgagactggagccggctgccacccccaggaagccctacacgtgcgagcagtgtggccgcggcttcgactggaagtcagtgttcgtcatccaccaccggacacacacgagtgggccaggtgtgcagtccccggggctagccaccggggaaagcacagagaagccaccacaaggggaggtggcctttccgcaccacccccgacgctcactcacaggcccccggagttacccgtgtgaggagtgcgggtgcagcttcagctggaagtcgcagctggtcatccaccgcaagagccacacaggccagcggcgtcacttctgcagtgactgtggccgcgccttcgactggaagtcgcagctggtcatccaccgcaagggccaccggccggaggttccatga

SEQ ID NO: 44558 - DNA, 804 bp, Homo Sapiens
atgcatctcctcttatttcagctgctggtactcctgcctctaggaaagaccacacggcaccaggatggccgccagaatcagagttctctttcccccgtactcctgccaaggaatcaaagagagcttcccacaggcaaccatgaggaagctgaggagaagccagatctgtttgtcgcagtgccacaccttgtagccaccagccctgcaggggaaggccagaggcagagagagaagatgctgtccagatttggcaggttctggaagaagcctgagagagaaatgcatccatccagggactcagatagtgagcccttcccacctgggacccagtccctcatccagccgatagatggaatgaaaatggagaaatctcctcttcgggaagaagccaagaaattctggcaccacttcatgttcagaaaaactccggcttctcagggggtcatcttgcccatcaaaagccatgaagtacattgggagacctgcaggacagtgcccttcagccagactataacccacgaaggctgtgaaaaagtagttgttcagaacaacctttgctttgggaaatgcgggtctgttcattttcctggagccgcgcagcactcccatacctcctgctctcactgtttgcctgccaagttcaccacgatgcacttgccactgaactgcactgaactttcctccgtgatcaaggtggtgatgctggtggaggagtgccagtgcaaggtgaagacggagcatgaagatggacacatcctacatgctggctcccaggattcctttatcccaggagtttcagcttga

SEQ ID NO: 44559 - DNA, 2001 bp, Homo Sapiens
tgagtaagccagaatggttgatagtgggggaggatgatgacgacgctgcctttgcccctgtcttgtgtgaaacaactgcctgtgggtttcctgcagcgcagtggggagtgagaggagaaacgtcctgccgtgccacacacctcggctgctgcccggcagcggcagcagctgcgtcggcggcccacacagcagcgagaggcgagaggaggctgcctcgaggatgaagtgcaaacccaaccagacacggacctacgaccccgaggggttcaagaagcgggcggcgtgcctgtgcttccggagcgagcgcgaggacgaggtcctgttagtgagtagcagccggtacccggaccgctggatcgtgccgggcgggggcatggagcccgaggaggagccgggcggtgcggcggtccgagaggtgtacgaagaggcgggagtcaaggggaagttaggccggctcctgggcgtcttcgaacagaaccaggaccccaagcacagaacgtacgtgtatgtactgactgtcacggagctgctggaggattgggaagattcggttagcattgggaggaagcgagagtggttcaaagtcgaagatgccatcaaggttctccagtgccacaagcccgtgcacgccgaatatctggagaaactaaagctgggcggttccccaaccaatggaaactccatggccccatcctcgccagatagcgatccctagtgaatggcatagatgttgttcagatttactttgaaagaatcaagtatgtgaatggatggatgaatggaattgtgaagcacagatgagctctttcacactccaaggacacagctcatcctatgcttttggacacttcttccctgtttattacaatgactattctccaggttgttgcactaccgctgtatctgtacataattctaacttggcacctgtggccttttttgtgctcttatgtgtctgtatttcccggcagagtatacgcccttgaatgccaggaacttgtttccttagtcttttttatatatctagcatataagatattgcttagaatatggtagacatcactgaagatttgtttcagtagttcatattttgtaatgatactgaatggttaaacaatccctttctaatctgtctagcatatatgtgacttttgtttatcaagtgtcacacaactgcttcaaggcagctgtgagatactagaaagcaaaaattcttactcctatgtctgtgtcatcccagatgtgtgcctccagatggcagtatactacactatctgtaaaatatatttgcaaagccaggcacagtgttacgcgtctgcctcaggaggctgaggcagaagaatagcttgagcccaggagctttagtctagcctgagcaatataatgagactccgtctcttaaaatatttgcccaaacattgaacctaaatttgaccatgcccctagaaataattcctaatctttagaaaatagggcagagaaacattattttacaccatggagatgagatcagcagaatccagactataagaaactacaggacacatgacctagtttcttctgtaaataacttgcaaggatgaaagatggaggatgaacctatagatttaaagagacttaagagacatattaaccaattgttaattggatcttatttgaattgtgatttgaccgaactgtaaaacgaatacatttatgagacaatcggggtaatttgaacattggtggggtatttggtattagaataatggttttatcattatgttagaaagaagggtcctcatctacattctcaaacatctgtggctgatatgatatgattcttggaatttgcttcaaaataataagtctggatgttaagtgcattggaaatattgatgaaacgaaattggccttgataattgttgaagctgggtgatggctaaaatgatggttcattatatatgttcatctctatttttgtatgtttggcattttccgtaataaagtttataaaaataa

SEQ ID NO: 44560 - DNA, 2286 bp, Homo Sapiens
tctagatgtgcagaaggtgcaagccagagctcaggcagaacttccagagtgcatctgggatctgcatttgccactggttgcagatcaggcggacgaggagccgggaaggcagagccatgtggctgccccctgctctgctccttctcagcctctcaggctgtttctccatccaaggcccagagtctgtgagagccccagagcaggggtccctgacggttcaatgccactataagcaaggatgggagacctacattaagtggtggtgccgaggggtgcgctgggatacatgcaagatcctcattgaaaccagagggtcggagcaaggagagaagagtgaccgtgtgtccatcaaggacaatcagaaagaccgcacgttcactgtgaccatggaggggctcaggcgagatgacgcagatgtttactggtgtgggattgaaagaagaggacctgaccttgggactcaagtgaaagtgatcgttgacccagagggagcggcttccacaacagcaagctcacctaccaacagcaatatggcagtgttcatcggctcccacaagaggaaccactacatgctcctggtatttgtgaaggtgcccatcttgctcatcttggtcactgccatcctctggttgaaggggtctcagagggtccctgaggagccaggggaacagcctatctacatgaacttctccgaacctctgactaaagacatggccacttagagagatggatctgcagagccttcctgccctggccacgtttccagaagagactcgggctgtggaaggaacatctacgagtcctcgggatgcagtgactgagataggggccctgggcctccgccctggccttggagctggtgggcacctccctgttctgcacagctcagggacttagccaggtcctctcctgagccaccatcacctcctggggtgccagcacctgttctcttggtcaggagctgtagagatggagctcaagcactggacgactctgtccccactgctggaataactcgggcacagagcatgggaccaaagtacagaaagaggttgggggagacccccccagccctagacttccatcattccggagaccaactcaacaccgtctttgcctgagaacctgatatatccgtgtttttaaatttttttttttctagcaaagttgggttttaatgacttatgttcataggaaacctctctgatcccacacacaaggagggtgattctgggatgagttcctggttctagggcatgaggggctggatggaccctgtccccagggaggacatggctctgagtccacagggctgaggaggcaatgggaacctccctggcccggcccggtgcttgtcctccccctcccacctcttcctcctcctagctccccaagctccctgcctattcccccacctccgaggggctgcagcttgggagcctcctcagcatgacagcttgggtctcctccccaaaagagcctgtcaggcctcaagaaccacctccaggtggggagggcagtaacgaaaaccatcgcaggaaatggcaccctcccttttcggtgatgttgaaatcatgttactaatgaaaactgtcctagggaagtggttctgtctcctcacaggcttcacccacggcgatgaggcccttgaatgtggtcactttgtgctgtatggttgagggaccctcacaccaaagggaccttcccatgtgagatgtgctcccgcccccacctgcccacaagcaaacacaccacacatgttcggcatgttgccctttgaacacccatgaggacgcctccaacctgctcttggttctaatagggagtactgactgtcagcagtggataaaggagaggggaccctctggtccctagcatggcacccagagcctcccctcttcttgtccttcagccaaagagaaactttctctgactttgaactgaatttaggtctctggccaatgatgggcctgaaaattccataatggccagagaggagagttcgagcccggctaagatcccctgagtcattctgtgagggaccaagacccacagtccaccagccccagggccctacctcctggaatgctttcctggatccagcttcccgaagatccgaccagacccagggaggacggcaccgctccgcgggagggaaagccaaagcatggtgcttcaccagctggactcaggggcgaggggacatgggcgcttgtcaacgtgatgtcattcttttcccaccgtttcttcctgttgatattcaatgaatccgtcaatctctctgga

SEQ ID NO: 44561 - DNA, 2383 bp, Homo Sapiens
gctgctgcgacagtccactacctttttcgagagtgactcccgttgtcccaaggcttcccagagcgaacctgtgcggctgcaggcaccggcgcgtcgagtttccggcgtccggaaggaccgagctcttctcgcggatccagtgttccgtttccagcccccaatctcagagcggagccgacagagagcagggaaccggcatggccaaagccgcggcgatcggcatcgacctgggcaccacctactcctgcgtgggggtgttccaacacggcaaggtggagatcatcgccaacgaccagggcaaccgcaccacccccagctacgtggccttcacggacaccgagcggctcatcggggatgcggccaagaaccaggtggcgctgaacccgcagaacaccgtgtttgacgcgaagcggctgattggccgcaagttcggcgacccggtggtgcagtcggacatgaagcactggcctttccaggtgatcaacgacggagacaagcccaaggtgcaggtgagctacaagggggagaccaaggcattctaccccgaggagatctcgtccatggtgctgaccaagatgaaggagatcgccgaggcgtacctgggctacccggtgaccaacgcggtgatcaccgtgccggcctacttcaacgactcgcagcgccaggccaccaaggatgcgggtgtgatcgcggggctcaacgtgctgcggatcatcaacgagcccacggccgccgccatcgcctacggcctggacagaacgggcaagggggagcgcaacgtgctcatctttgacctgggcgggggcaccttcgacgtgtccatcctgacgatcgacgacggcatcttcgaggtgaaggccacggccggggacacccacctgggtggggaggactttgacaacaggctggtgaaccacttcgtggaggagttcaagagaaaacacaagaaggacatcagccagaacaagcgagccgtgaggcggctgcgcaccgcctgcgagagggccaagaggaccctgtcgtccagcacccaggccagcctggagatcgactccctgtttgagggcatcgacttctacacgtccatcaccagggcgaggttcgaggagctgtgctccgacctgttccgaagcaccctggagcccgtggagaaggctctgcgcgacgccaagctggacaaggcccagattcacgacctggtcctggtcgggggctccacccgcatccccaaggtgcagaagctgctgcaggacttcttcaacgggcgcgacctgaacaagagcatcaaccccgacgaggctgtggcctacggggcggcggtgcaggcggccatcctgatgggggacaagtccgagaacgtgcaggacctgctgctgctggacgtggctcccctgtcgctggggctggagacggccggaggcgtgatgactgccctgatcaagcgcaactccaccatccccaccaagcagacgcagatcttcaccacctactccgacaaccaacccggggtgctgatccaggtgtacgagggcgagagggccatgacgaaagacaacaatctgttggggcgcttcgagctgagcggcatccctccggcccccaggggcgtgccccagatcgaggtgaccttcgacatcgatgccaacggcatcctgaacgtcacggccacggacaagagcaccggcaaggccaacaagatcaccatcaccaacgacaagggccgcctgagcaaggaggagatcgagcgcatggtgcaggaggcggagaagtacaaagcggaggacgaggtgcagcgcgagagggtgtcagccaagaacgccctggagtcctacgccttcaacatgaagagcgccgtggaggatgaggggctcaagggcaagatcagcgaggcggacaagaagaaggtgctggacaagtgtcaagaggtcatctcgtggctggacgccaacaccttggccgagaaggacgagtttgagcacaagaggaaggagctggagcaggtgtgtaaccccatcatcagcggactgtaccagggtgccggtggtcccgggcctgggggcttcggggctcagggtcccaagggagggtctgggtcaggccccaccattgaggaggtagattaggggcctttccaagattgctgtttttgttttggagcttcaagactttgcatttcctagtatttctgtttgtcagttctcaatttcctgtgtttgcaatgttgaaattttttggtgaagtactgaacttgctttttttccggtttctacatgcagagatgaatttatactgccatcttacgactatttcttctttttaatacacttaactcaggccattttttaagttggttacttcaaagtaaataaactttaaaattcaa

SEQ ID NO: 44562 - DNA, 456 bp, Homo Sapiens
atgttttatgggaactctgatttaatgggaagcaaactagttcatattagcaggaattattttattttttcgagacagagtttcactctcgttggccaggctggagtgcaatggcgtgatctcggctcaccgcaacctctgcttcccgggttcaagcgattctcctgcctcagcctcccaagtagctgggattacaggcatacaccaccacacccagctaatttttttgtatttttgttagagacagggtttctccatgttggtcaggctggtctcgaactcccgacctcaggtgatccgcccacctcggcctcccaaagtgatgattttatttttatttttaattgtattaatctgcatctagataatgactttgtgaagggtgtgtgttgtgtgcaaaacttaaggtattggttgagagttaaatacattatttttataatatgttgggtatag

SEQ ID NO: 44563 - DNA, 1095 bp, Homo Sapiens
atggagcccctgttcccagcctccacgcccagctggaacgcctcctccccgggggctgcctctggaggcggtgacaacaggacgctggtggggccggcgccctcggcaggggcccgggcggtgctggtgcccgtgctgtacctgctggtgtgtgcggccgggctgggcgggaacacgctggtcatctacgtggtgctgcgcttcgccaagatgaagaccgtcaccaacatctacattctcaacctggcagtggccgacgtcctgtacatgctggggctgcctttcctggccacgcagaacgccgcgtccttctggcccttcggccccgtcctgtgccgcctggtcatgacgctggacggcgtcaaccagttcaccagtgtcttctgcctgacagtcatgagcgtggaccgctacctggcagtggtgcacccgctgagctcggcccgctggcgccgcccgcgtgtggccaagctggcgagcgccgcggcctgggtcctgtctctgtgcatgtcgctgccgctcctggtgttcgcggacgtgcaggagggcggtacctgcaacgccagctggccggagcccgtggggctgtggggcgccgtcttcatcatctacacggccgtgctgggcttcttcgcgccgctgctggtcatctgcctgtgctacctgctcatcgtggtgaaggtgagggcggcgggcgtgcgcgtgggctgcgtgcggcggcgctcggagcggaaggtgacgcgcatggtgttggtggtggtgctggtgtttgcgggatgttggctgcccttcttcaccgtcaacatcgtcaacctggccgtggcgctgccccaggagcccgcctccgccggcctctacttcttcgtggtcatcctctcctacgccaacagctgtgccaaccccgtcctctacggcttcctctctgacaacttccgccagagcttccagaaggttctgtgcctccgcaagggctctggtgccaaggacgctgacgccacggagccgcgtccagacaggatccggcagcagcaggaggccacgccacccgcgcaccgcgccgcagccaacgggcttatgcagaccagcaagctgtga

SEQ ID NO: 44564 - DNA, 438 bp, Homo Sapiens
atgttctcgaggcggcgtcttttcttctctttttcctccttccttatttgggccagttcctttaggaaaacagcaaagtcccatcccaagttagggactgagatttcacagcctctcagtctgcgctctgcaggattctccgcatttccaggcaaagccaaaaaaccaaagcaaagcacagggggccctctttctacctctcctcacccagccaaatggcagaggtgccacagaggcagaggggtggtggaagtgctgcttctgaggcaggcagtggaagtgagatgcccgtggggcaggaaggaggtgcctcgccagccccgccatccaccatccggcatcaggatgggctgctcgccaacccagcactcccactgcagaggtcgcgggtgtgaggtgcatggattctcttctaggaaccaggtaggaaccgggtag

SEQ ID NO: 44565 - DNA, 501 bp, Homo Sapiens
atgctgttgatattaagcgctgcaggagatgagagaaaggagaggccatcctgcattaggctctcaagaagcttaatggcaaaactgggacttgcccccccttttttttttggacagggttttgcgctgtcacccaagctggagaggagtggcatgattacagctcgctgcagcctcaacttcttgggctcaagcaatcctccctcctcagcttcccgaataggtgggactacaggcatgcaccaccatgcccggctaatttttgcattttttgtagaggcaaggtttcaccgtgttgtccaggctggtcttgaactcttgggctcaaacaatcctcctgcctcagcctcccaaagtgggaggccactgagcccggccctaagtcttaaagtaaccccacctctgtgctccaggtttccttggacaggaggggtggagcttctgtttttctatataaatggggctgggggcagagaacaacttttctttttattttattga

SEQ ID NO: 44566 - DNA, 825 bp, Homo Sapiens
atgatgtcagaaaaccaaaggatgataataaatatgaaaaaggatccagaactgcagtcggtcctcgctttgctgtccctgtccctgtccctgaatctggtcacggtgctgaggaacctgctcagcatcctggctgtcagctctgactcccccctccacacccccatgtacttcttcctctccaacctgtgctgggctgacatcggtctcacctcggccacggttcccaaggtgattctggatatgcagtcgcatagcagagtcatctctcatgtgggctgcctgacacagatgtctttcttggtcctttttgcatgtatagaaggcatgctcctgactgtgatggcctatggctgctttgtagccatctgtcgccctctgcactacccagtcatagtgaatcctcacctctgtgtcttcttcgttttggtgtcctttttccttaacctgttggattcccagctgcacagttggattgtgttacaattcaccatcatcaagaatgtggaaatctctaattttttctgtgacccctctcagcttctcaaccttgcctgttctgacagcgtcatcaatagcatattcatatatttcgatagtactatgtttggttttcttcccatttcagggatccttttgtcttactataaaattgtcccctccattctaaggatgtcatcgtcagatgggaagtataaagccttctccacctatggctctcacctaggagttgtttgctggttttatggaacagtcattggcatgtacctggcttcagccgtgtcaccaccccccaggaatggtgtggtggcatcagtgatgtag

SEQ ID NO: 44567 - DNA, 495 bp, Homo Sapiens
atgtggccgaagttcaaccccagcgagatcaaagtcgtatacctgaggtgcactgggggtgaagtcagtgccacgtctgcgctgggccccaagatcggccccctggacctgtctccaaaaaaggttggtgatgacattgccaaggcaacgggtgactggaagggcctgaggattacagtgaaactgaccattgagaacagacaggcccagattgaggtggtgccttctgcttctgccctgatcatcaaagcccttaaggaaccaagagacagaaagaaacagaaaaacattaaacacagtgggaatatcacttttgatgagatcgtcaacattgctccacggatgcggcaccgatctttagccagagatctcactggaaccattaaagagatcctggggactgcccagtctgtgggctgcaatgttgatggccgccaccctcatgacatcatagatgacatcaacagtggtgctgtggaatgcccagctagttaa

SEQ ID NO: 44568 - DNA, 1169 bp, Homo Sapiens
ggtcagctgcacctagaaggggccccctcctggctcaaaaatggctgcaaccacatgagccatgtgactcaggatggagggtggcactgtccacaaatcggcttctctgcagagcccactctgcaaggctgcggtgaggggctgaggctggctgcctggtgggatggcctgagatcctgctcctgctagggccagaggccaactgcctctagggttgcttggtgcctcagtaacaggtggtttgagtggatgtctcctgcaggaaccatgactagaaatgtggttagacaagaatttgaggctccagggaagccacaggattctagccagcaggatgcctgcttaatcctcgtaaaaggaaactggacaacaaacgagatggaggtaaaatgaaatcccaaaggaacgcctccaaggatcccgtcttctacctgtcaggagatgttctatttttctaacttccccaccttcagcataacaggatttagtaactgtttagaccttttgaagaacaaagacaaaaataggaagttgtgtcagaggagtgcagtcatctcttattcatggtagtgttttggttcgattttggagcatccaccaggttcgcgtacaggagaagaaacacggatgatctctgtctttattttgggggaggacaatccggccttcttgggactgttccagcccacctcccagatgcttcggtcagtctgatccacgagatatctcaggctgggaagaacacatcttgggccaacttccacagcagccatgcgtccaaggatacagaatcaggcaggccgataaaaggattttgacttgggtttcacaggaaggaggtatgccatcaaaccccactgtagtcaaggatcagaaggtgcttttagcaggaactgaagctttttagtataaggcccacttagggtgccagcaccctgacagtgtccctttaatccacttcagatctggttgactcatcatcaggtgtttccattcactttcaaaattacacagtcacaggataacagtgagatccactgctaaagggtaaagggtcagaggctgaagagtactgtgtaatgtctgcatgagatttgttttaaaaaagtctgaattggcatggtattttgaatgctgctggaactgtaataaaggttcacctttaggaa

SEQ ID NO: 44569 - DNA, 307 bp, Homo Sapiens
catgtcagacgcagccgtggacaccagctccgaaatcaccaccaaggacttaaaggagaagaaggaagttgtggaagaggcggaaaatggaagagacgcccctgctgacgaggaaaatggggagcaagaggctgacaatgaagtagatgaagaacaggaagaaggtggggaggaagaggaggaggaagaagaagaaggatggagatgaagatgaggaagctgagtcagctaccggcaagtgggcagctgaagatgatgaggatgacgatgttgataccaagaagcagaagaccgacgaggatgacta

SEQ ID NO: 44570 - DNA, 942 bp, Homo Sapiens
atggcatgggagaatcagaccttcaactccgacttcatcctccttggaatcttcaatcacagcccaccacacacgttcctcttctttctggtcctgggcatctttttagtggccttcatgggaaactctgtcatggttctcctcatctacctggacacccagctccacacccccatgtacttcctcctcagccaactgtccctcatggacctcatgctcatctgcaccaccgtacccaagatggccttcaactacctgtctggcagcaagtccatttctatggctggttgtgtcacacaaattttcttctatatatcactgtctggctctgaatgttttcttttggctgttatggcttatgaccgctatattgctatttgccaccctctaagatataccaatctcatgaatcctaaaatttgtggacttatggctaccttctcctggatcctgggctctacagatggaatcattgatgctgtagccacattttccttctccttttgtgggtctcgggaaatagcccacttcttctgtgaattcccttccctactaatcctctcatgcaatgacacatcaatatttgaagaggttattttcatctgctgtatagtaatgcttgttttccctgttgcaatcatcattgcttcctatgctcgagttattctggctgtcattcacatgggatctggagagggtcgttgcaaagctttcacgacctgttcctctcacctcatggtggtgggaatgtactatggagcagctttgttcatgtacatacggcccacatctgatcactccccaacgcaggacaagatggtgtctgtattctacaccatcctcactcccatgctgaatcccctcatctacagcctccgcaacaaggaggtgactagagcattcatgaagatcttaggaaagggcaagtctgagagtgagtta

SEQ ID NO: 44571 - DNA, 1753 bp, Homo Sapiens
gcgccagcgaccatggcggagcccacagtgtgctccttcctcaccaaggtgctgtgcgcccacggcggccgcatgttcctgaaggacctgcgcggccacgtggagctgtcggaggccaggctccgggacgtgctgcagcgcgccgggcccgagcgtttcctgctgcaggaggtggagacgcaggagggcctcggggacgcggaggccgaggcggcggccggcgcggtgggcggtggcggcacctccgcctggagggtggtggccgtgtcctctgtgcgcctctgcgcccgctaccagcgcggcgagtgccaggcctgcgaccagctgcacttctgccgccggcacatgctgggcaagtgccccaaccgggactgctggtctacctgtaccctttcccatgatatccacacacctgtcaacatgcaggtcctgaaaagccatggactttttggtctcaatgaaaaccagcttcggatcctgcttttgcagaatgacccctgtcttttaccagaggtctgtttgctctacaacaaaggggaagccctgtatggctactgcaacctcaaggataaatgcaacaagtttcatgtgtgcaaatcctttgtgaaaggagaatgcaaacttcagacctgcaaacggtcccatcagcttatccatgctgcatctttgaagctgctacaggaccaaggactgaatattccaagtgttgttaattttcagataatctccacctacaagcatatgaagctgcacaagatgcttgaaaatacagataattcatcaccttcgactgagcattcacaaggccttgagaagcaaggagtgcacgcagctggagctgcagaagctggtcctctggcttctgtccctgctcagtcggccaagaagccctgcccagtgtcttgcgagaagtaaagaagatggaaaaggagaaaatgtccttttggaagaatacatttgggcatgggtggttggggatggggtgggacattgaacaggcaaagagaggctaaaattgagtgcagatggggctagtccagggcaagtgctgaagatggcagctgctatctgcagctcctaggtgctttcctcaggctgggtagatggagctctgctgacttctgtggtccaccattgtttttctatcaatttatattgtggcaatcctagagtactttgcactcatttttttttttcacttaatattgtctcataagcatctttctatatttgttcacatcgtacataatcatgtttttgcacagatacattaatattatcatagtttgtttaactacttggctttttctaacagtttttttttttgagatggtcttgctctgttgcccaggctggagtgcagtgacgtgatctcggctcactgcagccttgacttcctgggctcaagtgatcatcccacctcagcctcctgagtagctgggactacaggtatgcaccacgaccagctaattttttgtattttttttttgtagagagggtattttgccatgttgcccaggctagtcttgaactcctgggctcaagcgatctgcctgcttcagcctcccagagtgctaggattacaggcatgagccactgcacccagcctcttaacaaattttgaatataactcctgtcttaaaatctgcagaatattgaatttttccagctattttttacttttgcttagcttatagatgctaaaggatactgtcatttgcatttttaaaaatatatgtatgagtgaatagtt

SEQ ID NO: 44572 - DNA, 975 bp, Homo Sapiens
atgggcatggagggtcttctccagaactccactaacttcgtcctcacaggcctcatcacccatcctgccttccccgggcttctctttgcaatagtcttctccatctttgtggtggctataacagccaacttggtcatgattctgctcatccacatggactcccgcctccacacacccatgtacttcttgctcagccagctctccatcatggataccatctacatctgtatcactgtccccaagatgctccaggacctcctgtccaaggacaagaccatttccttcctgggctgtgcagttcagatcttcctctacctgaccctgattggaggggaattcttcctgctgggtctcatggcctatgaccgctatgtggctgtgtgcaaccctctacggtaccctctcctcatgaaccgcagggtttgcttattcatggtggtcggctcctgggttggtggttccttggatgggttcatgctgactcctgtcactatgagtttccccttctgtagatcccgagagatcaatcactttttctgtgagatcccagccgtgctgaagttgtcttgcacagacacgtcactctatgagaccctgatgtatgcctgctgcgtgctgatgctgcttatccctctatctgtcatctctgtctcctacacgcacatcctcctgactgtccacaggatgaactctgctgagggccggcgcaaagcctttgctacgtgttcctcccacattatggtggtgagcgttttctacggggcagccttctacaccaacgtgctgccccactcctaccacactccagagaaagataaagtggtgtctgccttctacaccatcctcacccccatgctcaacccactcatctacagcttgaggaataaagatgtggctgcagctctgaggaaagtactagggagatgtggttcctcccagagcatcagggtggcgactgtgatcaggaagggctag

SEQ ID NO: 44573 - DNA, 498 bp, Homo Sapiens
gttcccaagatgattgtgaacatgcagtcgcatagcagagtcatctcttatgagggctgcctgacacggatgtctttctttgtcctttttgcatgtatggaagacatgctcctgactgtgatggcctatgactgctttgtagccatctgtcgccctctgcactacccagtcatcgtgaatcctcacctctgtgtcttcttcgtcttggtgtcctttttccttagcccgttggattcccagctgcacagttggattgtgttactattcaccatcatcaagaatgtggaaatcactaattttgtctgtgaaccctctcaacttctcaaccttgcttgttctgacagcgtcatcaataacatattcatatatttcgatagtactatgtttggttttcttcccatttcagggatccttttgtcttactataaaattgtcccctccattctaaggatgtcatcgtcagatgggaagtataaaggcttctccacctgtggctct

SEQ ID NO: 44574 - DNA, 405 bp, Homo Sapiens
atgggcgactggaaggtctacatcagtgcagtgctgcgggaccagcgcatcgacgacgtggccatcgtgggccatgcggacaacagctgcgtgtgggcttcgcggcccgggggcctgctggcggccatctcgccgcaggaggtgggcgtgctcacggggccggacaggcacaccttcctgcaggcgggcctgagcgtggggggccgccgctgctgcgtcatccgcgaccacctgctggccgagggtgacggcgtgctggacgcacgcaccaaggggctggacgcgcgcgccgtgtgcgtgggccgtgcgccgcgcgcgctcctggtgctaatgggccgacgcggcgtacatgggggcatcctcaacaagacggtgcacgaactcatacgcgggctgcgcatgcag

SEQ ID NO: 44575 - DNA, 709 bp, Homo Sapiens
ctcttgagaccgggagcccagctgcccaccctctggacattcacccagccaggtggtctcgtcacctcagaggctccgccagactcctgcccaggccaggactgaggcaagcctcaaggcacttctaggacctgcctcttctcaccaagatgaactcactggtttcttggcagctactgcttttcctctgtgccacccactttggggagccattagaaaaggtggcctctgtggggaattctagacccacaggccagcagctagaatccctgggcctcctggcccccggggagcagagcctgccgtgcaccgagaggaagccagctgctactgccaggctgagccgtcgggggacctcgctgtccccgccccccgagagctccgggagcccccagcagccgggcctgtccgccccccacagccgccagatccccgcaccccagggcgcggtgctggtgcagcgggagaaggacctgccgaactacaactggaactccttcggcctgcgcttcggcaagcgggaggcggcaccagggaaccacggcagaagcgctgggcggggctgagggcgcaggtgcggggcagtgaacttcagaccccaaaggagtcagagcatgcggggcgggggcggggggcggggacgtagggctaagggagggggcgctggagcttccaacccgaggcaataaaagaaatgttgcgtaactca

SEQ ID NO: 44576 - DNA, 1695 bp, Homo Sapiens
ggtcaggatcgcagtgaagccactttgataaagaggtttaaaggtgaaggggtccggtacaaagccaaattgatcgggattgatgaagtttccgcagctcggggagacaagttatgtcaagattccatgatgaaactcaagggcgttgttgctggcgctcgttccaaaggagaacacaaacagaaaatctttttaaccatctcctttggaggaatcaaaatctttgatgagaagacaggggcccttcagcatcatcatgctgttcatgaaatatcctacattgcaaaggacattacagatcaccgggcctttggatatgtttgtgggaaggaagggaatcacagatttgtggccataaaaacagcccaggcggctgaacctgttattctggacttgagagatctctttcaactcatttatgaattgaagcaaagagaagaattagaaaaaaaggcacaaaaggataagcagtgtgaacaagctgtgtaccagacaatattggaagaggatgttgaagatcctgtgtaccagtacattgtgtttgaggctggacacgagccaatccgtgatcccgaaacggaagaaaacatttatcaggttcccaccagccaaaagaaggaaggtgtttatgatgtgccaaaaagtcaacctaatggctattcgtttgaggattttgaagaacggtttgctgcagccaccccgaacagaaacctgcccacagactttgatgagatttttgaggcaacgaaggctgtgacccaattagaactttttggggacatgtccacaccccctgatataacctctccccccactcctgcaactccaggtgatgcctttatcccatcttcatctcagacccttccagcgagtgcagatgtgtttagttctgtacctttcggcactgctgctgtaccctcaggttacgttgcaatgggcgctgtcctcccgtccttctggggtcagcagcccctcgtccaacagcagatggtcatgggtgcccagccaccagtcgctcaggtgatgccgggggctcagcccatcgcatggggccagccgggtctctttcctgccactcagcagccctggccaactgtggccgggcagtttccgccagccgccttcatgcccacacaaactgttatgcctttgccagctgccatgttccaaggtcccctcaccccccttgccaccgtcccaggcacgagtgactccaccaggtcaagtccacagaccgacaagcccaggcagaaaatgggcaaagaaacgtttaaggatttccagatggcccagcctccgcccgtgccctcccgcaaacccgaccagccctccctcacctgtacctcagaggccttctccagttacttcaacaaagtcggggtggcacaggatacagacgactgtgatgactttgacatctcccagttgaatttgacccctgtgacttctaccacaccatcgaccaactcacctccaaccccagcccctagacagagctctccatccaaatcatctgcatcccatgccagtgatcctaccacagatgacatctttgaagagggctttgaaagtcccagcaaaagcgaagagcaagaagctcctgatggatcacaggcctcatccaacagtgatccatttggtgagcccagtggggagcccagtggtgataatataagtccacaggccggtagctag

SEQ ID NO: 44577 - DNA, 423 bp, Homo Sapiens
atgcagacaggtcttcatgtaaagaaagacttctacctacttgtgtggccatgtccccaccgaggcccggcctggctgggagcagactggatttcagttccagttgtcactctgcatggctgccctgaactcggctgtgtcagactcactgagcagtggtacacggggccccacacaggccttccagggacttcaagagccattctcctatacatgctttacgtcgtatgccttgtcttcagaccaggtcaccaggtgcaatgggattctggtcgatccagttctggttcagttctggttctggcgatgagggtttgctctgacaagaacaagaaccagaaacaagggcacctctttccagtgttactaaaacaagtaaactgtcaggagggcaggctttgtttgaagcttttcataacataa

SEQ ID NO: 44578 - DNA, 2487 bp, Homo Sapiens
tgtcgcacagatgcctctgcacgctgcagacggtgcctctcctctcctatggaccctcgtcgggggcaggcagcggccgggtccaaacttgctgctgtcctcgaggctggcactgctatctccagggctgggttgactcaagccagacagggggaaggaattggttctgcaggacagtgagagggtctgtgtcccggcacccctgggacagcgctcggctgcctgtgctcactgcatgagaaaactcagagggtgcattctccctctggcatggctgtgtctgggcgccttgggctgcggcagggggcaggccccacgtggggaagcctcgtgcttggtcagctttctgtctctcccaggccagtgacaactggcttcccgaggaaggaggtgaggtaccagggaccctgggcaggacctggtgtcgggcagggcggtgccagcactggggaaggacagggagccctcccggagccccaccctgcacctgccactggggtcagggagtgtctcggggtgcctttgggggcagcatgagctccaccaggggccccggcccccacctcagcctatggcccttccccatggctaaggtcatgccttttctgaacagctttggccttgagtgcacacatctgtgccaggctcacggcatgttcccgttggatgtcagggtccttgtccaaaccaaactcacagctgcccctgtgcagccttcagagttgagctggggtctcagtctccaacctgtcctttctgaccctcccatggctgcccagggagggcggggttcactgtgccacgtgctgggtgcccccctctgcagacagccagtccaggagatggaccaacagaggtcaaggggcagctggccaggccgcaccggggtccccgagttctgagctgtgctatgcaaacaagaatgctcctgtgtgggggggcatggccgttggaggtatagctgggcgggtagtggaaggactggaaatctctgttgttgtttggggaagtccatgcttcagtccttcggagtatgcgtggattgttcgaagtgtgactatggcccgggagccagggcagcatgaactcctttctctgaaatttcgaggcctccttgggttccctgaactccgggctgatgttcccaggacccagcaccaggagaccccagtcccgccagcagccgccgctacccaggagggctgggcgacattggccgcctcccaccccctcctcgcccacagcctcttgtcactgccaagcccccgttccttttgcccaaatcacgcaggcggaagctgcagtgccagctggagggatgttcatagggcttcctgtgcccatccctgctccaaacagctggacagcttcccctctacccccaccctggtgagcccctgggggccagagaaagatggggttcctgcaccttcccagctccacctctgaacttgagttagcgttagctaagcatacaatcagtgtcgaacgtctctcttccttaagcttgtagatacgactgcctataatcaggggactcccactggaggccgggaggccaatgctggccaggtgcgagggcatggtttggttcctttagggaatttttgttttgcaaacaggagaaacctgtgctgcaggttggagtggcaggaacgactggccttggtcagcaggcagcccccagcctagggccacagtcctcttcagggcctgggcagccccaatttctggcccagcaggtttctctttgtagtgtctttcagcacatccaaaatgctaggcctcctgccaccaacgtgtcagagcaatgtccaactgtcaggctctcagagatgcctcagtttccctagcatgagcaccagccgacacacacagtccactgagatgataattctgttctctccaaagcaaaaagctgggcgaggggtagtctcaatttctgtcagtgctcaaaggaataacaccaaaagaatcaacacagaatctcccagacacacgtgacccagctcgtggcgccgtgggtccgtaggagggacagtacctcacaacaggcccagcgggggaccacctctctgtacaattggaatgcgttttacttttcttttctctccttttttcattccgattttttttgcatgtttctttttgaaatgggcaaaatgtgtagcagcctgcatgagcacagttgttttggggaaagatactggagtatgatgtactcacacctgcaaatctgagcatcgcgaggttaaacgttccacctttttttgtaatcgtcaacagcacaactattttgtattgttgtttgtatcattttgtaccaaaaaaaaaaaggaaaaaaaaagggaagagagttgatgttttcagtgtgtttccagtgccagacagtcttggtcctgaactcagtagacccttgcggagcggttgtgcgcgggcaggcggggcgcgctgctccagagaatgaataaagtcccccttttccgt

SEQ ID NO: 44579 - DNA, 2118 bp, Homo Sapiens
cgactcctgctcatgggtacccccatcctgagagactcctggggtgggacccccctccacgacgcagcagagaacgggcagatggaggtgcccctgctgatgacgcccccaccaccaccgttccccccacctccactgttggccacgaggcgctccctggaggatggaagaagaggaggcccagggccagggaaccccagccccatgtccctcagcccggcctggcctggccatcctgaccagcctcttcccagggagcagatgaccagcccggcccctccgaggatcatcaccagtgccacggctgaccccgaggggacagagacggcgctggcgggggacacctcagatggcctggccgcactacagctggatgggctgccctcaggcgacatcgacgggctggtgcccacgcgggatgagcgcggccagcccatcccagagtggaagcggcaggtgatggtgcggaagctgcaggcgcgcctgggcgcagagagctccgcagaggcccaggacaatggtgggagctcaggccccacggagcaggcggcctggaggtactcacagactcatcaggccatcctggggccctttggggagctgctgacagaggatgacctggtctacctggagaagcagattgcagacctgcagcttcggcgccgctgtcaggagtatgagagtgagctgggccggttggcggctgagctgcaggccctgctgcccgagcccctggtcagcatcacggtcaacagccacttcctgccccgggcgcccggactggaggttgaggaggcctcaatcccagcggctgagcccgcagggtctgcggaggcctcagaggtggcccccggggtgcagcccctgcccttctggtgcagccacatctcccgcctggtacgcagcctgtccctgctgctgaagggcgtgcatgggctagtacagggggatgagaagccatccacccggcccctgcaggacacctgcagggaggcctcggccagcccccctcggagcgaggcccagcgccagatccaggagtggggggtgtctgtgcggacgctgcggggcaacttcgagtcggcctctggcccactctgtggcttcaaccctggcccctgcgagccgggggcccagcacaggcagtgcctgagtggctgctggccagccctgcctaagccccgcagtggcctggcttcaggggagcccaggcctggcgacacagaggaggccagcgactctggcatcagctgcgaggaggtgccatcagaggcgggtgccgcagccggcccagacctggccagcctgcgcaaggagcgcatcatcatgctcttcctcagccactggaggagatcggcctacacgccggccctcaagacagtggcctgcaggaccctaggagcccgccacgcggggttgcggggccaggaggccgccaggagccctgggccaccctccccgcccagcgagggcccccggctgggccacctgtggcagcagcgcagcaccatcacccacctgctgggcaactggaaggccatcatggctcacgtgcccgcccggcagctgcggcggctgagccggcagccccgcggggctttgtcccccgagcagttcctgccccacgtggacggggctccggtgccctacagcagcctctcactggatctcttcatgctgggttacttccagctgctggagtgcgacctgccggcggaggagcggaagctgcgccacctgctgtgcttcgaggtcttcgagcacctgggcacccacggctgggaggctgtgcgcgccttccacaaggccgtgaccgacgaggtggccgccggccgccgggcctggaccgacggcttcgaggacatcaaagcccgcttctttggctccagccagcgtcccgcctgggatacggagcctggccgcaagtcaggtctgaccctgctcgggcccctgcctcacgccgccgtcccctgcagcggccctgagcccacagcacagcggctggggtcccgctcccagcagggcagcttcaacggtgaggacatctgcggctacatcaaccgcagctttgccttctggaaggagaaggaagctgagatgttcaactttggagaatga

SEQ ID NO: 44580 - DNA, 1153 bp, Homo Sapiens
taaagtttcctgtagtgaaagtcagttacaaagccagtgtgaacaaatgaaacagacaaatattaatttggaaagtaggttgttgaaagaggaagaactgcgaaaagaggaagtccaaactctgcaagctgaactcgcttgtagacaaacagaagttaaagcattgagtacccaggtagaagaattaaaagatgagttagtaactcagagacgtaaacatgcctctagtatcaaggatctcaccaaacaacttcagcaagcacgaagaaaattagatcaggttgagagtggaagctatgacaaagaagtcagcagcatgggaagtcgttctagttcatcagggtccctgaatgctcgaagcagtgcagaagatcgatctccagaaaatactgggtcctcagtagctgtggataactttccacaagtagataaggccatgttgattgagagaatagttaggctgcaaaaagcacatgcccggaaaaatgaaaagatagaatttatggaggaccacatcaaacaactggtggaagaaattaggaaaaaaacaaaaataattcaaagttatattttacgagaagaatcaggcacactttcttcagaggcatctgattttaacaaagttcatttaagtagacggggtggcatcatggcatctttatatacatcccatccagctgacaatggattaacattggagctctctttggaaatcaaccgaaaattacaggctgttttggaggatacgttactaaaaaatattactttgaaggaaaatctacaaacacttggaacagaaatagaacgtcttattaaacaccagcatgaactagaacagaggacaaagaaaacctaaaacaagcctcttgctcagtaaagagacaaaagccacacaggagtaggtgccactgacctctattgttggagactttgttccactttttgtttcagccagtaaaaatattgttttgcttcatctgtacacaaaaaaatacccttttacaatatgaatgcattgctgtatatactgtaagactgaaagctttgatgaaatttgtttttgtatggtgcaatatgacagcctgtcattgaatctaaacaacttaatttgcttgtattcataagaagtgttgaacattacaagggcttttat

SEQ ID NO: 44581 - DNA, 1382 bp, Homo Sapiens
cattatgctaacagcataaacatgcagggggtgggagcagggtcacaaaagtgagtgttgtcaattctacttggaatgaaaggttgaaataatttaaacagtacgggaaatgcagagcaattttctcctctggtgacaatatagtgtccaacacttggaagtgatttttaagaatgtttatttaaattaaaaggatggatttccaaggaaaaaaaataaggaaaaggaaagaaaaaactgaacagaaaacgcaaaagtatcagtttggtcactaacctttgcaaggatacctttttattttctttaagattcctgttgtttatacacagattttaagtttactcctactgctgacccaagtgaaattccttctccagtcacagtgtcaacctctaccccccaactgcaacgagagttttgaggggcatcaatcacaccgagaagtcacagcccctcaaccactgaggtgtgggggggtagggatctgcatttcttcatatcaaccccacactatagggcacctaaatgggtgggcggtgggggagaccgactcacttgagtttcttgaaggcttcctggcctccagccacgtaattgcccccgctctggatctggtctagcttccggattcggtggccagtccgcggggtgtagatgttcctgacggccccaaagggtgcctgaacgccgccggtcacctccttcaggaagacttcgaagctggacaccttcttctcatggatgacgacgcggcgccccgcgtagaaggggtccccgttgcggtacacaagcacgctcttcacgacgggctgagacaggtggctggacctggcgctgctgccgctcatcttccccgctggccgccgcctcagctcgctgcttcgcgtcgggaggcacctccgctgtcccagcggcctcaccgcacccagggcgcgggatcgcctcctgaaacgaacgagaaactgacgaatccacaggtgaaagagaagtaacggccgtgcgcctaggcgtccacccagaggagacactaggagcttgcaggactcggagtagacgctcaagtttttcaccgtggcgtgcacagccaatcaggacccgcagtgcgcgcaccacaccaggttcacctgctacgggcagaatcaaggtggacagcttctgagcaggagccggaaacgcgcggggccttcaaacaggcacgcctagtgagggcaggagagaggaggacgcacacacacacacacacacaaatatggtgaaacccaatttcttacatcatatctgtgctaccctttccaaacagcctaatttttcttttctctcttcttgcacctttacccctcaatctcctgcttgctcccaaattaaagcaattaagttcctgg

SEQ ID NO: 44582 - DNA, 1728 bp, Homo Sapiens
atgtggtccttgctgctctgcgggttgtccatcgcccttccactgtctgtcacagcagatggatgcaaggacatttttatgaaaaatgagatactttcagcaagccagccttttgcttttaattgtacattccctcccataacatctggggaagtcagtgtaacatggtataaaaattctagcaaaatcccagtgtccaaaatcatacagtctagaattcaccaggacgagacttggattttgtttctccccatggaatggggggactcaggagtctaccaatgtgttataaagggtagagacagctgtcatagaatacatgtaaacctaactgtttttgaaaaacattggtgtgacacttccataggtggtttaccaaatttatcagatgagtacaagcaaatattacatcttggaaaagatgatagtctcacatgtcatctgcacttcccgaagagttgtgttttgggtccaataaagtggtataaggactgtaacgagattaaaggggagcggttcactgttttggaaaccaggcttttggtgagcaatgtctcggcagaggacagagggaactacgcgtgtcaagccatactgacacactcagggaagcagtacgaggttttaaatggcatcactgtgagcattacagaaagagctggatatggaggaagtgtccctaaaatcatttatccaaaaaatcattcaattgaagtacagcttggtaccactctgattgtggactgcaatgtaacagacaccaaggataatacaaatctacgatgctggagagtcaataacactttggtggatgattactatgatgaatccaaacgaatcagagaaggggtggaaacccatgtctcttttcgggaacataatttgtacacagtaaacatcaccttcttggaagtgaaaatggaagattatggccttcctttcatgtgccacgctggagtgtccacagcatacattatattacagctcccagctccggattttcgagcttacttgataggagggcttatcgccttggtggctgtggctgtgtctgttgtgtacatatacaacatttttaagatcgacattgttctttggtatcgaagtgccttccattctacagagaccatagtagatgggaagctgtatgacgcctatgtcttataccccaagccccacaaggaaagccagaggcatgccgtggatgccctggtgttgaatatcctgcccgaggtgttggagagacaatgtggatataagttgtttatattcggcagagatgaattccctggacaagccgtggccaatgtcatcgatgaaaacgttaagctgtgcaggaggctgattgtcattgtggtccccgaatcgctgggctttggcctgttgaagaacctgtcagaagaacaaatcgcggtctacagtgccctgatccaggacgggatgaaggttattctcattgagctggagaaaatcgaggactacacagtcatgccagagtcaattcagtacatcaaacagaagcatggtgccatccggtggcatggggacttcacggagcagtcacagtgtatgaagaccaagttttggaagacagtgagataccacatgccgcccagaaggtgtcggccgtttcctccggtccagctgctgcagcacacaccttgctaccgcaccgcaggcccagaactaggctcaagaagaaagaagtgtactctcacgactggctaa

SEQ ID NO: 44583 - DNA, 2302 bp, Homo Sapiens
agagcctgtgctactggaaggtggcgtgccctcctctggctggtaccatgcagctcccactggccctgtgtctcgtctgcctgctggtacacacagccttccgtgtagtggagggccaggggtggcaggcgttcaagaatgatgccacggaaatcatccccgagctcggagagtaccccgagcctccaccggagctggagaacaacaagaccatgaaccgggcggagaacggagggcggcctccccaccacccctttgagaccaaagacgtgtccgagtacagctgccgcgagctgcacttcacccgctacgtgaccgatgggccgtgccgcagcgccaagccggtcaccgagctggtgtgctccggccagtgcggcccggcgcgcctgctgcccaacgccatcggccgcggcaagtggtggcgacctagtgggcccgacttccgctgcatccccgaccgctaccgcgcgcagcgcgtgcagctgctgtgtcccggtggtgaggcgccgcgcgcgcgcaaggtgcgcctggtggcctcgtgcaagtgcaagcgcctcacccgcttccacaaccagtcggagctcaaggacttcgggaccgaggccgctcggccgcagaagggccggaagccgcggccccgcgcccggagcgccaaagccaaccaggccgagctggagaacgcctactagagcccgcccgcgcccctccccaccggcgggcgccccggccctgaacccgcgccccacatttctgtcctctgcgcgtggtttgattgtttatatttcattgtaaatgcctgcaacccagggcagggggctgagaccttccaggccctgaggaatcccgggcgccggcaaggcccccctcagcccgccagctgaggggtcccacggggcaggggagggaattgagagtcacagacactgagccacgcagccccgcctctggggccgcctacctttgctggtcccacttcagaggaggcagaaatggaagcattttcaccgccctggggttttaagggagcggtgtgggagtgggaaagtccagggactggttaagaaagttggataagattcccccttgcacctcgctgcccatcagaaagcctgaggcgtgcccagagcacaagactgggggcaactgtagatgtggtttctagtcctggctctgccactaacttgctgtgtaaccttgaactacacaattctccttcgggacctcaatttccactttgtaaaatgagggtggaggtgggaataggatctcgaggagactattggcatatgattccaaggactccagtgccttttgaatgggcagaggtgagagagagagagagaaagagagagaatgaatgcagttgcattgattcagtgccaaggtcacttccagaattcagagttgtgatgctctcttctgacagccaaagatgaaaaacaaacagaaaaaaaaaagtaaagagtctatttatggctgacatatttacggctgacaaactcctggaagaagctatgctgcttcccagcctggcttccccggatgtttggctacctccacccctccatctcaaagaaataacatcatccattggggtagaaaaggagagggtccgagggtggtgggagggatagaaatcacatccgccccaacttcccaaagagcagcatccctcccccgacccatagccatgttttaaagtcaccttccgaagagaagtgaaaggttcaaggacactggccttgcaggcccgagggagcagccatcacaaactcacagaccagcacatcccttttgagacaccgccttctgcccaccactcacggacacatttctgcctagaaaacagcttcttactgctcttacatgtgatggcatatcttacactaaaagaatattattgggggaaaaactacaagtgctgtacatatgctgagaaactgcagagcataatactgccacccaaaaatctttttgaaaatcatttccagacaacctcttactttctgtgtagtttttaattgttaaaaaaaaaaagttttaaacagaagcacatgacatatgaaagcctgcaggactggtcgtttttttggcaattcttccacgtgggacttgtccacaagaatgaaagtagtggtttttaaagagttaagttacatatttattttctcacttaagttatttatgcaaaagtttttcttgtagagaatgacaatgttaatattgctttatgaattaacagtctgttcttccagagtccagagacattgttaataaagacaatgaatcatgaccgaaagga

SEQ ID NO: 44584 - DNA, 354 bp, Homo Sapiens
atgctgtgtatagtggaaccttatgtgacctggggatttccaaatctgaagtctgtccgagaactcattttgaaacgtggacaagccaaggtcaagaataagaccatccctctgacagacaacacagtgattgaggagcacctggggaagtttggcatcatttgcttggaagacctcattcatgaaattgccttcccagggaagcatttacaggagatctcgtggttcttgcgccctttccacctctcagtggcctgtcatgctaccaaaaatagagtgggcttcctcaaggagatgggcacacctggctattggggtgaacgcatcaatcagctcatccgccagctgaactag

SEQ ID NO: 44585 - DNA, 492 bp, Homo Sapiens
atgcagagcagcccctcccctgctcaccctcagctcccagtcctacagacacagatggtgtcggacggcatgacaggcagcaatcctgtgtcccctgcctcatccagttccccagcctctagtggggcaggcggcatctccccgcagcacatagctcaagattcctcactggatggacctccaggccccccagatggtgccacagtgcccctggaggggttcagcttatcccaggctgctgacctggctaacaagggcccgaagtgggagaagagccatgccgaaattgcagaacaggccaagcatgaggccgagatcgagactcggattgctgagctgcggaaggagggtttctggtcactgaagaggctgcctaaggtgccagagccccctcgccccaaaactgggactatttgtgcgaagagatgcagtggctctctgctgactttgctcaggagcgccgttggaaacggggtgtggcccggaaggtag

SEQ ID NO: 44586 - DNA, 1813 bp, Homo Sapiens
gtatgcaaatgtagcggcgcggcgggagcgcgcggctgatacccgggactgggctgcggcggttagtcctctcccggccgccgtcgcctccgacatattgcccgcaggagctgcggcggcgaagcggagagcaccggggggaggagatgggaggacgaagaggtcccaacaggacatcttactgtcgaaatccgctctgtgagccgggatcctcggggggctctagtggaagccacacttccagtgcatcggtgaccagtgttcgttcccgcaccaggagcagttctggaacaggcctctccagccctcctctggccacccaaactgttgtgcctctacagcactgcaagatccccgagctgccagtccaggccagcattctgtttgagttgcagctcttcttctgccagctcatagcactcttcgtccactacatcaacatctacaagacagtgtggtggtatccaccttcccacccaccctcccacacctccctgaacttccatctgatcgacttcaacttgctgatggtgaccaccatcgttctgggccgccgcttcattgggtccatcgtgaaggaggcctctcagagggggaaggtctccctctttcgctccatcctgctgttcctcactcgcttcaccgttctcacggcaacaggctggagtctgtgccgatccctcatccacctcttcaggacctactccttcctgaacctcctgttcctctgctatccgtttgggatgtacattccgttcctgcagctgaattgcgacctccgcaagacaagcctcttcaaccacatggcctccatggggccccgggaggcggtcagtggcctggcaaagagccgggactacctcctgacactgcgggagacgtggaagcagcacacaagacagctgtatggcccggacgccatgcccacccatgcctgctgcctgtcacccagcctcatccgcagtgaggtggagttcctcaagatggacttcaactggcgcatgaaggaagtgctcgtcagctccatgctgagcgcctactatgtggcctttgtgcctgtctggttcgtgaagaacacacattactatgacaagcgctggtcctgtgaactcttcctgctggtgtccatcagcacctccgtgatcctcatgcagcacctgctgcctgccagctactgtgacctgctgcacaaggccgccgcccatctgggctgttggcagaaggtggacccagcgctgtgctccaacgtgctgcagcacccgtggactgaagaatgcatgtggccgcagggcgtgctggtgaagcacagcaagaacgtctacaaagccgtaggccactacaacgtggctatcccctctgacgtctcccacttccgcttccatttctttttcagcaaacccctgcggatcctcaacatcctcctgctgctggagggcgctgtcattgtctatcagctgtactccctaatgtcctctgaaaagtggcaccagaccatctcgctggccctcatcctcttcagcaactactatgccttcttcaagctgctccgggaccgcttggtattgggcaaggcctactcatactctgctagcccccagagagacctggaccaccgtttctcctgagccctggggtcacctcagggacagcgtccaggcttcagccaagggctccctggcaaggggctgttgggtagaagtggtggtgggggggacaaaagacaaaaaaatccaccagagctttgtatttttgttacgtactgtttctttgataattgatgtgataaggaaaaaagtcctatttttatactccc

SEQ ID NO: 44587 - DNA, 162 bp, Homo Sapiens
atgggatcgttaatcaaagatgatgttcttagggtcaaggaagactggaagctatcaagaatgctcaatccatgggaatcaagaacaatcaaagctgaatctgacaatcttcgccagattctggacttcagtctacattatttccagggatctattgattaa

SEQ ID NO: 44588 - DNA, 1572 bp, Homo Sapiens
gtcctggaactgcaacctgcacagagctgctctgtactgtccctggtggtcgccgccatgacctggttggtgctgctggggacactgctctgcatgctgcgcgttgggttaggcaccccggactccgagggtttcccgccccgtgcgctccacaactgcccctacaaatgtatctgcgctgccgacctgctaagctgcactggcctagggctgcaggacgtgccagccgagttacctgccgctactgcggacctcgacctgagccacaacgcgctccagcgcctgcgccccggctggttggcgcccctcttccagctgcgcgccctgcacctagaccacaacgaactagatgcgctgggtcgcggcgtcttcgtcaacgccagcggcctgaggctgctcgatctatcatctaacacgttgcgggcgcttggccgccacgacctcgacgggctgggggcgctggagaagctgcttctgttcaataaccgcttggtgcacttggacgagcatgccttccacggcctgcgcgcgctcagccatctctacctgggctgcaacgaactcgcctcgttctccttcgaccacctgcacggtctgagcgccacccacctgcttactctggacctctcctccaaccggctgggacacatctccgtacctgagctggccgcgctgccggccttcctcaagaacggcctctacttgcacaacaaccctttgccttgcgactgccgcctctaccacctgctacagcgctggcaccagcggggcctgagcgccgtgcgcgactttgcgcgcgagtacgtatgcttggccttcaaggtacccgcgtcccgcgtgcgcttcttccagcacagccgcgtctttgagaactgctcgtcggccccagctcttggcctagagcggccggaagagcacctgtacgcgctggtgggtcggtccctgaggctttactgcaacaccagcgtcccggccatgcgcattgcctgggtttcgccgcagcaggagcttctcagggcgccaggatcccgcgatggcagcatcgcggtgctggccgacggcagcttggccataggcaacgtacaggagcagcatgcgggactcttcgtgtgcctggccactgggccccgcctgcaccacaaccagacgcacgagtacaacgtgagcgtgcactttccgcgcccagagcccgaggctttcaacacaggcttcaccacactgctgggctgtgccgtgggccttgtgctcgtgctgctctacctgttcgccccaccctgccgctgctgccgccgtgcctgccgctgccgccgctggccccaaacacccagcccgctccaagagctgagcgcacagtcctcagtactcagcaccacaccgccagacgcacccagccgcaaggccagcgtccacaagcacgtagtctttctggagccaggccggaggggcctcaatggccgcgtgcagctggcagtagctgaggaattcgatctctacaaccctggaggcctgcagctgaaggctggctctgagtccgccagctccataggctccgagggtcccatgacaacctag

SEQ ID NO: 44589 - DNA, 1058 bp, Homo Sapiens
ggcgcgggtgttcgcctacgtcactggggcgctacggtgcctggagctgggcggtcttctcgtcagagtggggactggtgagagcgacctccccgccaggtcctgtgtgttgccggctgaagaagggtagctgaaaaattcagacccagcacagtgtttatgttggtcaaaaatagaaaactatggcgcggccgaggcgggaggacccttcaggccaagagcagcctagcaacatggcgcaaccccatctctgtagtcctacctcagccccccagctacttgaacccaaagattcaaggctccagtgagctatgatcccaccacagcattccagcctgcgagattgaggatgatgattattccccaccttctaagagacaaagaccaacgagccaccacagccaccagtcccagaacccgccaatgctggggaacggaaaatgagggagttcaactctggccctcacaatccagtggaggagacgaaactcatctgcctctgtccctctgggcacgcctcatgccaggtgcatctgtggacaggggccacgctcctgggcttccaaagttggagaaagctgccaggctcaggtctgaaggccagaattctacagtaagtcctactgagtcaaggtgggagcagggtcggtggcttccgaggctctgcgggagaatccgtttcctggcggtagaggtggcctgcactcctcagcttgtgctgcccgtctcgaatgactggagtttcctgcttctgtcactacacctcccaccctctcccatcacctgctctgctcttacaaggatccgaagaaatggaataatcgtatcgctgatctatgtaaacaaattgaagaattgtctgaaagaaaatatgacatgaacttatgaattcaacaggtgaagatttacaacttgataaatcagctttgtgaggctcgagctgtaaaagccaaaggtccggtgatgatcccatacccttttttccagtctcatgttgaagatttttatgtagaaggccttcccaaaggaattttttttttttttttgagatggagttt

SEQ ID NO: 44590 - DNA, 426 bp, Homo Sapiens
atgtgggtcctaggcatcgcggcaactttttgcggattgttcttgcttccaggctttgcgctgcaaatccagtgctaccagtgtgaagaattccagctgaacaacgactgctcctcccccgagttcattgtgaattgcacggtgaacgttcaagacatgtgtcagaaagaagtgatggagcaaagtgccgggatcatgtaccgcaagtcctgtgcatcatcagcggcctgtctcatcgcctctgccgggtaccagtccttctgctccccagggaaactgaactcagtttgcatcagctgctgcaacacccctctttgtaacgggccaaggcccaagaaaaggggaagttctgcctcggccctcaggccagggctccgcaccaccatcctgttcctcaaattagccctcttctcggcacactgctga

SEQ ID NO: 44591 - DNA, 4288 bp, Homo Sapiens
gattccagctctcgcgcccgacgaggtggatttggctgtccaccgagctccggcgcctgtcgttctaattgggtttggatttgcaccgttaaggaggggggaagagaaggaagaggcgggcgaggaaggcgagtccagctagcggctgttgcggggaccgtagccccagctgcagctccgaagaatcccccgccacggtttcggtggagcgtctgggcacgggatggagtgaaagagcgagtgcctctccaagcgggggtgggagggggtcaggctgtgcagaggagagagacagcgagaagaagccgcggctggctactgcgaatttgggattcgattgggagggaccgctcactcgggggaaatggattctttaccacggctgaccagcgttttgactttgctgttctctggcttgtggcatttaggattaacagcgacaaactacaactgtgatgatccactagcatccctgctctctccaatggctttttccagttcctcagacctcactggcactcacagcccagctcaactcaactggagagttggaactggcggttggtccccagcagattccaatgctcaacagtggctccagatggacctgggaaacagagtagagattacagcagtggccacgcagggaagatacggaagctctgactgggtgacgagttacagcctgatgttcagtgacacaggacgcaactggaaacagtacaaacaagaagacagcatctggacctttgcaggaaacatgaatgctgacagcgtggtgcaccacaagctattgcactcagtgagagcccgatttgttcgctttgtgcccctggaatggaatcccagtgggaagattggcatgagagtcgaggtctacggatgttcctataaatcagatgttgctgactttgatggccgaagctcacttctgtacaggttcaatcagaagttgatgagtactctcaaagatgtgatctccctgaagttcaagagcatgcaaggagatggggtcctgttccatggagaaggtcagcgtggagaccacatcaccttggaactccagaaggggaggctcgccctacacctcaatttgggtgacagcaaagcgcggctcagcagcagcttgccctctgccaccctgggcagcctcctggatgaccagcactggcactcggtcctcattgagcgggtgggcaagcaggtgaacttcacggtggacaagcacacacagcacttccgcaccaagggcgagacggatgccttagacattgactatgagcttagttttggaggaattccagtaccaggaaaacctgggacctttttaaagaaaaacttccatggatgcatcgaaaacctttactacaatggagtaaacataattgacctggctaagagacgaaagcatcagatctatactgtgggcaatgtcactttttcctgctccgaaccacagattgtgcccatcacatttgtcaactccagcggcagctatttgctgctgcccggcaccccccaaattgatgggctctcagtgagtttccagtttcgaacatggaacaaggatggtctgcttctgtccacagagctgtctgagggctcgggaaccctgctgctgagcctggagggtggaatcctgagactcgtgattcagaaaatgacagaacgcgtagctgaaatcctcacaggcagcaacttgaatgatggcctgtggcactcggttagcatcaacgccaggaggaaccgcatcacgctcactctggatgatgaagcagcacccccggctccagacagcacttgggtgcagatttattctggaaatagctactattttggagggtgccccgacaatctcaccgattcccaatgtttaaatcccattaaggctttccaaggctgcatgaggctcatctttattgataaccagcccaaggacctcatttcagttcagcaaggttccctggggaattttagtgatttacacattgatctgtgtagcatcaaagacaggtgtttgccaaactactgtgaacatggaggaagctgctcccagtcctggactaccttctattgtaactgcagtgacacaagttacactggtgccacctgccacaactccatctacgagcaatcctgcgaggtgtacaggcaccaggggaatacagccggcttcttctacatcgactcagatggcagcggcccactgggacctctccaggtgtactgcaatatcactgaggacaagatctggacatcagtgcagcacaacaatacagagctgacccgagtgcggggcgctaaccctgagaagccctatgccatggccttggactacgggggcagcatggaacagctggaggccgtgatcgacggctctgagcactgtgagcaggaggtggcctaccactgcaggaggtcccgcctgctcaacacgccggatggaacaccatttacctggtggattgggcggtccaatgaaaggcacccttactggggaggttcccctcctggggtccagcagtgtgagtgtggcctagacgagagctgcctggacattcagcacttttgcaattgcgacgctgacaaggatgaatggacaaatgatactggctttctttccttcaaagaccacttgcctgtcactcagatagttatcactgataccgacagatcaaactcagaagccgcttggagaattggtcccttgcgttgctatggtgaccgacgcttctggaacgccgtctcattttatacagaagcctcttacctccactttcctaccttccatgcggaattcagtgccgatatttccttcttttttaaaaccacagcattatccggagttttcctagaaaatcttggcattaaagacttcattcgactcgaaataagctctccttcagagatcacctttgccatcgatgttgggaatggtcctgtggagcttgtagtccagtctccttctcttctgaatgacaaccaatggcactatgtccgggctgagaggaacctcaaggagacctccctgcaggtggacaaccttccaaggagcaccagggagacgtcggaggagggccattttcgactgcagctgaacagccagttgtttgtagggggaacgtcatccagacagaaaggcttcctaggatgcattcgctccttacacttgaatggacagaaaatggacctggaagagagggcaaaggtcacatctggagtcaggccaggctgccccggccactgcagcagctacggcagcatctgccacaacgggggcaagtgtgtggagaagcacaatggctacctgtgtgattgcaccaattcaccttatgaagggcccttttgcaaaaaagaggtttctgctgtttttgaggctggcacgtcggttacttacatgtttcaagaaccctatcctgtgaccaagaatataagcctctcatcctcagctatttacacagattcagctccatccaaggaaaacattgcacttagctttgtgacaacccaggcacccagtcttttgctctttatcaattcttcttctcaggacttcgtggttgttctgctctgcaagaatggaagcttacaggttcgctatcacctaaacaaggaagaaacccatgtattcaccattgatgcagataactttgctaacagaaggatgcaccacttgaagattaaccgagagggaagagagcttaccattcagatggaccagcaacttcgactcagttataacttctctccggaagtagagttcagggttataaggtcactcaccttgggcaaagtcacagagaatcttggtttggattctgaagttgctaaagcaaatgccatgggttttgctggatgcatgtcttccgtccagtacaaccacatagcaccactgaaggctgccctgcgccatgccactgtcgcgcctgtgactgtccatgggaccttgacggaatccagctgtggcttcatggtggactcagatgtgaatgcagtgaccacggtgcattcttcatcagatccttttgggaagacagatgagcgggaaccactcacaaatgctgttcgaagtgattcggcagtcatcggaggggtgatagcagtggtgatattcatcatcttctgtatcatcggcatcatgacccggttcctctaccagcacaagcagtcacatcgtacgagccagatgaaggagaaggaatatccagaaaatttggacagttccttcagaaatgaaattgacttgcaaaacacagtgagcgagtgtaaacgggaatatttcatctga

SEQ ID NO: 44592 - DNA, 420 bp, Homo Sapiens
ttggtgtcctttgaagatgtggctctgcacttcacctgggaggagtgtcagggcctggatgatgctcagaggaccctctacagggacgtgattgtggagacctacagcagcctggtatcattggggcattgcattaccaaacctgagatgatcttcaagctagagcaaggagcagagacatggatagtagaagaaataccaaacctgagactttcagctgtccagatcactgatgaccttattgaaaggagccatgaaagtcatgatagatttttctggcaaattgtaatcaccaacagcaagacatcaactcaggagagagttgaattaggaaaaagatttaattttaactcaaaccatgttttaaatctgattataaataatggaaacagttcaggagtgaagcctgggcagtttaat

SEQ ID NO: 44593 - DNA, 844 bp, Homo Sapiens
cagcaggccatggcggagagggagcggctgctcaaggcccgggaaggaacaagaaggggcacggaaggttcctcaggccctgctgttcctgccatcacggccccacccaccccaccccaccctccaggcccgcgaatcttggatctccggcagcatctggagggatggggccacaacccggaaaactgcccacatgtgcaggtgtctgggtgctgctgccgtggacccctggtgaagatgggcggccgcatcaagacctggaggaagcgatggttctgctttgaccgccaagcccgccgcttggcctactatgcggacaaggaagagaccaagctcaaaggtgtcatctacttccaggccattgaggaagtctattatgaccacttacgctgtgccttcaagagccccaacccccgcctgaccttctgcgtcaaaacctacgaacgccttttctacatggtggctccgagccccgaagccatgcgcatttggatggacgtcatcgtgaccgccgctgacgaaaaccacgccccctgagtggccccgccctcttggggggaagtcccttcgaggctccgccggcgcggggcgcgggggcgttcctaggccccgcccactgccggaaaacttggacgcaccgctttggaactctcccgggaattccgcaggcgcggcagttcagctggcctgagctgctgcgttctgggttgcaggtgccttgcccccgacgggatcgccggcccctaaggccctgcccggggcaggaggaagattgcaggggcgggaagaaactatttattggtgctcctgtgataccgaattaaatacggaggaaaaacaggaa

SEQ ID NO: 44594 - DNA, 1793 bp, Homo Sapiens
gtgcccgaggcggcggggctcgcgcgggtggagccgcctcggcgttcgagcggggtgggggctgcccggttgagatttcccggcgggtcccggcctctgcgtgcacgcgcctgcgtgctcgcgctcgcggttctggcgctgccggaaaggaataatgctgacagcatgtctgcacattccatgctctgtgaacgaatcgccatagccaaggaactgatcaagagagcagaatcactttctagatcaagaaaaggtggcatagaaggtggtgcaaagctgtgcagcaaattgaaggcagaattaaaattcttgcagaaagtagaagctgggaaagtagctattaaagagtctcatttacagagcactaacctaacacacctgagagccattgtggaatcagcagaaaacctggaagaagttgttagtgttcttcatgtctttggttatacagataccttaggagaaaagcaaacccttgtggtagatgtagttgcaaatggtggtcatacttgggtgaaagccattggccggaaggctgaagctcttcataacatctggctgggcaggggccaatatggtgacaaaagcatcattgagcaggctgaagacttcctccaggccagtcaccagcagccagtgcagtatagcaaccctcacatcatctttgcattttacaacagtgtctccagccccatggcagagaagctgaaagaaatgggcatatctgtgagaggagacatagtagcagtcaacgctctgttagatcaccctgaagagcttcaaccaagtgagagtgaatcagatgatgagggccctgaacttttgcaggtgaccagagttgaccgagaaaatatactagcaagtgttgcgtttccaacagaaattaaggtcgatgtgtgcaaaagagtaaatctggacattactactttaatcacatatgtatctgccctcagctatggaggctgccactttattttcaaagagaaagtgctcacagaacaagcagagcaagagaggaaagagcaggttctacctcagctggaggcctttatgaaggacaaggagttgtttgcttgtgaatctgctgtcaaggactttcagtctattttagataccttaggaggacctggggagagagagagggccactgtgttaattaagcgaattaatgtggtaccagaccagccttctgagcgtgccttgagactagtggccagttcaaaaattaatagccgctcattaacaatttttgggacgggagacaccctaaaagccatcacaatgactgctaatagtggttttgtcagagctgcaaacaaccagggtgttaaatttagtgtgtttatccatcagcccagagcacttactgagagtaaagaggctctagccacccccttaccaaaagactacacaactgacagtgaacactaaagataccctttaaatatttttgtggaagtaagttatttataccaaaggctgggtcttcccatctaaactggtgggaaaaaaggtctatagtaaaagtaaaactgagaactcttaaaccagtagagtttctttgtctctcatctaaagtatataacctcccaaagtagaaaaagcacaagagagaagcttatctatcaaactgtctgcattagtgcaattaagaaccgaaatacgtctatataaagctttcagctgtattgtaatactttgattcgatagggctacaactcccctactgctaaccacatttcatggaatatggctacattgcatcttgcattaaatatctggagaaaattcaa

SEQ ID NO: 44595 - DNA, 1228 bp, Homo Sapiens
ctcagatattttgttgaacgtgggacctttgtttttttttgttgttttgttttgttttgtttttgttgttgttgttgttgttgtttaccagcaggggacccctgttttgtctatgtcaagaacaaagaccaggcaaaagaaatgtcaagccgcatttacaaatgcaaaaatggacttgtttttgatatgcttttcccaacaataagggacatgagtcattggggcatgttacagagagtttcagtaaaattcagaaaaaaataataaatatgaacagccacagcatgcccagaagcctttttatggagccaggcatggttgacctgctttccatgtctcaaaacattagtccctacaagaaccctatgaggtttatcttcttttcacccattttgagagaagaaaagttcagctcagagagctgcaggaacattggggacatctccaagtcacagccaataggtggcagtcatcagtgtgtcttggaagggacaaacattgagcttctgaacagctactccagaaactatggtgctgtggtgaagtcctggttaggagcctaggaaaatggtgaaggaaaagatggtcccagcctgcaaagctgaagtcaggaacccaccaggatctcccttctccctagcctggtggtccacatcatgcagatttactctagattcagcttagactcatttttatactactcgggggacaaggagggaactacagtcagtaacagcagcatgagcctcaggtgctttggggattgaaattcagaccaggaaattccaatacatcagtgcatgtggaggacatgagtatttaaggagaaggttctaggcttccgaagtaaaattggatgtggaggttggggattgattcaaacattaatactttcaagcgtttctatggtatttgtcagctgtggagcaacagcacacatctgtattaatagcctgtgttaagagattactgtgaatcctgaaaaacatcctcattgtagagatgagaaaacacaggcttttgcacatccaatgtctccttaaagcatgtggttcagaattgagaacgtgcagagtgagagtggtatgaattttcctgtaagctacctgaagttctgtttgctgtcatgtggaagaaaagagccttggagaagttttatttttttctgtttggaaagaatacacagagcaagatgatttacaataaaccttttgacctaacgcacata

SEQ ID NO: 44596 - DNA, 2491 bp, Homo Sapiens
ctctcatttgggtaaggtcgaggctggctctggaagcagcaccatggttctgcggtctggcatctgtggcctctctccacatcggatcttcccttccttactcgtggtggttgctttggtggggctgctgcctgttctcaggagccatggcctccagctcagcccaactgccagcaccattcgaagctcagagccaccacgagaacgctcgattggggatgtcaccaccgctccaccggaggtcaccccagagagccgccctgttaatcattccgtcactgatcatggcatgaagccgcgcaaggcctttccagtcctgggcatcgactacacacacgtgcgcacccccttcgagatctccctctggatccttctggcctgcctcatgaagataggtttccatgtgatccccactatctcaagcatcgtcccggagagctgcctgctgatcgtggtggggctgctggtggggggcctgatcaagggtgtaggcgagacaccccccttcctgcagtccgacgtcttcttcctcttcctgctgccgcccatcatcctggatgcgggctacttcctgccactgcggcagttcacagaaaacctgggcaccatcctgatctttgccgtggtgggcacgctgtggaacgccttcttcctgggcggcctcatgtacgccgtgtgcctggtgggcggtgagcagatcaacaacatcggcctcctggacaacctgctcttcggcagcatcatctcggccgtggaccccgtggcggttctggctgtctttgaggaaattcacatcaatgagctgctgcacatccttgtttttggggagtccttgctcaatgacgccgtcactgtggtcctgtatcacctctttgaggagtttgccaactacgaacacgtgggcatcgtggacatcttcctcggcttcctgagcttcttcgtggtggccctgggcggggtgcttgtgggcgtggtctacggggtcatcgcagccttcacctcccgatttacctcccacatccgggtcatcgagccgctcttcgtcttcctctacagctacatggcctacttgtcagccgagctcttccacctgtcaggcatcatggcgctcatagcctcaggagtggtgatgcgcccctatgtggaggccaacatctcccacaagtcccacaccaccatcaaatacttcctgaagatgtggagcagcgtcagcgagaccctcatcttcatcttcctcggcgtctccacggtggccggctcccaccactggaactggaccttcgtcatcagcaccctgctcttctgcctcatcgcccgcgtgctgggggtgctgggcctgacctggttcatcaacaagttccgtatcgtgaagctgacccccaaggaccagttcatcatcgcctatgggggcctgcgaggggccatcgccttctctctgggctacctcctggacaagaagcacttccccatgtgtgacctgttcctcactgccatcatcactgtcatcttcttcaccgtctttgtgcagggcatgaccattcggcccctggtagacctgttggctgtgaagaaaaagcaagagacgaagcgctccatcaacgaagagatccacacacagttcctggaccaccttctgacaggcatcgaagacatctgtggccactacggtcaccaccactggaaggacaagctcaaccggtttaataagaaatatgtgaagaagtgtctgatagctggcgagcgctccaaggagccccagctcattgccttctaccacaagatggagatgaagcaggccatcgagctggtggagagcgggggcatgggcaagatcccctctgccgtctccaccgtctccatgcagaacatccaccccaagtccctgccttccgagcgcatcctgccagcactgtccaaggacaaggaggaggagatccgcaaaatcctgaggaacaacttgcagaagaccaggcagcggctgcggtcctacaacagacacacgctggtggcagacccctacgaggaagcctggaaccagatgctgctccggaggcagaaggcccggcagctggagcagaagatcaacaactacctgacggtgccagcccacaagctggactcacccaccatgtctcgggcccgcatcggctcagacccactggcctatgagccgaaggaggacctgcctgtcatcaccatcgacccggcttccccgcagtcacccgagtctgtggacctggtgaatgaagagctgaagggcaaagtcttagggttgagccgggatcctgcaaaggtggctgaggaggacgaggacgacgatgggggcatcatgatgcggagcaaggagacttcgtccccaggaaccgacgatgtcttcacccccgcgcccagtgacagccccagctcccagaggatacagcgctgcctcagtgacccaggcccacaccctgagcctggggagggagaaccgttcttccccaaggggcagtaa

SEQ ID NO: 44597 - DNA, 426 bp, Homo Sapiens
atggcgttcaccttcgccgcgttctgctacatgctcaccctggtgctgtgcgcctccctcatcttctttgtcatctggcacatcatagcctttgatgagctgcggaccgacttcaagaaccccatcgaccaggggaaccctgcgcgggcactggtggtcccagaatactccatccacggcctcttctgtctgatgtttctgtgtgcagcagagtgggtgaccctgggcctcaacatccccctcctcttctaccacctctggaggtacttccaccgtcctgcagatggctctgaggtcatgtatgatgcggtctccatcatgaatgctgacattctcaactactgccagaaggagtcctggtgcaaacttgccttctacctgctctccttcttctattacctgtacagtatggtttatacgttggtg

SEQ ID NO: 44598 - DNA, 1698 bp, Homo Sapiens
atggcgccggagcggctgcggagccgggcgctctccgccttcaagttgcggggcttgctgctccgtggtgaagctattaagtacctcacagaagctcttcagtctatcagtgaattagagcttgaagataaactggaaaagataattaatgcagttgagaagcaacccttgtcatcaaacatgattgaacgatctgtggtggaagcagcagtccaggaatgcagtcagtctgttgatgaaactatagagcacgttttcaatatcataggagcatttgatattccacgctttgtgtacaattcagaaagaaaaaaatttcttcctctgttaatgaccaaccaccctgcaccaaatttatttggaacaccaagagataaagcagagatgtttcgtgagcgatataccattttgcaccagaggacccacaggcatgaattatttactcctccggtgataggttctcaccctgatgaaagcggaagcaaattccagcttaaaacaatagaaaccttattgggtagtacaaccaaaatcggagatgcgattgttcttggaatgataacgcagttaaaagagggaaaattttttctggaagatcctactggaacagtccaactagaccttaaattattttcctcaactgttgtgtaccagttccatagtggtttatacacagaggcatgctttgtcttagcagaaggttggtttgaagatcaagtgtttcatgtcaatgcctttggatttccacccactgagccctctagtactactagggcatactatggaaatattaatttttttggaggtccttctaatacatctgtgaagacttctgcaaaactaaaacagctagaagaggagaataaagatgctatgtttgtgtttttatctgatgtttggttggaccaggtggaagtattggaaaaacttcgcataatgtttgctggttattcaccagcacctccaacctgctttattctgtgtggtaatttttcatctgcaccatatggaaaaaatcaagttcaagctttgaaagattccctaaaaactttggcagatataatatgtgaatacccagatattcaccaaagtagtcgttttgtgtttgtacctggtccagaggatcctggatttggttccatcttaccaaggccaccacttgctgaaagcatcactaatgaattcagacaaagggtaccattttcagtttttactactaatccttgcagaattcagtactgtacacaggaaattactgtcttccgtgaagacttagtaaataaaatgtgcagaaactgcgtccgttttcctagcagcaatttggctattcctaatcactttgtaaagactatcttatcccaaggacatctgactcccctacctctttatgtctgcccagtgtattgggcatatgactatgctttgagagtgtatcctgtgcccgatctacttgtcattgcagacaaatatgatcctttcactacgacaaataccgaatgcctctgcataaaccctggctcttttccaagaagtggattttcattcaaagttttttatccttctaataagacagtagaagatagcaaacttcaaggcttttgagattcttaaagatcatctgaagaaaattcatcagttttctgcttaactctatatcttatgtgattctgatattacaataaaattatggtaaacttt

SEQ ID NO: 44599 - DNA, 1416 bp, Homo Sapiens
accgagccgaccacggaaaccgagccgaccacacacaccaagccgaccacgcacaccgagccaaccacggaaatcgagccgaccacgcacaccgagctgaccacgcacactgagccgaccacggaaaccgagccgaccacacgcaccgagccgaccacgcacaccgagccgaccacggaaaccgagccaaccacgcacaccgagacgaccacggaaaccgagccgaccatgcacaccgagacgaccacggaaactgagccgaccacgcacattgagccgaccacgcacaccgagccgaccacgcacaccgagctgaccacggaaaccaagctgaccacgcacactgagccgaccacgcacaccgagctgaccacgcacactgagccgaccatgcacaccgagctgaccacggaacccgagctgaccacgcacaccgagctgaccatggaaaccgagctgaccacagaaaccgagccgaccatgcacaccgagctgaccacgcacactgagctgaccatggaaaccgagctgacaacacacaccgagccgaacacgtgcagcgagctgaccacgcacaccgagccgaccacgcacaccgagccgaccacggaaaccgagctgaccacggaaaccgagctgaccacgcacaccgagccgaccatgcacaccgagctgaccacggaaaccgagctgaccacggaaactgagcagaccatgcacaccgagccgaccacgcacaccgagctgaccacggaaactgagccgaccatgcacaccgagctgaccacgcacaccgagctgaccatgcataccgagccgaccatgcacaatgagccgaccacgcacaccgagctgaacatgcacaccgagccgaccatgcacaccgagccgaccacggaaaccgagctgaacatgcataccgagccaaccacacacaccgagccgactacagaaaccgagctgaccacagaaaccaagctgaccacggaaaccgagctgaccacgcacaccgagctgaccacgcacaccgagctgaccacccacaccgagctgaccacgcacaccgagctgaccacgcacaccgagctgaccacgcacaccaagctgaccacgcacaccgagctgaccacgcacaccaagctgaccacgcacaccaagctgaccacgcacaccgagctgaacatgcacaccgagccgaccatgcacaccgagccgaccacggaaaccgagctgaacatgcataccgagccaaccacacacaccgagccgactacagaaaccgagctgaccacagaaaccaagcttagcacggaaaccgagctgaccatgcacaccgagctgaccacgcacaccgagctgaccacgcacaccaagctgaccacgcacaccgagctgaccatggaaaccgagccgacc

SEQ ID NO: 44600 - DNA, 957 bp, Homo Sapiens
atgtgctcagggaatcagacttctcagaatcaaacagcaagcactgatttcaccctcacgggactctttgctgagagcaagcatgctgccctcctctacaccgtgaccttccttcttttcttgatggccctcactgggaatgccctcctcatcctcctcatccactcagagccccgcctccacacccccatgtacttcttcatcagccagctcgcgctcatggatctcatgtacctatgcgtgactgtgcccaagatgcttgtgggccaggtcactggagatgataccatttccccgtcaggctgtgggatccagatgttcttccacctgaccctggctggagctgaggttttcctcctggctgccatggcctatgaccgatatgctgctgtttgcagacctctccattacccactgctgatgaaccagagggtgtgccagctcctggtgtcagcctgctgggttttgggaatggttgatggtttgttgctcacccccattaccatgagcttccccttttgccagtctaggaaaatcctgagttttttctgtgagactcctgccctgctgaagctctcctgctctgacgtctccctctataagatgctcacgtacctgtgctgcatcctcatgcttctcacccccatcatggtcatctccagctcatacaccctcatcctgcatctcatccacaggatgaattctgccgccggccgcaggaaggccttggccacctgctcctcccacatgatcatagtgctgctgctcttcggtgcttccttctacacctacatgctccggagttcctaccacacagctgagcaggacatgatggtgtctgccttttacaccatcttcactcctgtgctgaaccccctcatttacagtctccgcaacaaagatgtcaccagggctctgaggagcatgatgcagtcaagaatgaaccaagaaaagtag

SEQ ID NO: 44601 - DNA, 771 bp, Homo Sapiens
cctgaatggtggaccctcagcccctcctgtacaagatggtcaagcggtgcctcatgcatttgttcattcgacctgtcctgagagtttgtgacatgctggcacggggccaatgttgagtccaccaggatgggagggtggccaggctctgagccactgagcaccagctggccaggatgggtcttcaacaagaaatctcactgacagagcgcctgtcggctgagcagatcaaggagtacaagggagtctttgagatgttcgacgaagagggcaacggggaggtgaagacgggggagctggagtggctcatgagcctgctgggtatcaaccccaccaagagtgagctggcctcaatggccaaggatgtggacagagacaacaaagggttcttcaactgcgatggtttcctggcactaatgggagtttaccatgagaaggcccagaaccaggagagcgagctgagggcggcattccgtgtctttgacaaagagggcaagggctacattgactggaacacactcaagtacgtgctaatgaacgcaggggagcccctcaacgaggtggaggcggagcagatgatgaaggaggccgacaaggatggggacaggaccatcgactatgaggagtttgtggccatgatgacgggggagtccttcaagctgatccagtaggtgcagctgccgcagccgggggaggcctgcccgggaaggctgctgcccctgccccctggcccccactcccccggctccgtgtaaaataaatgttccagcccaa

SEQ ID NO: 44602 - DNA, 2898 bp, Homo Sapiens
tcagaaccaatcttttacaggatttcttctggtgatctcggcggaaagttctccattcacccgcggctgggcactattcgcacccggaagcccctggatcacgagacgcagcccgtggttgtgctcacggtgcaggcgcagctcggcagcgccccagcctgcagcagcaccgaggtcaacataacagtcatggatgtcaatgacaaccacccagcgttcctcaggacctcggatgagattagaatatcccagaccacgccccctggcacagccttgtacctcgcacgtgcggaagacagagacagtgggcggaacggactcatccggtactccatcgccagcccgcagccaggcgtctttgccatcgacagagccctgggggtgctgttcctcaacggcagcctgggcgcgggcgagcagcgggagctcacgctgactctcagggccgaggaccaaggcgtgcatcctcaggcagccctgctggtgctgacagtcgttatcgagaaacgcgaacacagcccatcctggactttcgaacatttggtctatcaagtggaagtcagtgagtctctctcaccgatgacacaaatgctgcaaacacaggcgcacccacttggcccccagcgtgcagcctcgcctcttaggtactcgctggaacccagcgtagactctgctatgtttggaatccgcccttacacgggctggatttatttgcggcgacagtttgactatgaatccacccaaacatataattttagagtgtttgcttggatccccgaggacggattcttgcaaaatgtgagcactacagtcattgttcgtgtctgggatgagaatgacaattcccccaccttcttgcatgatgtgttgtttttgaaagtcgaagagagccctgttccccaaggggtaataggcaaaattacagctattgacatggactctggaaagaatggacagctattatatttccttttgtctgatggaaaattcttcaagatgaatcctaatacagacagctcaaccggagacttgtttctttctaaggaacttgattatgagacgacatctcattatcttttcagagtgattactacagaccatagcaaaaacctttccctgagtagcacagtcttccttagtatcgatgtggaagatcagaatgaccattccccatctttccaggatgagctcattgtgatcagtgtagaggagaatgttcccataggaaccctggtgtatgtcttcaatgccaaagatgatgacggcagttttttgaacagtagaatacaatactacattgaatcccacaaccctggcacgaatccatttctcatccacccctcatttggcacactagtcactgtgtcccgtcttgacagagaaagcattccaactgtcatcctgacagtaacagcatctgatcaggctgtgaatgtgacagaccggcgactgagatcactgacagcacaaatagtgattttggatgtaaatgaccacaaccccacttttatttctttccccaatgcccatgtcaaagaggatgtcacagtgggctccttggtccaccacataactgctcacgatccagacgaaggaaggaatggaaaagtaacatacagcatcctctcaggaaatgaaaacatgacgtttatgctagatgagtcatcaggagaactctcaaccactcgtgctttggaccgggagcaaatcagcaattttacccttgtcattctgtgctctgacctgggagatccacctaggagctctgtaatacacctgcaagttagagttttggatgccaatgaccacagtccttcttttcccacactttattaccagtcctctgtgagagaagatgctgaagtgggaacagtggttcttgtgctttcagctgtggacaaggatgaaggcctgaatgggcaaactgagtattttctgactgatgaggcttctggtgcattcaccattgatcctatgtcaggcacattgaaaaccagcaacaccctcgaccgtgaagccagatctcagcatacatttagtgctgtggccagagactgtagcatccagggttcacgaagcaccactgtaattataaaagtatatgtcactgatgttaatgacaatgatccagttttggaacagaacccttttgatgtgtttctttcccccgagtcgcctacaaaccagacaactgtcattgtgagagctgatgacctggacttggggcccaatggaactgtggtttttagttttgcagagacccagtcaatgttttctattgataaatacacaggagaaattcaatttcagcaaaatccatcttcagaatacttccctatctggctgcaagaagcaagtgctagccatgagcttgtcattctggcatctgacagtggctgccctccattgagttccacagctgtcatatcaatacaagtacttgatgtcaatgacaatcccccaaacttcagcagcctgagctatcacacccatgtcaaggaaagcacccctctagggagtcacatcactgtggtctcagcaaatgaccgtgacacagggtcacatgcagaaatcatctacaacatcatctctggaaatgagaagggacatttttacttagaagaaaacactggagttctttatttgattaaacctctggattatgaaaaaatgacaaaattcaccttaactgtccaagcttcagatgcagaaaagaaacatttttcttttgcagttgtgtttgtcagtgtcctggatgataacgaccatgcacctcagtttatgttctcaagcttcagctgtattgttccagaaaatctgcctatttcctctaccatatgctctataaatgctctggattttgatgctggtccgtatggagaattgacctattctatt

SEQ ID NO: 44603 - DNA, 2703 bp, Homo Sapiens
atgggggcgtgggccctggcaagtgcactcctcagccaatcagcgtcctgcccggctggtggattcggttacaagcccaagatcaccccatactccagcctctttcctcctcctcccgcagctccattcattggtcccgccgcaccgggcctgctgggctccgcttccgttccactgctcagctgccgcctggtggggccaccaagggcaggcatcccaggggctttgtctgactggactgggccagtgcagaatgggggttcaggcagggctgtttgggatgctgggcttcctgggggtggccctggggggctcccctgccctccgctggtacaggacctcctgccacttgaccaaggccgtccctggcaacccactggggtacctgagcttcctggccaaggatgctcagggactggccctgatccatgcccgctgggatgcgcataggaggctgcagtcatgtagctgggaggatgagccggagctcaccgcagcctacggtgctctctgtgctcatgagactgcctggggctccttcatccacacccccggacccgagctgcagagagcactggccactcttcagagtcagtgggaggcatgccgagcgcttgaggagagtccagcaggggccaggaagaagcgagcagcagggcagagtggagtccctggtggagggcaccagcgagagaagagaggatggaccatgcctggcacactgtggtgtggagttggagattctgctgggaactcctcggagctgggggtcttccagggacctgatctctgttgccgggaacatgaccgctgcccacagaacatctcacccttgcagtacaactatggcatccgaaactaccgattccacaccatctcccactgtgactgtgacaccaggtttcagcaatgcctacagaatcagcacgactccatctcggacatcgtgggcgtggccttcttcaacgtgctggagatcccctgctttgtgctggaggagcaggaggcgtgtgtggcgtggtactggtggggcgggtgtaggatgtacggcacagtgcccctcgctcgcctgcagcccaggaccttctacaatgcctcctggagctcccgggccacctccccaactcccagctcccggagcccagcccctcccaagcctcgacagaagcagcaccttcggaaggggccaccacatcagaaagggtccaagcgccccagcaaagccaacaccacagccctccaggaccctatggtctctcccaggcttgatgtggcccccacaggcctccagggcccacagggtggcctaaaacctcagggtgcccgctgggtctgccgcagcttccgccgccacctggaccagtgtgagcaccagattgggccccgggaaatcgagttccagctgctcaacagcgcccaagagcccctcttccactgcaactgcacgcgccgtctggcacgcttcctgaggctccacagcccacccgaggttaccaacatgctttgggagctgctgggcacaacctgcttcaagctggcccctccactggactgtgtggaaggcaaaaactgttccagagaccctagggccatcagggtgtcagcccggcacttgcggaggcttcagcagaggcgacaccagctccaggataaaggcacagatgagaggcagccatggccttcagagcccctgagaggccccatgtcattctacaaccagtgcctgcagctaacccaggcagccaggagacccgacaggcagcagaagtcctggagccagtgacctcagtttcagctttcctgggcaccagcctggaccttgcccatggctatgccaagccttgggaatctcagcctcccctccgtaggttagactgaagcatggcagaggctgttgtggacaatcaagaggatgaatggggggatctcaaggcccaaatgctggaccacatctcctgctgttctgggtaaccttgagctatgtatgacacaactcttctatgcctggatgtggtgttcaggaagctcattctgatgccctgggctttggccttgccagggaacttcacatacagatgagaatggggaaagggtaacttattgcagcagccccaggcagtaccaggaggaggtacatgtatgtccgtgttgcaaaaataatacatgcctcaaaaacctgcctaggggagccctagtgcctgggtgctgtggcctgaggtagcaggtgggaagttagggatgtcacagaaatgtctgtgtctgaatccaggattggggtgggtgttggagagggctttcagctcccctcctcccaggggggcctctttttttaacggctgccgtgcccttcctggcccagccctaaacctaaattcaaatctcctccatgcctttgcgcaaaggacctccctcttgcactctaagccttagtttcctcctctaaaaaaagggggtctctaaacaggagctacctcatagggttgttgaggattaagtgaaccaatacatatacagtgcttagcacttaataagtattcccccctgcgacacctagctgaactatggtttggtgtctgatcttgagaggttgatgtaaccttttaaaggcctcagttcgctcacctgtgaaatgggtctaagaatagcactgatctcacagggttgtgatgcagattaaaggagatggcatgtgtaatgtataca

SEQ ID NO: 44604 - DNA, 2942 bp, Homo Sapiens
cgcccgagccgcgcgcggagctgccgggggctccttagcacccgggcgccggggccctcgcccttccgcagccttcactccagccctctgctcccgcacgccatgaagtcgccgttctaccgctgccagaacaccacctctgtggaaaaaggcaactcggcggtgatgggcggggtgctcttcagcaccggcctcctgggcaacctgctggccctggggctgctggcgcgctcggggctggggtggtgctcgcggcgtccactgcgcccgctgccctcggtcttctacatgctggtgtgtggcctgacggtcaccgacttgctgggcaagtgcctcctaagcccggtggtgctggctgcctacgctcagaaccggagtctgcgggtgcttgcgcccgcattggacaactcgttgtgccaagccttcgccttcttcatgtccttctttgggctctcctcgacactgcaactcctggccatggcactggagtgctggctctccctagggcaccctttcttctaccgacggcacatcaccctgcgcctgggcgcactggtggccccggtggtgagcgccttctccctggctttctgcgcgctacctttcatgggcttcgggaagttcgtgcagtactgccccggcacctggtgctttatccagatggtccacgaggagggctcgctgtcggtgctggggtactctgtgctctactccagcctcatggcgctgctggtcctcgccaccgtgctgtgcaacctcggcgccatgcgcaacctctatgcgatgcaccggcggctgcagcggcacccgcgctcctgcaccagggactgtgccgagccgcgcgcggacgggagggaagcgtcccctcagcccctggaggagctggatcacctcctgctgctggcgctgatgaccgtgctcttcactatgtgttctctgcccgtaatttatcgcgcttactatggagcatttaaggatgtcaaggagaaaaacaggacctctgaagaagcagaagacctccgagccttgcgatttctatctgtgatttcaattgtggacccttggatttttatcattttcagatctccagtatttcggatattttttcacaagattttcattagacctcttaggtacaggagccggtgcagcaattccactaacatggaatccagtctgtgacagtgtttttcactctgtggtaagctgaggaatatgtcacattttcagtcaaagaaccatgattaaaaaaaaaaagacaacttacaatttaaatccttaaaagttacctcccataacaaaagcatgtatatgtattttcaaaagtatttgatatcttaacaatgtgttaccattctatagtcatgaaccccttcagtgcattttcatttttttattaacagcaactaaaattttatatattgtaaccagtgttaaaagtcttaaaaaacaatggtattaattgtccctacatttgtgcttggtggccctattttttttttttagagaggccttgagacatacaggtcttttaaaatacagtagaaacaccactgtttacgattatacgatggacattcataaaaagcataatttcttaccctattcattttttggtgaaacctgattcattgattttatatcattgccgatgtttagttcatttctttgccaattgatctaagcatagcctgaattatgatgttcctcagagaagtgaggtgggaaatatgaccaggtcaggcagttggaggggcttccccagccaccatcggggagtacttgctgcctcaggtggagacctgaagctgtaactagatgcagagcaagatatgactatagcccacaacccaaagaagcaaaaattcgtttttatcttttgaaatccagtttcttttgtattgagtcaagggtgtcagtaggaatcaaaagttgggggtgggttgcaaaatgttctttcagtttttagaacctccattttataaaagaattatcctatcaatggattctttagtggaaggatttatgcttctttgaaaaccagtgtgtgactcactgtagagccatgtttactgtttgactgtgtggcacaggggggcatttggcacagcaaaaagcccacccaggacttagcctcagttgacgatagtaacaatggccttaacatctaccttaacagctacctattacagccgtattctgctgtccgtggagacggtaagatcttaggttccaagattttacttcaaattacaccttcaaaactggagcagcatatagccgaaaaggagcacaactgagcactttaatagtaatttaaaagttttcaagggtcagcaatatgatgactgaaagggaaaagtggaggaaacgcagctgcaactgaagcggagactctaaacccagcttgcaggtaagagctttcacctttggtaaaagaacagctggggaggttcaaggggtttcagcatctctggagttcctttgtatctgacaatctcaggactccaaggtgcaaagcctgctgcatttgcgtgatctcaagacctccagccagaagtcccttccaaatataagagtactcatgtttatttatttccaactgagcagcaacctcctttgtttcacttatgttttttccagtatctgagataatataaagctgggtaattttttatgtaattttttggtatagcaaaactgtgaaaaagccaaattaggcatacaaggagtatgatttaacagtatgacatgatgaaaaaaatacagttgtttttgaaatttaacttttgtttgtaccttcaatgtgtaagtacatgcatgttttattgtcagaggaagaacatgttttttgtattctttttttggagaggtgtgttaggataattgtccagttaatttgaaaaggccccagatgaatcaataaatataattttatagta

SEQ ID NO: 44605 - DNA, 457 bp, Homo Sapiens
accctagatcccaagatctccaaggatttggtggcatacccactccagcacacagaagcatgaggttcatgactctcctcttcctgacagctctggcaggagccctggtctgtgcctatgatccagaggccgcctctgccccaggatcggggaacccttgccatgaagcatcagcagctcaaaaggaaaatgcaggtgaagacccagggttagccagacaggcaccaaagccaaggaagcagagatccagccttctggaaaaaggcctagacggagcaaaaaaagctgtggggggactcggaaaactaggaaaagatgcagtcgaagatctagaaagcgtgggtaaaggagccgtccatgacgttaaagacgtccttgactcagtactatagctgtaaggagaagctgagaaatgatacccaggagcagcaggctttacgtcttcagcctaaaacct

SEQ ID NO: 44606 - DNA, 531 bp, Homo Sapiens
atgctgatgcctaagaagaaccggattgccattcatgaactcctttttaaggagggagtcatggtggccaagaaggatgtccacatgcctaagcacccggagctggcagacaagaatgtgcccaaccttcacgtcatgaaggccatgcagtctctcaagtcccggggctgcgtgaaggaacagtttgcctggagacatttctactggtaccttaccaatgagggtagccagtatctccgtgattaccttcatctgcccccagagattgttcctgccaccctacatctgcccccggagattgttcctgccaccctacaccgcagccgtccagagactggcaggcctcggcctaaaggtctggagggtaagcgacctgcaagactcacaagacgggaagctgacagagatacctacagacggtgttctgtgccccctggtgctgacaagaaagccgaggctggggctgggtcagcaaccgaattccagtttagaggcagatgtggtcgtggacgtggtcagccacctcaataa

SEQ ID NO: 44607 - DNA, 964 bp, Homo Sapiens
tgagttatttctgttggccgcattaggaacctgacatttgattcattcagtgggtcctgcctaggtcctttaaaacagaatggactgttagggaaaggctgccctgggccatgcaggccgaggagaccaaggggattggaataaccagtatggcaaaatgcttggtcaagatccagactcgacgaagcctccaattgcacatggtgaaccactgcaacagtaatgtgtttgttcgtctgctgagactcggctccaaggtcacagctcgtaacactggtgttccattgcctaaagaggagaacatttctgctcccttgatctccagctccccagtgaaggcagcccgggagtatgaagatccccctagtgaagaggaagataaaataaaagaagaacctttaaccatctctgaactagtgtacaacccaagtgccagcctgctccccacccctgtggatgacgatgagattgacatgctctttgactgtccttctaggcttgagttggaaagagaagacacagattcatttgaggatctggaagcagatgaaaacgcctttttgattgctgaagaagaggagctgaaggaggctcgccgtgctttgtcgtggagctatgacattctgactggccatattcgggtgaacccactggtcaagagtttttccaggctccttgtggtgggcctgggactgctgctctttgtatttcccctgctcctcctccttttggagtcagtctccatgcagtaaacagacccagcagaacctgcccgtggtgagctcagccaagacttggctctccatgttccagcctccgtctgtgactgggtgggtaagttcggtgggccccacccagtgggctcggcagccgtcacttcacagaagaagaaaggaaccttgcttaggcctcagatcccagctgtgctctccaatccattaataaagctgcttttaaccctctc

SEQ ID NO: 44608 - DNA, 765 bp, Homo Sapiens
gtgagaccctacccacccccctgcccgcgccgggcctcgtccgctccccggccccttccccgcgggcgtgtgggtcccgggctggggtctcggcgtccgcgatcccgagcccgctcgcttcggcccccctcaggaggctgcgaggaggggtggcggcggcatggaggcgcgcttcacgcgcgggaagtcggcgctgctggagcgcgcgctggcgcggccgcgcaccgaggtgagcctgagcgccttcgcactgctgttctccgagctggtacagcactgccagagccgcgtcttctccgtggccgagctgcagtcgcgcctggccgcgctgggccgccaggtgggcgcgcgcgtgctggatgcgctggtggcgcgcgaaaagggtgcccggcgtgagaccaaggtgctaggcgcgttgctcttcgtcaagggcgccgtgtggaaggcgctcttcggcaaggaggcggacaagctggagcaggccaacgatgacgcgcgcaccttctacatcatcgagcgcgagccgctcatcaacacctacatctccgtgcccaaggagaacagcacgctcaactgcgccagcttcacggcgggcatcgtggaggcggtgctcacacacagcggcttccctgccaaggtcacggcgcactggcacaagggcaccacgctcatgatcaagttcgaggaggcagtcatcgctcgagaccgggccctggagggccgctgaccctgccggagataaaggatacagagagcccctcccca

SEQ ID NO: 44609 - DNA, 735 bp, Homo Sapiens
acagggagagaggggtggccgtgggtggggtggggtggggtggaagggaccacatccagcaggctgagaccatcccaggaagttgtggggttggggaggcctagggttaggcaagaccttgaggcaggggttgaagccagggagtggtcagccagcactgtccctgcctgtccccatcccacagagggcaaggagttggtgcacacctacaagggctgcatcaggtcccaggactgctactccggcgttatatccaccaccatgggccccaaggaccacatggtaaccagctccttctgctgccagagcgacggctgcaacagtgcctttttgtctgcctgtttccttacctgtaaaatgcagtgtctattagcaaccctggtgtttcccggggttgttgggaggttgggggaacggcttaaacatccctattcaccttacacttcatcctcatcctcagttcccttgaccaatcttactgagaatggcctgatgtgccccgcctgcactgcgagcttcagggacaaatgcatggggcccatgacccactgtactggaaaggaaaaccactgcgtctccttatctggacacgtgcaggctggtattttcaaacccagatttgctatgcggggctgtgctacagagagtatgtgctttaccaagcctggtgctgaagtacccacaggcaccaatgtcctcttcctccatcatatagagtgcactcactccccctga

SEQ ID NO: 44610 - DNA, 5429 bp, Homo Sapiens
atggcagaaacatcgccagagccttctgggcagcttgttgtacactcagacgctcacagtgacactgtgctggccagttttgaggatcagaggaagaaaggcttcctctgtgacattactttaatcgtggagaatgtacatttccgggcccacaaagccttacttgctgccagtagtgaatacttctcaatgatgtttgcagaagagggggaaatcggccaatccatttatatgctggaaggcatggttgcagacacctttggtatcctgctggaatttatctacacaggttatctccatgccagtgagaaaagtacagaacaaatcctggctactgctcagttcttaaaagtctatgacctggtaaaggcttacacagacttccaaaataatcatagctccccaaagccaacaactttgaacactgctggtgccccagtggttgttatctctaataagaaaaacgatcctccaaagcggaaacggggaagaccaaaaaaagtcaatacattgcaggaggagaaatcagaactggctgcagaggaagaaatacagttaagagtgaacaattcagttcagaatagacaaaactttgtggttaaaggagacagtggtgtactgaatgagcaaattgcagcaaaagaaaaggaagaatcggagcctacttgtgagccaagtagagaggaggaaatgccagttgaaaaagatgagaactatgatcccaagaccgaggatggccaggcaagccagagtcgatacagcaagcggaggatttggagatccgtcaaacttaaagattacaaacttgttggggatcaagaggaccatggttcagccaagaggatctgtggaaggagaaagcgccctggaggccctgaggcccgctgtaaagactgtggcaaggtctttaagtacaatcactttttagcaatccaccagaggagccacacaggggagcgacctttcaaatgtaatgagtgtggaaaaggctttgcccagaagcactcgctacaggtccacaccaggatgcacacaggcgagcggccgtacacctgcaccgtgtgcagcaaggctctgaccaccaagcactcactgctggagcacatgagcctgcactcaggacagaagtcttttacctgtgatcaatgcggaaaatatttcagccagaacagacagctaaagagccattaccgagttcatacaggccactcattaccggaatgcaaagactgccatcgcaaattcatggatgtgtctcagctaaagaaacatctgcgaacacacacaggtgagaagccatttacttgtgaaatctgtggcaaatctttcacagcaaagagttctcttcagacccacatcagaatccatcgaggagaaaagccatactcctgtggcatttgtggcaaatccttctctgactccagtgccaaaaggagacactgcattctacacactggcaagaagcctttctcctgccctgagtgtaacttacagtttgctcgcttagacaacttgaaggctcacttgaaaattcatagcaaggagaagcatgcttcagatgccagcagcatttctggcagtagtaatacagaagaggtcaggaatattcttcagctacagccatatcaactctctacctcgggagagcaggaaattcagcttctcgtaaccgattctgtacataacatcaatttcatgcccggtcctagccagggaatcagcattgtgactgcagagagttcccaaaacatgactgcagaccaggctgctaatcttaccctgctcacgcagcagccagagcaactgcagaatttaattctttcagctcaacaggagcaaacagaacacattcagagcctcaatatgattgaaagccagatggggccctcacaaacagagccagtgcacgtgatcactctgtccaaggaaacactggaacatcttcatgcccatcaagagcaaacagaggagctccatttagctacaagtacttcagatccagctcagcacctgcagctgacacaggagcctggtccgccaccacccactcaccacgtgccccagccaacgccacttggccaggagcagagctgacctgtaaacacgtttgactgcttgattgggctcttcttataagccagctctgactggattttgaacgcttgaaatcaggctctccacaccattgacttgcagatgcttctgtgagagctgtgatggctaactgatgtttataatgccctccatccaggtagcaagatgtgtgtatgtcttgtctaaggtactgatttgtattgagcatttcaatattattgaatggttttcattttaatctgcaatgtctcataaagactcgggtagtttttctttgggggcattgatctcagtttttctgtaaggtttaaatgttcacagccataggttatggtcttgccaacctccccagttatgtttttttgttttctaggacaaagggagtcattttggttgaactgggcagaatggtttgttctattttcttatttttcttaggcaacacagttgttaccacaagacaagtcagggctaaatatgacagatcacaatgtatggggaatttgcccttttaataatttccagtcccctaagacaaagtaaccctcaacgttttatctttatgcagtacagtgggcttattgtgttaacacttcagaaagattcaaactcataaactcagtattttaactcaaaattcatgtaacaagatagccaaaagcataggatttcttaaaattctgaattcgtcttttctgagaaacataaatttacatatttttcaacagaaggctatcaaaattttaattaagtttaaaatacaaaattggatcaagacattcaccctaaattctgaatttttgtcagaaaagagatttgattttcatgaaggtaaagctttcttcactattctggaacataaaactttattcagtgtaatttaagtcttatatatactctactgaattctaactgatctcctgaaaatgttgatctacgtgttgtgtctgataactttctggagatggaagcttataattcatttttattgcagactagttaaatcccacaaagtgaatatcttctcctaatctttccttttttagagacagggtctcactgtatcacccaggccagagtgtagtggcacaatcattgctcactgtaacctcgaattcctgggctcaagcaaccctcccaccttagcctccctagtagctgggactacagggatgtaccaccacacccagctaatcttcatctaatcttaaaactttgagcctcagagactttgtagccagcatgtgtctgtaattgtatgatttttaaatcatcatcaaaagattaaattatgtttgggttaggttttcaagctaagcttattgaattcttttaccactttcatgtaagctggtaggggatttttgagaaaagaaggtgggcactagtatatctaaattaacaatgctgatggggagtagggggtaatctactctaaaattaatagagcctttccatcaattgttttgttttagacatccttgatttctccctaaatcaaataagttatttggaggttagagtaatagagaattcttcaggtttgagagaagataaaaacattttggttgcatatttgctaagctatattttattatatgtaattcacaaaacttccaaaatgatatatatcttatatgtatcaaccaaactaatgttaaatcaggcctgactagagcaaagataacaattttttacaaacactgttaagccctaagtattatttcaggttctcgtttaaactgtttaattttattcttaaaacacaaagtttttaccaacttttcaaagcccaccaatccacattttctccaggaaattaaatatttaagtaagtgagtgtttactcactctggatagctaggtgattattcagaaaatacggttacatagctatttataagtcaagtttcactggctctataacagtctacctctacactaagagaactataacatgaacaacataggtcactttaaatgttctagtagcaacttttaaaaacataaaaagaagcaggtgaaaatgttaataaaagtttatttaatccaacatttgccaaatatttcaacatataaaaatatattagtgagacattttacattctctttttcatactaagctttcgaaatctggtgtgtattttacactttctgcacatctccatttggatgctaatgttcattggacatacttgatctgtatttagatttcatacaacttacagttgaaaacagattctcatatcaagtagctaagacaaaagtttttttcaagaattgaaataagtatcagtttaaaaatttatattaaatttattaaaattaaaatccagttccttgttgcatgggacacagtgcaaatgcttgataagcacatgtggctagtggctgctatattggacagcatgggccacctgtttctaacttgagcatcagtcctagctatgcctgaattatttgaccagctgtcaaagagaaacaaggaaatgatagctttgttaatctagcctctttctttgtcccacatatacattctacccctttgaataaaaaagttcaatgacgccgggcgtggaggctcatgcctgtaatcccagcactttgggaggccaaggtgggcggatcacgaggtcaggagttcgagggcagcctgaccaacatagtgaaaccccatctctactaaaaatacaaaaattagctgggcgtggtggtgtacccctgtaatcccagctactcgggaggctgagacaggagaatcacttgaacccaggaggcggaggctgcagtgagctgagatcacgccattgcactcaagcctggcgacagagcgagactccgtctcaaaaaaaaaagttaaatgacttgagtacccaaaagaaatgtcgtgaacatgaaagtacttctcatgtgtccttgagaaatgatgttgctagtgcagtgtttcacaattcattttctactaaatgtgtaccattttttaaattgttttaacagaaatatagagtgtgtttcttaggaaatagaatgttatgctttggggctcctgaaacacctcgttttgaaggtgaatctttggttttctcccagaagagggtctgccttgggatgattggagctcttaccatcaaaatcagttattcaagtgcttgcccagtgcttcttgaaactcacctctactctgtattttctacagttggttcttgtgttataaatgttgtgagcaacagattaaatgatgctgaggaatgaaaaaagattctcattataaatgcttacctaggattctcattatagatgcttatctaggttttcataaatgggaatgtaacaat

SEQ ID NO: 44611 - DNA, 534 bp, Homo Sapiens
aagtcctctcactctcgtaggactgctctacactgggtctgtgccaatggccatgcagaagtagtaacacctctggtagatagaaagtgccagcttgacatccttgatggtgaaaacaggacacctctgatgaaggctgcgcaatgccagagggaggtttgtgcaaatattctcatagattctggtgctgatccaaatattgtagatgtgtatggcaacacagctgtccattatgctctttatggtgagaatttgtcagtggtggcaaaattgctgtcctgtggtgcagacatcgaagtgaagaacaaggctggccacacaccacttttactggccataaggaaaagaagtgagcaaattgtggaatttttactgacaaaaaatacaaatgcaaatgcagttgataagtttaaatgcacagccctcatgcttgccatatgtcatggatcatcagagatagttggcctggttcttcagcaaaatgttgacacctgtgctgaagatccgtgtggaatgattgcagaacgttatgct

SEQ ID NO: 44612 - DNA, 291 bp, Homo Sapiens
gacatccagttgacccagtctccatcctccctgtctgcatctgtaggagacagagtcaccatcacttgccgggtgagtcagggcattagcagttatttaaattggtatcggcagaaaccagggaaagttcctaagctcctgatctatagtgcatccaatttgcaatctggagtcccatctcggttcagtggcagtggatctgggacagatttcactctcactatcagcagcctgcagcctgaagatgttgcaacttattacggtcaacggacttacaatgcccctcccaca

SEQ ID NO: 44613 - DNA, 1500 bp, Homo Sapiens
ggcgggcggaccaaggtcaagagttcgacaccagcctggccaacatggcccatctctactaagaatacaaaaattagccaggtgtggtggtgcgcgcctgtaatcccagctactcaggaggctggagaatcacttgaacctgggagggaggttgcagccgagatcgtgccactgcactccagcctggacgacagagcaaggctccgtctcaggggggtggggggagctataaccagagaatgtggcggggcacagtggctaacgcctacaatgccagcacttcgggagaggtgggctgactgcttgagcccaggagttgaccagcctgggcaacatgatgaaaccccatctctaaaaaaaaatacaaaattagccagacatggggtcatgcacctatggtcccagctacatgggaggctgaggtgggaggatcacctgagcggaggttgcagctgcagtgagattgcttactgcacgccagcctgggtgacaagaccctgtttcaaaataaataaaaaaagacagagggctgggtgcagtggctcagtatcccagcactttgggaggaggccgaggcagggtcaggagttcaagaccagcctggccaacatggtgaaatcccgtttctacaaaaaaaatcagccaggtgtggtggcgggtgcctgtaatcccagctacttgggaggcaggagaatcgcttggacccgggaggcggaggttgcagtgagccaagatcacatcattgcactccagcctgggcaacagagtgagactgtagctgggattacaggcgcacgccaccatgcctggctatttgtatttttagtagagacagatcttcaccatgttggtcaggctggtctcaaactcttgacttcgatccgcccgcctcggcctaccaaagtgctgggattacaggcatcaaccgccgcgcccagccgctttttctttaatctaactagaatgaagccatactggagtgtaatgtcttggctcactgcaacctccatctccccggttcaggcgattctcctgcctcggccacccgaaggattacaggtgcctgccaccacgcctggctcatttttgtacattagtagaggtttcaccatgttcaccaggctggtcttgaactcccaggtgatccacctcggcctcccaaagtgctgggattacaggtgtgagccaccatgcccagccattatactctcgataacaattttgctgcaagagcataattatgatcgaatatttcctttgcaaatctatttctctgaagtgtgtttaccacaaactctgtctcccgggttcttctcctgcctcagcctcctgagtagctgggattattggcacatgccaccacacccagctaatgtttgtgttttcagtagagatggggtttcaccatgtgggctaggctggtctcaaactcctgacctcaaactgtccacctcggcctcccaaagtgctgggattacaggcgtgagccaccgcacccgg

SEQ ID NO: 44614 - DNA, 5290 bp, Homo Sapiens
ctctctcttcccctctccccttctcttccccgaggctatgtccacccggtgcggcgaggcgggcagagccagaggcacgcagccgcacaggggctacagagcccagaatcagccctacaagatgcacttaggacccccgcggctggaagaatgagcttgtccttcctcctcctcctcttcttcagccacctgatcctcagcgcctgggctcacggggagaagcgtctcgcccccaaagggcaacccggacccgctgccactgataggaaccctagaggctccagcagcagacagagcagcagtagcgctatgtcttcctcttctgcctcctcctcccccgcagcttctctgggcagccaaggaagtggcttggagcagagcagtttccagtggagcccctcggggcgccggaccggcagcctctactgcagagtgggcatcggtttccatctgcagatctacccggatggcaaagtcaatggatcccacgaagccaatatgttaagtgttttggaaatatttgctgtgtctcaggggattgtaggaatacgaggagttttcagcaacaaatttttagcgatgtcaaaaaaaggaaaactccatgcaagtgccaagttcacagatgactgcaagttcagggagcgttttcaagaaaatagctataatacctatgcctcagcaatacatagaactgaaaaaacagggcgggagtggtatgtggccctgaataaaagaggaaaagccaaacgagggtgcagcccccgggttaaaccccagcatatctctacccattttctgccaagattcaagcagtcggagcagccagaactttctttcacggttactgttcctgaaaagaaaaagccacctagccctatcaagccaaagattcccctttctgcacctcggaaaaataccaactcagtgaaatacagactcaagtttcgctttggataatattcctcttggccttgtgagaaaccattctttcccctcaggagtttctataggtgtcttcagagttctgaagaaaaattactggacacagcttcagctatacttacactgtattgaagtcacgtcatttgtttcaatgtgactgaaacaaaatgttttttgataggaaggaaactggaattctttgtactaatacagggagcacactccttcagttcagcaagacataaagccttttgctttatgcttgagggatatttagaactttgtattttcggaaagttaaataacagggactacgtatttttctgacttttacagattaacctgaaagaacatacatgatacatttttatttttggtttccaaagaatattttgatgcagataaaatattttgttaacttttgtttttttttgtttgttttcttaaaagtacctctgcattgagcatattttcttacttttattattttaattaatatgacataagcaatcattttatgctgtttatgaattataaatgtgtttatagctcatttgtaatatggaaatcttttacatttttcctattcactgcacttttttattgtttttatttctagccatacctcagataatatgtttagttttacattttaaaatgtttaaattctctttcacagcaccaaaggctcagcttggatttgtgtgtatgtgtatgtcaattcatgacattatgtggaatcctaaacctttggtggctgggatatgatgggttagaagcaaggagaaaatataaggactttttgatggaattaaatgtgggaggtaaggaaaaggatttagaggtaaaagtacactaagtttgcaacatttattgagatctaagtctgtcttgccttcatttctctttttatctcccccttgccctcattcttgaacagctggaggaatacattttattctgtccatgaagcatacactatgaaattcaagtgcttaaaaatacttctatgactctctgctatcccactgtatagatccacagggagcaaacacttagaaatgatagagaactgaaggagatcaatggtttaacagttatccatgccaagtcccattgtcagaaatattcttattactcagtcaaacactctttgagcttcccttcctaaaggtaaccaatccagtgaatagatgtgcccttttataaggaaacttctgatgtttattaaaaaaactggccttttgatagaggtaacttaatttgggaatttgttgtgttgaaatggcatttaatttcaacctaaatactgactgctggacataaatcacagaaaatttaacttaagaaaatttacaaaatttattctcaggtaatcattttaataaagttctgcaaaatacacgtttatcttacattcagaaatgtggcaaaaaaggcatagctaaaggctaaacatatggctttagtagtaacaaaagggttcatagaaacttcatggtttgcatttaaacatgtttaaagtgtacttataaactatttttttcttaaagcaaactatgatttattttggtgcacaaatacaaagtggaaacttaccaaaattgaactagctaccatataagcagattgctttaatttgatgggaaaatagtacacacatatatataacaaataatatattaaaaaacccatccatcaactaaaacattatatgtatacatcagtatagtgttttattataaagccaattatctgattaagcattctttccactgaatgcataatgtttaaatagcataaaatgaaatgctacaaaaattgaactaatttatactttaaagtatttctgggttaaatgaaacaatgaaattttttagtatgttcaactctcatccaaatggcatatgaccctgtttacacagcctaaagctaaaaatattactctagtttattctaatctattgttaagtattgtgcactgtataccaagttcttagggcacatgaaaaattttagctgccaaacaggaactagtaaacatatgttcctaataagtgaagggaaagataataatgatggtcaacaataagccacgtcaatgcataagttgtataggctaaatgttgcttgtaggctacattaaactcaaatgtaatagtttatcttatactcctggtttgatttgattagcatattaacgtgaaagtaggatagctactaaatatatattatgcaagtcaggaatcattaatttcaaaatttaaagccatgctaaaattaaaaagaaaatattaaattacacaattacacttgtctttactggccatacaaaatgattttttttttttttttgagacagagtcttgctctgtcaccaggctggagtgcagtggcatgatctcggctcactgcaacctccaactccctggtttaagggattctcctgcctcagcctcccaagtagctgggattacagactcatgccaccacgccagctaatttttgtatttttagtagagacggggtttcaccatgttggtcaggatggtctcaatcctggcctcttgatagtcctgacctcatgatctgcccacctcggcctccccaaagtgctgggattacaggtacaatgatgtataattaatgcttagtgaagcataaagttacctacatcaattaattaaatgaacttatgtacagaaaacatgtataaatataagtctatactaatgcttacaactttctaagagggttcttgcttatgtagctttttattattttaagtaactagaaccaccaaatatcaaataaaattatttggttatggttatgttcatctaaacacaacaataacttttatattaatatttaggagtctattttgtctataggtgacaaacatctccagactaacatgtcagttttatcaattatattatgtttaattatttaagatttctttatgtggaacatctatagagataaatagaaattttcaataagatgtagtaacactgtgatttatctttcaagagtctctcttcacttccttctaaagagactaatttgagagtacaggtgcatattaattttcttggttctttcagctgaattatattggtccagaagttcaaaatcatgtgacaataataagggatactgacagaagttatttccaagtttgtgtatatattataaaaattacatatataaaactaaggcttttatttctgttatttttaagcttttatttcttgtagctaaaaataaaacatcataaatctggtaggtaaatttcttattaaatcaatcttgaaatagaaaatgtaataactttcttaccattaacattttttacccttccatagaagggagggaataaatcatgacttatcccattttcaataacaaaacgaaactatggcactaaccaaaaacttgcattctggcataatttttacagttgcagagaattgtttctgggctcattaaaaaaagtagtattgcagacattgctgcaatgggaagcagacaataacttcttaaaggaattctacacctcctttaagatttacttaattgctacatctaaattctgataatttaaaatccattttaggtgataaaattttttaaaagttttgaaggaaacctctggataaatggacaaggcctaatttttttttgtagtcaatccaactgtactggccaatttttgaaataagattatatgattaggtattagcagagacaaagagttacctcctccatcttactctgccctatttgaaagtctcaggggagaaaagggaacaagatgctgatccaacctgagtggagtcaggtgaggcatctttacatctaagaatttttttttaaattttattattattatacttcaagttctagggtacatgtccacaatgcacatgtctgtcacacatgcacacatgtgccatgctggtgtgctgcacccaccaacctgtcatccagcattaggtatatctcctaatgctatccctcccctctccacccaccccacagcaggccccggtatgtgatgttccccttcgtgtgtccatgtgttcttattgttcaattcccacctatgagtgagaatatgtggtgtttggtttttggtccttgcaatagtttgctgagaatgatggtttccagcttcatccatgtccctacaaagaacatgaactcatcattttttatggctgcatagtattccatggtgtatatgtgccacattttcttaatccagtctatcattgttggacatttgggttggttccaagtctttgctattgtgaatagtgctgcaataaacatatgtgtg

SEQ ID NO: 44615 - DNA, 443 bp, Homo Sapiens
gtctagtgcccatttactctggactccggatggctgccgcacgcctctgcctctccctgctgctcctgtccacctgcgtggctctgttactacagccactgctgggtgcccagggagccccactggagccagtgtacccaggggacaatgccacaccagagcagatggcccagtatgcagctgatctccgtagatacatcaacatgctgaccaggcctaggtatgggaaaagacacaaagaggacacgctggccttctcggagtgggggtccccgcatgctgctgtccccagggagctcagcccgctggacttataatgccaccttctgtctcctacgactccatgagcagcgccagcccagctctcccctctgcacccttggctctggccaaagcttgctccctgctcccacacaggctcaataaagcaagtcaaagccaca

SEQ ID NO: 44616 - DNA, 1062 bp, Homo Sapiens
ggagttgccatggcgtcgctgagcggcctggcgtcggcgctggagtcgtacaggggccgggaccgcctgatccgagtgctggggtactgctgccagctggttggtggagttctggttgaacagtgtcccgccaggtccgaagtggggacacgtctgttggtggtgtccacccaactcagccactgcaggaccatcttgcgactctttgatgacctggccatgtttgtctacactaagcaatatggcctgggggcacaggaggaggacgcctttgtccgctgtgtctccgtcctagggaacctggctgaccagctctactacccctgtgagcacgtggcctgggcggctgatgcccgggtcctccacgtggactcttctcggtggtggacgctgagtacaaccctgtgggccctctctctgctcctgggggttgccaggtccctgtggatgctgctgaaactgagacagaggctgcggagccccacggcgcccttcaccagcccgctgccccggggcaagcggagggccatggaggcgcagatgcagtcggaggcgctgtcacttctcagcaacctggccgacctggccaacgccgtgcactggctgccccggggcgtgctgtgggccggccgcttcccgccgtggctagtgggcctcatgggcaccatctcctcaatcctcagcatgtaccaggcggcccgggccggcggccaggccgaggccactaccccctgacactgccggaagagcacagggacacagccagagcccacggagggcccttcccgcaaagcagaagccgccagggcaggggccggggctctcatggagctgcctgtggtgaaacccatgggcagggtgggtggagggactgatgcgaggtcccccaggcctcagcctggagctcctgagccgtgacagttttcaggggccgtgcagggcttcagcagcacctcctgcctgccagctggcgtcttgtatccaaatcaagatgaggaagagggggcctgtcgtgccttgagaaagctggaacgggaatcaattaaacattgtggtgctggc

SEQ ID NO: 44617 - DNA, 291 bp, Homo Sapiens
atgcaagcagctgcccagacatgtggagctgaggccagggagcatgcgcattggaggcagtgtgaatgtcccctgaagggcttcgctgcccaagggacagatgggctgtccaggacccaggtggggcaagccagggttggaagaaccaaaggcagagaaactaaaggccccagcagctgcagcagtcaatcttggggtccaggctataataatctggatttaagatctcaggaagattctgagttaggtcaagggaccatggaggtgaaggccattgactcagaggtgtaa

SEQ ID NO: 44618 - DNA, 2412 bp, Homo Sapiens
gttttctctttctctcgcttgctggccttggacaatctccccccagttttcctcgacgccacccccggcgctgccaaccctcctccccccgcctcccttctcttccctgtgcccagactcttgttcggggccttgaaacagtgagctgtctttgttcgaaatacaggtgaacggcaatcatgtgattaacacacacacacataaaaagctttttaacagcgcccgctcggcctcagaaccgcccggagaggagccgccctggatggacagagggacgagggacgagcatctgccgtcgtgtcccggctgccctgcagtcgcctccaacacccgctgctgcccgcccgctgcctgcctgcctggcatctctctctcccggtgggtccccactcatccttccacccctcagttcctcctctttgaggaaaggacctccccgctctctgctgtgtctgtgactggcctgagacccgcctggggcaggaggggtggttgtggaaggaaagagcccagagttaggaggtggaatgtggggtcccacagctgccccctctctaactccctgcttcctcctttgccctccttggtccagctgtgccaggatgggggtgggggtagcagtgggcacgctctgtctgcaggaagccacgctagacagaaggggccactccctctctctctcccttgtccccgcacagacactgccttcctctcagggctgtgctgggctttttgctgagcagtgttgggtgaggcaggtgggcctgcagggcgggtgggaagggctgtcagatgaccagtgctgtgtgtgtgtggttggggcccctgctgcgaacacatccctgcccaccatgctggcaactgggatcccctccatcccatcccaggccctgggaacccagtgctctccagcaggcaagggtgaaggacccatagtcattcctgaagagcagggagcttggagaggggagggatcctggctgaagacacctgggcctctgccccagcaggacaacaggagggccagtgtcaccttctcctcctttccctgctgggggtggcaggggtccctttaccccctcattcttgacccttctccagggatgcttgtgacctccttaccccaccccccatcacctctctgtcctgaagtgagggtttgtcaccgtccatggcaaggtgtggtgtctggtaggctctatgacctgccttctctcagggtgtttattctgcagcagagaggggtctgcggtctgagtgtaatggtggaaatccaggcttccttccatggcccaaggaggcctttccggagcaacagggttttcctgggactcagcctggcttttgttaaggcaggtcccggatttactcagaagatgggccccagagaggaggagaggaaaggaatacctgtcagtcaaacgtgaagcccactgatgacactgcctggcagagctgcctccggtcagcagtgacccttcaccccccagctcccaagtcctcttcctgagggagctggtccggctttatggaaggctccgcctgtgttcccccactgggtccctggtccctcacctgtcacgtggggcgatggtcaccctccctccctgcctgccctgaaggatacactgagatgaaggtcaggaaatctgctggctgcagaaccaggggccatgcaggagtgagggatggtctggtcaagttgaggctctgccccagcctcagtttccccacacaggcatgagactgtcttcctgactttcagaggacagggctgagatgggatgagggaacacagggaaagcgtttagcacctctgagtgctgtgtggatgcgacctggggggtcctggcctccactctttaattctatctggactgtgtgccctcctacctccagtttccctgcgggggcctttcacagggcctggcttgcggatacggggtttggcgtagggcagtgcttctcaaatgggaaggcgcactgggattcttcaggttggggtggggcctgaggttctgcatttctaatcagttgcctaggactggctctaattcttgttgaatttacaatcacttgtggagttaagaaaaacatactgggccttggttgggtgtggtggctcacacctgtaatcccagcactttgggaggccaaggtgggcagatcatgaggtcgagagattgagaccatcctggccaacatggtgaaaccttgtctctactaaaaaaaaaaaaaaaaaaaaattagctgggcatggtggcaggcgcctgtaatcccagctacttgggaggctgaggcaggagaatcacttgaacccgggaggtggaggttgcagtgagctgagattgcaccattgcactccagcctgggcaaaaagagcgaaactctgtctcaaaaaaaaaaaaaaaa

SEQ ID NO: 44619 - DNA, 2105 bp, Homo Sapiens
atggagcccgaagccccccgtcgccgccacacccatcagcgcggctacctgctgacacggaaccctcacctcaacaaggacttggcctttaccctggaagagagacagcaattgaacattcatggattgttgccaccttccttcaacagtcaggagatccaggttcttagagtagtaaaaaatttcgagcatctgaactctgactttgacaggtatcttctcttaatggatctccaagatagaaatgaaaaactcttttatagagtgctgacatctgacattgagaaattcatgcctattgtttatactcccactgtgggtctggcttgccaacaatatagtttggtgtttcggaagccaagaggtctctttattactatccacgatcgagggcatattgcttcagttctcaatgcatggccagaagatgtcatcaaggccattgtggtgactgatggagagcgtattcttggcttgggagaccttggctgtaatggaatgggcatccctgtgggtaaattggctctatatacagcttgcggagggatgaatcctcaagaatgtctgcctgtcattctggatgtgggaaccgaaaatgaggagttacttaaagatccactctacattggactacggcagagaagagtaagaggttctgaatatgatgattttttggacgaattcatggaggcagtttcttccaagtatggcatgaattgccttattcagtttgaagattttgccaatgtgaatgcatttcgtctcctgaacaagtatcgaaaccagtattgcacattcaatgatgatattcaaggaacagcatctgttgcagttgcaggtctccttgcagctcttcgaataaccaagaacaaactgtctgatcaaacaatactattccaaggagctggagaggctgccctagggattgcacacctgattgtgatggccttggaaaaagaaggtttaccaaaagagaaagccatcaaaaagatatggctggttgattcaaaaggattaatagttaagggacgtgcttccttaacacaagagaaagagaagtttgcccatgaacatgaagaaatgaagaacctagaagccattgttcaagaaataaaaccaactgccctcataggagttgctgcaattggtggtgcattctcagaacaaattctcaaagatatggctgccttcaatgaacggcctattatttttgctttgagtaatccaactagcaaagcagaatgttctgcagagcagtgctacaaaataaccaagggacgtgcaatttttgccagtggcagtccttttgatccagtcactcttccaaatggacagaccctatatcctggccaaggcaacaattcctatgtgttccctggagttgctcttggtgttgtggcgtgtggattgaggcagatcacagataatattttcctcactactgctgaggttatagctcagcaagtgtcagataaacacttggaagagggtcggctttatcctcctttgaataccattagagatgtttctctgaaaattgcagaaaagattgtgaaagatgcataccaagaaaagacagccacagtttatcctgaaccgcaaaacaaagaagcatttgtccgctcccagatgtatagtactgattatgaccagattctacctgattgttattcttggcctgaagaggtgcagaaaatacagaccaaagttgaccagtaggataatagcaaacatttctaactctattaatgaggtctttaaacctttcataatttttaaaggttggaatcttttataatgattcataagacacttagattaagattttactttaacagtctaaaaattgatagaagaatatcgatataaattgggataaacatcacatgagacaattttgcttcactttgccttctggttatttatggtttctgtctgaattattctgcctacgttctctttaaaagctgttgtacgtactacggagaaactcatcatttttatacaggacactaatgggaagaccaaaattactaataaattgacataaccaacattaaaactcataattattttgttgaccattttgttaaaatctacttttc

SEQ ID NO: 44620 - DNA, 639 bp, Homo Sapiens
atggccttcagcaatgctgattcgggctttgctgaggcccagctggtgctgacccaccaggacctcctctctggcagtatcatggccacggatgagcccatgcagcccatctgccgcttcatccaggaggggcctcaggaagaggcgagtcctgttcacacactcaggctgaccacggctggatcccgctgcaggtgtccgatgggcagcaccaggccatcacggtgctggaggtgcaggccttggagccttacctctgtgtggccaatggctccggcctcatggttcctcaaggaggccagggtaccatcaacatggccgagctccacctgggcaccaacctcaacatctgcagtagggatgaggcccactaccacgtcacagacagccctcactggggacagttgctccaagccactcagccacagccttctctcagcaggacctgctggttggggctgttttctatggccacaatggcagcctcagctcccgcaacaccctggccttctcaatggatgtgggaccagtgcacacagatgccaccctacaagtgaccattgccctagagggcccagtagccccactgaagctggcccagcacaaggagatctacatcttccagggagaggcagctga

SEQ ID NO: 44621 - DNA, 2495 bp, Homo Sapiens
gcgcgctccgctcggcagcctgtgggacgcgaccgcggcgctagtctcgttcctttgtgctgcggcggcggcttctcgagtcctccccgacgcgtcctctaggccagcgagccccgcgctctccggtgacggaccatgtcggcggcgggagcgggcgcgggcgtagaggcgggcttctccagcgaggagctgctctcgctccgtttcccgctgcaccgcgcctgccgcgacggggacctggccacgctctgctcgctgctgcagcagacaccccacgcccacctggcctctgaggactccttctatggctggacgcccgtgcactgggccgcgcatttcggcaagttggagtgcttagtgcagttggtgagagcgggagccacactcaacgtctccaccacacggtacgcgcagacgccagcccacattgcagcctttgggggacatcctcagtgcctggtctggctgattcaagcaggagccaacattaacaaaccggattgtgagggtgaaactcccattcacaaggcagctcgctctgggagcctagaatgcatcagtgcccttgtggcgaatggggctcacgtcgacctgagaaatgccagtggcctgacagcagcagacattgcacaaacccagggtttccaagagtgtgcccagtttctcttgaacctccagaattgtcatctgaaccatttctataacaatggcatcttaaatgggggtcatcagaatgtatttcctaatcatattagtgtgggaacaaatcgaaagagatgcttggaagactcagaagactttggagtaaagaaagctagaactgaagctcaaagcttggattctgccgtgccactcacgaatggcgacacagaagacgatgctgacaaaatgcacgttgatagggagtttgctgttgtaacagatatgaaaaacagtagctccgtatcgaatacattgacaaatggatgtgtcatcaatggacatttggacttcccctccacgaccccgctcagtgggatggaaagcaggaatggccagtgcttgacaggaactaacggaattagcagtggattagccccaggacagccgtttccgagtagccagggttctctctgcattagtgggactgaggagccagagaagaccctgagagctaaccctgagttgtgcggttctctgcacctgaacgggagtccaagtagctgcatagccagtaggccttcctgggtggaagacattggggataacctgtactatggacactaccacgggtttggggacactgctgaaagcatcccagaactgaacagtgtggtcgagcattccaagtccgtgaaggtgcaggagcggtacgacagtgccgtgctgggcaccatgcacctgcaccacggctcctagagacgctgacctggctctcggaaacgcaggagtccttcctggtagccagctcagaatacccatgtagcagcaacttgaacgaatgtcacaacttgtacgttttttatatacttcaactttctgaaaaagtaaacttcgacaagttcccagcaactgcttgtttgtgcatgagtagggcttactaagtgcatagatgtttctacagtgaggtgtcctttttataaggtgcacttttggagtttttctgatgccaatctcaacattgtctttttaatactgtcaccagatattgccatttttctttttgttaaaagattatatgatcaagataaattggggtggtaaatcaggtgcctggtaatttatctctttgcacatgggcatcattttaaaaagcttgcttccactcttttctgtagaatttgacggaacacagctatttccctatgcaaggtacagccttacaaagatttctgcagtgatttgtgtgaagaagagaacgtttgtctttttcaatgaagctttgcagatcaccatgtggttgaaggttttagttgtggacacagtggtccctccttaatgatgaagatcactgccttgggcttcatggaaaacaggcccagcctggggctgcgtttggatttattgtttttattccacacttcctacttggtctctggaagttttaccacatgtaacagattcctttatatgtagtggaaatcactatttgtagaaactgtcaggtcaaaatatttaactgactgttgacatgtattttcttttttccttgtttttgttttttggggttttctgctttaagatatataccactatgtatatccagttaactgagagaattttgactctcttaataaaactgcattaagtttttgattttgtagaaattagcttttgtctaggcaactagtggttatactctgcaaatattgtaatgaatttttacttttttgatttttgtaataaaaattggtgcagataaaatgtcaaatgaacaaaccagtgttctaagagtgttactaacattttgttctaaaactgtccttcacaaattgaataaaaaactctcacactca

SEQ ID NO: 44622 - DNA, 376 bp, Homo Sapiens
catggcccggtccgcgacactggcggccgcgccctggcgctgtgcctgctgctggcgccgcctggcctcgcgtggtacaagccagcggcggggcacagctcctactcggtgggccgcgcggggctgctgtccggcctccgcaggtccccgtacgcgcggcgctcccagccctacagaggggcggaacccccgggcggggccggcgcctccccggagctgcaactgcaccccaggctgcggagcctcgctgtgtgcgtccaggacgtcgccccaaacctgcagaggtgcgagcggctccccgacggccgcgggacctaccagtgcaaggcgaacgtcttcctgtccctgcgcgcagccgactgtctcgccgcctgag

SEQ ID NO: 44623 - DNA, 5561 bp, Homo Sapiens
atggaatcacagcggcagcggcggctgcggcgcgcgcgagccgagtgtgagcggaaaggggcccggcgtctgcctcgagactgaagaccgataaactcaagccatggagggattactgcattacatcaaccctgcacacgccatttctctcctaagtgccctgaatgaggagcgtctcaaaggacagctgtgtgatgtgctgctgattgttggagaccaaaagttccgagctcataaaaacgtcttggctgccagcagcgaatactttcagagtttattcacaaataaggaaaatgagtcacaaactgtatttcagcttgacttctgtgagccagatgcttttgataatgttttaaactacatttattcttcctctctatttgttgagaagagcagccttgctgctgtgcaagaacttggctatagtcttgggatttcctttctgactaacatcgtttctaaaacacctcaagccccctttccaacgtgtcctaatagaaaaaaagtgtttgtagaagatgatgaaaacagttctcaaaagagaagtgtcattgtttgtcaaagtagaaacgaagcgcaaggaaaaactgttagtcaaaatcaacccgatgtaagccatacttcccggccctctcctagcattgcagtcaaggccaataccaataagccacatgtcccaaaaccaatagaaccacttcataatttgtcattaactgaaaagagttggccgaaagatagttctgtggtatatgcaaagtctcttgagcattctggatctttggatgatcctaatagaatcagtttggtgaaaagaaatgcagtgttgccttcaaagcctctgcaagacagagaagctatggatgataaaccaggtgtgagtggtcagcttccaaaaggaaaagctctagagctggctttgaagagaccacggccacctgttttgtctgtttgtagctcatcagagactccctatctattaaaagaaactaacaaaggaaatggtcaaggtgaagatagaaacttgttgtactattcaaagttaggcttagtgatcccatccagtggatctggttctggaaaccaaagcattgacaggagtggcccacttgttaagagtctcctcagacggtcattgtcgatggatagccaggttcctgtctattcaccttccatagatttgaaatcttcccagggatcatcttcggtgtccagtgatgcaccagggaatgtgttgtgtgctttatctcagaagtcatctttaaaagattgtagtgaaaaaacagccctagatgacaggcctcaagtgctacaaccgcatcgcctcaggtcctttagtgcttctcagtcaacagacagggagggagcttcccctgtgactgaggtgcgcataaagactgagcccagcagcccgctgtcggacccctcggacatcatccgcgtcactgtgggagatgcggcaacaacagcagctgcctcatcttcgtcggtcacaagagacctgtctctgaaaacagaagatgaccaaaaagacatgagcagactcccagcaaaaaggaggttccaagcggaccgaagattgccgtttaagaagttaaaggtgaatgagcacgggtctcctgtgtcagaagataattttgaggaaggctcaagccctactctccttgatgcagattttccagattctgatttgaataaagacgaatttggtgagttggaggggacgagaccaaacaaaaaatttaaatgcaaacattgccttaagatctttagatcaacagcaggtcttcaccgtcatgttaacatgtaccataacccagaaaagccctacgcttgtgacatctgtcacaagaggtttcacaccaacttcaaagtgtggacacactgtcagacccaacacggcatagtgaagaacccatcaccagcctctagttcacatgctgttttggatgaaaaattccaaagaaagctgattgacatagtgagagagagagaaattaagaaggccctgatcattaagttaaggcgcggcaagcctggttttcagggacagagtagctcccaagcacagcaagtcatcaagaggaacttgagatctcgagccaaaggagcttacatttgtacttactgcggaaaagcgtaccgctttctctctcaatttaagcagcatataaaaatgcatccaggagaaaaaccccttggagtaaataaagttgctaaaccaaaagagcatgctcctcttgcaagtccagtagaaaacaaggaggtttaccagtgccgcctctgtaatgctaagctctcttctctcctagagcaaggaagccacgagcggctgtgccggaacgcggccgtctgcccttactgcagcctcaggtttttctcgcccgagctgaagcaagaacacgagagcaagtgtgagtataagaagctgacctgcctcgagtgcatgcgcaccttcaagtcctctttcagcatctggcggcaccaggttgaagtccataatcagaacaacatggcacccaccgaaaacttttctttgcccgttttggaccacaatggtgatgtgactggttcttcaaggccccaatcccagcctgagcccaacaaagtaaaccacatcgtcaccacaaaagacgacaacgtgttcagtgattcttcagaacaagttaacttcgactcggaagattcctcttgtcttcccgaagaccttagtctttccaagcaactgaaaatccaagtcaaagaggagcctgtggaggaggctgaagaagaggcacccgaggccagcacagcccccaaagaagcgggtcctagcaaagaagccagcctgtggccctgcgagaagtgtgggaagatgttcacggtgcataagcagctggagcgtcaccaggagcttctgtgctctgtgaaaccatttatttgtcacgtgtgcaacaaagcttttcgcactaattttcgactctggagtcacttccaatcgcacatgtctcaggcttcagaggaatcggcacataaggaatctgaggtgtgccctgttcccacaaactctccctctccaccacctctgccaccgccaccaccactgcccaagatccagcctctggagcctgacagccccacaggcctgtccgaaaacccaactccagccacagaaaaactgtttgtgccccaagaatcagacacccttttttaccatgccccacccctttcagcaatcacatttaaaagacagtttatgtgtaaactttgccacaggacattcaagactgcatttagtctttggagtcacgaacaaacacacaattgaaagaccaacactttttacctatgggaggcagtccccagatttcaacctgaattgtgaaatgtgtcataagaaacaaaatattttttaaacaagaataataaaggttggagattgttacgcttgaaattaagttggaggcaaattgataattacttagtaatgtccttaactttagaaatacagcttttaaaatattgtggttctggaccttacaagaacaagatggtttgatttcattaatgttgaaattggattagtcttgattgtgtgcatggttcctcattccatggtgtcagtataatcatttaattgaggtttttggttttttattgattagtggaatactgtcgaagtattccttcttttaattattttagacacttgagttctagttaaatcttaaccatgttcttaagtccaaaataggaagaagtggagtagtttgcagtattgatttatatcttagactactttagcaataaaagataaatctcaactttaataagttatcctgacacttgataaaaataaatatttggtattttgtggtcatgtaaaacttctttttgtatgaaaattgtgagaaatttaaatcagcaatagtaacacttagatttttataaactaacaaaaacttgctctcagtcaatataataaatgatagttaaactctaaggaagacctgggaaatgaaaacaatttatggaagtcccctacagtcagtttataagggcttcagtagtgatagacattgttataaaaacttgtaccatgttacatgtacactgcaccacagtctaaattcagaccagcatttgaaggactgcacatatttcatttcctctgatttatgctgtcacaaattgaaaatctgagtgtagttaggacaaaaaacaaagctaaccatatggcactaattttgattttaacattagtgtaacaaataaggtcgggacatatatttacatagatcccagacactcaagaattagcacagctgatgtaaaattctaaattaccatttacttccagatagagcagaggagaaacacctcactgcagtttcaacatgctttccaagaacaatatatacgacatatacattttcctgcctctctcttgtgacaatttctgttagaatttgttgggggtctgatggttaaaatcatgggcaaggccattctctacatcattgcttaatatttcaaaaataggtattagagcactatcagtggtccaaaattagttttagctacttattttgctccatgggttttgggcttttcaaagaatactatgtataatttgtaattgaaagcctttcagtaggatatccaaagttcaatgtgtttcaaaagggaaaacttttacttgtgggggtgggagttagatgtattaaaaaaacgaaactacaaaatccttttaagaaagtaataccaatttagactctagtttgtgttacgaggtattctttcaaattttttttaaaagccaactactgtcattaagaaataattttagatttgtgctctagcagaaaataactctgtacccatcaatcttattgccaacattccataccagtggtaggaaagatattctcattttttttattgaaccagacatttttataaaatactgattgactttgtacattatggatattatatatgaaattttgccttgtattctttcacttgaaaaaactccaaaattccacaatattttagtagttaacttcctattctttcttaaatttgatggagaagggaaaataaattgcagttattgattcttgccatctttgttttcttaaagaaatctatgcattttaaggataaaactaaagcatatgggtttacatgaaacatcaggatggattattgtacattgaattcattccgcgtataatgtggtatttcttactctgtccatcttggtagctgtcacttcaaaagaagacagtttccctgagtaatcatcacctacatggccattagagtatctatcggtgataattccatgatacagagtatcttggcattataaattcagtatcccaggacctaaacctttatgctacattttcgaagattttttaaaaataatattgttaatcagtaaaaaaaaaaaatatttttgatctaaacataggttctgcatatctgttagattttaaaaatgactggtgttttgtcttcacatttttgtctaagcaaggaatataagatttcaaataaaattttgaaccaaaaac

SEQ ID NO: 44624 - DNA, 909 bp, Homo Sapiens
gaccttacagaagcacaggaaactgtaccttcacgatgtctacatctggatgcagagaatgaagttcttcaacttcaacagacattattctctatgaaagcaatacaaaagcaatgtgaaacactacagaagaataagaagcagctgaaacaagaagtagtaaacctcaaaagttatatggaaagaaatatgttagaacgtggtgaagctgaatggcataaactgttgattgaagaaagagcaaggaaggagatagaagaaaaattaaacgaagccattctcaccttgcaggttgcagcagtatctcatgaacagttagcacagttaagggaggataatactacttcaataaaaactcagatggaactcacagtcatagatctggaatctgaaatctccagaataaaaacttcgcaagccgactttaataaaaccaaattggaaagatataaggaactctacctagaagaagtgaaagttagagaatccttgtcaaatgaactcagtagaactaatgagatgatagcagaggtcagtacacaacttactgtggagaaagagcagaccagatccagatctctattcactgcttatgctacaaggccagtcctagagtcaccttgcgttggaaatcttaatgatagtgaaggtctcaacagaaaacatattccaagaaaaaagaggtctgctcttaaggacatggagagctacttgttgaagtttagctatcttttttccttcggcgttcagatttctgatagaattcttgtatctgctactaaatatgaacctggatcctatatagcttctcctctaggatttacacacaaggaaaatctgaatcaagatccagttttggaagtagcaaaagaatatgcacagattttaagaagaaaatacatactctga

SEQ ID NO: 44625 - DNA, 471 bp, Homo Sapiens
aagatggcactgaaagcagagaaggaagctcctgccactcctaaagccaaagccaaggctttgaaggccaagaaggcagtgttgaaaggtgtccacagccacaaaaaacagaagatctacatgtcaccaaccttccagtggcccaagacactgcgactccagaggcaacccaaagatcctcggaagagcacccccaggagaaatgagcttgaccactatgctgtcattaagtttctgctgaccactgagccggccatgaagaagatagaagacaacaacaacatgcttgtgttcattaaggacgttaaagccaacaagcaccaaatcaaacaggctgtgaagaagctctataacattgacgtggcccaattcaacaccctgattcggcctgatggagagaagaaggcgtatgttcagccatctcctgattatgatgctttggatgttgccaacaaaattgggatcatctaa

SEQ ID NO: 44626 - DNA, 835 bp, Homo Sapiens
caggaccccggcgcgggcagggcgcccacgagctggctggctgcttgcacccacatccttctttctctgggacctggggtcgcggttacttgggctggccggcgaacccttgagtggcctggcggggagcgggcctcgcgcgcctggagggccctgtggaacgaagagaggcacacagcatggcagaaaaccgagagccccgcggtgctgtggaggctgaactggatccagtggaatacacccttaggaaaaggcttcccagccgcctgccccggagacccaatgacatttatgtcaacatgaagacggactttaaggcccagctggcccgctgccagaagctgctggacggaggggcccggggtcagaacgcgtgctctgagatctacattcacggcttgggcctggccatcaaccgcgccatcaacatcgcgctgcagctgcaggcgggcagcttcgggtccttgcaggtggctgccaatacctccaccgtggagcttgttgatgagctggagccagagaccgacacacgggagccactgactcggatccgcaacaactcagccatccacatccgagtcttcagggtcacacccaagtaattgaaaagacactcctccacttatcccctccgtgatatggctcttcgcatgctgagtactggacctcggaccagagccatgtaagaaaaggcctgttccctggaagcccaaaggactctgcattgagggtgggggtaattgtctcttggtgggcccagttagtgggccttcctgagtgtgtgtatgcggtctgtaactattgccatataaataaaaaatcctgttgcactagt

SEQ ID NO: 44627 - DNA, 1633 bp, Homo Sapiens
cagtccccaaacaaacctaggagctaaataaaacagtgtgtgcagtgtgcaaatggagctttatgtcctccagcctgcttcctgcttctctattcctcctgcccgggaggagtagagaattctggagccaccttagtgggcaatgggggagctcctgatggttcaggagcaggaaatttatgagcagagtggggtcccaggccacagggagatgtctatccacaagggatggtggccaagggttgaatggaaagaggcaggcagggggagaggggcagagggtgtgggtattcccagggccttgagagtggacatggccccttctcctcagccttccattagcaaggatgtcactgctgctcttgcctgatgacagccagatctgttcacagttagtctgcctctcctgccatcattcatctcatgcctccatcctgcgtcaccaatgcattagcctagtgccaacacgcaaagtcccccttgcccaggctccctgacccaatgcctgcttccacatctagcttcctccctctcctctgcttccagcatgctctgaccccatttctcacccatcataggtcatcttgtcttggatctggcccaggcccggtccacgttggtgctgcccacaggcattatcgccgcggctggcaccatgacggtgaccctgcacagcagccgggagctgccctcaaggcctgacggggtgctgcatgtggccctgcccactgtgctcaccccgctggccccgccaggcccgccggggccccccaggcctccggggctctgtgacgacaggttgggcctatggtgattctcttcgtccctccctcggcttctctgggtctagtgcgggtgagggggcactggcagggtacccagggatgggaagggtgaggaagggctggggccagtcagccggagggtttaggggccttcacagtggcccagtgaccctcctcatgctcccttccagccccaccagctgcttcggggtgggcagccttcaggaggaagggctggcctgggaggagctggctgcccctcgggacgtgttctcaggccctgcccgctgccctgccccatataccttctccttcgagatgctggtgactgggccatgcctgcttgcaggcctggagagcccctctcatgctctgcgggcagatgccccccctcatgccagctctgcagccaccatctgtgtcacactggcagagggccaccactgtgaccgggccttggagatcctgctgcaccccagtgagccccatcagccacacctgatgctggagggcggcagcctgagctcagcagaatatgaggcccgggtgagggcccgccgagattttcagaggctacagcgaagggacagtgatggggaccggcaggtaccgccataggagcctggcctggcccctggccttggctgcatttgtgcacaaggagcaggcaagcaggcttacattggaatgggtgcggggaggcctcttttctcggtaagatctctccacagctgccaccaaccatcacagaggacagatgagtattgtcattggagggccgatgtgaatctctctggggtgtgtctcagaggatggaggctaggtctgatataaacagaagacagcca

SEQ ID NO: 44628 - DNA, 756 bp, Homo Sapiens
gacatagtggcccatgtgccggacagtcagctcacgctgggccacatggaggagcacagcttcaccgagcccatcctcatccctaagaaagacgggctgggcttggctgtcccggcccccacgttccatgtaagcaatgtcgagaaatacgtggatgtcaccaagcagaaggactgcaagatgaagctgcaggagtttgtggactatgactacatcaccaaccacaagcgggtcctcaccatcaccaaccttgagttcttcgacacccaaatgtccagcttcgtggagccacctgacaccatgaagaaactgttccgggtagaaaactggccagatgatgcattgctggccaagcccaaagtgaccaagtcctgcctgatctgtgtgaaggacagctacaccgacttccacatcgactgtgggggcgcctccgcctggtaccacgtgctcaagaccttctatttcatcaggctgaccttggccaacatctccctggatgagctctggcagtctgcctttaaccacagcgagatgttctttgctgaccaggtccacaaatgctgcaagtgcatcgtcaagcagggccagaccctcttcatcccctcaggctggatctatgccacactcacttctgtggactgcctggccctcgtgggacatttcctccccagcctgagcatgcagatgcagaggagagcatatgaagtagaaagaaggttgcaattgtgcagcctgactcagtttcccaacttctaa

SEQ ID NO: 44629 - DNA, 1923 bp, Homo Sapiens
gggcaccaccaagtggacttcctctttcccctcaccatcctacctgtggatgatgaaccaccaatggtcaatactaacacaggactctcactcactgaagggcaggtggtccagatctctccctttgtactgagtgctactgatattgactctgaggactcaaccatccactttgtgctggagaaccagcccctaaaaggaaatgaggaagagcctcagtgggagttggcccctggttcctcccactcaggccactacctgggggacctgttgctgcagcaggctgaactacctctctcaactgaagatgaagactggcactacatggaaaaggaagggctttatgagaaagtggtgactgagtggctacagagagacataatggaagggagactcttctaccgccatcttggaccacacagccctcaatctgtaatggtccagctggctttccatgtgcaggatgaccatgacccacccaatctctccaaacagcacattttcaccatcaaggtccaaccagtggatatactgagtccacagctgtatccaggaactacactagaaatgactgtacaagaataccaactcactcacttccagaagaatttcctccgatacattgaccaggactctgatgaccagaacctatggtacaccctactgacactcccgactgacacagatggcaaccaccaagtccgggctggagaaattgtgctcactgattcaccagacacactcatcatgcactttacccaagcccaggtaaatcagcataaagttgcctaccagcctccacagaaattgggtattgcaccacgggttgtgcagtttacttaccaggtggaagatgctgcaggcaatagcgtgccaggcacattcacattattcctgcaacctgtggacaaccagcccccagaagtcaccaacagaggctttgctatcttagagggaggcagctttaacctcagcagtaatgagctgcatgttacagacccagacacagacattgaccaaattgtcttcatattagtccggggtccccaacatggacacttgcagtactttaaaagatgtatggtcccaggggaatctttcatgcaagctgatgttattaacgggagtgtctcttaccagcatggcagagaccagacgactaccagtgacactttccatctggaagtaagtgatggggtgcaccatatacccatcaccatcccaatttctgtgcatcccaatgtggctaacagaagtcctaggatctctctcagaagtagttcattattggatgtttctatagacgtactagagaataaagccactgaaattaccatgggtgtcatccatggcaaaaggaaggatgtaggtgacttgatgctgtctttcattgtaaaggacagccccaaactgggcactattctggtaaatggtttgcccacagaacgattcacccaagaggatctcatcaatgggagagtagcctatgcccacactgcaggtgaagttggttttcaaaagcagcacgatgccttcagcctcatcctctccaaagattcttaccaatgggtagtggggaatagcataatagagaaagtacaggtacaagtaactgtgctgcctgtggacaatgtgggacccaaggtcttcgtcggggagtccttcattgtctatgaaggtgagaagaactccttgaccttacaacatctccatgttgaagatgtggacactcatcaagatgaactcctctgcacagtgactagtcagccagcctctggctacctggaaaagattgcatcagctcctggttcaaaaatgtcccagtctggtagccctatcagtgctttctccctcagagatatccaagtgaggcatatcaattatgtacagagtattcacaagggagtagagccacaagaggac

SEQ ID NO: 44630 - DNA, 1008 bp, Homo Sapiens
atggaatcatctttctcatttggagtgatccttgctgtcctggcctccctcatcattgctactaacacactagtggctgtggctgtgctgctgttgatccacaagaatgatggtgtcagtctctgcttcaccttgaatctggctgtggctgacaccttgattggtgtggccatctctggcctactcacagaccagctctccagcccttctcggcccacacagaagaccctgtgcagcctgcggatggcatttgtcacttcctccgcagctgcctctgtcctcacggtcatgctgatcacctttgacaggtaccttgccatcaagcagcccttccgctacttgaagatcatgagtgggttcgtggccggggcctgcattgccgggctgtggttagtgtcttacctcattggcttcctcccactcggaatccccatgttccagcagactgcctacaaagggcagtgcagcttctttgctgtatttcaccctcacttcgtgctgaccctctcctgcgttggcttcttcccagccatgctcctctttgtcttcttctactgcgacatgctcaagattgcctccatgcacagccagcagattcgaaagatggaacatgcaggagccatggctggaggttatcgatccccacggactcccagcgacttcaaagctctccgtactgtgtctgttctcattgggagctttgctctatcctggacccccttccttatcactggcattgtgcaggtggcctgccaggagtgtcacctctacctagtgctggaacggtacctgtggctgctcggcgtgggcaactccctgctcaacccactcatctatgcctattggcagaaggaggtgcgactgcagctctaccacatggccctaggagtgaagaaggtgctcacctcattcctcctctttctctcggccaggaattgtggcccagagaggcccagggaaagttcctgtcacatcgtcactatctccagctcagagtttgatggctaa

SEQ ID NO: 44631 - DNA, 501 bp, Homo Sapiens
atgaatacgtacacccgcagcgcctccttcactccgaagactttcactttcccccttgcacaaaaccgaacatcccaccccaccaccacctccaagctaaaatacctgggccgcccctccccacgaagggacgcgctccaggcgaatggggagggcccggaagtcgggcctgggacagaggagccggcccaccgcctcccggtcggaagcggcagtgcaggtgaggcggcggccagcctggggactgcgcgggtaaggagcgggagggcggaatgcaccgcgaagttggcgggggacggccacgcacgcctcgcctcggccttcctgcaccgtagggccgccctcccgccacccctgggcacctgtcgaccacgtctgggcgagggcgggtcggctcccgccctcgggccctcaccgcggcggggacgccgggtcagcgaagggttaagggactcgctccctcctctcggctccctcacccttggaaagtccccgaaatga

SEQ ID NO: 44632 - DNA, 549 bp, Homo Sapiens
gtgtccctacctgcaccggacgacgggggacacagaacgcaagtaccacctgcgttactacaaaacaggaacctgcatccacgagacagacgcacgtggccactgcgtgaagaatgggctgcactgtgccttcgcgcacggccccctggacctgcggccgccccattgcttccagtcgcgctgctcaggcaccgtgtggcccatttttcagatgccaacttcgtgctgggcagctacaagacggagcagtgcccgaagccgccacgcctgtgccgccagggctatgcgtgcccacactaccacaatagccgggacaggcggcgcaacccccggcggttccagtacaggtccacgccctgccccagtgtgaagcacggggatgagtggggggaaccctcacgctgcgatggcggcgacggctgccagtattgccactcccgcacggagcagcagttccatcccgagatctacaaatctacaaaatgcaacgacatgcgccaaaccgggtactgcccgcgcggccccttctgtgcctttgcacacgttgag

SEQ ID NO: 44633 - DNA, 1527 bp, Homo Sapiens
agttcctcatctgttgctttttcattttgtatactgcaagttcccaggcaactcgaatttgcaaacacagccatggatacactatttaccttacagtagtttcctgggaatctaagtctggtttttgttattcttccctcccctccactgcataatcatgtataactagcaacatttatggttataggttgatttcctaagtgtggctgatggtagcctctagtttgaagtgagggaagaatgagtagtcaggaactggtcactttgaatgtgggagggaagatattcacgacaaggttttctacgataaagcagtttcctgcttctcgtttggcacgcatgttagatggcagagaccaagaattcaagatggttggtggccagatttttgtagacagagatggtgatttgtttagtttcatcttagattttttgagaactcaccagcttttattacccactgaattttcagactatcttaggcttcagagagaggctcttttctatgaacttcgttctctagttgatctcttaaacccatacctgctacagccaagacctgctcttgtggaggtacatttcctaagccggaacactcaagcttttttcagggtgtttggctcttgcagcaaaacaattgagatgctaacagggaggattacagtgtttacagaacaaccttcagcgccgacctggaatggtaactttttccctcctcagatgaccttacttccactgcctccacaaagaccttcttaccatgacctggttttccagtgtggttctgacagcactactgataaccaaactggagtcaggtatgtttctataaaacctgataaccgaaaattggccaacggaacaaatgtcctcggcttactgattgacactttattaaaggaaggctttcatttggtcagcactagaacagtatcttctgaagacaaaactgaatgctatagctttgaaaggataaaaagccctgaagtgctcatcacgaatgaaacaccaaaaccagagactatcatcataccagagcaatctcagataaagaaatgaagttgtctatcctcttttaaagagaaattgccatttttcttgtttcattacgtatttagggcatacatgttagccaaatctacactcagcctaactcttggcttcatctgctgccatgccgtctctgggcaaccaggccccaactgtgcttaagccataatgcctgctgctctctagacaactccatgtacttggtgctttggtatatgttctaccttcaatacatctttccctttctcttcttcatgaatgcttatgagccgagattgcgccactgcacactagcttgggtgacagaggaagactgtctcaaaaaaaaaaaaattgatcaaactgatggataccctaagtaccctgacttgatcattacaccttctatgcatgcaacaaaatgccacgtgtaccccataaatatgtagaaatattatatgtaaataaatagttgggccttccgtattttcccactta

SEQ ID NO: 44634 - DNA, 954 bp, Homo Sapiens
cctgcctggggacccacgaaagtggccaacaatgtcactgagtttatattcctgggactttcccaagattctggaatgcgatggatattctttgtcttatttctcctcttctacatcgtgatcatggtgggaaatttgctcatttttcttatggtcttttctgacccccaactacacacacccatgtatttcttcctcagtaacctgtcttttgtggacattgcctattcctcggccacagcacccaagatgattgcagactttgtttctgagaaaaagactatttcctactggggctgtataactcagatgtttaccttccacttttttggttgtgctgagatttttgttttgactgtcatggcttttgatcgctatgctgctatctgccaacccctccgttacactgtcatcatgagtgctaatgcttgtactgtgctggcatcactgtcctggttgggggccctgggtcattcctttgttcagaccctcctgaccttccagctgcccttctgtaatgctcaggttatagaccattacttttgtgatgtccacccagtcctaaaacttgcctgtgctgatacaactctgataaatatgttggtagttgccaacagtggtctcatctccctgggttgtttcctcattcttttggcctcctacaaagtcattctgcttagtcttcaaaaacagtctgcagagagccgacgcaaagctctctctacctgtggatctcatctgactgtagtaactttcttctttgttccgtgtatctttatttatctccgtccatccactactttcccattggataaagctgtgtctgtgttctataccaccatcaccccaatgttgaacccactcatctatactctgaggaatgaggatgtaaagaatgccatgaggcagctatggagtagcaagatctccttgaaggaaaaacagagaggatag

SEQ ID NO: 44635 - DNA, 2247 bp, Homo Sapiens
atggccagagtggacgccaaggccaaggaagctccgagagcaagcgagggctgccagcatgctgtcacctctcagaggaacaagaagtcatccaactggaataataatcaaaatgattattccagtctcagtgattcccagttcctctttggatctcagttctgtccagaaaattcagaaaccctatcagcacccttggactttggtgcccacttgagacattcaaaacagtcacaacagaactatctggagggtgaacctagcattttcacaaagtaccagacaaagccccagctgttcggaggagatataaaagatggaggtttatttcctcctcctttgtcagttggaaaatcaaaaggcctcttggaacagtttgaggagaaaaagaaaagggcaaaagacaaatgtgacagtgagactctatacaactttgtttctaatgttagagaaagcattctcaggttgcagacgtctgtggaaaagtctgaggaccatctcagttcaagaagccaatctattttggattctttggagactgtggccaagacattacaagagactatacaggcccagaatgacctggtgtttgaggcagtccaggacaaaggcaacatggagcaggccatccttgagatgaagaaaagatttgaagctagacaaggagagtttatagaaatgaagtccaacctgaagcaccttgaagttttagttgctcagcagagtcaggaattccagcagctgtgtgagcagctaggccagctgaatgtgcccagtgtcctagcagagctgaagagattgatctcagtgcctccagtgaaagacagtgcttctcagacgtcgccacctttggcccagagcctcaatctcaccaggcaggaaaaatacacctctgagaaaccagttttatggcaggcccaggccctccctgctgcatggaatcctggtatgggctccctacagcctggagaatttgatgtctggggtgaaggagcaaagaatgatgatctccaagaagaggctgcactgccagcatttgggtcccatgaaagaaataggcatgtaaaggacaaggtggtgcagactaactgcaagaactgggctgttactaaaacaggtgccaagaaccatggttccagcgtcccaggccataagattcccagtgacagggacctggtttcccaaggagcctcacagctcacatcattggagataaacttttcaaccagcattaagaatgcctgccaaaaatatcaagcccaaagtatgtttttgtgtgacccacgtgaacatttggtgattaaacagaaagatgggactgtagaaatgcgggggaaagacaagaagcagcagcccaggaaggcccacagggcccacagaggcaggctcatagccagcaagcaaaaacaaatcccaatccagacctgtaaattcaattccaaatatcagagtcctcagcctgcaatttctgtccctcaaagccccttcctggggcagcaggaaccccgtgctcagcctctgcatctgcagtgtcccaggagccccagaaaaccagtctgccctattctgggaggaacagtcatgcccaataagacagtaagggcagtgcagggaagactcttgcagctcagcaggtgctcttcccaagacaactggctactttccagcagttcccagggggaccaccagatgagctggttcagtgacctcaatctcggatgttcagagacccctctatgcaaggaggcaggaaagaatttgctctatgacctgggttttgatagcagtgatgatgatggcttctgaccagtccacagttgatttattggtctcagctagaaagagaaattgcaggacatttgggctggccaacagcagaaagtccctgaagcctgccaagtacccagggtcagaggccctgctgaggtggggcaatgagcacgagggcagggaaggtccagcattctgggtaccaggtgctgcccctgacaaggattaagtgcatccttatttattggaatgaaatgtgaaaatggtgctgatgaaaactgaggcagcagcctggttgtggggcatctggagcagggtgcctgtactttggcgaaaggcaggcaggcctccttatggaatactgtgtagcagaagggctctcataaaactgttgcggtggcagcatgactccaaacaacatttttgggtctttaaaatattccctacacatgaccaatacattttcaggcctcagga

SEQ ID NO: 44636 - DNA, 1059 bp, Homo Sapiens
atgcaaagaaatgcaatgtatttaaagaatgtggcagagactgcttgtaactttcaactaactcaatatcaaataagtcatgctaatcagaaaccctatgaatgtcagatatgtggaaagccctttagaaagcgtgcccaccttacccaacataatcgaattcacactggtgggaaaccatatgaatgcaaagaatgtgggaaagtgtttatctgttgttcaacattgattcaacataagagaactcacactagtgagaaaccctatgaatgtctggaatgtagaaagacgtttaggcggagtgcacatcttattcgacatcaaagaattcatactggtgagaaaccttataaatgtaagcaatgttggaaggcctttgcttctgtttctgatttaatagacatcggaaaattcacactgatgagagactttacgaatgtacagaatgtgggaaggcatttaacaatcgctcaactcttattcagcatcagagaattcacactggtgagaagtcctttgaatgtaaggaatgtggcaaagcattcaataattgctcaacacttactcaacaccagagaactcatactaatgagaaatcttatgaatgtcaggaatgtaaaaaggcttttaggcaaagtgcacatcttactcaacatcaaagaattcatactggtgagaaaccatatgagtgtaagtaatgtgggaaggctttcacttgtgtttctgattttaatagacatcagagaattcacactggtgaaaaaccctatgaatgtaaagaatgtggtagagcttttaacaattgttcagctcttattcaacaccagagaattcacactggtgagaaggcttatgaatataagcagtgtgggaaggtttttgtctcctgtccaacacttgttcaacatcagagaacacatactaatgaaaaaccttatgaatgtcagtaatgcaagaaggccttcaagcataatgcacatcgacatcagagaattcacagtggggagaaaccctatgaatgtaatgaatgtgggaatgccttcatttgtttttttgatt

SEQ ID NO: 44637 - DNA, 1844 bp, Homo Sapiens
gttctctgtcagggtctccctgggagggacgcagccaccgcagctggttggggcctggcttcaccgaggacagtcctttcctttcccattgtcgttgggtaattattgctgggctgggacatgaggcaggcagaggtgcgggtcacccttagggcccccctcttcctgctggggctctgggcgctcctggctccagtccggtgttctcaaggccgtcccttgtggcactacgcctcctccgaggtggtgattcccaggaaggagacgcaccacggcaaaggccttcagtttcccggctggctgtcccacagcctgcgttttgggggtcaaagacacgtcattcacatgcggaggaaacaccttctttggcccagacatctgctggtgacaactcaggatgaccaaggagccttgccgatggatggcccctacattccaccagactgctactacctcggctacctggaggaggtgcctcagtccatggtcaccatcgacacgtgctatgggggcctcagaggcatcatgaagctggacgaccttgcctacgaaatcaaacccctccaggattcccgcaggccggtgtgttttcaaaacactttctcctgtgtataatgaaaccatgacaacggttcgctgtggaaacctcatagtggaggggagggaggaatgtgactgtggctccttcaagcagtgttatgccagttattgctgccaaagtgactgtcacttaacaccggggagcacctgtcatataggagagtgctgtacaaacttcagcttctccccaccagggactctctgcagacctatccaaaatatatgtgaccttccagagtactgtcacgggaccaccgtgacatgcccagcaaacttttatatgcaagatggaaccctgtgcatggaagaaggctactgttatcatgggaactgcactgaccgcaatgtgctctgcaaggcgatgtttggtgtcagtgctgaggatgctcctaaggtctgctatgacataaatcttgaaagctaccgatttggacattgtattagacaacaaacatatctcagctaccaggcttgtacaggaatagataagttttgtggaggactgcagtgtaccaatgtgacccatcttccccagctgcaggaacatgtttcattccatcactcagtgagaggagggtttcagtgttttagactggatgaacaccatgcaacagacatgactgatgttgggcgtgtgatagatggcactccttgtgttcatggaaacttctgtaataacacccggtgcaatgcaactatcacttcactgggctacgactgtcgccttgagaagtgcagtcatagaggggtctgcaacaacagaaggaactgccattgccatataggctgggatcctccactgtgcctaagaagaggtgctggtgggagtgtcgacagcgggccacctccaaaaagaacatgttctctcagacaaagccaacaatcagagatgtatctgagagtggtctttggtcgtatttacgccttcataattgcactgctctttgggacagccacaaatgtgcaaacttatcaggaccaccaccggttaggaagagacagttactaaccctgaataagactaattcagcctcccgatccctgtaaagatacagagaatataacagcaaaatctatgaaataggatcaggcgaagggatggcaaagctcaagtccacatttcttgaagtccacaggaggcacatggtcctgtctcacgtcacagggaaaggggaggcattggcttctatcccaggttcttgtaggtcgctgatgttcactctgaaataaatcttcaaaaacac

SEQ ID NO: 44638 - DNA, 1191 bp, Homo Sapiens
agggggcggggaggggcgcagggctgcgcgctcgccggcgctctctttcggtttggtcggcggctggaggagagtggacccccccactttaaggctctgtcctcggcgcgttcccgccgccccccggtcccgacgcggggctcggggatgcccgccagcatgttcagcatcgacaacatcctagccgcccggccgcgctgcaaggactcggtgttgccggtggcgcacagcgcggcggctcccgtcgtcttcccggccctgcacggggactcgctctacggcgccagcggcggcgcctcctcggactatggcgccttctacccgcgccccgtggcccccggcggcgcgggcctcccggccgcggtcagcggctcccgcctcggctacaacaactacttctacgggcagctgcacgtgcaggcggcgcccgtgggcccggcctgctgcggggccgtgccgccgctgggcgcccagcagtgctcctgcgtcccgacgcccccaggctacgagggccccggttcggtgctggtgtccccggtaccgcaccagatgctgccctacatgaacgtgggcacgctgtcgcgcaccgagctgcagcttctcaaccagctgcactgtcggcggaagcggcggcaccgcaccatcttcactgacgagcagctcgaagctctcgagaacctcttccaggagaccaagtacccggacgtgggcacgcgcgagcagctggcccggaaagtgcacctccgcgaggagaaagtggaggtctggtttaagaaccgccgcgccaaatggaggcggcagaagcggtcctcatcagaggagtcggagaacgcggagaagtggaacaagacgtcgtcgtcgaaggcgtcaccggagaagagggaagaggaaggtaaaagcgatttggactcggacagctgacggccgcgggacacttgcccgtattacttacctaactcgaaggacttgcacagacagacgatgctactttcttgcacacgcgctgccttgcgggagggggtcgagaaagaggaacgaggagctgtaaatagtgtacagagccgggagggtcggcgtctggggtcagggcgcgcacagcccagcagcccgaggccgcccgcgactagcccccaccgtagtatttatagttaaattaagggtgacagtacaataaagtgatggcgatgtaga

SEQ ID NO: 44639 - DNA, 627 bp, Homo Sapiens
atgtggaaatggatactgacacattgtgcctcagcctttccccacctgcccggctgctgctgctgctgctttttgttgctgttcttggtgtcttccgtccctgtcacctgccaagcccttggtcaggacatggtgtcaccagaggccaccaactcttcttcctcctccttctcctctccttccagcgcgggaaggcatgtgcggagctacaatcaccttcaaggagatgtccgctggagaaagctattctctttcaccaagtactttctcaagattgagaagaacgggaaggtcagcgggaccaagaaggagaactgcccgtacagcatcctggagataacatcagtagaaatcggagttgttgccgtcaaagccattaacagcaactattacttagccatgaacaagaaggggaaactctatggctcaaaagaatttaacaatgactgtaagctgaaggagaggatagaggaaaatggatacaatacctatgcatcatttaactggcagcataatgggaggcaaatgtatgtggcattgaatggaaaaggagctccaaggagaggacagaaaacacgaaggaaaaacacctctgctcactttcttccaatggtggtacactcatag

SEQ ID NO: 44640 - DNA, 5035 bp, Homo Sapiens
atgtctccggcggctgcggcggctggagcaggcgagcggcggcggccgatagcgagtgtcagggacggccggggccggggctgcggcgggccggccggggcggcgcttctcggcctgtcgctggtcggcctcctactgtacctcgtgcctgctgcggctgcgctggcctggctggccgtggggactaccgcggcctggtggggactgagccgcgagccccgaggttcgcgccccttgtcctccttcgttcagaaggcgcgacatcggcgaacactgttcgcttcgcctccggccaagtcgacagccaacggaaacctcctagagccgcggaccctgctcgaaggacctgaccctgccgaactgctcctcatgggcagttacctgggcaagcccgggccgccgcagcccgcccccgctccggagggccaggacctgcggaataggcctggccgccgcccacccgcccgcccggcgccgcgctccacaccgccctccccgccgacccatcgcgttcaccacttttacccctctctccccactcctcttctccgaccctccgggaggccttccccacgggatcgtgggactttaccagatcggtttgtaataacacctcgaagacgctatccgatccatcagacccagtattcctgtccgggggtacttcccacagtgtgctggaatggttatcacaagaaggctgtgctgtcccctcgcaactccaggatggtgtgtagcccagtgactgtgaggatcgcccctcctgacagaagattttcacgttctgcgataccagagcagataatcagctcaacactgtcgtcaccatcaagtaatgccccagacccatgtgcaaaggagactgtactgagtgccctcaaagagaagaagaagaaaaggacagtggaggaagaagaccaaatattccttgatggccaggaaaataaaagaaggcgccatgatagcagtggcagtggacattcagcatttgagcccctggtggccagtggagtccccgcttcttttgtgcctaagcctgggtctctgaagagaggcctcaattctcagagctcagatgaccacttgaataagagatcccgaagctcttccatgagctccttgacaggcgcttacacaagtggcatccctagctccagccgcaatgccattaccagttcctacagctccactcgaggcatctcacagctctggaagagaaatggccccagttcatcacccttctctagcccagcctcatcccgctcccagacaccggagaggccagcaaagaaaataagagaagaagagctgtgtcatcattccagttcttcaactccattggcagcagacaaggagtcccagggagaaaaggctgcagatacaaccccaaggaagaaacaaaactcgaattctcagtctacacctggcagctctgggcagcgtaagcggaaagttcagctgctgccttctcggcgaggggaacagctgaccttgcctccacctccccagcttggctattcgatcactgccgaggacctagacttagagaagaaggcttcattacagtggttcaaccaggccttggaggacaagagtgatgctgcctcgaactctgtcactgagaccccacctaccactcagccttcatttacctttaccctgcctgctgctgcaactgcctccccacccacctccctcctggccccaagcaccaacccactgttagagagcttgaagaagatgcagactcccccgagcctgccaccctgcccagaatctgctggagcagcaaccactgaggccctctcacctccaaagacacccagcctcctacccccgctgggtttatcacagtcagggccgccagggctgctccccagcccctcctttgactccaaacccccgaccactttgctggggctgatccctgctccatccatggtaccagccactgacaccaaggcacctccaacccttcaagcagagacggctaccaaaccccaagccacatctgccccgtcccccgcccccaagcaaagcttcctgtttggaacacagaacacctcaccttccagccctgccgcccctgctgcatcttcagcatctcccatgttcaagcccattttcacggctccacccaagagtgagaaggaaggccccacaccgcctggcccttcagtcacagccacagcgccctccagctcctccctccccacgaccaccagcaccacagccccgaccttccagcctgtctttagcagcatggggccacctgcatctgtgcccttgcctgctcccttcttcaagcagacaactactcccgccactgctcccaccacaactgccccgctcttcactggcctggccagcgccacctctgctgtggctcccatcacctctgccagtccatccacagactctgcttcgaagcctgcgtttggctttggcataaacagtgtgagcagcagcagtgtgagtaccacgaccagcaccgccactgccgcctcacagcctttcctcttcggggcgccccaggcctctgctgccagcttcaccccggccatgggctccatattccagtttggcaaacctcctgccttgcccacaaccaccacagtcaccaccttcagccagtccctgcccactgccgtgccaacggccaccagcagcagcgctgccgactttagtggttttggcagcaccctcgccacctccgccccggccaccagcagccagcccactctgacgttcagtaacacgagcacccccacgttcaacattccctttggctcaagcgccaagtccccgctcccatcatatccgggagccaacccccagcccgcatttggggccgctgaggggcagccaccgggggccgccaagccagcccttacccccagctttggcagctctttcacttttggaaactctgcagccccggccccggctactgcacccacacctgcacctgcgtccacgatcaagatcgtgcctgcgcacgtgcctacgcccatccagcctacctttggcggtgccacgcactcggcgtttggattgaaagccacggcttccgccttcggcgctcccgccagctcacagcccgcctttggcggctccactgctgtcttctccttcggtgcagccaccagctccggctttggagccaccacccagaccgccagcagcgggagcagcagctcggtgtttggcagcacaacaccatcacccttcacgtttgggggttcggcagcccccgctggcagtgggagctttgggatcaacgtggccaccccaggctccagcgccaccaccggagctttcagctttggagcaggacagagtgggagcacagccacctccacccccttcacagggggcttaggtcagaacgccctgggcaccaccggccagagcacaccgtttgccttcaacgtgggcagcacaactgagagcaaacctgtgtttggaggcaccgccacccccacctttggtcagaacacccctgcgcctggagtgggcacatcgggcagcagcctctcctttggggcatcttcagcacccgcccaaggctttgttggtgttggaccgttcggatcggcggccccttcattttccattggtgcgggatccaagaccccaggggctcgacagcgactgcaggcccgaaggcagcacacccgcaaaaagtagcctttgtcccctgtccctgttccccccaccccttccctaaatctggaccttggcacgtgctagaaagagccttggacccttccagctgcgtaaagcaaacctaccccggatctctggcttcagccgccagggggcagtggcagccctggggccctttcccttctggaggaagcacaagcctcagggaaggggaagcaggatgcggagggccaaagcccgggacctctacttgaacagttccactggggaggctggagaactaaggacctgtacatagtgtccgctgccctgactcccgcttagcgcacccttaggcaggcgccccttccacctttccccgagagccgtcgtcgctggagggggcagggtccagcccgcctggatcggtggtgtgcacctgatgggatttgggaaatgggttatccctaaagctttatcttgcttggcttagctgtgagaagtggttctcttcctctggtcccttctggggactctgtttccccatttcttgctgctgtgtccctcaccggttccttgcaggattccctcctttttaaatgcccttgaatctagctttgccttggagaccccagtgggtgctgctcctgccgttttcttcctgccaagcctgaatcaatgtttcatctccaaccctctgccagtttggcccctcagagcttggtggctcaagactgttagcctggcagagccaggggtgaagggagaagctcttggagcaggcaggatgcccaccgctgcttcagctgcctcctcgcccagctaccctttggccccattgggccctcgtctgcctctccaggattgtatgtttcaagccttgtcctgtgttcctttgtctgacgctctgtgtattgctctttgaatcgagtttggaggaagagttgagttgtatgagtggcggcatgttggtagtgccggacttcctgtttcaagttttctggggcctcgctaattgaatgtggaaagtagcaccacttgacggctacaagtgccgactcctgaattttcccatggtgttctgacttcaagggctggcagccagggagaatgggcccaggggaagcaaagacctcttccctctgcggtttctgtcccacttaactgacctcactggaggctacgtcacccaaagtagatgttagaaaacctaaattaatgaaccatatttttaaaatcctatttttcccaaacagggccctctgcagcccatcctttccttccgtccttctgaaaccacataccccaggcccaagcgccttgctgtcacgcccaacctctttgggagaagtatgaatgcgtgtgtctaaattaaaagaaaaaaata

SEQ ID NO: 44641 - DNA, 1335 bp, Homo Sapiens
cagaatgagctcatttgctgcatttgcgtgaactacttcatagacccggtcaccactgactgtgtgcacagcttttgcaggccctgcctctgcctctgctcagaagaaggcagagcaccaatgcgctgccctttgtgcagaaaaatctcagagaagcccaacttcaacaccaatgtggcactcaaaaagctggcttccctagccagacagaccagacctcagaacatcaacagctcagacaatatctgtgtgctccatgaggagactaaggagctcttctgtgaggctgacaagagattgctctgtgggccctgctctgagtcaccagagcacatggctcacagccacagcccaataggatgggctgctgaggaatgcagggcactggaaagagaagcaaaagagcttttccaacaactacaagacagtcaagtgagaatgacccaacatttagaagggatgaaagacatgtacagagagctgaaagggatgatcagatatcaatatcaaaagttgcgccaatttctcctggaggaggagcaacgccatctggagacaatggacagagaagcagaagagatttttcgacaactccaaaacagtgaagtaagaataactcaacatataaaaaagatgaaaaacatgtacagagagctgtgggagatgtgccacatgcccgatgtgaagctgcaccaggtgaggagggagggtccatcatccagagtcaggaagacttttgtaactgaggttgttctttgcaggacagagttggtgcaaatggaaaagccccagccagtgaacccagaactcacttcctggcacatcactggagtgttagataagctcaacaaattcagagcggatgatcctctgagtaaggaaaaggcgaatcactatatgagcctttctgaggatgtgagaaatgtgatatttggagatgaccatgatggtgcacccggggagtcccagagagcagagaactttgcagcatggggagctcaggccttctcctccggcaggcataactgggaagtggatgtaacccactcccccaactggattctgggagtctgtaaagattccaggacagcaaacacaaatcacgttccggcttttgaggaaggattttttctattttcttcaaagagaaacaacctttatagcctctccaacattttttttcccttaactcactatgtgcagagacctttgggtcgggttggggtctttctggattatgacaacacagttgcgagcttttatgatgcttcaaaaggttccctcatatacagctttttccctacctctttttcttcccttttgacacctttcttt

SEQ ID NO: 44642 - DNA, 1648 bp, Homo Sapiens
tctaggcctttccccctggtgctcttcatcctttaccaaagagacaagcacttgaaaaaagcaatggtaccagcgcggtctttaaccccagcgtcttgcactaccagcaggctctcaccagcgcacagttgcagcaacacgccgcgttcattccaacagataattctgaaataatcagcagaaacggaatggaatgccaagaatctgcattgagaataactaaacattgttactgtacatactatcctgtttcctcctcaatagaattgccacaaactgcatgctaaataaagatgtagttcttctggacagaccacaactctaagaagctagtgctgctatctcatatatgagtattaaatatggtatgcttagtatattccaacctaagatagttaactacctgagaccagctgtgatgtttaaagacataaaggataaagtttacttttaaagggtttctaaacatagtttctgtcctaggaatattgtcttatctccataactatagctgatgcagaaagtccagccagtttactcatttcgattcagaatatttcaaatttagcaataaacaattagcattagttaaaaaagaaacatattccaagggcaggttcgattctagctctaattactgtcatgtcatttacccactggatcaaagggtatgtttcacttcttgacaatataaatgctgcagcaaagatgagaggtgaagtaaaaccgatacctgtcctgcaggtctaaaatttgaatggaaattcaagcacaagtactggggacacatcaaagtgtggtgtttggtttgcctggagatgccacgttgaatcatgtgattctagattaacattaaatagattgaaaaagaaactttgcacggtatgagcttcataccccaccaaacaaagtcttgaaggtattattttacaagtatatttttaaagttgttttataagagagactttgtagaagtgcctagattttgccagacttcatccagcttgacaagattgagaggcccatgccaacagtctaatctaagagattagtctttcaaactcaccatccagttgcctgttacagaataactcttcttaactaaaaacctagtcaaacaaggaagctgtaggtgaggagatctgtataatattctaatttaagtaagtttgagtttagtcactgcaaatttgactgtgactttaatctaaattactatgtaaacaaaaagtagatagtttcactttttaaaaaatccattactgttttgcatttcaaaagttggattaaagggttgtaactgactacagcatggaaaaaaatagttcttttaattctttcaccttaaagcatattttatgtctcaaaagtataaaaaactttaatacaagtacatacatattatatatacacatacatatatatactatatatggatgaaacatattttaatgttgtttacttttttaaatacttggttgatcttcaaggtaatagcgatacaattaaattttgttcagaaagtttgttttaaagtttattttaagcactatcgtaccaaatatttcatatttcacattttatatgttgcacatagcctatacagtacctacatagtttttaaattattgtttaaaaaacaaaacag

SEQ ID NO: 44643 - DNA, 144 bp, Homo Sapiens
atgcccgagtactgtcctcaggcggaacggcgtctgcagcgaggagcggggttccagcaggctcggctgacgcggtccctggcatttcccgtgctggccctgggtcgccctcgatgctgcttcccgctgggagcctccttctga

SEQ ID NO: 44644 - DNA, 459 bp, Homo Sapiens
atgctgatgcctaagaaaaaccggattgccatttatgaactcctttttaaagaggaagtcacggtggtcaagaaggatgtccacatgcctaagcacctggagttggcagacaagaattcccgaggctactacgtgaaggaacagtttgcctggagacatgtctactggtaccttaccaatgaggatatccagtatctccgtgattaccttcatctgcccctggagattgtgcctgccaccctacgccgcagccgtccagggactggcaggcctcggtctaaaggtctggagggtgagcgacctgcaagactcacaagaggagaagccgacagagatacctacagaaggagtgctgtgccccctggtgccgacaagaaagccgaggctggggctgggtcagcaaccgaattccagtttagaggcaaatttggtcgtggacaccgtcagccacctcagtag

SEQ ID NO: 44645 - DNA, 1176 bp, Homo Sapiens
tccacagaccgatttgggatgttgcccctggatgagcctgctattcttgttagtgaattcctagatcgttttaagcctttgtcacttggacctccagcttccttccctaaggccggaggacttgaaaactatgtgcttgacagaagacaagatcagtcttctcctacacttgaagatgaacttgatcaccgaactgatgagagaaaaactacaatcaaattaggctcagacatccaagtccacgtcactgcctgtattctctctgtgtgtggctgggcgtgtagttcctctttggaatccatgcagctctccctgataacatgttcgcaatgtatgaggaaggtggggctctggggcttccagcagattgaatcgtccatgactgacctggatgcatcctttggcctgaccagctccccaatcccaggccttgaggggcgaccagagcgcttacctctggtgcctgaatctcctcggaggatgatgacccggagccaggatgccactttctccccaggctcagagcaggacacatcttcccgaagcttctttgatcccacctctcagcatagagactggtgcccttgggtgaatatcacacttggcaaagaaagcagggagaatggtggaactgaaccagatgccagcgccccagcagagccaggctggaaagcagtgctgaccatcctcttggcgcacaaacagtctagccagccagctgaaacggactccatgagtctctctgagaaatcaaggaaagtattccgaatatttcggcagtgggaatctctgtgctcatgctgaagatactccagcgccttcctggagatagctggaatgagagtgactttttgaaaaattaaggctgagttcctttcggtcagctgacactaagtttttcctgttctgggttaatcataaggagccccctgccatagcaaaggcagtgagtgtcaactatctgcatctggctgagagagacccgtttcctttcagggatgtggacagggtaagggcagcaagcatggttctgttaaaggagtgtgggattaacagactagaaggaagactaaggacctgaccacccatttcagcatcttcaatgtggagcagtgttctgaggactcttctatcctaggactatgacagtgtgtattaataaaatatttgctaaga

SEQ ID NO: 44646 - DNA, 483 bp, Homo Sapiens
agcttgtggaggaagatggctgccgcctgggggtcgtccctaacggccgcgacgcagagagcggtcactccctggccgaggggcaggctcctcacggcctccctgggaccccaggcgcgtcgggaggcgtcgtcctccagccccgaggccggcgaagggcagatccgcctcacagacagttgcgtccagaggcttttggaaatcaccgaagggtcagaattcctcaggctgcaagtggagggaggtggatgctccggattccaatacaaattttcactggatacagttatcaaccccgacgacaggcaggtatttgaacagggtggggcaagagtggtggttgactctgatagcttggccttcgtgaaaggggcccaggtggacttcagccaagaactgatccgaagctcatttcaagtgttgaacaatcctcaagcacagcaaggctgctcctgtgggtcatctttctctatcaaactttga

SEQ ID NO: 44647 - DNA, 2809 bp, Homo Sapiens
gagatgggccagatgccaggatccctgaaaggagaccatatactgtaccatttgatactcatttggggcattatatttatatcccatcaagacaagattccaggaaggtccacacaagtccgcctatgtactctctggatcgaatatttgctggatttcgaacacgaagtcagatgctgttgggtcacatagaagaacaagataaggtcctccactgccaattttctgataacagtgatgatgaagaatcagaaggccaagagaaatctggaactagatgtagaagtcgttcatggattcagaagccagactctgtttgttcccttgttgaattgagtgatactcaggatgaaacacaaaagtcagatttggagaatgaagatttaaagattgattgtctccaggagagtcaagaattgaatttgcaaaaattaaagaattcagaacgcatacttactgaagctaaacaaaaaatgagagaacttacaattaacatcaagatgaaggaagatctgattaaagaattaataaaaacaggtaatgatgccaagtctgtaagcaagcagtattctttgaaagtaacaaagctagagcatgatgcagaacaggcaaaagtcgaactgattgaaacacaaaagcagctacaggagctggaaaacaaagatctttctgatgttgcaatgaaggtaaaattacagaaagagtttcgtaaaaagatggatgctgcaaagctgagagttcaggtcttgcagaagaagcaacaagatagtaagaaactggcatcactgtcaatccaaaatgagaaacgtgctaatgagctagagcagagtgtagatcacatgaaatatcaaaagatacagctacaaagaaaactacgagaagaaaatgaaaaaaggaagcaactggatgcagtaattaagcgggaccagcaaaaaatcaaagaaatacaattaaaaacaggacaggaagaaggtctaaaaccgaaagctgaggaccttgatgcatgtaacttgaaaaggagaaaaggttcgtttggaagtatagaccatctccagaaattggatgagcaaaagaaatggttagatgaagaagtagagaaagttctgaaccaacgccaagaattagaggagctggaagcagacttaaagaaacgggaggccatagtttctaagaaggaggctctgttacaggagaagagtcacctggaaaataagaaattgagatctagtcaggccttaaacacagatagtttgaaaatatcaactcgcctgaacttactggaacaagagttgtctgaaaagaatgtgcagctccagaccagtacagctgaggagaaaacaaagatttcagaacaagttgaagtcctccagaaagaaaaggatcagctccagaaacgcagacacaatgtggatgaaaaacttaaaaatggtagagtgttatcacctgaagaagaacatgttcttttccaacttgaagaagggattgaagctttggaagctgcaattgaatacaggaatgaaagtatccagaatcgccagaagtcacttagagcatcattccataacctctctcgtggtgaagcaaatgtcttggaaaagctagcttgcctgagtcctgttgagattagaactattcttttcagatatttcaataaggtggtgaatttgcgagaagctgaacggaaacaacagttatataatgaagaaatgaaaatgaaagttctggaacgggataatatggttcgtgaattagaatctgcactggaccatctaaaattgcagtgtgaccggagactgaccctccagcaaaaggaacacgaacaaaagatgcagttgctattacatcatttcaaagaacaagatggagaaggcattatggaaactttcaaaacatatgaagataaaatccagcagttggaaaaagatctttatttctataagaaaaccagccgggatcataagaagaaacttaaggaactggtaggggaagcaattcggcggcaactagcaccatcagagtatcaagaggctggagatggagtcctgaagccagaaggaggaggcatgctttcagaagaattaaaatgggcatccagacctgaaagtatgaaattaagtggaagagaaagagaaatggacagttcagcaagcagcttaagaacacagccaaatcctcaaaagctctgggaagatatcccagaattacctccaattcatagttctttagcaccccccagtgggcatatgttaggtaatgagaataaaacagaaacagatgataatcagtttacaaaatctcacagtcgactgtcatcccaaattcaggttgtgggaaatgtgggacgacttcatggtgtcacacctgtaaaactgtgtcgaaaagaattacgtcaaatttccgccttggaactatcattgcgacgttccagtcttggagttggcattggatcaatggctgctgattccatcgaagtatctaggaaaccaagggacttaaaaacttagacattgaataatagaacttttagtagatatgtaaaaagattcctttttctaacctgttaaaaactaaagctcaagttcactacctctttcctcagaataaaggaagaaggggaggaaggaatccctaattcttttatatgctatagatgtgtacatcttctatatatatttggggagttttagtttatattcccatagtaatcaaacatgttttccaatacttgataacatttaaatatttataaatacgcttaaatgtttttccaggcatatttgaagattaaaactagtaatagactaaaata

SEQ ID NO: 44648 - DNA, 828 bp, Homo Sapiens
atgagtgcctgcgggaggaaggccctgaccctgctgagcagtgtctttgctgtctgtggcttgggcctcctgggtatcgcggtcagcaccgactactggctgtacctggaggagggtgtgattgtgccccagaaccagagcaccgagatcaagatgtccctgcactcaggcctctggcgggtctgcttccttgcaggtgaggagcgggggcgttgcttcaccatagaatatgtgatgcccatgaacacccagctgacatccgagtccacggtcaatgttctaaagatgatccgctcagccacaccattccctctggtcagcctcttcttcatgttcattgggtttatcctgaacaacatcggacacatccgtccccaccggacgatactggcctttgtctctggcatcttctttatcctctcaggcctctctctcgtggtgggcctggtgctctacatctccagcatcaacgatgagatgctcaacaggaccaaggatgcagagacctacttcaactacaagtatgggtggtcgtttgccttcgccgccatctccttccttttaacggagagtgccggggtgatgtctgtgtacctgtttatgaagcggtacaccgcggaggacatgtacaggccccaccctggcttctaccgccctcggctgagcaactgctccgattactcaggccagttcctacacccagacgcctgggtcaggggccgcagcccctccgacatctccagcgaggcctccctgcagatgaacagcaactaccccgccttgctcaagtgccccgactatgatcagatgtcctcttcaccctgctga

SEQ ID NO: 44649 - DNA, 774 bp, Homo Sapiens
atgccggcccgttgtgtggccgcccactgcggcaacaccaccaagtctgggaagtcgctgttccgctttcccaaggaccgggccgtgcggctgctctgggaccgcttcgtgcggggttgccgcgccgactggtacggaggcaatgaccgctcggtcatctgctctgaccactttgccccagcctgttttgacgtctcttcggttatccagaagaacctgcgcttctcccagcgcctgaggctggtggcaggcgccgtgcccaccctgcaccgggtgcccgccccggcacctaagaggggagaggagggagaccaagcaggccgcctggacacgcgaggagagctccaggcagccaggcattctgaggctgccccaggtccagtctcctgtacacgcccccgagctgggaagcaggctgcagcttcacagattacgtgtgaaaatgaacttgtgcaaacccaaccccatgctgataatccatctaatactgtcacttcagtacctactcactgtgaagaaggcccagtgcataaaagtacacaaatttctttgaaaaggccccgtcaccgtagtgtgggtattcaagccaaagtgaaagcgtttggaaaaagactgtgtaatgcaactactcagacagaggaattgtggtctagaacttcctctctctttgacatttactccagtgattcagaaacagatacagactgggatatcaagagtgaacagagtgatttgtcttatatggctgtacaggtgaaagaagaaacatgttaa

SEQ ID NO: 44650 - DNA, 450 bp, Homo Sapiens
atggcgcccgaggagaacgcgggagaactcttgctgcagggtttcgatcgccgcttcctggcggcgcgcacactgcgctccttcccctggttagaagcaaagttaagagactcatcagattctgagctgctgcgggatattttgcagaagactgtgaagcatcctgtgtgtaagcacccgccgtcagtcaagtatgcccggtgctttctctcagaactcatcaaaaagccctcgggaggctcggtcacaatctccgagagcacagccatcatctctcacggtaccacaggcctggtcacatgggacgccaccctctgccttgcagaatgggccatcgagaacccagcagccttcactaacagacgtgctgtattgcccagaagccatcgtgtcgctggtcggggtcctgcggaggctggctgcctgccaggagcacaagcgggctcctga

SEQ ID NO: 44651 - DNA, 618 bp, Homo Sapiens
taccaatttcgggtcgcgctgctgggggacgcggcggtgggcaagacgtcgctgctgcggagctacgtggcgggcgcgcctggcgccccacagcccaagcccgagcccacggtgggcgccgagtgctaccgccgcgcgctgcagctgcgggctgggccgcgggtcaagctgcagctctgggacaccgcgggccacgagcgcttcagctgcatcaccgggtccttttaccggaatgtggtgggtgtcctgctggtctttgatgtgacaaacaggaagtcctttgaacacatccaagactggcaccaggaggtcatggccactcagggcccggacaaggtcatcttcctgctggttggccacaagagtgacctgcagagcacccgctgtgtctcagcccaggaggccgaggagctagctgcctccctgggcatggccttcgtggagacctctgttaaaaacaactgcaatgtggacctggcctttgacgccctcactgatgctatccagcaggccctgcagcagggggacatcaagctagaagagggcttggggggtgtccggctcatccacaagacccaaatccccaggtcccccagcaggaagcagcacccaggccca

SEQ ID NO: 44652 - DNA, 1662 bp, Homo Sapiens
atggcagcctcaaagaaggcagttttggggccattggtgggggcagtggaccaaggcaccagttccacgcgctttttggttttcaattcaagaacagctgaactacttagtcatcatcaagtggaaataaaacaagagttcccaagagaaggatgggtggaacaggaccctaaggaaattctacattctgtctatgagtgtatagagaaaacatgtgagaaacttggacagctcaatattggtatttccaacataaaagctattggtgtcagcaaccagagggaaaccaccgtagtctgggacaagataactggagagcctctctacaatgctgtggtgtggcttgatctaagaacacagtctaccgttgagagtcttagtaaaagaattccaggaaataataactttgtcaagtccaagacaggccttccacttagcacttacttcagtgcagtgaaacttcgctggctcctcgacaatgtgagaaaagttcaaaaggccgttgaagaaaaacgagctctttttgggactattgattcatggcttatttggagtttgacaggaggcgtcaatggaggtgtccactgtacagatgtaacaaatgcaagtaggactatgcttttcaacattcattctttggaatgggataaacaactctgtgaattttttggaattccaatggaaattcttccacatgttcggagttcttctgagatctatggcctaatgaaagcgggggccttggaaggtgtgccaatatctgggtgtttaggggaccagtctgctgcactggtgggacaaatgtgcttccagattggacaagccaaaaatacgtatggaacaggatgtttcttactatgtaatacaggccataagtgtgtattttctgatcatggccttctcaccacagtggcttacaaacttggcagagacaaaccggtatattacgctttggaaggttctgtagctatagctggtgctgttattcgctggctaagagacaatcttggaattataaagacctcagaagaaattgaaaaacttgctaaagaagtaggtacttcttatggctgctacttcgtcccagcattttcggggttatatgcaccttattgggagcccagcgcaagagggataatctgtggactcactcaattcacgaataaatgccatattgcttttgctgcattagaagctgtttgtttccaaactcgagagattttggatgccatgaatcgagactgtggaattccactcagtcatttgcaggttgatggaggaatgaccagcaacaaaattcttatgcagctacaagcagacattctgtatattccagtagtgaagcccttgatgcccgaaaccactgcactgggtgctgccatggcggcaggggctgcagaaggagtcgacgtatggagtcttgaacctgaggatttgtccgccgtcacgatggagcggtttgaacctcagattaatgctgaggaaagtgaaattcgttattctacatggaagaaagctgtgatgaagtcaatgggttgggttacaactcaatctccagaaggtggtgaccctagtgtcttctgtagtctgcccttgggcttttttatagtgagtagcatggcaatgttaatcggagcaaggtacatctcaggtattccataa

SEQ ID NO: 44653 - DNA, 1680 bp, Homo Sapiens
atgagaaaatttgcatactgcaaggtggtcctagccacctccttgatttgggtactcttggatatgttcctgctgctttacttcagtgaatgcaacaaatgtgatgaaaaaaaggagagaggacttcctgctggagatgttctagagccagtacaaaagcctcatgaaggtcctggagaaatggggaaaccagtcgtcattcctaaagaggatcaagaaaagatgaaagagatgtttaaaatcaatcagttcaatttaatggcaagtgagatgattgcactcaacagatctttaccagatgttaggttagaagggtgtaaaacaaaggtgtatccagataatcttcctacaacaagtgtggtgattgttttccacaatgaggcttggagcacacttctgcgaactgtccatagtgtcattaatcgctcaccaagacacatgatagaagaaattgttctagtagatgatgccagtgaaagagactttttgaaaaggcctttagagagttatgtgaaaaaactaaaagtaccagttcatgtaattcgaatggaacaacgttctggattgatcagagctagattaaaaggagctgctgtgtctaaaggccaagtgatcaccttcctggatgcccattgtgagtgtacagtgggatggctggagcctctcttggccaggatcaaacatgacaggagaacagtggtgtgtcccatcatcgatgtgatcagtgatgatacttttgagtacatggcaggctctgatatgacctatggtgggttcaactggaagctcaattttcgctggtatcctgttccccaaagagaaatggacagaaggaaaggtgatcggactcttcctgtcaggacacctaccatggcaggaggccttttttcaatagacagagattactttcaggaaattggaacatatgatgctggaatggatatttggggaggagaaaacctagaaatttcctttaggatttggcagtgtggaggaactttggaaattgttacatgctcacatgttggacatgtgtttcggaaagctacaccttacacgtttccaggaggcacagggcagattatcaataaaaataacagacgacttgcagaagtgtggatggatgaattcaagaatttcttctatataatttctccaggtgttacaaaggtagattatggagatatatcgtcaagagttggtctaagacacaaactacaatgcaaacctttttcctggtacctagagaatatatatcctgattctcaaattccacgtcactatttctcattgggagagatacgaaatgtggaaacgaatcagtgtctagataacatggctagaaaagagaatgaaaaagttggaatttttaattgccatggtatggggggtaatcaggttttctcttatactgccaacaaagaaattagaacagatgacctttgcttggatgtttccaaacttaatggcccagttacaatgctcaaatgccaccacctaaaaggcaaccaactctgggagtatgacccagtgaaattaaccctgcagcatgtgaacagtaatcagtgcctggataaagccacagaagaggatagccaggtgcccagcattagagactgcaatggaagtcggtcccagcagtggcttcttcgaaacgtcaccctgccagaaatattctga

SEQ ID NO: 44654 - DNA, 789 bp, Homo Sapiens
atggagcatctggagcgctgcgagtggttgttgcggggaacgctggtgcgggcggccgtgcggcgctacctgccctgggccctggtggcctccatgctggcgggctccctcctcaaggagttgtccccgttgcccgagagctacctcagcaacaagcgcaacgtcctcaacgtgtattttgtcaaagtggcctgggcctggacgttctgtctccttctgcctttcattgccctcaccaactaccatctgaccggcaaggctggcttggtcctgcggcggctgagcaccctgcttgtgggcacggccatctggtacatctgcacctccatcttctccaacatcgaacactacacgggcagctgctaccagtccccagccctggagggggtcagaaaggaacaccagagcaagcagcagtgccaccaggaagggggcttttggcatggctttgacatctcaggtcactccttcctgctgaccttctgcgccctcatgattgtagaagagatgtctgtgctgcatgaggtgaagacggaccgaagccactgcctccacaccgccatcaccaccctggttgtggccctgggcattctgactttcatctgggtgttgatgtttctgtgcacagctgtttatttccacaacttgtcccagaaggtgtttggcaccttgtttggtttgctgagctggtacgggacatacgggttttggtatccgaaagccttttccccaggacttcctccccagagctgtagtttgaatttgaagcaagatagttacaagaaataa

SEQ ID NO: 44655 - DNA, 480 bp, Homo Sapiens
cctcctgctctgcttctgtgggtgcatcagagcccccccagatgcccacacgcagacgcgcacaggcctgcacgtggaaacacagacatgcgcacacgcaggcccacacacagacgcacacagagctgcacgtggagacacgtgcgcacacgcaggcccacacgcaggcccacacacaggtgcacgcggacctgcacgtggagacacagatgtgtgcacatgcaggcccacacacaggtgagcgtggacctgtgtgaacagatgcgcgcagacctgcacgtggagacacagacatgcaggcgcacaaagagatccctcaaggctgacacccaggaaggggcctctcacttgtgggactcccgagatgcagtggccaacacgagtgtagtgcccagttcactgctggataagacagaggcctgttctggtcacacatgggaggcagaacccagagactgggcccaggagcccttctgctga

SEQ ID NO: 44656 - DNA, 624 bp, Homo Sapiens
aagcacgcctacatctgcctggcagccatctgggcctatgcttccttctggaccaccatgcccttggtaggtctgggggactacgtacctgagcccttcggaacctcgtgcaccctggactggtggctggcccaggcctcggtagggggccaggttttcatcctgaacatcctcttcttctgcctcttgctcccaacggctgtgatcgtgttctcctacgtaaagatcattgccaaggttaagtcctcttccaaagaagtagctcatttcgacagtcggatccatagcagccatgtgctggaaatgaaactgacaaaggtagcgatgttgatttgtgctggattcctgattgcctggattccttatgcagtggtgtctgtgtggtcagcttttggaaggccagactccattcccatacagctctctgtggtgccaaccctacttgcaaaatctgcagcgatgtacaatcccatcatttaccaagttattgattacaaatttgcctgttgccaaactggtggtttgaaagcaaccaagaagaagtctctggaaggcttcaggctgcacaccgtaaccacagtcaggaagtcttctgctgtgctggaaattcatgaagaggtatga

SEQ ID NO: 44657 - DNA, 360 bp, Homo Sapiens
atggtggacatgatggagttgcccaggttgcgcatcaacgctggcacgctagctcagttcatcgataagcctgtctgcttcgtagggaggctggaaaagattcatcccactggaaaaatgtttgttcttttagatggagaaggaaaaaatggaaccatcaaactgatggaaccccttgatgaagaaatctctggaattatggaagtggttggaagagtaaccgctaaggccaccatcatgtgtacttatgtccagtttaaagagaaccatccttttgatcttggactttacaatgaagctgtgaaaattatccatgagtttcctcagttttatcctttagggattgtgcatcataattga

SEQ ID NO: 44658 - DNA, 1572 bp, Homo Sapiens
atttaccgccgcgcggagagtgagggcccaagtccgccctgctccgccacttaggccgccccagacgcttccctcggggctgccaccgggtcgggcgcggctgccgcggctagcgggccttccccgcaccggcgcggcccaaccgccaccgaaccttctggaagcggcggctgcctgggcccccacgccgccagaatcgtacgcccgcgcgagctctctgcagccttggcggcctgggaggcggggctcggggtggggccggcgcgggggcggggtcggcgcggggaggccgcgttcgattgcccccggcgcgcaggccccgcctcaccagccccatcgctccacctctgccctccccctttatggcgcggcccgggctcattcattccgcgccgggcctgccagacacctgcgcccttctgcagccgcccgccgcatccgccgccgcagcccccagcatgtcgggcccagacgtcgagacgccgtccgccatccagatctgccggatcatgcggccagatgatgccaacgtggccggcaatgtccacggggggaccatcctgaagatgatcgaggaggcaggcgccatcatcagcacccggcattgcaacagccagaacggggagcgctgtgtggccgccctggctcgtgtcgagcgcaccgacttcctgtctcccatgtgcatcggtgaggtggcgcatgtcagcgcggagatcacctacacctccaagcactctgtggaggtgcaggtcaacgtgatgtccgaaaacatcctcacaggtgccaaaaagctgaccaataaggccaccctgtggtatgtgcccctgtcgctgaagaatgtggacaaggtcctcgaggtgcctcctgttgtgtattcccggcaggagcaggaggaggagggccggaagcggtatgaagcccagaagctggagcgcatggagaccaagtggaggaacggggacatcgtccagccagtcctcaacccagagccgaacactgtcagctacagccagtccagcttgatccacctggtggggccttcagactgcaccctgcacggctttgtgcacggaggtgtgaccatgaagctcatggatgaggtcgccgggatcgtggctgcacgccactgcaagaccaacatcgtcacagcttccgtggacgccattaattttcatgacaagatcagaaaaggctgcgtcatcaccatctcgggacgcatgaccttcacgagcaataagtccatggagatcgaggtgttggtggacgccgaccctgttgtggacagctctcagaagcgctaccgggccgccagtgccttcttcacctacgtgtcgctgagccaggaaggcaggtcgctgcctgtgccccagctggtgcccgagaccgaggacgagaagaagcgctttgaggaaggcaaagggcggtacctgcagatgaaggcgaagcagggccacgcggagcctcagccctagactccctcctcctgccactggtgcctcgagtagccatggcaacgggcccagtgtccagtcacttagaagttccccccttggccaaaaacccaattcacat

SEQ ID NO: 44659 - DNA, 1992 bp, Homo Sapiens
tcaggaacaaggtgtggttattgattctctaaaattaagtgaggagatgaagcccaatctagatggtgttgatttattcaacaatggtggttctggaaacggtgaaacgaaaactgggctgagactgaaagcaataaatctgcctttggaaaatgaagtaactgaaatttcagctttgcaggtgcatttggatgaattccaaaaaatcttatggaaggaaagagaaatgcgcacagctttggaaaaagaaatagagagactggagtcggctttgtctctgtggaagtggaagtatgaagaactgaaagaatcaaagccaaaaaatgtgaaagagtttgacattcttcttggtcaacataatgatgaaatgcaagaactgtcaggcaatataaaggaagaatccaaatctcaaaacagcaaagacagagtgatttgtgagttaagagcagagctagagagattgcaagctgaaaatacctcggagtgggacaagagggaaatacttgaaagagaaaagcagggactggagagagaaaatagaaggctgaagatccaggtgaaagaaatggaagagcttttggataagaaaaatagattaagtgcaaactctcaaagtcctgatttcaagatgtcacaaattgatctgcaagaaaaaaaccaggaattactgaaccttcaacatgcctactataaactaaacagacaataccaggcaaatattgcagaactgactcatgcaaacaaccgagtggatcaaaatgaagcagaagtaaagaaactaagattacgagtggaagaactaaagcagggactcaatcaaaaagaagatgagcttgatgattccctgaatcagatccgtaagctccagaggtctctggatgaagagaaagaaagaaatgaaaacttagagactgaactcaggcacttgcaaaactggtaattttttcacaaaatatgctgaattaaagattagggccttaaagacatttccatatccttttcttaaatatcagtaaaattgtttttattaactagaaatattaatgaaaaaaacgtagacaatacacaaattaatgggcttcttcacttcttctaatttttgcctaacagatactgcatattctcaaaaagacaatttaaatgtcatttaaaaacaactttaattctaagatgtgtaaatattttgaaagtcaaaaagggctttcagaatactttttacataaaatctgaaagagttataatatcggtaagaaaaagtaagttgaaaaccatacaagacgctgggtcattaataagaaaaccattgactttaagtataaagtactggtttgtttaaataattggtaaacttttatgtacgtgttgtctatgtggtggggatggcaggttgtattaacaaaaatgaatcattctagaggtgtaacaatacatttcttatataattttataagtcatttctaatctttgtataaaacagaagtgagcagatgaatcagaaaaaagtgttttgtattttaaagtaacagataaccagtgattgaatctaagacaggctgtaagcatcgctgagaaactaaaaggacttttgacttttatctggatagacatttctacagtaaaatcatggaaaggcatcagcattgcaaagtagcatctaggtagaaatcaggccaaaattaagctgtggtttccctctgagtagtgggaatagagaaaattaggaaattgtggttatgtgaatatttctttaaaacttttatgtacattatagtttattgcttcatatttaagtttagtttttaaggtaaaatgttattttgaacaaaaagacacttataattttccatacctattttcaactgaaggcaacttgtaagatttaactcagtcaataacatactggttttactcatctccccctccattgattagccaaaaaaaaatgaaatcttactaattcattattgaataaagaccacttttatcagagtc

SEQ ID NO: 44660 - DNA, 411 bp, Homo Sapiens
atgtgtgcccctgagaagaggattattcagcctgaattagagcttgggaacgagactgggtgtgctcatcttacttgtgagggagacaaaaaggaagaggtttcaggcagtaataaaagcggcaaggttcatgcctgcacattagccagattggcaaacttctgctttactcccccatcggaatccaaatcaaaatcccctcctcctgaaaggaagaaccgaggtgagagaggcccaagctcccctcctacaaccacagctccaatgcgtgtcagtaaaaggaaatcttttcagctccgtgggtccaccgagaaactgattgtttccaaagaatccctcttcactttaccagaactaggtgatgaagcatttgattgtgactgggatgaagagatgagaaaaaagtcatag

SEQ ID NO: 44661 - DNA, 885 bp, Homo Sapiens
atggcgggcaccgtgcgttgccagagccagcgctgctcaccgctctcgtgtggccccgacaaggcccctgccctgagtcctggcagctgctgcccccgctgcctgcctcggcccgcttcctgcatggccttcggagacccccattaccgcaccttcgacggccgcctgctgcacttccagggcagttgcagctatgtgctggccaaggactgccacagcggggacttcagtgtgcacgtgaccaatgatgaccggggccggagcggtgtggcctggacccaggaggtggcggtgctgctgggagacatggccgtgcggctgctgcaggacggggcagtcacggtggatgggcacccggtggccttgcccttcctgcaggagccgctgctgtatgtggagctgcgaggacacactgtgatcctgcacgcccagcccgggctccaggtgctgtgggatgggcagtcccaggtggaggtgagcgtacctggctcctaccagggccggacttgtgggctctgtgggaacttcaatggctttgcccaggacgatctgcagggccctgaggggctgctcctgccctcggaggctgcgtttgggaatagctggcaggtgcaagagggccgcgggtatcccccagggctggagctgccccctgtactgctgcagatggagtggagccggcgggcccaggagcagctcctgtgggacttggaactgctgactggtgtggagctgggcctcttctggccaccccaggcccagtttttcggtccgaggggccaggcccagcaagcatggagccagtgctgtcagccaggtggtagcacaggtggggaccctgagcagccgatactgaaggccagctgtgatggctcacgcctgtaa

SEQ ID NO: 44662 - DNA, 396 bp, Homo Sapiens
ttccctttggacggcagctcccctccccgccacgccccgtgctgcagctggagcagaggagctcacgcctgcgggtcgggaggcgcatccgtggaccatgggggcagctgggccacactgtccttcgccctgtggcctgctagcctggtcgagagaggtggtggggttctctggaatggtttcctcctgacacccagagctgtgcggggaggcagggatctctcatctcacagagattgtgcctgggggagcgtggaggcagggcctccaggtgctggaacagtcgggaggggcagcatcatggtgctcggtcagccgaggagagagggcagggctgccctgcagcccaggcatgggactgaccacggacagcgaggggacagccagtggtgctga

SEQ ID NO: 44663 - DNA, 3702 bp, Homo Sapiens
ataatacgcaacttcaatttaatttcaccagagcaaaacactggatttcctcccctcagcagccttccccatctcagaaaatggcatcactttttacccattagctcaaaccaaataccaagaagttatgctcaatgccctttgtgtccatcgggttccaattatgagacagaaactgcttggtgatttaaacagggaaagtttaatcattagctataaaaggagattgaagtgttgagagattagctactaagaggtaaagagatgtctaaagaatacaagagtaggagatgtagccagcagccactatcttcagatcagaggcaaagcatgcaaagaaaaaccaacctgggtaaggaatccgcctccttacccccaccagcccacctcacatacacacacacccagcactgaaatgcagaccttgcaggaaagggtgggtcccctggatgatggagaagttcacaaaggtgctttgctgatggaacttgctgaaaagccactcataggggtattagaaaaagctgtccaaggggagaaactgcatctcaggccatgctgggcatctgcccaaggaaccgaatgcctttggaagctgctctctgaagggcagggatggctgtccacgaggaggccacatgcattgcgtgcattaggcaggagcctgctacgagaaagcaggtaccagagccagggagaaaagcctattcttccccaagtgctgcttcagcgccttgtaatgatgaagattagtttagcatcccacccattggtaagggagaaacgtgctagtttcatggcagggcagtagagggtggatttggagccgaagacaatatatggatggatagcctttcttttgtttacacccacaccacgtatgctgtatcttctaataccgatgactctgctttaaagcgtgtctctcatctgaccacttctcgccatttctactgctactaccttctcaggctagtacaacattctccctctccctgttttcactttcgctgcactgtggtcagttctctgcacattagccatacatcgtgtgaaagtataaattcaatgttatactaatttatagtactgatgttaaatcatgatagtctccactaaaatttttcctgtggcttttgatctcactcagatgaaaatgtaaacgccatgatcagacccttgcctgtctctcagtcaacttctttctgttcctttgtttttgcctcataagctttgaattttctgttatctctgatgggaacatttcctcaaatagctggttcctctgtatcattcataactgctccagtgtcatctctgcaaagaaggtcctgatttctctatttctctatgtaaaattgtagctttttgttccctactttttatactattttatatatatatatataatatatacatatacatatatatatatattttttttttcagagatagagtctcatgctgttgcccaggctggagtgcagtggtgcgatctcggatcactgcaacctccacctcctaggttcaagagattcttctgcctcagcctcctgagtagctgggattacaagggcacaccaccacgcccagctaatttttgtatttttagtggagatggggtttcaccatgttggccaggctagtcttgaactcctgacctcaagtgatcctccccaccttggtctcccaaagtgctgggattataggcatgagccaccacacctggctactttatattctttttggcatttattattaccacaaattatgttaagtattcttaattaacaagaattaattaaatttttgtccactagaatttaagtgtcataaagaaggaaattatttttgcctggctattgtgagctaaggtttaatggcattcaataaacatatgttgaaagaataaaaaagtgggtaaaggaatgaattcctgcttttcaacactgatttgaacccatgatctgccattttttagcatataaagtttgagtcagtttctcaatatctaagaacctcaaattcttcttctctaagatgatagtttaaaacatttaactctcccaagcttactgtgaaaattcaccaggttggatgatatctcctcaaaaaaccataagaaagacttcttgatcaagcagagccatctcttgatggagtctaagtagtttcttaaaaagagcaattagggcaggatatttataggaccacaggccagcctgggagattttaaagagtgtctattaaggtttggattggacagagtttatgaaacagctgtgctttgatggacacagtagggtgagggtggtaaaatgaattaagttagcaagctgttagtcctaatgaataagtgattgggttggcttacagtcttatattctacaagcaagtgtttcaaggagcaagtagctaagtgtgttttgtttgttctcagtattgattaataaagaaacagggagaatatattgtctcagatttggttagcactggggcaggagagtatgttctatggcgttgtttatgggacagaggtattttggttccagatctcaagtgagatggtatttgtgaggtgtggaaacagtgccagcccatatgcacaatgccataaagcagagtagatatctaagtgaattgcccgtcactgagcagcttagcatatacagcctgtattcagataaaagcatcatggtttcgcttctttgaaaagttcttttcattaataaaatggtttttttggtttcttttggatgatttaaaaatgattctttcagagatgataaattatgtgcttggggaaattctgtaattctgatgggtttgtaatgactctttttgactttgcgaattgatccagtagagcataaacttcgggagtgccttaggccttaataggctatgttcttgttttaataattttgacagaattgttgtgggaatcataattagagtctctctctcagtgaatttgattaatttaaaaaattaataacatttctacgtaaacaaaaggtattaggatggtgcaaaagtaacttgcagttttgccattaaaagtaattacttaccacaattactttttcaataacctaaatgtaataaggaagagaggagagcctatccccgagcagatgtgcactttagggaaggagttgatgcttgtcctgtgttgtgaggctttgtgattgaatcagctgctcaggatatcaaagaatcttcaacctgaggaccagttacattagaatggtattgtctgcttggactcctctgttgagaagaattgcaacgattctctgagttcaggtgggaaaaagagctgtggtatgggcataggaaaggtggatgatggcctactcatagcacatttattggtacattgttgtttttgctgctgctattgctgtttcctgtttcattgatgaatcaggagtcttctattaaaaactatatgtactacttttacacatgttcacagtaacataacaacaagcataggtcttatcatccacttattccaaggctaagaataggagtcagggaagttaagtgactagtctgaggacacagggataaaatttggcagagacatggatgtggctatgcccaggtatatgtggctgaaagctggtgctctgtctctatgcaagacaggcagaggaaaacctctggttaccaaaaaaaaaaaaaaaaaaaaaa

SEQ ID NO: 44664 - DNA, 1104 bp, Homo Sapiens
ccacactcagtctggcctcggggcctttgcactggctgtgtcccctgcctgtgatgccattctcctctgcctggccaactcctacgtttattcaagtctggaccttgtcatcggctcctcaggaaggcactccgggacccccagatgggggcggttccctgtgactcctggcacggaggccaaccccttccttgttcaatggttccttgagggaccattcccatgtgattatcgaccattcggcaggcgttcaaagtcaaaggccccacactgagtcctggcccagcgccctgtgcccgttggctgctggagggacagacggggcgtgcggctgaccatcccgtgcccgcaggctgaggatgcagcgctggaaggcggcggccttggcctcagtgctctgcagctccgtgctgtccatctggatgtgtcgagagggcctgcttctcagccaccgcctcggacctgcgctggtccccctgcaccgcctgcctcgaaccctggacgcccggattgcccgcctggcccagtaccgtgcactcctgcagggggccccggatgcgatggagctgcgcgagctgacgccctgggctgggcggcccccaggtccgcgccgtcgggcggggccccggcggcggcgcgcgcgtgcgcggttgggggcgcggccttgcgggctgcgcgagctggaggtgcgcgtgagcgagctgggcctgggctacgcgtccgacgagacggtgctgttccgctactgcgcaggcgcctgcgaggctgccgcgcgcgtctacgacctcgggctgcgacgactgcgccagcggcggcgcctgcggcgggagcgggtgcgcgcgcagccctgctgccgcccgacggcctacgaggacgaggtgtccttcctggacgcgcacagccgctaccacacggtgcacgagctgtcggcgcgcgagtgcgcctgcgtgtgaccctacctcactcggccggcgcggcggccactccccccgcctcgacggcaccactggccggccccgcgaaagactgcgcgtgcgtagagcacgccggcgcggccccgggactctcgcgataactgtactgagataaagtgtggcaactcga

SEQ ID NO: 44665 - DNA, 2677 bp, Homo Sapiens
ggttccgtttccggagtggagggcacgccagggtgtctgaagctgagaccccgggctcgcagtcgccccatgaatttcgagttccgcaactgacgctactgggcggggcttcatggccagggcctcgctcaggcctaagtttccccacctgtgctcaatgcacaggtgcggtgccgcctccagggccggccgagaagagaggccgcacccgcacggggactgcatctcccagagcgccccgcgagcggccgagcggcgggactccatgccctagagtgccccgcgggcggccgggcggcgggactccatgtcctagagtgccccgcgggcggccgggcggcgggactccatgtcctagagtgccccgcgggcggccgggcggcgggactccatgtcctagagtgccccgcgggcggccgggcggcggccgccgcaaccgacaggtccgggactgggcgctgcggcctcgtccgcgcgccggggcgggggcctagctcgacagcttcccggcggctgcgcgatggacagccccgaggtgaccttcactctcgcctatctggtgttcgccgtgtgcttcgtgttcacgcccaacgagttccacgcggcggggctcacggtgcagaacctgctgtcgggctggctgggcagcgaggacgccgccttcgtgcccttccacttgcgccgcacggccgccacgctgttgtgccactcgctgctgccgctcggctactatgtgggcatgtgccttgcggcttcagaaaagcggctccacgccctcagccaggcccctgaggcctggcggctcttcctgctgctggccgtgaccctcccctccatcgcctgcatcctgatctactactggtcccgtgaccggtgggcctgccacccactggcgcgcaccctggccctctacgccctcccacagtctggctggcaggctgttgcctcctctgtcaacactgagttccggcggattgacaagtttgccaccggtgcaccaggtgcccgtgtgattgtgacagacacgtgggtgatgaaggtaaccacctaccgagtgcacgtggcccagcagcaggacgtgcacctgactgtgacggagtctcggcagcatgagctctcgccagactcgaacttgcccgtgcagctcctcaccatccgtgtggccagcaccaaccctgctgtgcaggcctttgacatctggagctggaggcctgcataggctgcatgcagacacgtgccagcgtgaagctggtgaagacctgccaggaggcagccacaggcgagtgccagcagtgttactgccgccccatgtggtgcctcacctgcatgggcaagtggttcgccagccgccaggaccccctgcgccctgacacctggctggccagccgcgtgccctgccccacctgccgcgcacgcttctgcatcctggatgtgtgcaccgtgcgctgagtgggctggggccttgaggtgactctgtgtctccccccaaagccacagggcagggaagggggtggctgggcctcctggctggcaaagggctctacttaaagcacatgatgtagagcaactcgcctctgccctgggtctgcagaaggctgaggacttttggttaaaagcaatcctcatgaaaacaccccaccctgcttggcagccagggtacaagtcctgggcacctcctctttgcctccctcctgcccctttcctgctggtgggggcagatcctgcacacacagacacagcgtctgcccccgagccattccctggagaccctgggtctaccccaggtggtcgtcatctgggccatttgccttacttctctggagcatacccaccctcagttacgtgccagacctggaccgcattctcctgccctgtcctggagctggcccctggctgcctggaggaccctgggtaggtcctgagggtgggatggagaagagggcactgctgtggtgtgggagcagtcctggggcttcctggtggctgtgaccagttgaggggctgttcctgggtggggtggcaatgggaggacaggtcagagcgccctcatttgtggggctgcccctccgggtttctcatcctgtccttggtgcctttttctgcccaacaagtccagggaaggccgaggtctcagactcctgggtaggggtgggggtttgagttgaggaccaaagtgccatagcgacatccagaacacaagcccaccaggggtccagcccaggctacccactcccctagggtctcccaggctcagaaggggatgcacgccccctgtggtcaagcctctggtgggcgtcttgcccagttcctgatggttcaaggggaggggggatgttggccaggccccagggcacagccctgacacaggtgtggctactggaggggccttcatacctgcggccccaaagcccctgggcttggctgtttgaggcagaggtgatggactccgggggcctgacacttgggatttgggaggcttcctagagcgctcagcaggtgaaggcagcaggggccatggccgggagccaggcctagctttgaactgagtttcaagggctgccaaagaggggcagtgggttggggttgtttttactacaaaataagttacttagttttataaagacaaaccgattgtagccaaatgacaccatatttaataaaatttagtctgaagtga

SEQ ID NO: 44666 - DNA, 1401 bp, Homo Sapiens
gctggggccagctggaggccttcagtacagccccagccaactctcactgaacagctggagcaccgacaccctgggcactcatttcaaatcatgaaatgctacttcacagatcacaggggagaacagtcacccaccgatgggaccaccctcagcttgaccagccctgagtccactgaggagagtgtggaagtgttctggccagggactatacagagagaagggtcgtccccacggccggggcctgccattccccgggaggagggcctctacttcgctgccagggaccgggggatgcgggactggagcagctccccatcctcagagtcctccgagtaccagtcctactcccagtaccagtcgtgctgctcctgcatgtgcgatgaggacaatgctgctccgcagagtgtgtgtgccttctacacgcacgtgcagactgtgcggggtgtggctgtggcctgggagacggaggccggcttcgagccggtcaccaggaagccccgcatccatgaagcccagttcatcaagaggcagaggtggaacggctcctccttcgaaatggcttccaacaccgatatgcgctgggacctggaagcctgcaagagcaactgcagccccgagcccgaggacatagacctgctggagtgctgcctgcaggagctgcgggagccgccggactggctggtcaccaccaactacggggtgcgctgcgtggcctgctgcagggtcttgccctccctggacgctctgctggagcacgcccagcatggcatccgggagggcttcagctgtcagatcttttttgaggagatgctggagagaaggcgggctcagggccaagcacatgaccaacagctggaggaggagcagagtccttcagacaacagcgaatgttcccggccccagggtgaggtgctctcagcacagcagcaggagaagcagtgagccagaggggagatacccaaccctgccctcacctccagggcctgggactgctccttccccagccagcagtatcagagccactagggcagggagagaggaccagggtcagggggaaggaaaggcatggagtgtagagcaaggagggccaggagactggaaggaacccccttcctgccctaggcacagcatctccaccagagtccatttcaaaacccaaacgagagggctttgagtgtttctgatggcaggcacaacatctgaaacccacaaacgcatggccagagggatttctatttttgccggtggatcaggcaggtccacacttgctaagtatatgtgggtcacaggacagccaactgcaaattactctccagccctatttttttcactattacaaatctgtcatatgccctagttctatgtcttatgttattgggattaaacttgaataacacaaaa

SEQ ID NO: 44667 - DNA, 475 bp, Homo Sapiens
caggtgtccagcaagaccatcacccagagggtgctgaagttctccgtctaccacgtggacaggcagaggaagcaccagctcctgggccaggtgctcttccccttgaagaatgagaccctagtgggggactgccggcgtgtcatctggagagacctggaggccgagagcctggagcccccctcggagtttggcgacctccagttctgcctcagctacaacgactacctgagccgcctgacggtggttgtgctgcgtgccaagggcctccggctccaggaggacagaggcattgtcagtgtgtttgtcaaagtgtctctgatgaaccacaacaagtttgtcaagtgcaagaagacttcagctgtgctgggctccatcaaccctgtgtacaatgagaccttcagcttcaaggccgatgccaccgagctggataccgctagcctcagcctgactgtggtgcagaacatggaaggggaca

SEQ ID NO: 44668 - DNA, 582 bp, Homo Sapiens
aagctggtgctggtgggcgacgcaagcgtgggcaagatgtgcgtggtgcagcgcttcaagaccggcgccttctcggagcgccagggaagcaccatcggcgtcgacttcaccatgaagacgctggagatccagggcaagcgggtcaagctgcagatctgggacacggccggccaggagcggttccgcaccatcacccagagctactaccgcagtgccaatggggccatccttgcctacgacatcaccaagaggagctccttcctgtcggtgcctcactggattgaggatgtgaggaagtatgcgggctccaacattgtgcagctgctgatcgggaacaagtcagacctcagcgagcttcgggaggtctccttggctgaggcacagagcctggctgagcactatgacatcctgtgtgccattgagacgtctgccaaggactcgagcaacgtggaggaggccttcctgagggtggccacggagctcatcatgcggcacgggggccccttgttcagcgagaagagccccgaccacatccagctgaacagcaaggacatcggagaaggctggggctgcgggtgctga

SEQ ID NO: 44669 - DNA, 306 bp, Homo Sapiens
ttcattccacagacacacacagcctctctgcccacctctgcttcctctaggaacacaggagttccagatcacatcgagttcaccatgaattcactcagtgaagccaacaccaagttcatgttcgatctgttccaacagttcagaaaatcaaaagagaacaacatcttctattcccctatcagcatcacatcagcattagggatggtcctcttaggagccaaagacaacactgcacaacaaattagcaaggttcttcactttgatcaagtcacagagaacaccacagaaaaagctgcaacatatcat

SEQ ID NO: 44670 - DNA, 363 bp, Homo Sapiens
ctgctcttggcttccaagtatgaggagatgttttctccaaatactgaaggctttgtttacatcacagacaatgcttatactagtttccaaatccaagaaatggaactaattttgaaagaactgaaatttgaggtgggtggacccttgccactacacttcttaaggcaagcatcaaaagccgggaaggctgatgttgaacagcacactttagccaaatatttgatggagctgactctcattgactacgatatgatgcattatcatccttctaaggcagcaacagctgcttcctgcttgtctcagaaggttctgggccaaggaaaatggaacttaaagcagcagtgttatacaggatacacacag

SEQ ID NO: 44671 - DNA, 1029 bp, Homo Sapiens
atggtgaaggtgaaggtggaagtcaacggatttggccatactgggcgcctggtcaccagggctgcttttaactctggtaaagtagatattgtcaccatcaatgaccccttcattgacctcaactaccccttcattgacctcaactacatgatctacatgttccagtatgattccatggcaaattccatggcaccatcaaggctgagaatgggaagcttgtcatcaagggaaatcccatcaccatcttccaggagtgatccctccaaaatcaaatggggtgacactggggctgagtacatggtgaagtccaccagcatcttcaccaccatggaaaaggctggggcttacttgcagggagaagccaaaaggatcataatctctgctccctctgctgacgcccccatgttcatgatgggcataaaccgtgagaagtatgacaacagcctcgagatcatcagcaatgcctcctgcaccaccaactgcttagcacctctggccaaggtcatccatgacaattttggtatcatggaaggactcatgaccacagtccatgccatcgctgcaacccagaagactgtggatagcccctctgggaaactgtggtgtgatggatgcagggctctccagaacatcatccctgcctctactggtgctgccaaggctgtggacaagccaaggtgctgccaaggctgtgtcatccctgagctgaacaggaagctcactggcaaagccttcgtccccaccaccaacgtgtcggtagtggacctgacctgccatctggaaaaacctgccaaatatgatgacatcaagaagtggtgtagcgcatcagaaggccccttcaagggcatcctgggctacactgagcacttggtagtctcctccaacttcaacagtgacacccactcttccgcctttgatgctggggctggcattgccctcaacaaccactttatcaagctcatttcctggcatgacaatgaaggctacagcaatagggtggtagacctcatggcacacatggcctccaag

SEQ ID NO: 44672 - DNA, 2670 bp, Homo Sapiens
ggcggagatgagcaggtccgcgacgctgctgctgtgcctgctgggctgccacgtctggaaggcggtgacacgctgcgggagcccggcgccggagcccaagaggtgacgttaaaggtgcacatcagcgacgccagcacccaccagcccgtagcagatgcgctcatcgagatcttcaccaaccaggcctccatagcctctggcacctcggggactgatggcgtcgcctttatcaagttccagtataagctgggcagtcagttgattgtcaccgcctcgaagcatgcctacgtgccaaactctgccccatggaagccaatccggttacctgtattttcctctctgagccttggcctgcttccagaacgctctgccactctaatggtatatgaagatgtcgtccaaatagtatcaggattccaaggtgcccggccacagcctcgcgttcatttccagagaagggctctgaggttgcctgagaacaccagctacagtgacctgaccgcgtttctcacggccgccagctccccttcggaggtggacagttttccttatttgcgaggattagacggaaatggaacaggaaacagcaccaggcatgacctgaccccagtcacagccgtcagcgtccacttgctgagcagtaatggaacgccggtgctggtggatggtcccatctatgtcactgtgcccctggccacgcagagcagcctgaggcacaatgcctatgtcgcggcgtggcggtttgaccagaagctgggaacgtggctgaagagcggtctgggtcttgtgcaccaggaaggcagccagctgacgtggacatacattgccccccagttggggtactgggtggccgccatgtcccctcccatcccaggtcccgttgtaacacaggacattaccacgtatcacacggtgtttcttttggccattttaggaggaatggctttcatacttttggttttgctgtgtctccttttatattattgcaggaggaagtgcttgaaacctcgtcagcaccacagaaaactgcagctccctgcaggactggagagttccaaaagagaccagtccacgtccatgtcacacattaacttgctgttttcacgccgagcgtcagaattccctggcccgctgtccgtcaccagccacggccgccccgaggcccccggcacgaaggaactgatgagtggagtccatttggaaatgatgtctccgggcggcgaaggggacctgcacacccccatgctcaagctctcctacagcacctcccaggaatttagctcccgggaggagctcctctcttgcaaggaagaggataaaagccagatctcctttgataacctcactccaagtgggacgctggggaaagactaccataagtcagtggaggtttttcccttaaaggcaagaaaatctatggaaagagaaggctacgagtcctcgggcatgactacaggggtagttacaacaccgtgctctcacagcctttatttgaaaagcaggacagagaaggtccagcctccacgggaagcaaactcaccattcaggaacatctgtaccccgcgccttcatcacctgagaaagaacagctgctggaccgcagacccactgaatatgatgtcgcgatcagtagatcacctcgagagacctacgtccttcccacggcccggccagttaatctgctgcagttctgtcgaccaggtcaatgacagcgtttacaggaaagtactgcctgccttggtcatcccggctcattatatgaaactccccggggaccactcctatgtcagccagcccctcgtcgtcccggctgatcagcagcttgagatagaaagactacaggctgagctgtccaatccccatgccgggatcttcccacacccgtcctcacagatccagccccagcccctgtcttcccaggccatctctcagcagcacctgcaggatgcgggcacccgggagtggagccctcagaacgcatccatgtcggagtctctctccatcccagcttccctgaacgacgcggctttggctcagatgaacagtgaggtgcagctcctgactgaaaaggccctgatggagcttgggggtgggaagccgcttccgcacccccgggcgtggttcgtctccttggatggcaggtccaacgctcacgttagacattcatacattgatctccaaagagctggaaggaacggaagtaatgatgccagtttggactctggcgtagatatgaatgaaccaaaatcagcccggaagggaaggggagatgctttgtctctgcagcagaactacccgcccgtccaagagcaccagcagaaagagcctcgagccccagacagcacggcctacacgcagctcgtgtacctggatgacgtggaacagagtggtagcgaatgtgggaccacggtctgtacccccgaggacagtgccctgcgatgcttgttggaggggtcgagtcggagaagtggtggccagctgcccagcctgcaggaggagacgaccagacggactgcggatgccccctcggagccagcagccagcccccaccagagaagatctgcccacgaggaagaggaagacgatgatgatgatgaccaaggagaagacaagaaaagcccctggcagaaacgggaggagaggcccctgatggcgtttaacattaaatga

SEQ ID NO: 44673 - DNA, 105 bp, Homo Sapiens
atggatttcttgttattaattcatttcttctattttctacccattttcttctcaaaagctccttctatttatttttaccctttaatttgtacatatttttgttag

SEQ ID NO: 44674 - DNA, 298 bp, Homo Sapiens
tatcaaattttcctgtttggcagcctttgtgaaactttctcagccttttggtgaagaagccttaagtttggagtcaagagctaatgaagctcagtggtttcgaaaaacagcttggaacttggctgtgcaatgtgacaaagatccagtgatgatgagagagttttttatactttcttataagatgtcccagttttgtccttctgatcaagtaattctgattgcacggaaaacatgtttacttatggcagttgcagttgatctagagcaagggagaaaagcttcaacagcttttgaacag

SEQ ID NO: 44675 - DNA, 1656 bp, Homo Sapiens
atgtcgacctcgtccttgaggcgccagatgaagaacatcgtccacaactactcagaggcggagatcaaggttcgagaggccacgagcaatgacccctggggcccatccagctccctcatgtcagagattgccgacctcacctacaacgttgtcgccttctcggagatcatgagcatgatctggaagcggctcaatgaccatggcaagaactggcgtcacgtttacaaggccatgacgctgatggagtacctcatcaagaccggctcggagcgcgtgtcgcagcagtgcaaggagaacatgtacgccgtgcagacgctgaaggacttccagtacgtggaccgcgacggcaaggaccagggcgtgaacgtgcgtgagaaagctaagcagctggtggccctgctgcgcgacgaggaccggctgcgggaagagcgggcgcacgcgctcaagaccaaggaaaagctggcacagaccgccacggcctcatcagcagctgtgggctcaggcccccctcccgaggcggagcaggcgtggccgcagagcagcggggaggaggagctgcagctccagctggccctggccatgagcaaggaggaggccgaccaggaggagcggatccgtcgcggggatgacctgcggctgcagatggcaatcgaggagagcaagagggagactgggggcaaggaggagtcgtccctcatggaccttgctgacgtcttcacggccccagctcctgccccgaccacagacccctgggggggcccagcacccatggctgctgccgtccccacggctgcccccacctcggacccctggggcggcccccctgtccctccagctgctgatccctggggaggtccagcccccacgccggcctctggggacccctggaggcctgctgcccctgcaggaccctcagttgacccttggggtgggaccccagcccctgcagctggggaggggcccacgcctgatccatggggaagttccgatggtggggtcccggtcagtgggccctcagcctccgatccctggacaccggccccggccttctcagatccctggggagggtcacctgccaagcccagcaccaatggcacaacagcagccgggggattcgacacggagcccgacgagttctctgactttgaccgactccgcacggcactgccgacctccgggagcagcgcaggagagctggagctgctggcaggagaggtgccggcccgaagccctggggcgtttgacatgagtggggtcaggggatctctggctgaggctgtgggcagccccccacctgcagccacaccaactcccacgccccccacccggaagacgccggagtcattcctggggcccaatgcagccctcgtcgacctggactcgctggtgagccggccgggccccacgccgcctggagccaaggcctccaaccccttcctgccaggcggaggcccagccactggcccttccgtcaccaaccccttccagcccgcgcctcccgcgacgctcaccctgaaccagctccgtctcagtcctgtgcctcccgtccctggagcgccacccacgtacatctctccccttggcgggggccctggcctgccccccatgatgcccccgggccccccggcccccaacactaatcccttcctcctataa

SEQ ID NO: 44676 - DNA, 603 bp, Homo Sapiens
atgatgttcaagcacttcctggaggtttgccaggtggcctatgtctcctttggaccttatgctggaaagctggtcgcagttgtagatgttactgatgaaaacagggctctggctgatggactttgcactcaggtaatgggacaggccgtgtctttcaaatgcatgcagctcactgacttcatcctcaagttcccacatagcacccaccaaaggtatgtccaacaagcctggcagcaggtagacctcaatgcaaaatgggcagccacactagccaagaagattgaagccaaagagaggaaagccaagatgacagattttgattgttttaaagccatgaaggcaaagaaaatgaggaaaagaataattaagaatgaatttaggaagcttcgaaaggcagctctcctgaaagcttctaccagaaaagcacctgctgctaaagtcccagcaaaaaagtcactgcgggcaagaaggctccagcccggaagattcctgcccagaaagccacaggccagaaggcagcacttcttcagaaagctcagaagggtcaaaaagtgttggcccagggagcaccttctccaaaagtgtctggcaaggaagcataag

SEQ ID NO: 44677 - DNA, 1107 bp, Homo Sapiens
atgtggccccaaccccgcctccctccccaccccgcgatgtcagaaaaaacacaacaggggaaattggccgcagccaagaaaaagttaaaagcatattggcagaggaagagccctggcattccagcaggagctaacaggaaaaagaaaatcaatggcagtagccctgacacagccacttctggtggttaccactcacctggggattcagcaacaggtatctacggagaaggccgtgcatcctctactaccctggaggatctggagagccagtaccaagaactagcagtggccctggattcaagctccgcaataatcagtcaactcactgaaaacatcaattcactggttcgcacatctaaggaggagaagaagcatgagatacatctggtacagaagcttgggaggagcttgttcaaactcaaaaaccagacggctgaacccctggccccagagcccccagcagggccatctaaggtagagcagctacaagatgagaccaaccacctaaggaaggagctagagagtgtgggaagacagctccaggctgaggtggaaaacaatcagatgttgagtctcctgaacaggagacaggaggagaggctacgtgaacaggaggagaggctacgtgaacaggaggagaggctacgtgaacaggaggataggctacatgaacaggaggagaggctacgtgaacaggaggagaggctgtgtgaacaggaggagaggctacgtgaacatgaggagaggctgtgtgaacaggaggagaggctatgtgaacaggaggagaggctacgtgaacaggaggagaggctgtgtgaacaggaggagaggctacgtgaacaggaggagaggctgtgtgaacaggagaagctgccagggcaggagaggctgctggaagaggtggagaagctgttagaacaggagaggcggcaggaggagcaggagaggctgctggagagggagaggctgctggaagaggtggagaagctgttagaacaggagaggcggcaggaggagcaggagaggctgctggagagggagaggctgctggacgaggtggaggagctcctggacgaggtggaggagctcctggagcaggagaggctt

SEQ ID NO: 44678 - DNA, 459 bp, Homo Sapiens
gaggccactggcattgctcggattttcccatccatcactccctttgtagggaccttagaaaggatattttggatcccaattgtgcgagaatatgtgatgtcaatgggtgtgtgccctgtgagtagctcagccttgaagtacttgctgacccagaaaggctcaggcaatgccgtggttattgtggtgggtggagctgctgaagctctcttgtgccgaccaggagcctccactctcttcctcaagcagcgtaaaggttttgtgaagatggcactgcaaacaggggcataccttgtcccttcatattcctttggtgagaacgaagttttcaatcaggagaccttccctgagggcacgtggttaaggttgttccaaaaaaccttccaggacacattcaaaaaaatcctgggactaaatttctgtaccttccatggccggggcttcactcgcggatcctggggc

SEQ ID NO: 44679 - DNA, 708 bp, Homo Sapiens
atgacaacacaccgaaatgacaccctctccactgaagcttcagacttcctcttgaattgttttgtcagatcccccagctggcagcactggctgtccctgcccctcagcctccttttcctcttggccgtaggggccaacaccaccctcctgatgaccatctggctggaggcctctctgcaccagcccctgtactacctgctcagcctcctctccctgctggacatcgtgctctgcctcactgtcatccccaaggtcctgaccatccaactccgttattgtggaagaaatgtcattgagaactgcatctgtgccaatatgtctgtttccagactctcctgcgatgatgtcaccatcaatcacctttaccaatttgctggaggctggactctgctaggatctgacctcatccttatcttcctctcctacaccttcattctgcgagctgtgctgagactcaaggcagagggtgccgtggcaaaggccctaagcacatgtggctcccacttcatgctcatcctcttcttcagcaccatccttctggtttttgtcctcacacatgtggctaagaagaaagtctcccctgatgtgccagtcttgctcaatgttctccaccatgtcattcctgcagcccttaaccccatcatttacggggtgagaacccaagaaattaagcagggaatgcagaggttgttgaagaaagggtgctaa

SEQ ID NO: 44680 - DNA, 1291 bp, Homo Sapiens
cttgaacccgggaggcagaggttgcagtgagccgagatcgcgcagctgcactccagcctgggcaacagagcaagactccatctcagaaaagaagcagaaagcctccaagagccaatggctctcaagcatcttggtctctgctaagaagaggctcagaggcttagaagccctgcctcgccggggctttgaggtgtgtgagcaatggctggggactgcaggcccgggaatctgagggcctcaccccacttcctttccagagccgtgacctcaggctcacctcctgccctcctctcaggcaagctgcagatgccctttagggcccaggccatgccccggatgtgaggggctgagtcactggtttggcagtgcccctcagagcccaggcctgggctgccacccacctgaggacgagggctgggccagctgtcgtgctccagttgctggggcctcttgggatcttgggaaccccatctctgagccccgccccatggccccgcccctcccaaggagggaaaaggcggctgccagtcgctcaactcaggcactgggacctagagctcagaagaccgagaggacagactgccgtgttgccaccacaggctggaccatggacccccaagagatggtcgtcaagaacccatatgcccacatcagcatcccccgggctcacctgcggcctgacctggggcagcagttagaggtggcttccacctgttcctcatcctcggagatgcagcccctgccagtggggccctgtgccccagagccaacccacctcttgcagccgaccgaggtcccagggcccaagggcgccaagggtaaccagggggctgcccccatccagaaccagcaggcctggcagcagcctggcaacccctacagcagcagtcagcgccaggccggactgacctacgctggccctccgcccgcggggcgcggggatgacatcgcccaccactgctgctgctgcccctgctgccactgctgccactgcccccccttctgccgctgccacagctgctgctgctgtgtcatctcctagcccagcccaccctgccagggccaggacccagacttcagcaaatgtggctcacacagtgccgggacatgccgggacatgcggggtggctgttgtcatgggcgtctgccccttcacaccaggcactggggctcagacccaccaggaaggtggccgttcagcccgagctcctgaaacggaatcccaggtcctggctggagagggacacccctgattaccttaaggcccaggcaataaagcagggtgatcttc

SEQ ID NO: 44681 - DNA, 1680 bp, Homo Sapiens
  misc_feature (1)...(1680): n = A,T,C or G
gcaaatgaagcagcagccctgaacttggagcatcttcatgaagtagcagccctgagagaggcagcgacatcggaggagggagaggctgagggtggggtggctgtgagtgatgtcggagaaagtgaagaggaagcatccatagacctagaggacacaggacccatggaggacacagcatcaaagagagaggacggttctgaagaggcaattcttgggggagaggaaccagccaaagagagaaaagaggttatgagaacagaaacacgcttgagccccttcacaggagaggcagaggcaagccggatgcaggtttcggagggcagccctgaggaaggaagccttgcaaaggaagccttcctttgcaaggaagatgtggaaggggaagagatggtgactgaggcagaagctaatagggaagatgataggaaagaaattttacccaaggaattagatttagcaagagagcgaaggaaagctgagaggccaaaaacatctctgaggaaaactgactctgagagagaagaggtgacaagggcaaatgcactcaaggatgaagatgcttttaaagaagagcaaaaacttaaagcggaagaaggggaaacagagacagaagtaagagctgaggaagagacaaaagctcccccaaatgaaatgggatctgatgctgagaacgaagcacctgtggaggcttctgagttgtctgacaatccagggcttctaggagaagattcactaaaagagacagtggttcccatatttgaagcaacgcctggatttgaaaagtcgctggaaaacataacagctctgaggaaagaaggaggaggggaaagactgagtgaagccagagacacagagcacaaagacagagaagagctgtccagcagggagaatagggccctgaaggaagggcaccgccaagatggagagggggccttagcagctcctgaagctgagccagcaggaaaggtgcaggcccctgaggggctgatcccagccacaggccaggcagaggagctagcagccaaagatcacgactcctgcgcaggactggaggggagagctgaagggcaaggaggagtggatgtcgtgctaaggacccaggaagctgttgctgaggaagatcccataatggcagaaaagttcagggaggaagcggtggatgaggacccagaggaggaagaggacaaagagtgcactctggagacagaagcgatgcaggacaggaactcggaaggggacggggacatggaaggagaaggaaacacacaaaagaatgagggcatgggaggaggaagggttgtggctgtggaagttctacacggaggtggtgaaacggcagaaacagccgcanaggaaagggaggtgttggcaggttcggaaacagccgaggagaaaacaatagcaaataaagcctcctccttttcagatgttgctgaggaagaaacctggcaccaacaggatgagttagtaggaaaaacagcagctgcagggaaggtggtggtagaggaattancacggagtgggggaggaagtgccagcagcagaatgacagtgacatatacaacagaggctggggtgggcactccaggagccctggcgcaagactcaagggctagtacacaagaggaagggtcagagggccaggaggcagcccctgggagtgtcgatggcaggcagtaa

SEQ ID NO: 44682 - DNA, 3112 bp, Homo Sapiens
acaactatcaacagccgggaaggctgagcgcgtgtgagcgccgaggggggcgcaggaccctcgcaacttcttcgcaggactccagcctggccgccggcgcccgcagccgtccgagagccctgcgcccgcgcctccccttgcgcaccgtggcagcgcccggcgggcggtcctgccagccccgacgggatgcccgcagccatgctcccctacgcttgcgtcctggtgcttttgggagcccacactgcaccggcggctggggaggccgggggcagctgcctgcgctgggaaccccactgccagcagcccttgccagatagagtgcccagcactgcgatcctgcctccacgccttaatggaccttggatctccacaggctgcgaggtgcgcccaggaccggagttcctgacccgcgcctacaccttctaccccagccggctctttcgagcccaccagttctactacgaggaccccttctgcggggaacctgcccactcgctgctcgtcaagggcaaagtccgcctgcgccgggcctcctgggtcacccggggagccaccgaggccgactaccacctgcacaaggtgggcatcgtcttccacagccgccgggccctggtcgacgtcaccgggcgcctcaaccagacccgcgccggccgggactgcgcgcggcggctgcctccggcccgggcctggctgcctggggcgctgtacgagctgcggagcgcccgggctcagggggactgcctggaggcgctgggcctcaccatgcacgagctcagcctggtccgcgtgcagcgccgcctgcagccgcagccccgggcgtcgccccggctggtggaggagctgtacctgggggacatccacaccgacccggcggagaggcggcactaccggcccacgggctaccagcgcccgctgcagagcgcactgcaccacgtgcagccgtgcccagcctgtggcctcattgcccgctccgatgtgcaccacccgcccgtgctgccgccccctctggccctgcccctgcacctgggcggctggtgggtcagctcggggtgcgaggtgcgcccagcagtcctgttcctcacccggctcttcactttccacgggcacagccgctcctgggaagggtattaccaccacttctcagacccagcctgccggcagcccaccttcaccgtgtatgccgccggccgctacaccaggggcacgccatccaccagggtccgcggcggcaccgagctggtgtttgaggtcacacgggcccatgtgacccccatggaccaggtcaccacggccatgctcaacttctctgagccaagcagctgtgggggtgcgggggcctggtccatgggcactgagcgggatgtcacagccaccaacggctgcctaccgctgggcatccggctcccgcatgtggagtacgagcttttcaagatggaacaagaccccctcgggcaaagcctgctcttcatcggacaaaggcccaccgatggctcaagtcccgataccccagagaaacgtcccacctcctaccaagcacccctggtgctctgtcatggggaggcccccgacttctccaggccaccgcagcacaggccatcgctgcagaagcaccccagcacagggggtcttcacatagcccccttcccacttctgcccctagttctagggctggccttcctccactggctatgacattggacttgacatcaggatggcggctctggacacccattcaacccttcagactccctcctggcagctgtagggaaggaaccattctcctctgctctgtcatggatggatgcacagccccactgcttccaaactctgcctgtgtcccatgtggctcaggacatgagcttaacccctgcaaagcctataccacatcccacagcccgggtccccagtcaagcacttggatgcggcagtgatgttcatcgctacgtgagtttctaaagatcactcccaatttttctactttcctcatccttggcagctcgccaacaggtgcagtcagggggccacacggaacacccccatcccatgttccccccagttcttcccatcctgacccttgggattccaagatgggagcaagaggagatcctgaggctctgcctagggacgaggcctacagttctgccatgtctgtaggttgttgtttaaagattattaattcgaatttagcaatacgatctctaagtggtgccatgaattaaagatgccacttcgggctttcagtgcttctcagcttttgggcaaagggcttgtgtcttcaggggcagctcagctttcctgagtcctgactgctggcattcgtctgcatttgcctgtgcttctgcgagtcggacctcaagctgccaacactgcatgtggataaatccagttttcccgggccagcatgcaaaatgaagaggactccatctaagctgagaagcatggcctccccagagcagcctgcggcctccaagccttcctggcccaggcaaatgccagtgtgcaccaggctggctgctgggggcaggtctttggaggggagcagcatttccagccttctgaacatagttaatagtaatgacagccgtaacactaacgcgctctgcaattcgccctgcccagccatcctcggttgccaagattgcctgtgcctgcctgacaaaggaagagaatctccgaatgtgtatctttgggcccaccctagggagaggtcggggtcaccaggctacatggcgacatctaggcagctccgccttgcccagcctccttgccataatcctaatatattggtgtcctctgctcagaggggactgtcatcatggtgggaacaggctgtgcctccccagggactctgcccatgttcccagggcctcatctgtacactgtgaaattaactggcatcctggtgggcccaagggttttcaggactgggggccaatgactcaccccctccttcctcctcctgatccctatctctagctcttatcacagattttgaacaattgtctgtgaggttaatgatggtttcagagggaagcccttttcctccctgagactgtgtggggttcagtcagcctgctgaaattgcttccacttattacccatccttcctctt

SEQ ID NO: 44683 - DNA, 586 bp, Homo Sapiens
aactcttcaggatgtggacttaactcagcatcagcacaaacagacccgagctctgtctggaggcctgaagaggaagctctcccttggcattgctttcatgggcatgtcgaggaccgtggttctggatgagcccaccagtggggtggacccttgctcccggcatagcctgtgggacattctgctcaagtaccgagaaggtcgtacgatcatcttcacaacccaccacctggatgaagctgaagcgctgagtgaccgcgtggccgtcctccagcatgggaggctcaggtgctgcggtcctcccttctgcctgaaggaggcatatggccaggggctccgcctgacactcacgaggcagccttctgttctggaggcccatgatctgaaagacatggcttgtgttacatccctgataaagatctatattccacaagcatttctcaaagacagcagtggaagtgagctgacctacaccattccaaaggacacagacaaggcctgcttgaaagggctcttccaggccctggatgagaacctgcatcagctgcacctgacgggctatgggatctcagacaccaccttagaagag

SEQ ID NO: 44684 - DNA, 4401 bp, Homo Sapiens
cccagggcgccagcttcgccctcgccgccgcggccgcgctgctcttcggctccgacatggaagatggaccttctaataatgcgagctgcttccgaaggctgaccgagtgcttcctgagccccagtttgacagatgaaaaagtgaaggcatatctttctcttcacccccaggtattagatgaatttgtatctgaaagtgttagtgcagagacagtagagaaatggctgaagaggaagaacaacaaatcagaagatgaatcagctcctaaggaagtcagcaggtaccaagatacgaatatgcagggagttgtatatgaactaaacagctatatagaacaacggttggacacaggaggagacaaccagctactcctctatgaactgagcagcatcattaaaatagccacaaaagccgatggatttgcactgtatttccttggagagtgcaataatagcctgtgtatattcacgccacctgggataaaggaaggaaaaccccgcctcatccctgctgggcccatcactcagggcaccaccgtctctgcttatgtggccaagtccaggaaaacactgctagtagaagacatccttggagatgaacgatttccaagaggtactggactggaatcagggactcgtatccagtctgttctttgcttaccaattgtcactgcaattggtgacttgattggtattctcgagctgtatcggcactggggcaaagaagccttctgtcttagtcaccaggaggttgcaacagcaaatcttgcctgggcttcagtagcaatacatcaggtgcaggtatgcagaggccttgccaaacagacagaattgaatgacttcctactcgacgtatcaaaaacatattttgataacatagttgcaatagattctctacttgaacacataatgatatatgcaaaaaacctggtgaatgccgatcgttgtgcgcttttccaggtggaccataagaacaaggagttatattcagacctttttgatattggagaggaaaaggaaggaaaacctgtcttcaagaagaccaaagagataagattttcaattgagaaaggaattgctggccaagtagcaagaacaggggaagtcctgaacattccagatgcctatgcagacccacgctttaacagagaagtagacttgtacacaggctacaccacgcggaacatcctgtgcatgcccatcgtcagccgaggcagcgtgataggtgtggtgcagatggtcaacaaaatcagtggcagtgccttctctaaaacagatgaaaacaacttcaaaatgtttgccgtcttttgtgctttagccttacactgtgctaatatgtatcatagaattcgccactcagagtgcatttaccgggtaacgatggaaaagctgtcctaccatagcatttgtacttcagaagagtggcaaggtctcatgcaattcacccttcccgtgcgtctctgcaaagaaattgaattattccactttgacattggtccttttgaaaacatgtggcctggaatttttgtctacatggttcatcggtcctgtgggacatcctgctttgagcttgaaaagttgtgtcgttttattatgtctgtgaagaagaactatcggcgggttccttatcacaactggaagcatgcggtcactgtagcacactgcatgtatgccatacttcagaacaatcacacgcttttcacagaccttgagcgcaaaggactgctgattgcgtgtctgtgtcatgacctggaccacaggggcttcagtaacagctacctgcagaagttcgaccaccctctggccgctctctactccacttccaccatggagcagcaccacttctcccagactgtgtccatcctccagttggaagggcacaatatcttctccactctgagctccagtgaatatgagcaggtgcttgagatcatccgcaaagccatcattgccacagaccttgctttatactttggaaacaggaagcagttggaagagatgtaccagaccggatcactaaaccttaataatcaatcacatagagaccgtgtaattggtttgatgatgactgcctgtgacctttgttctgtgacaaaactgtggcccgttacaaaattgacggcaaatgatatatatgcagaattctgggctgagggtgatgaaatgaagaaattgggaatacagcctattcctatgatggacagagacaagaaggatgaagtcccccaaggccagcttgggttctacaatgccgtggccattccctgctatacaacccttacccagatcctccctcccacggagcctcttctgaaagcatgcagggataatctcagtcagtgggagaaggtgattcgaggggaggagactgcaacctggatttcatccccatccgtggctcagaaggcagctgcatctgaagattgagcactggtcaccctgacacgctgtcccacctacagatcctcatcttgcttctttgacattcttttcctttttttggggggggtggggggaacctgcacctggtaactggggtgcaaacctcttcaagaaggtaacatcaaataaataagtcaagcagaggacttcctgccaatctcttctgtgaggcatcatagacactgagcaaccaggaccacccccacgttcagaaatcagctggccaagtgactccatttgacttgcaaaccagccttttctaataggctaatattgctgaggccttaaaggaaatggacaaaaattatccagaaggggtacttttccattgtatctttctaataagggtttaaaatggtactattatggtattgtacttgggctttaacatcaatgttgctttgatgttgttggatataaataggaatttttacacattactattgtgaatggtgaatgttcatgtatgacctacttgtaattaacttgagttgtagtccacagcctcaggacaaatgtcgttgaggttacagagtaagaaatgatggcaaaacgtcaaactcttatttcagagcttcatgaatttagttagactaaacataattctttaagttcaacctaaagggctgagatcaataaatttaacactagacgaagtagacttcctgtctttttgagaagagatgaggtatatgttacaataaatctcagaacttcaagtagcagttcaaaagatgtcagtttttaaaattgtttttgttgttgtcttggcagttttactgaaccctttgcataaagaacaaaataaaagctcggcattgtaatttttttaatggacaagtcttatggatacgaagggtacatttttcataatgattcctttatattttcactttgtgtcattgcagaattttagactctcattcacaatgaaaagtttattttaaacattgtttaattaaaataccatacagttctcttttaaacatcaaaccataaaaagtgtattttgtaattttactctgacctgccgcagtcacctctcacttatctcttccacgtactgcacggtcgtatttcatgagctttctgtccatagcacagaaacagagcagaaagtagtacaatcatgttggaccttctttctgttctctttactcttctcacagatcagatcactccatagaagcctgtgggtttcgatggtttcttctatacacctttttggttgaccagtattactatacaatgtaagtgttttaaaaaatacgaaagtaatactctgcaccccttcctacaaagatgataaagcagtcacttctggcgcattttaataatttaaagatttttagtgcaatggcacggtaacctccaaacctgaattagacagagactcactcaggaagtgacaggcccatcatatcaaataacttattcacttttcatgtggcaggaaactggaatatcgcttttaataaaatggaaaaatatgcttctacatatttaccaccataggcgttttgttcatatgagcctggtttgtgcaaaattaaatcagaggcttctacaacatggtttatttatgttgtagcaaagttggctctacataaacattgttcttattttaaaattaacactatgtgttcagttttcttgtgggcttctgaaagttgccatcttccctccgtggagctccatttgctattttcattatacactatgaggtaaaatgtaataacaaaagagagagaagtaccactgtggctagatatatacacacacatatatatatggatggatgtaatatatgtagaacacacacatagatgtatataggatacacactcatgtatgtaaacgtatacatatgtgtatatatgatacatacacatacacacacacgagagacagaaggaaagagaggaagagagaagcaaacatgtaggaaaaaatataaatc

SEQ ID NO: 44685 - DNA, 593 bp, Homo Sapiens
acagcctcttgatgaaccggaggaagtttctttaccaattcaaaaatgtccgctgggctaagggtcggcgtgagacctacctgtgctacgtagtgaagaggcgtgacagtgctacatccttttcactggactttggttatcttcgcaataagaacggctgccacgtggaattgctcttcctccgctacatctcggactgggacctagaccctggccgctgctaccgcgtcacctggttcacctcctggagcccctgctacgactgtgcccgacatgtggccgactttctgcgagggaaccccaacctcagtctgaggatcttcaccgcgcgcctctacttctgtgaggaccgcaaggctgagcccgaggggctgcggcggctgcaccgcgccggggtgcaaatagccatcatgaccttcaaagattatttttactgctggaatacttttgtagaaaaccacgaaagaactttcaaagcctgggaagggctgcatgaaaattcagttcgtctctccagacagcttcggcgcatccttttgcccctgtatgaggttgatgacttacgagacgcatttcgtactttgggactttga

SEQ ID NO: 44686 - DNA, 357 bp, Homo Sapiens
atgaaattagtgattaagaatagaagtcaattaatacaatcattttgtcttaattatttaaagtccagttttttccctccagcaaacctgaaaatacactatcctccagctatcagaattatattgagatctactcacatttatgatgatgttcagagattctcattgggaaggaaaaggcacacgctgcggcggtcttgcatgactctgttgttgtggaaattcaatttgttcattgtgttttgggctctctgggtggtcagggctgggctctgggtccttggcaattcctcaggttcccagcactccaaagccaagctcacctcctcatcacacaccctacaggagaagcattag

SEQ ID NO: 44687 - DNA, 459 bp, Homo Sapiens
atgaagtcctgcaagcccagcggcccgccggcgggagcgcgcgttgcacccccgtgcgcgggcggcaccgagtgcgcgggcacgtgcgccggggccgggcggctggagagcgcggcgcgcaggcgcctggcggccaacgcgcgcgagcgccgccgcatgcaggggctcaacactgccttcgaccgcttacgcagggtggttccccagtggggccaggataaaaagctgtccaagtacgagaccctgcagatggccctgagctacatcatggctctgacccggatcctggccgaggccgagcgattcggctcggagcgggactgggtgggtctccactgtgagcacttcggccgcgaccactacctcccgttcccgggcgcgaagctgccgggcgagagcgagctgtacagccagagactcttcggcttccagcccgagcccttccagatggccacctag

SEQ ID NO: 44688 - DNA, 243 bp, Homo Sapiens
atgtggaaaggaggtagaagtcatcctttcctcccccatagcagcaggtgtgcaggctctggtggtcagctggactccatactcccccaccagtcaccagcctggggaccgtggggctgcaaggacctcagcagcggtttcccaagtttcctgacttcttccatcctctggaaatcagctgtggttcgtgagccacacatctccccacaccaagctcctccatacaagacctcggactgcatc

SEQ ID NO: 44689 - DNA, 435 bp, Homo Sapiens
atgaaattcaagttacatgtgaattctgccaggcaatacaaggacctgtggaatatgagtgatgacaaaccctttctatgtactgcgcctggatgtggccagagtgaagtcaccctgctgagaaatgaagtggcacagctgaaacagcttcttctggctcataaagattgccctgtaaccgccatgcagaagaaatctggctatcatactgctgataaagatgatagttcagaagacatttcagtgccgagtagtccacatacagaagctatacagcatagttcggtcagcacatccaatggagtcagttcaacctccaaggcagaagctgtagccacttcagtcctcacccagatggcggaccagagtacagagcctgctctttcacagatcgttatggctccttcctcccagtcacagccctcaggaagttga

SEQ ID NO: 44690 - DNA, 240 bp, Homo Sapiens
atggtgtggcaggagaatgaggacctgcgcaagcaattggttgaagcctcagagttattgaaatcccaggccaaagaactcaaagatgcccatcagcagcaaaagctggccctgcaggacttcttggagctctgtgagctggtagcagagctctgctcccagaagcagaaggtgtgggacaaggagggggagatggaggtggccatgcagaaagtcaacacgatgtggcaggagagctga

SEQ ID NO: 44691 - DNA, 234 bp, Homo Sapiens
atggtgtggcaggagaaggaggacatgcacaagcaattggttgaagcttcagagacattgaaatcccaagccaaagaactgaaagatgcccatcagcagcaaaagctggccctgcaggagttcttggagctcaatgagctcatggcagagctctactcccagaagcagaaggtgtgggacaaggaggaggagatggaagtagccatgcagaaagctgacatgatgtggcaggag

SEQ ID NO: 44692 - DNA, 657 bp, Homo Sapiens
atggctgccgcatgccgctgcctctccctcctgctcctgtccacctgtgtggctctgttgctgtagccactgctgggtgcccggggagccccgttggagccattgtacccaggggacaataccacaccggagcagatggcccagtacacagctgagctccgtagatacatcaacatgctgaccaagcctaggcatgtgccatggacaaggagagagatcccagcccctgggaccctgggcccactccacattcctggccacaccctatccccagcccaagccccatctccagccccagtcccagccccttccaggccactcttggggaaacagagcatctgtgctgaccaggcctgggcccatgtgccctgggcaagagggtgcctacaggcggatatgaaaccggtgggctggcacctgggcacagtgcttccaggtatggagaaagagacaaagaggacacgctggccttctcagagtggggtcttcccatgctgctgcccccagagagctcagcccgctggacttgtaacactacctcccgccccctaccactccacgggcagtgccagcccagctctcccctccacactgttggctctggccgaagctcactccctgttcctgcacaggctcaataaagcaagtcaaagcaca

SEQ ID NO: 44693 - DNA, 868 bp, Homo Sapiens
agaggcactgagagtggaggtctcagactcttggaaggggctatactagacacacaaagacagccccaagaaggacggtggagtagtgtcctcgctaaaagacagtagatatgcaatgcctcttgctcctgccctttctcctgctgggaacagtttctgctcttcatctggagaatgatgccccccatctggagagcctagagacacaggcagacctaggccaggatctggatagttcaaaggagcaggagagagacttggctctgacggaggaggtgattcaggcagagggagaggaggtcaaggcttctgcctgtcaagacaactttgaggatgaggaagccatggagtcggacccagctgccttagacaaggacttccagtgccccagggaagaagacattgttgaagtgcagggaagtccaaggtgcaagatctgccgctacctattggtgcggactcctaaaacttttgcagaagctcagaatgtctgcagcagatgctacggaggcaaccttgtctctatccatgacttcaacttcaactatcgcattcagtgctgcactagcacagtcaaccaagcccaggtctggattggaggcaacctcaggggctggttcctgtggaagcggttttgctggactgatgggagccactggaattttgcttactggtccccagggcaacctgggaatgggcaaggctcctgtgtggccctatgcaccaaaggaggttattggcgacgagctcaatgcgacaagcaactgcccttcgtctgctccttctaagccagcggcacggagaccctgccagcagctccctcccgtcccccaacctctcctgctcataaatccagacttcccacagc

SEQ ID NO: 44694 - DNA, 1428 bp, Homo Sapiens
agcacaacagctctgaggcctccactcactgagacaatagacccaagcacatcagctctgagtcctccactcactgagacaatagacccaagcacaacagctcggaggcctccactcggtgagacaatagacccaagcacaacagctctgaggcctccactcactgagacaatagacccaagcacatcagctctgaggcctccactcactgagacaatagacccaagcacatcagctctgaggcctccactcactgagacaatagacccaagcacaacagctctgaggcctccactcactgagacaatagacccaagcacatcagctctgaggcctccactcggtgagacaatagacccaagcacaacagctctgaggcctccactcactgagacaatagacccaagcacatcagctctgaggcctccactcactgagacaatagacccaagcacatcagctctgaggcctccactcactgagacaatagacccaagcacaacagctctgaggcctccactcactgagacaatagacccaagcacaacagctcggagacctccactcggtgagacaatagacccaagcacaacagctctgaggcctccactcactgagacaatagacccaagcacatcagctctgaggcctccactcactgagacaatagacccaagcacatcagctctgaggcctccactcactgagacaatagacccaagcacaacagctctgaggcctccactcactgagacaatagacccaagcacatcagctctgaggcctccacttggtgagacaatagacccaagcacaacagctctgaggcctccactcactgagacaatagacccaagcacatcagctctgaggcctccactcactgagacaatagacccaagcacatcagctctgaggcctccactcactgagacaatagacccaagcacaacagctctgaggcctccactcactgagacaatagacccaagcacatcagctctgaggcctccactcggtgagacaatagacccaagcacaacagctctgagggctccactcactgagacaacagacccaagaacaacagctctgaggcctccactcactgagacaatagacccaagcacatcagctctgaggcctccactcactgagacaatagacccaagcacatcagctctgaggcctccactcactgagacaatagacccaagcacaacagctctgaggcctccactcactgagacaatagacccaagcacatcagctctgaggcctccactcggtgagacaatagacccaagcacaacagctctgagggctccactcactgagacaatagacccaagtgcatcagctctgagggctccactcactgagacaatagacccaagcacatcagctctgaggcctccactcactgag

SEQ ID NO: 44695 - DNA, 1694 bp, Homo Sapiens
gtctgcaccggcagcaccatgtcgctcatggtcgtcagcatggcgtgtgttgggttcttcttgctggaggggccctggccacatgtgggtggtcaggacaagcccttcctctctgcctggcccggcactgtggtgtctgaaggacaacatgtgactcttcagtgtcgctctcgtcttgggtttaacgaattcagtctgtccaaagaagacgggatgcctgtccctgagctctacaacagaatattccggaacagctttctcatgggccctgtgaccccagcacatgcagggacctacagatgttgcagttcacacccacactcccccactgggtggtcggcacccagcaaccctgtggtgatcatggtcacaggagtccacagaaaaccttccctcctggcccacccaggtcccctggtgaaatcgggagagacggtcatcctgcaatgttggtcagatgtcaggtttgagcgcttccttctgcacagagaggggatcactgaggaccccttgcgcctcattggacagctccacgatgcgggttcccaggtcaactattccatgggtcccatgacacctgcccttgcagggacctacagatgctttggttctgtcactcacttaccctatgagttgtcggctcccagtgaccctctggacatcgtggtcgtaggtctatatgggaaaccttctctctcagcccagccgggccccacggttcaggcaggagagaatgtgaccttgtcctgcagctcccggagcttgtttgacatttaccatctatccagggaggcagaggccggtgaacttaggctcactgcggtgctgagggtcaatggaacattccaggccaacttccctctgggccctgtgacccacggagggaactacagatgcttcggctctttccgtgccctgccccacgcgtggtcagacccgagtgacccactgcccgtttctgtcacaggtaactccagatacctgcacgctctgattgggacctcagtggtcatcatcccctttgctatcctcctcttctttctccttcatcgctggtgtgccaacaaaaagaatgctgttgtaatggaccaagagcctgcagggaacagaacagtgaacagggaggactctgatgaacaagaccctcaggaggtgacatacgcacagttgaatcactgcgttttcacacagagaaaaatcactcgcccttctcagaggcccaagacacccccaacagataccagcgtgtaacacggaacttccaaatgctgagcgcagatccaaagttgtcttctgtccaccagcaccacagtcaggccttgatgggatcttctagggagacaatagccctgtctcaaaaccgggttgccagctcccatgtaccagcagctggaatctgaaggcgtgagtctgcatcttagggcatcgctcttcctcacaccacgaatctgaacatgcctctctcttgcttacaaatgtctaaggtccccactgcctgctggagagaaaacacactcctttgcttagcccacaattctccatttcacttgacccctgcccacctctccaacctaactggcttacttcctagtctacttgaggctgcgatcacactgaggaactcacaattccaaacatataagaggctccctcttaacacggcacttagatacatgctattccacctttcctca

SEQ ID NO: 44696 - DNA, 1992 bp, Homo Sapiens
atgagacgcgcccacgaggggcgcgagattcctagcttgggcggcgctaggcggagggaggtgttgcagccgcggagccagagagctgccggcaggaggcggcggcggcaagaacttgaacttggcgtcgggagcgggcgccccggacgccccccgccggggccggggcgccgagggacctgcgccgcagcgctgccccccgaatggccgcggcggcggaccgggctcccgcgccgcggccctaggcggcctctcgccatggccaagtggctaaacaagtacttcagcttgggcaacagcaagaccaagagccccccgcagccgccgcggccagactaccgcgagcagcggcgccgaggcgagcggccttcgcagcccccccaggccgtgccgcaggcctcctccgccgcctcggcgtcctgcggtccggccaccgcctcctgcttctcagcctcttcgggctcgctgcccgacgacagcggcagcaccagcgacctcatccgcgcctaccgcgcgcagaaggagcgagacttcgaggacccctacaacgggcctggctcgtcgctgcgcaaactgcgcgccatgtgccgcctggactactgcggcggcagcggggagccaggcggggtccagcgcgccttctcggcctcgtccgcgtcgggcgccgcgggctgttgctgcgcctcctcgggcgcgggggccgccgcgtcctcgtcctcgtcctccggctctccgcatctctaccgcagcagcagcgagcggcggcccgccacgccggccgaggtgcgctacatctcccccaagcaccgcctcatcaaagtggagagcgccgcgggcggtggggccggggaccccctggggggcgcctgcgcgggcggccgcacctggagcccgacggcctgcggaggcaagaaactgctcaacaagtgcgccgcctcagccgcggaggagagcggggccggcaagaaggacaaggtgaccatagccgatgactactcagatccctttgatgccaagaatgatctcaagagcaaagcaggaaagggggagagtgctggctacatggagccctatgaggcacagaggatcatgacagaatttcagaggcaggaaagtgtccggtcccagcataaaggtatccagttatatgacaccccttacgaacctgaaggccaaagtgttgactcagactcggagagcacagtcagcccccgactgcgggagagcaagctgccccaggatgacgacaggcccgccgatgagtacgaccagccttgggagtggaaccgggtcaccatcccagccctggcagcacagtttaatggcaacgagaagcggcagtcatccccctcaccttcgcgggaccggcggcgccagcttcgtgcccctggagggggctttaagcctatcaaacatgggagccctgagttctgcgggatcctaggagaaagggtggatcctgccgtccccctggagaagcaaatatggtatcacggagccatcagcagaggagacgccgagaacctgctgcgactctgcaaggagtgtagctaccttgtccggaacagccagaccagcaagcatgactactccctctccctgaggagcaaccagggttttatgcacatgaaactggccaaaaccaaagagaaatacgttctgggtcagaacagccctccgttcgacagtgtcccggaagtcatccactactacaccaccagaaagctacccatcaaaggggctgagcacttgtccctcctctatcccgtggctgtgaggaccctgtgagcggaccagacctgccctgctctgtgacagagcctgagacttggaggtgccagaggccccccaccaaccagcccagccactgttgctggctgtgtcgtttgtgttgtgtgtatggtactagcacaccactgcatgtctctagaatgctgttgccacttacgggggctggagaaggcctggataaagacagaagggcggcaacac

SEQ ID NO: 44697 - DNA, 1362 bp, Homo Sapiens
actgctgagatgtcctctattcttaaagagcatgttcttggagctgatacctctgctgaccttgaagaaactgggcatgtcttaagtattggtgatggtattgtccatgtacatgggctgaggaatgttccaagcgaaatggtagagttttcttcaggcttaaaggatatgtccttgaacttcgaaactgacaatgttggcattgtagtgtttgaaaataataaagtagaaggaggtatagtgaagaggacaggaaccattgtggacgttccagtcggtgaggagctgttgggtcgtgtagttgatgcccttggtaatgctattgatggaaagggtccaatgggttccaagacccataaaatcattcctcgaacttcagtgtgggaaccaatgccgactggcattaaggctgtggatagcttggtgccaattggtcgtggtcagcatgagctcattattggtgaccgaaggactgggaaaacctcaattgctattgacacaatcattaaccagaaacatttcaatgatagatctgaagaaaagaagaagctgtactgtatctatgttgctattggtcgaaagagatccactgttgctcagttggtgaagagacttacagatgcagatgccgtgaagtacaccactgtggtgtcagctatggcctcagatgctgccctacttcagtacctggctccttactctgactgttccatgggagagtattttagagacgatggcaaatatactttgatcatctatgacgacttatccaaacaggctgtcgcttactgtcagatgtctctgttgctccacccccctggtcgtaaggcctgtcctggtgatgtgttttacctatactcccggttgctggagagagcagccaaaatgaatgatgcttttggtggtggctccttgactgctttgctagtcatagaaacacaggccgatgatgtgtctgcttacattccaacaaatgtcatttccatcactgacagacagatcttggaaacagaattgttctacaaagatatccgctctgccattaacggtctgtctgtgtcttgtgttggatctgctgcccaaaccaggactatgaagcaggcggcaggtaccatgaagctggaattggctcaggatcgtgaggttgctgcttttgcccagtttggttctgacctcaatgctcccactcaacaactattgagtcgcggtgtgcgtctaactgagttgctgaagcaaggacagtatcctcccatggttactgaacaacaagtggctgttatctgtgcgggtgtaagggggtatcttgataaactggagcccagcaagattacaaagtttgagaatgctttcttgtctcatgtt

SEQ ID NO: 44698 - DNA, 652 bp, Homo Sapiens
gtggagtctcgagcctgggttgcacctgctcttggccgggaggtgactcccagagccgcaatgccagctcatgaggatggctttacccaggacgcgttcatgatgccagcaaggcagagccaccaaaacagaaaaatggaagatgcattttgtggaaagattgtgttatttgaaatttcaaagcgagcactgcagttgtcctcacagacggagtttcgctcttcttcccatgctggagtgcaatggcgcaatctcagctcaccccaacctccgcctcctgggttcaagcgattctcctgcctcagcctcctgattacctgggattacaggcatgtgccaccacacctggctaattttgtgtttttagtagagatggggtttctccatgtcggtcaggctggtctggaactcctgacctcaggtgatccgcccacctcagcctcctaaaatgctgggattacaggcgtgagccaccgcgcccagcctataaaattgattctttaaaaaaaattagaacatttaccgatgctggacccaccttccccaccttcagggtccactttctaggtggccacagtgcctgcttggcccctgtagcatttgagtttgcaactctgcttttggagttaaacatgttttaggagtcctggga

SEQ ID NO: 44699 - DNA, 636 bp, Homo Sapiens
atgagcagaaccttggaaaaagtgctgtgcctgaggaacaataccacttttaagcaaggcttttcactcttaaggcttagaacttcagcagagaagcccatctattctgtaggtggcattctactaagtactagtcggccctacaagacaaagcccacccacgccattggaaagtacaagcacctaattaaagcagaagagcccgagaagaagcaaaaagtggaagtgaaactcattaatttggggacagatgatgaatatggggttttaaacattcacctgcctgcatatgacatgaccctggcagagagttatgcccagtatgttcacaacttctgcaactctctctccattaaagtcgaggaaagttatgtgatgccaaccaaaaccactgaagtgttgtggttgcaggaccaaggcagcaaaacgttcctggactcagtgcttaccacccatgagcgagtggttcacatcagcagtttgagtgctacgtttgcagagattttcttggaaataatccaaagcagtcttcctgaaggagtcagattgtcgttgaaggagcacactgaagaagacttcaagggaagattcaaagctcgaccagaactggaagaacggttggccaagttgaactag

SEQ ID NO: 44700 - DNA, 2405 bp, Homo Sapiens
tctttgtgtccctagggccttatgtgcccagaccacaaggaagaggtgacccactactgcaagacatgccaacgcctggtatgtcaactctgccgggtgcggcgcacccacagcgggcacaagatcacaccagtgctcagtgcctaccaggccctcaaggacaagctgacaaagagcctgacatacatcctgggaaaccaggacacggtacagacccagatctgtgagctggaggaggccgtgaggcacaccgaggtgagtggtcagcaggccaaggaggaggtgtcgcagctggtgcgggggctgggggctgtgctggaggagaagcgggcatcactgcttcaggccattgaagaatgccagcaggagcggctggcccgtctcagcgcccagatccaggagcaccggagcctgctggatggctcaggtctggtgggctatgcccaggaagtacttaaggaaacagaccagccttgctttgtgcaagccgccaagcagctgcacaacaggattgcccgagccactgaagccctccagacattccggccagctgccagctcctccttccgccattgccagctcgacgtgggacgtgagatgaagctgctgacagagcttaacttcctgcgagtgcctgaggcccccgtcattgacacccagcgcacctttgcctatgatcagatcttcctgtgctggcggctgcccccccattcaccacctgcctggcactataccgttgagttccggcgcacggatgtgcctgctcagccaggccccacccgctggcagcggcgggaggaggtgaggggcaccagtgccctgcttgagaaccccgacacgggctctgtgtatgtgctgcgtgtccgcggctgcaacaaggccggctacggcgaatacagtgaagatgtgcacctgcacacgcccccggcacctgtcctgcacttcttcctcgatagccgctggggcgcaagccgagagcggctggctatcagcaaggaccagcgagcagtacggagtgttccagggctgcccctgctgctggctgctgaccggctgctgaccggctgccacctgagtgtggatgtggtcctgggcgacgtggctgtgacccagggccgcagctactgggcctgcgccgtagacccagcctcctacttggtcaaggtgggcgtcgggctggagagcaagcttcaagaaagtttccagggtgcccccgatgtgatcagccccaggtacgacccggacagcgggcacgacagcggtgccgaggatgccacagtggaggcgtcgccacccttcgctttcctaaccattggcatgggcaagatcctgctggggtcgggggcaagctcaaacgcagggctgacagggagggatggccccacagccggctgcacagtgcccctgccaccccgcctgggcatctgcctggactatgagcggggccgggtttccttcctggatgctgtttccttccgtgggctcttggagtgccccctggactgctcagggcctgtgtgccctgccttttgcttcatcgggggtggcgcagtacagctccaggagccagtgggcactaagcctgagaggaaagtcaccattgggggcttcgccaagctggactgagccttccaggcccctcatgcagacctggggtcctcctgggccctggcccccaaacctcttggcacccggttgttaccccctggcagcttctcccccaaactctcctaccatgtggccctgctccttctcccgtgtctgtcttcccacagttttctcttgacccaggggctctcttctgcccacctctctggatggcccccgttctctccattgcttgttagccaggcccccacccccactgagtctgccctatgacctgcctttggcatgttacccaagccatggagagagccccttctccatccctgtcctgtgccccccaggctgattgggagggagggcacctggaacactgggcatgatctccagctctgcccttgccctgccaagctccctgccctgttgatgctgaactacagccttgggacaggcaggctttggggctggacgctgtccaggcattcctggtgaggggaaggggaccctgtcatcctgctttatttatttgggtcccaacaccccgcagccgcatgccccttatgtccctcttctccctcttgcatgctttacctgtcccacacccatgccaatgtgccaagtctcccttggggacccagctgagtctgggtgttcccattgggttgggccaggcaaggcctctggtgcccgctgccgtccccctgcagtgggctctgctaggcctgtgctgagcaacagctgttattgtcatggtttataaacaataaactgtgatgccaggcacatctctgccttccctg

SEQ ID NO: 44701 - DNA, 3048 bp, Homo Sapiens
atgttcggaggcccggggcctggggtcctgggagcccagggcatggcgggacccctgcggggccgggtggaagagctgaagctgccgtggtggcgggagagctcaccgctggtgctgcggcacagcgaggcggctcggctggcggccgacgccctcctggagcggggtgaggctgcctacctgcgggtcatctccgaggagcgggagctgcccttcctgagcgccctggatgtggactacatgaccagccatgtgcgcgggggccctgagctcagcgaggctcaggggcaggaggcctccgggccagaccgcctcagcctgctctctgaagtcacctcagggacttacttccccatggcctctgacatagaccccccagacctggacctgggctggcccgaggtgccacaggccacaggcttcagccccacccaggctgtggtccacttccagagggacaaggccaagaacatcaaggacctgctgcgcttccttttcagccaggcccacacggtggtggctgtggtgatggacatattcactgacatggagcttctgtgtgacctcatggaggcctcaagccggcgtggtgtccctgtgtacctgctccttgcccaggagcacctgaggcacttcctggagatgtgctacaagatggacctcaatggggagcacctgccgaacatgcgtgtgcggagcacgtgtggggacacatactgcagcaaggctggccgccgcttcacggggcaggccctggagaagttcgtcctcattgactgtgagcaagtggtggcgggcagttacagcttcacctggctttgcagccaggcccacactagcatggtgctgcagctgaggggccgcatcgtggaagactttgaccgggagttccgctgtctgtacgctgagtcgcagcctgtggagggcttctgtggcggtgaggacccgctgtctccccgggcactgcgtcctccccctgtggccctagccttcaggcctgatgtcccaagccccacgtcgtccctgccctccagcaccagcctcagcagcatcaagcagtcaccgcttatgggtcgctcctcctacctcgctctaccaggaggtggtgattgcagtgatacgggtgtggtgtcctcgtccctgggtcctgcccgccgtgaggccagtggccagccctccctacatcgccaactgtcagaccctaaccacggctcccctcctgggctctatagggccaatctcggcaagctaggggcatacccatggtcccagtcctcccctgccctcaaccataatagtaccagccccttaaccttggcagtggggtcacctctgcttcctcgctcccggcccctcctccagttccatcggggtgccccagctctgtcccggttcccagagaatgggctcccaggaagccaagagcccagccccctgcggggtcgatgggtacctggcacaaccctggagacagtggaggagaaggagaagaaggcatctccaagtcagagccgtggccagctggatctccttgtccccttccccagagcccgagaagtgggagaccctgactctggggttacccccaactcaggcccccttcggcctggcgagcaggccccagaggacaggaggttgtccccaagccaggccgacagccagctggatctcctgtcccgagccctgggtactgggggtgcccctgagttgggttccctcagacctggtgatcgggccctggaggacaggaggctgtccctaaaccaaagccgtggccaatcagacctcctgatgcagtaccccaaggcccagggttccagagtgccccttgaaaccaactcctcagccagacctgccagacgggcaccagatgagcggcggcagaccctggggcacagccagctggacctcatcacaaagttcggcccattccgtggtgaggggcctgggcccaatggtctcccgatatcaagccctgctcgcacggctggagctgggtctggggatgagaaacggctaaccctgggccacagcaagctggacctcatcaccaagtatcatcagttgcacggggccaggcagggaactgagcctgggggtcccaagggtggccatctcaatggtggtaacagtgacctggtcagggatgagaaacggctgaccctgggtcacagcaaactggacctcatcactaagtacaacaagtccaagttcaagcagctccgaagccgctttgagtcctagccaaaggactggcatcgggggtgcactggcaagggcaggcccctcctctgtccaccgagactctggacttgctcaggtcccagactggggaagggaggtgtctagaaacccaggtcagacacactctctgggctcaagattcttgtgtacacacacacacacacacacacacacacacaccctaactagtatcttcttgaatctaggctgtgtttccagccctgtgctgggcctgtagagctgacaggtgggtcacactcagacctggggacagaggtgaaatgcacaagctgctggagaaggggtcagagccatatcaagttaaaggttaaccagttacagagggtgttagaaaacaaagggcagagagtcctggagaaggtggagtagtcagaaaactttcttagaggagatggaggtggcctttgagccaggccctgaaggatggggaggttttggacagagggaggagagagttagaaaaatttttggtagagagaatcaggtgaaagagatgccctaaagaggactgagtgggtctgaggtgaatgagtgaggaagagcagagtatgtggatacccggaaacacacacacacacacatcatcattatcatcatcatcattgtcgtcgtcatcatcttgctgagtcatcatcatcatcatcatcattgtcgtcgtcatcatcttgctgagtgtctcttgaagtacaggctgtgacaggttgtgggccattttcctgaactcaccacttacccgggatagtaaacatgatacacatcaataaaggcagactttattgtgaa

SEQ ID NO: 44702 - DNA, 1101 bp, Homo Sapiens
agagtcacccatgagctccaagccatgaaggacaagatcaaagagaacagtgagaaaatcaatgtgaacaaaaccctggtgtaccttgtctccaacatcatcgagctcctggatgttgatcccaatgatcaagaggaggatggtccaaatattgacctggactcccagaggaaggacaagtgtgctgtgatcaaaacctctacacgacagacatacttcctacctgtgattggattggtggatgttgaaaagctaaagccaggagacctggtgggtgtgaacaaagactcctatccaatcctggagacactgcccgagtacgactcgcgggtgaaggccacagaggtggatgagagacccacggagcaatacagtgacactgggggcttggacaagcagatccaggaactggtggaggccactgtcttgtcaatgaaccacaaggagaagtttgagaacttgcggatccaacatccaaaaggggtgctgcccccagggacggagaagaccctcctggcctgggcctgtagggcacagactaaggccaccttcctaaagctgactggcccccagctggtgcagatgttcactggagatggtgccaagctagtccgggatgccttcgccctggccaaggagaaagcgccctccatcatcttcactgatgagctggatgccataggcaccaagcactttgacagcgagaagtccggggaccgagaggtgcagaggacgatgctggagcttctgaaccagctggatggcttccagcccaacacccaagttaaggtaattgcagtcacaaaccgggtggacatcctggaccccgccctgctacgcgcggcctggaccgcaagatcgagtgcctgggccagaatcatgcagatccactcccaaaagatgaacgtcagtcctgacgtgaacagggagctgacccgctgcacagatgacttcaacggggcccagtgcaaggctgtgtctgtggaggcgggtatgatcgcactgcgcaggggtgccacggagctcacccacgaggactacatggaaggcatcctggaggtccaggccaagaagaaagccaacctacagtactacgcctag

SEQ ID NO: 44703 - DNA, 2894 bp, Homo Sapiens
cgcggcggcctccaggaagcggaaaagcaaggggcggtcgagctgggccgccgcgccccactgctcgccgcgctgctctttgacctcgcagggtgtgaagaagatgcgcagctccacgctgcaggacccgcgccgccgggacccccaggacgacgtgtacgtggacatcaccgatcgccttcgttttgccattctctacagcagaccaaagagtgcatcaaatgtacattatttcagcatagataatgaactcgaatatgagaacttctccgaagactttggaccactcaatctggcaatggtttacagatattgttgcaagataaataagaaattaaagtccattacaatgttaaggaagaaaattgttcattttactggctctgatcagagaaaacaagcaaatgctgccttccttgttggatgctacatggttatatacttggggagaaccccagaagcagcatatagaatattaatctttggagatacaccctatattcctttcagagatgctgcctatggaagctgcaatttctacattacacttcttgactgttttcatgcagtaaagaaggcaatgcagtatggcttccttaatttcaactcatttaaccttgatgaatatgaacactatgaaaaagcagaaaacggagatttaaattggataataccagaccgatttattgccttctgtggacctcattcaagagccagacttgaaagtggttaccaccaacattctcccgagacttatattcaatattttaagaatcacaatgttactaccattattcgtctgaataaaaggatgtatgatgccaaacgctttacggatgctggcttcgatcaccatgatcttttctttgcggatggcagcacccctactgatgccattgtcaaaagatttctggatatctgtgaaaatgctgagggtgccattgcagtacattgtaaagctggccttggtcgcacaggcactctgatagcctgctacatcatgaagcattacaggatgacagcagccgagaccattgcgtgggtaaggatctgcagacctggcttggtgatcgggcctcagcagcagtttttggtgatgaagcaaacaagcctctggctggaaggggactattttcgtcagaggttaaaggggcaggagaatggacaacacagagcagccttctccaaacttctctctggtgttgatgacatttccataaatggggtcgagaatcaagaccagcaagaacccaaaccttacagtgatgacgacgaaatcaatggagtgacacaaggtgatagaagtcgggccctgaaaaggcgaagacaatcaaaaacaaacgatattcttctcccatctcccctggctgtgctgacctttacactgtgtagtgttgtcatctggtggattgtttgtgactacattcttcccatcctgctattctgactcaaagatttcagaacatagtagccatcaggaccccctgacagatagctgcttctctccatttcaaggactaaaatggttttgcattaagtaaaaacctgtgaccagaactgaaggaagactctaggaactgaaaactgcaacagaaattagcacaatttgaaaacaaaacaaaattgcaaaagacttagttgctttccacctaagaagctaatcaatggggaaaatgtccacggggtttcagtaatgaacttttgagtttgggtgcaagcaaatgtaccaagaccagctcagtcagggagaccctaccccagtggtgctagaggaattaaagacacacacacagaaatacagaggtgtaaagtgggaaatcaggggtctcacagccttcagagctgagagccccgaacagagatttacccacatattgattaacagcaaacaagtcattagcattgtttctatagatattaaattaactaaaagtatcccttatgggaaacgaagggatgggcctaattaaaggcataggttgggctagttaactgcggcaggagcacgtccttaaggcacagatggctcatgctattgtttgtggcttaagaatgcctttaagcagttttccactctgggctgggtgggccaggtgttccttgccctcattccggtaaacccacacccttccagcgtgggcattagggccattatgaacatgttacagtgctgcagagattttatttatggccagttttggggccagtttatggctggattttggggggcttgctcccaaaaagaatgactcaaagaaaggcccagctctcaagctgaatgacaaaaatgctgttgtaaatttagtctcaggtgtaaatacccaagccctctggtactcagggagctggctggtctgtggtgcatgtgtgtccttgtgatggcaagcattgtagttgatggccttcagaagaattgaggatctgatggaggttttttaatgtatttattttctgttcagcttgtgaccctgtgtcaaaatttgtaaagatacaaaaggcattactgaaatggtactttctgtaatttgatactatttggctttaccatcttcacttgactgtttgtaatactgtagtaatattaactctgataagtacccaagctgcttgtcttctaccaaagagtgctttattaacaagaatctgtgaaaaccacattttaaacactgttgcatgttgtaataccaggtgataccttggtaacctaaaacttgcaagagaatattagtggtagctttagaagactcaggaggagaaactgacttcagagctggaagatgttgcaagtcattcctttttctgtcctttagggactgaagaactgggaggttgcccattgtttggttgccagtcatacaaattaaaatcatatttccttccatgcatggaaaaaa

SEQ ID NO: 44704 - DNA, 1179 bp, Homo Sapiens
tactcagcctccaagccactgaagagcgtccgcatcactggctgcctgcacatgactgtggagacagtcgtcctcactgagaccctccttgtcctgggtgctgaagtgcagtggtccagctgcaacatcttctccacccaggaccatgcagcagctgccattgccaaggctgggattccagtgaacgcctggaagggagaaacggaggagaagtacctttggtgcaccaagcagacactgtacttcaaggacaagctcctcaacatgattctggacatcactgggggcctcaccaacctcactcacactaagtacccacagctcttgtcgggcatcagagacatctccgaggagaccatgactgaggtccacaacctatacaagatgatggccaatgggatcctgaaggtgtccaccatcaacgttaatgattctgtcaccaagagcaagtttgacaacctctatggctgccaccagtccctccccagatggcatcaagccataggtgtgatgattgccagcaaggtagctgtggtagcggtctatggtgatgtgggcaagggctgtgcccaggccctgcagggattcggggctcacgtcattatcaccgagatcgaccccatcaatgcactgcaggctgccatgcagcgctatgaggggaccaccatggacaaggcctgtcaggagggcaacatctttgtcaccaccacaggctgtgttgacatcatccttagcaacaggcactttgaacagatgaaggatgatgccatcgtgtgtaacactggacactttgacgtgaaaatcgatgtcaggtggctcaacaagaatgctatgaagaaggtgaacatcaactccagatggacttggctaaagaatgggcgtggcaccatcctgctggctgagtgtcagctggtctacctgggttgtgctatggaccaacccagctttgtgatgagtaactccttcaccaaccatgtgatggtgcagattgagctgtggacccactcagataagtaccccattgaggttcacttcctgcccaggaagctggatgaggcagtggctgaagcccatctgggcaaggtgaacatgaaactgaccaagcagactgagaagcaggcccagtacctgggcatgtcctgtgatagtctcttcaagctggatcactaccactactga

SEQ ID NO: 44705 - DNA, 5172 bp, Homo Sapiens
atggagtgtccttcgtgccagcatgtctccaaggaggaaacccccaagttctgcagccagtgcggagagaggctgcctcctgcagcccccatagcagattctgagaacaataactccacaatggcgtcggcctcggagggtgaaatggagtgtgggcaggagctgaaggaggaagggggcccgtgcttgttcccgggctcagacagttggcaagaaaaccccgaggagccctgttccaaagcctcctggaccgtccaagaaagcaaaaagaagaaaaggaagaagaaaaagaaggggaacaagtccgcttcctcagagctggcttccttgcccctttctcctgccagcccctgtcacctgactttgctttcaaacccgtggcctcaggacacagccctgccccacagccaagcccagcagagtggccccactggccagccgagccagcccccaggcacagccaccacgccactggagggtgacggcctctccgcgcccaccgaggttggcgacagccccctgcaggcccaggctttgggagaggcaggagtggccacaggaagtgaggctcagagcagcccgcaattccaggaccacacggaaggggaggaccaggacgcttccatcccctctgggggcagaggcctgtcccaggaggggaccggtccccccacctctgctggtgaaggccattctaggactgaagatgctgcccaggagctcctgttgcctgagtcaaaaggaggcagctctgagcccgggacagaactgcagaccaccgagcaacaggcaggggcctcagcctctatggcagttgatgctgtagctgagccagccaatgcagttaaaggggccgggaaggaaatgaaagagaagacccagagaatgaaacagccaccagcaaccactcctcctttcaaaacacactgccaggaagctgagaccaagaccaaggacgagatggctgctgctgaagaaaaagtcggtaagaatgaacaaggggagcctgaagacctcaagaagccagaggggaagaacagaagtgcagctgctgtgaaaaacgagaaggagcaaaaaaaccaggaagcagatgtccaggaagtgaaggcaagcacgctgagcccgggtggaggagtcaccgtgttcttccacgccatcatctctcttcatttcccattcaatcctgacctccataaagtcttcatcagaggaggagaagaatttggggagtcaaaatgggacagcaatatctgtgagctgcactacaccagagacttgggtcatgaccgcgttcttgttgaaggcattgtctgcatttccaagaagcacctagataaatacattccttacaagtacgtcatttataatggggaatcttttgagtatgagttcatttacaagcaccagcagaagaagggcgagtacgtcaaccgctgtctgttcataaaatcttcacttctgggctcaggagactggcatcagtactatgacatagtttatatgaagcctcatgggagactccagaaagtcatgaaccacatcacagacgggccgaggaaggacctggtgaaggggaagcagattgccgctgcgctcatgctggacagcaccttcagcatcctgcagacctgggacaccatcaacctgaacagcttcttcacccagttcgagcagttttgctttgtcctgcaacagcctatgatttatgaaggacaggcacagctgtggaccgatttgcagtacagggagaaagaggtgaagagatacctgtggcaacatctgaaaaaacacgtggtaccattgccggacggaaaaagcacggactttttgcctgtggactgcccagtgaggagtaaactgaaaacaggcctgattgtcctttttgtagtggaaaaaattgagcttttattagaaggcagcctggactggttgtgtcacctcctaacctcagatgccagctcaccagatgagtttcaccgtgacctaagccacatccttgggatacctcagagctggcggctgtacctggtgaacctgtgccaaagatgcatggacacaaggacgtacacctggctgggcgccctgcctgtcctgcactgctgtatggagctggccccgcggcacaaggatgcctggagacagcctgaggacacctgggccgctctggagggactctccttctcaccgttccgggaacaaatgctagatacgagttccctacttcagtttatgagagagaagcagcatttgctgagcatagacgagcctctcttccggtcctggtttagtctgctacctctgagtcacctggttatgtatatggaaaacttcattgagcacctgggtcgttttcctgctcatatcctggactgtctttcagggatttactaccggcttccgggacttgagcaagtcttgaatacgcaggatgttcaggatgttcagaacgttcagaacattttagaaatgctgttgcgactcctggacacttaccgggacaagattcccgaggaggccttgtcaccatcctacctgactgtgtgtctgaaactgcatgaagccatctgcagcagcacaaagctacttaagttttacgagctgccagccttatctgccgagattgtctgcagaatgattagacttctatctctggtggattctgcaggacagagagatgaaactggaaataattcagtccaaacagtcttccaagggacccttgctgctacgaaaaggtggctccgagaagtttttacaaagaacatgctcacatcttcaggtgcctcattcacatacgtcaaggaaattgaggtctggaggcggctggtggaaatccaattccccgcggagcatggctggaaggagtcgttgctgggagacatggaatggaggctcacaaaggaggaacccctctcccagatcactgcctactgcaatagttgctgggacaccaaaggcttagaggacagtgtggccaagaccttcgagaaatgcatcattgaagccgtgagctcagcctgccaggtgaacaatctctcctcctgggaaacggattcgggctcacagctgtgttctgccatgacccagctaagggctatgaagcacccgctgggtctcagctcctccgctaactcagagattgggaagtgggcaccctcctccctcgccaagggcaatggcgctgaaatctagttctctccggattcctcagtgtgctgcacagtccctgctgctcgcaccatcctgcatgtgttccatatggaatcacggccgtgcgcgtgtggcacaagtcacacgggcttgcaggccgttcctcagatggccctgtcatcactgtggctgctggtttgattgattgttaacacttgctcagtaggtgtgcgggaagagactccaaaggttgacagaacatttatggaagcaaaatatgtgaaatggaaaattgtatcaatttatttagctcttttcggcaaaggggaagagattgtgcccccctgtctcccaggaacagtctcgcaggcaatgccacatgaggaagctccctgctggccacggctgccctgctcacatttcctaattggacacttaacccctgtacaagcacagccttgcggccacaggggaagtccagaaacattgaggtcattgaattccggggaccaaggggttctaattttttaagtgactgatacctttgataaggttttcctttccctttttcgttaactctttgttgagatattgttcgtatgccatacggtacatctgtcaaaagttccagttcagcaggttttggggtagtcacagatatgtacagtcatcaccacagttaatgacagagcattttcatcacttcaaagagaaacccggcccctttagccatcatcctcctcccctctagtcacccactcccctctgcaggcataaacaattgctgaacataaacaactgcttctgtggctttctctgttctgactgtcatatgaatggaatcatatcatatgtggccttttgggtatggcttatttcactgagcataatgtttttttgttgttggtggtggtggttgtttgttgtttttgagacagagtttcactctttttgcccaggctggagtgcaatggtgcgatcctggctcaccgcaaccgctgcctcccgggttcaagtgattctcctgcctcagcctcccaagtgctggaattacagctactttttgtttaaagagtcttttaattgtttaaagaacaatgtgccgccacactcggttccttttgtatttttagaagagacagggtttctccatgttggtcaggctggtctcgaactcccgacctcaggtgatccacccaccttggcctcccgaagtgccgagattacaggtgtgagccaccgcgcccggccgagcataatgttttgaaagaccgctcaggctggacacggttgctcacgcctgtaatcacggcactttgggagcccaggagttcaagacaagcctgggtaacagagtaagaccctgtctctataaaaactaaaaaataaacaaaaaaaattagccaggcatggccgggcacacctgtggtcccagctacttgggaggctgaggtgggaggctcccttgggcccagaaggtcaaggcagcagtgagccatgatcacaccactgcacttcaacctgggggacagagcaagaccctgtctcaaaaagcaataacaacaaaagtccatccatattgtagcttgtgtccgtttacgttaagtattccttacccaaaatgcttgagaccagaagtgttttggatttcagatgttttcaaattttggaatatttgcatttacataatgagatgtcttccagatgggacccagagtctaaccacaaaattcacttgtttcatatacatcttatacacatagcctgaaggtaattttatacaatatttttaacaattttgtgcatgagacaaagtttgtattaagtatttgtatgttgaatttttcacttgtggcatcattatactcaaaaagtttggattttgtagtattttggatttggggattaggaatgctcaacctatatttcatttttttccatggccaaatattccccgtttatccatgtgtccattgacggccatctatgttgcttcttcggctattataaatctgctgatac

SEQ ID NO: 44706 - DNA, 1076 bp, Homo Sapiens
aggacaatgaccagactctgcttcctgttattcttctctgtggccaccagtgggtgcagtgcagcagcagcctcttctcttgagatgctctcgagggaattcgaaacctgtgccttctccttttcttccctgcctagaagctgcaaagaaatcaaggaacgctgccatagtgcaggtgatggcctgtattttctccgcaccaagaatggtgttgtctaccagaccttctgtgacatgacttctgggggtggcggctggaccctggtggccagcgtgcacgagaatgacatgcgtgggaagtgcacggtgggtgatcgctggtccagtcagcagggcaacaaagcagactacccagagggggatggcaactgggccaactacaacacctttggatctgcagaggcggccacgagcgatgactacaagaaccctggctactacgacatccaggccaaggacctgggcatctggcatgtgcccaacaagtcccccatgcagcattggagaaacagcgccctgctgaggtaccgcaccaacactggcttcctccagagactgggacataatctgtttggcatctaccagaaatacccagtgaaatacagatcagggaaatgttggaatgacaatggcccagccatacctgtggtctatgactttggtgatgctaagaagactgcatcttattactcaccgtatggtcaacgggaatttgttgcaggattcgttcagttccgggtgtttaataacgagagagcagccaacgccctttgtgctgggataaaagttactggctgtaacactgagcatcactgcatcggtggaggagggttcttcccacagggcaaaccccgtcagtgtggggacttctccgcctttgactgggatggatatggaactcacgttaagagcagctgcagtcgggagataacggaggcggctgtactcttgttctatagatgagacagagctctgcggtgtcagggcgagaacccatcttccaaccccggctatttggagacggaaaaactggaattctaacaaggaggagaggagactaaatcacatcaatttgc

SEQ ID NO: 44707 - DNA, 1326 bp, Homo Sapiens
gtttctcagaactttaattttgcaaaggatgtgttggatcagtggtcccagctggaaaaggacggactcagagggccttaccccgccctctggaaggttagtgccaaaggagaagaggacaaatggagctttgaaaggatgactcaactctccaagaaggccgccagcatcctctcagacacctgtgcccttagccatggagaccggctgatgataatcttgcccccaacacctgaagcctactggatctgcctggcctgtgtgcgcttgggaatcacctttgtgcctgggagcccccagctgactgccaagaaaattcgctatcaattacgcatgtctaaggcccagtgcattgtggctaatgaagctatggccccagttgtaaactctgccgtgtccgactgccccaccttgaaaaccaagctcctggtgtcagataagagctatgatgggtggttggatttcaagaagttgattcaagttgcccctccaaagcagacctacatgaggaccaaaagccaagatccaatggccatattcttcaccaagggtacaacaggagctcccaaaatggtcgagtattcccagtatggtttgggaatgggattcagccaggcttccagacggtggatggatctccagccaacagatgtcttgtggagtctgggtgatgcctttggtggatctttatccctgagcgctgtcttgggaacttggttccaaggagcctgtgtgtttctgtgtcacatgccaaccttctgccctgagactgttctaaatgtaagatcaattcctagtgtggaatgtgtgggacaaaggccagagagaggcattagcaatgacccagtgactcatgcccagaatggggcaaatcaagactacagattcaagagtctgaagcagtgtgtggctgcaggaggacccatcagccctggggtgattgaggactggaaacgcatcactaagttggacatctatgaaggctatgggcagacggaaactggtctactctgtgccacttccaaaacaataaaattgaagccaagctctctggggaagccattgccaccttatattgtccagattgtggatgaaaactcaaatctcctgcctccaggggaagaaggaaatattgcaatccgcataaaactaaaccaacctgcttctctgtactgtccacacatggtgagctgggaggaatatgcttcagcaagaggccacatgctttacctcacaggtgacagagggatcatggatgaagacggctacttctggtggtctggtagagttgatgatgttgccaatgcattgggtcagagattgtga

SEQ ID NO: 44708 - DNA, 2411 bp, Homo Sapiens
atggctgcctcccagtgtctctgctgctcaaaatttctcttccagagacagaacctcgcctgtttcctcacaaacccacactgtggcagccttgttaatgcagatggccatggtgaagtgtggacagattggaataatatgtccaagtttttccagtatggatggcgatgcaccactaatgagaatacctattcaaaccgtaccctgatgggcaactggaaccaggaaagatatgacctgaggaatatcgtgcagcccaaacccttgccttcccagtttggacactactttgaaacaacatatgatacaagctacaacaacaaaatgccactttcaacacatagatttaagcgagagcctcactggttcccaggacatcaacctgaactggatcctccccgatacaaatgcacagaaaagtcaacttacatgaatagctattcaaagccttaaattgggcatcactcaggatgtgtataagatcttaatattgactagtttcacatccaggtttctaagaaatgataagatacttcacttttccagagtgaaatgtaggagggagcacattctaagtacagctaaaaatttagctcactgtaacacagtttcactctctgaataaataaagcaaaaaacacagtaaatattctttatccctttttttgttgttgttttaaccaagatttaaatgtcaaatttaatacagcaactcagttctacatttggggtgttgtagaagggccttaaaaagaattattttaggccaggcacggtggctcatgcctgtaatcccagcactttgggaggccgaggcaggtggatcacgtgaggtcaggagttcgagaccagcctgaccaacatggtgaaacactgtctctactaaaaacacaaaaattagctgagcatggtggctcacgcctgtaatcccagctactcaggaggctgaggcaggggaatcgcttgaacctgagaagtggaggttgtggtgagctgagatcatgccactgcactttagcctgggtgacagagcgagactctgtctcaaaaaaaaaaaaaaaaaaagaattatttctctgaagtctacaaccactgtggtcttcccttccttctgtcgtagcaagacctcagaatctagcataacttaggctaggtttggctagatgctttctgggtataagccagagtcgtatagtgcaactttgctgtgaccttagtgaacatcccctcttgaggactacaaaaacaaacgtaactttttaaaattattatggagaattttacgtaaaacaaaagtagacaggctagtctaatgaactcccatgtatcattacccagcatcaactatttatgactaatcttacctacttctactttgtcttattgaattaattttggagcagatcttagaaatagaatttaatctataaaaatcttggtgggctgggtgcggtggctcatgcctgtaatcccagcactttgggaggctgaggtgggtggatcacctgaggtcaggagtccaagaccagcctggccaatgtggtgaaactccatctcttctaaaaatacaaaaattagctggtcttggtggcgggcgcctgtaatcccagctacttgggaggctgaggcaggagaattgcttgaacccaggaagcagaggttgcagtgagctgagacggtgccattgctctccagcctgggcgacaagagcgaaactccgtctcaaaaaaaaaaaagaaaagaaaaagaaaaaaaaaatcttggtatactggctgggcacagtggctcacacctaatcccagcactttgggaggctgaggcaggaggatagcttgaggctgggagttcaaaaccagcctgggcaacatagcaagaccccatctctaccaaaaaaaatttttttaaagatttcagtatatttctcaaaaagataaggactgtcaattgtctactcccccccaacaaaggtcactaaggaaacctgttgactaaacaaagctcattaaacctattgtagtgtagcaaaggagaccatcaacttgacacagagtcttggtaatgattcaaagggaggatgttagagtaaggtatttataaggatttgagataagggtccaactggtttaaaatgagtcaaaatagggaactagtagagactgagaaagggttgtgaatagcttaggtttggtaaacttaggaaatcaacagtcttaattttaatatggttaaactgattagtatttcctatttttttatctactgtgtaagaagacactataatatatgggcattactgagagatactgcccatatgttgtcctcgtaagcaaggagatattttttatctcccatatattacctctcaaacctttgttactttagtttcgagatatagatccagaatttatgtt

SEQ ID NO: 44709 - DNA, 1089 bp, Homo Sapiens
atgggaaaagtgaggtgccaggagccccactgtaaattgccggtggtcgggtcgaggggtgaggtggctgcagaaatctgggccgacaggagggcagataacaggcagcgactttatgtgggccccagggcagtgccgggactcaggcccagctccctggttttggggctactgtggcccccagggatgggagcttggtctccttacaaatcccatccatgcgtcactacaaacagctctaataattcctgccctgcagtacctgtgcactttaccatatccacaccccccagcatcccaccccactggcaggggctgacagctctggtgctcttgcactcttgggcacatggccgcacacccagacccactcgctcatctcagactcataccacactcaggaaggcccctaactggtctaattcccagcagtggccttccccgcacccgcccctcgcccctccccgctctagcttcccgactttcgtggggaaggggcaccggaacgcagggcagctgagaaggaccgggcagaggagagcgacggcccctcccggtgtcagcttcctcgccgcagtcccattaatcacagtgccgcagtccagttggggatcccgggcgcccagggccgcccgcagccccagggacaatgggattatttccggggagagaggccgcctcgggccggggctcaggcggagacgcctccttccctcaatccgtccctcggcacccaaggagcgcctgcggcggccggagacgagtggcagagcggacgcgggtggcgcgcgggtggcagggcctggccgacctaattcaattagctgggccgccgccgcctccgtgcgactctgggcccgccgggactccagctctgggcagctgctctttgtgcacgaagaccatgcatatggatgcggttcctcccccttcggcgctcaccccacccacacccacttctggcacctgcggcttgccccgccctcccactccttccccgcgagggaaggcgaccgtggcctccccaggaaagttgggaaactgtggttgcttttgagctccctgtggccgtcttcagagtatgtgtga

SEQ ID NO: 44710 - DNA, 1855 bp, Homo Sapiens
cgggcggagccttaacaagtggtcgggcgggcggacgaggcgggcgatggccccgcggccgggacgcgcacagggaccatgcagggcaacggcagcgcgctgcccaacgcctcccagcccgtgctccgcggggacggcgcgcggccctcgtggctggcgtccgccctggcctgcgtcctcatcttcaccatcgtggtggacatcctgggcaacctcctggtcatcctgtcggtgtatcggaacaagaagctcaggaacgcaggaaacatctttgtggtgagcttagcggtggcagacctggtggtggccatttatccgtacccgttggtgctgatgtcgatatttaacaacgggtggaacctgggctatctgcactgccaagtcagtgggttcctgatgggcctgagcgtcatcggctccatattcaacatcaccggcatcgccatcaaccgctactgctacatctgccacagtctcaagtacgacaaactgtacagcagcaagaactccctctgctacgtgctcctcatatggctcctgacgctggcggccgtcctgcccaacctccgtgcagggactctccagtacgacccgaggatctactcgtgcaccttcgcccagtccgtcagctccgcctacaccatcgccgtggtggttttccacttcctcgtccccatgatcatagtcatcttctgttacctgagaatatggatcctggttctccaggtcagacagagggtgaaacctgaccgcaaacccaaactgaaaccacaggacttcaggaattttgtcaccatgtttgtggtttttgtcctttttgccatttgctgggctcctctgaacttcattggcctggccgtggcctctgaccccgccagcatggtgcctaggatcccagagtggctgtttgtggccagttactacatggcgtatttcaacagctgcctcaatgccattatatacgggctactgaaccaaaatttcaggaaggaatacaggagaattatagtctcgctctgtacagccagggtgttctttgtggacagctctaacgacgtggccgatagggttaaatggaaaccgtctccactgatgaccaacaataatgtagtaaaggtggactccgtttaaaaaagcaccacgttccgggtgagatggacacgctgcgcaaggcctcgctcttgacagatgtctgggaaagcagagtggtggaggaaacttccaacttttacctggctgctgccatagtttctgagctaacgtgctgtcagcattataaacccctccaattctactagtcaagagaagtacagaatgtatggagagttacatgttaactgaggaatgcggttcagggctggggtgagagtaagctgctgaatgcattcaggggaaggagtgtgcaaacttttattgtaaatgagtgccacaaaaggggtaattgcattcttcttcactttttgaagacttctagcagaaaaatgaaagagaattttatttataaatgagcaaatggaacaattttttttctgtaaatggaacaaacaatgaaagtggggtgagtgcctcttattacagagggaaaggctgaacataaatcagttaatggctcatcaacaatcacaaccacaaccaacaccacaaacctttcagctggcagagttagcattgggtagctatactcatggtcataaatgtttgctgctctatattacaagttgtgcatgcaaccagataaagaactaaatcataggccgggcacagtcgctcacacctgtaatctcagcactttgggaggctgaggtgggcagatcaactgagttcaggagtttgagaccaccctgggcaacatgat

SEQ ID NO: 44711 - DNA, 2960 bp, Homo Sapiens
gctggacgaggacgctcagagcccagctctcgagagttcaagcaaccgacggttccccactgctcccaggagcggttacctgggcactctgtgcccctccttcctgttcgggcccaggccgaggacctgccagtagggctcagttgcctggagcccgttcagcccatcccccagttcactttgcttgtgggatctccccgttgctcctgcccgtggactgagtggcaggccatcctacaagcacccggacacttgacatcagtggtgtcaagacaactctaagaaggttttccgtgatcctgcaagccctgccttccttcctgggatcctgccttcaatttgattgcacagaggaccgaagcagagggtgctgtttcaacgccaccaccaggagagaggcagaggggctgtgccgtgctagagtcctcagggagggagtgacctcgaccctggctgtgctgcaagctgactccagccttggggtcagcagcacccggcgaacagcagcaggaggagccgctagagcagctgctcatgggcagagctgccctcgggcaactcctgccaccaccccctccccagggagcccaaggcaggggaggctcagcatggaatgaaacaggggagtgagggacacaaggaggtgggaagtgggagggtcccagccccaccaagtacgcagagaccccctcgacatcctggacaccacaggggcacctgcaggctgggagaccaggtcctctgtgcatgggcccgggaggcagacctgccctaagggtgatgcacaggctacaggtgctgcacgctccagcgcccactctagacatcagcctccaggttgactaagggtcaggtcatgtttgaaaccatgcttggctggaccaggacccatggcaagagcacctgggcaccagtgtttagccctggtctgcaggaaggaggacagcagactttaggaccccacagcacggcagtgctgaccatttcacccacttggcctccttgagaaatatggatggggagccctctggggatgggcaaggccttccaggataggctcagttttggtcccctgctttttgaggttgggttaaaattccgaccatggcagaggaagcacagctcgggttcccacacctcacttttcacagcctctgagggcagcagtgcacgtggaggagacgtctcccatgaggccaaggcctccagtgctcaccgatgccctctgcgaagttggggtagaactcgtcagtgaagaggggctcgggcagctcacggaagtacagcttcagcatgcctgcgatggcgttcacgtccatctcgctcatcatcactgacacgtccttgttatctggaaagagcacggaaatgcagcggcctccttgaagatcctgataaatgaagaaaagacacagagaaggatgtgacatgcctgggccatggagcactctgagatctcatcggggacaccactgcccacacctccatcccgtcctgcgcaggccgacactcactgacgttgaagcctgccttcagtgcctggatgtctgcggccaccccagacatgcggtagatgcccacctcctccatgcctcggcgctcgatctcctccatgcactggcgcacgatgtagggcaccttggacctctctctcctgcgggaggagggaatgttctcagtgtcctaacagccctgcttgggccataacacaggagacctgctccctatctgcgcacccggaggtggggtgaggacggtgacgaaggtacccaggtctggggctgcacacagagccttctgcatgcctgtcctccctctgcaagctctgtcctcattgcatgtactttctcaggaacctttcaagcggccagaacccctgcgaatcacacatgacctttgcgggaaggtcaggaggcctgtctaagtcaagtcagcacgggaagggcatctgacagattccaggcctggggttagcagcctgtgcccccggctgggaggtcagacccggtgttggtcctgccacccacgtgctgtgtgagaggagaaaccctgacccctgccctgggccttaacacacatccgacgaatgaatgaagggttgcctcagcaccggtgctccaagtcctgcgatgctaagtgcttttctcctctgagtcttagcaatggacaattccaatacctccacacaggacactagagtaagaatccttcacagttagaacgcagtgctgtgcggaggccttaacttgagttctgttttgcacctggatttaccagcacatcaaagctgcttcgcaagccccctcatcagcagggcttatgtgggggagctgctgatggagtcctcgctgctcatgcccacagccctcccagagtgctatgcgagtggctgccgtgcagttgggggtggggcgtgtgtttagacacagataggagtccagggtatgactgatggaggccccggcccacgtgaccagcaaggtcagaggcccagccagattccatcctggggaagcaaatgaattctcagaggaagtggtctgtgtctgcatgaactgctctcaaaccaacaaataggcttctcttggcaactgactcgtgacaaagggttcaagattgtttgaaaaaaaaaaaaggggggggggaacagggaggcagtaggtcctggaaaagtaaattctttattttacaataagaaagtgattacatattttattttttttacaatggtggaaaattagaagtgattgtgaaaatgatgtctacccgccttgctgatgagtaggatgtgatttggctctttaggaaactgaatttgcagaacttaagaatattgatttataaagggcatggccattgacccagtccatcttatgcaaatctggatgccataaataatatttaaaaatgaaagtattggggtggaggttgcagtgagcggagatcgccccactacactc

SEQ ID NO: 44712 - DNA, 2013 bp, Homo Sapiens
agcgagctagaggaagactttgccaagattctcatgctcaaggaggagaggatcaaagagctggagaagcggctgtcagagaaggaggaagaaattcaggagctgaagaggaaactccacaaatgccagtcggtgctcccagtgccctcgacccacatcggcccccggaccacccgggcgcagggcatctcggccgagccgcagacgtacaggtccttccacgacctccgacaggcattccggaagttcaccaagtccgaaaggtccaaggatcttataaaggaagctatccttgacaatgactttatgaagaacttggagctgtcgcagatccaggagattgtggattgtatgtacccggtggagtatggcaaggacagttgcatcatcaaagaaggagacgtggggtcactggtgtatgtcatggaagatggtaaggttgaagttacaaaagaaggtgtgaagttgtgtaccatgggtccaggaaaagtgtttggggaattggctattctttacaactgtacccggacagcgaccgtcaagactcttgtaaatgtaaaactctgggccattgatcgacaatgttttcaaacaataatgatgaggacaggactcatcaagcataccgagtatatggaatttttaaaaagcgttccaacattccagagccttcctgaagagatcctcagcaagcttgctgatgtccttgaagagacccactatgaaaatggagaatatattatcaggcaaggtgcaagaggggacaccttctttatcatcagcaaaggaacggtaaatgtcactcgtgaagactcaccgagtgaagacccagtctttcttagaactttaggaaaaggagactggtttggagagaaagccttgcagggggaagatgtgagaacagcaaacgtaattgctgcagaagctgtaacctgccttgtgattgacagagactcttttaaacatttgattggagggctggatgatgtttctaataaagcatatgaagatgcagaagctaaagcaaaatatgaagctgaagcggctttcttcgccaacctgaagctgtctgatttcaacatcattgatacccttggagttggaggtttcggacgagtagaactggtccagttgaaaagtgaagaatccaaaacgtttgcaatgaagattctcaagaaacgtcacattgtggacacaagacagcaggagcacatccgctcagagaagcagatcatgcagggggctcattccgatttcatagtgagactgtacagaacatttaaggacagcaaatatttgtatatgttgatggaagcttgtctaggtggagagctctggaccattctcagggatagaggttcgtttgaagattctacaaccagattttacacagcatgtgtggtagaagcttttgcctatctgcattccaaaggaatcatttacagggacctcaagccagaaaatctcatcctagatcaccgaggttatgccaaactggttgattttggctttgcaaagaaaataggatttggaaagaaaacatggactttttgtgggactccagagtatgtagccccagagatcatcctgaacaaaggccatgacatttcagccgactactggtcactgggaatcctaatgtatgaactcctgactggcagcccacctttctcaggcccagatcctatgaaaacctataacatcatattgagggggattgacatgatagaatttccaaagaagattgccaaaaatgctgctaatttaattaaaaaactatgcagggacaatccatcagaaagattagggaatttgaaaaatggagtaaaagacattcaaaagcacaaatggtttgagggctttaactgggaaggcttaagaaaaggtaccttgacacctcctataataccaagtgttgcatcacccacagacacaagtaattttgacagtttccctgaggacaacgatgaaccaccacctgatgacaactcaggatgggatatagacttctaa

SEQ ID NO: 44713 - DNA, 303 bp, Homo Sapiens
cagtcctacaaggtgtccacctctggcccctgggccttcagcagccgctcctgcacgagtgggccctgtgcccgcatgagctcctcgagcttctcccgagtggacagcagcagctttcggggtggcctgggcagcggctatggtggggccagcggcatgggagggatcactgcagtcacggtcaatcaaagcctgctgagcccccttatcctagaggtgaaccccaacatccaggccgtgcgcatccaggggaaggagcagatcaagaccctcaacaagaagtttgcctccttcatagacaag

SEQ ID NO: 44714 - DNA, 1398 bp, Homo Sapiens
atgttcaaatcaacaactgttactgtgagagaaaactgtaatgaaatttcccaacgagttgttgtggattcagttaataaccagcaagatttcaaatatactttgattcatagtgaagagaatactaaagatgctaccactgttgctgaagatccagaaagtgcaaataattatacagcaaaaaataaccaagttggggatcaagcccaggggattcacagacacaaaatcggcttttcttttgcatttccaaagaaagcgtccgtgaagctagagtcctcagctgcagccttctctgaatacagtgatgatgcctcagtgggaaaaggatttagcagaaaaagtagatttgtccccagtgcttgtcatcttcaacaatcttcaccaacagatgtgcttttgagttctgaggagaaaactaactcttttcatccaccagaggcaatgtgcagagacaaagaaactgttcaaactcaagagataaaagaagtctctagtgaaaaagatgcattattattaccttcattttgcaagtttcaacttcagttatcttctgatgcagataattgtcaaaattcagtcccattagcagatcaaataccactagagagtgttgttattaatgaagacatacctgttagtggtaacagttttgagttgttaggaaataaatccacagttcttgacatgtctaatgattgcatatctgtgcaagctaccacagaggaaaatgttaagcataacgaggcatccacaactgaggttgaaaataaaaatggtcccgagacattggccccttcaaatactgaagaggttaacataactatacataagaaaacaaatttctgcaaaagacaatgtgagccatttgtacctgtccttaacaaacacagatctacagttcttcagtggccatcagaaatgctggtttatacaactacgaaaccatcaatttcctatagctgtaatcctctatgttttgacttcaagtctactaaagtaaataataatctagataaaaataagccagacttaaaagatctttgttctcagcagaagcaggaagacatttgcatgggaccactttcagattacaaggatgtatctacagaaggactcactgattatgaaattggaagtagcaaaaataaatgcagccaagtcactcctcttttggctgatgatattctctccagtagttgtgattctggaaaaaatgagaacacaggtcagaggtataaaaacatttcctgtaagatcagagaaacagaaaagtataattttactaaaagtcaaataaaacaggacactctagatgaaaaatacaacaaaataaggttgaaagagacccatgaatactggttccataaaagtagaagaaagaaaaaaagaaaaaag

SEQ ID NO: 44715 - DNA, 276 bp, Homo Sapiens
gccaagtccaagaaccacaccacacacaaccagtcccgaaaatggcacagaaatgtcatcaagaaacccctatcacaaagatacaaatctcttaagggggtggaccccaagttcctggggaacatgtgctttaccaagaagcacaagaagaagggcctaaagaagatgcaggccgacagtgccaaggccgtgagtacatgtgccaaggctatcgaggccctcgtaaagcccaaagaggttaagcccaagatcccaaagggtgtcagctgtgagctc

SEQ ID NO: 44716 - DNA, 1416 bp, Homo Sapiens
atggatgaaaggttcaacaagtggctgctgacgccggtgctcactctcctcttcgtggtcatcatgtaccagtacgtgtccccctcctgcaccagctcctgcaccaacttcggggagcagccccgcgcgggggaggccggcccgcccgccgtcccgggtcccgcccgccgggctcaggcgccgccggaggagtgggagcggcggccccagttgcccccgccgccccgggggccccccgagggacctcggggggccgcggcgccggaggaggaggacgaggagcccggagacccccgggagggggaggaagaggaggaggaagacgagccggaccccgaggccccggaaaacggctccctgccccgattcgtgccgcgcttcaacttcagcctgaaggacctgacccgcttcgtggatttcaacatcaaagggcgcgacgtgatcgtgttcctccacatccagaagacggggggcaccactttcggccggcacctggtgaagaacatccggctggagcagccttgtagctgcaaagcgggtcagaagaagtgcacctgccaccggcctggcaagaaggagacgtggctcttctcccgcttctccaccggctggagctgcgggctgcacgccgactggacggagctcaccaactgcgtgccggccatcatggagaagaaggactgtccccgcaaccacagccacaccaggaatttctattacatcacaatgttacgggatccagtgtcacgttacctgagcgagtggaaacatgtccagagaggggccacttggaaaacctctcttcatatgtgtgatggaagaagccccaccccagatgagctgcctacctgctaccctggggatgactggtctggggtcagcttgcgggagtttatggattgcacctacaacctggctaacaatcgccaggtgcgcatgctggctgacctcagcctggtgggctgctataacttgactttcatgaacgagagtgaaagaaacaccatcctgttgcagagtgcaaagaacaacctgaagaacatggccttctttgggctcactgagttccagaggaagacacagtttctctttgagagaacattcaacctcaagttcatctcccccttcacacagttcaacatcacgcgggcttctaacgtggagatcaacgagggtgcccgccaacgcattgaggatctaaacttcctggacatgcagctttacgagtatgcaaaagatctcttccagcagcgctaccaccacaccaagcagctagagcaccagagggaccgccagaagcggcgggaggagcggaggctgcagcgagagcacagggaccaccagtggcccaaagaagatggggctgcagaagggactgtcaccgaggactacaacagccaggtggtgagatggtga

SEQ ID NO: 44717 - DNA, 472 bp, Homo Sapiens
agaacatgagggcctgtacaggtgcttggtgtccaacagtgccacccacctgtccagcctgggtactctgaaggtccgagtacttgaaacactgaccatgcctcaagtcgtgccttcaagcctgaaccttgtggagaatgctaggtctgtggacctgacctgccaaaccgtcaatcagagtgtgaatgtccagtggttcctaagtggccagcccctcctgcccagtgagcacctgcagctgtcagctgacaacaggaccctaatcatccatggcctccagcggaatgacacggggccctatgcctgtgaggtctggaactggggcagccgggcccggagtgagccccttgagctgaccatcaactgtccccagtcctcctccctgtcctcaggggccatcgctggtattgtcatcgggatcctggctgtcattgctgtggcctcagaactgggctattttctctacatcaga

SEQ ID NO: 44718 - DNA, 948 bp, Homo Sapiens
atgctggggctaaaccacacctccatgtctgaattcatcctcgtcggcttctctgccttcccccacctccaactgatgctcttcctgctgttcctgctgatgtacctgttcacgctgctgggcaacctgctcatcatggccaccgtctggagcgagcgcagcctccacacgcccatgtacctcttcctgtgcgtcctctcagtctccgagatcctctacaccgtggccatcatcccgcgcatgctggccgacctgctgtccacccagcgctccatcgccttcctggcctgtgccagtcagatgttcttctccttcagcttcggcttcacccactccttcctgctcaccgtcatgggctacgaccgctacgtggccatctgccaccccctgcgctacaacgtgctcatgagcccacggggctgcgcctgcctggtgggctgctcctgggctggtggctcggtcatggggatggtggtgacctcggccattttccaactgactttctgtggatcccatgagatccagcattttttatgtcatgtgccacctctgttgaagttggcctgtggaaataatgtaccagctgtggccctgggcgtgggcttggtatgtatcatggcactgctgggctgttttctcctcatcctcctctcctatgccttcatcgtggccgacatcttgaagatcccttctgctgaaggtcggaacaaggccttctccacctgtgcctctcaccttattgtggtcattgtgcactatggctttgcctctgtcatctacctcaagcccaaaggtccccactctcaggagggtgacaccctgatggccaccacctacgcagtcctcacgcccttcctcagccccatcatcttcagcctcaggaacaaagaactgaaggttgccatgaagaggaccttcctcagcacactctattcctcaggcacctga

SEQ ID NO: 44719 - DNA, 6317 bp, Homo Sapiens
tagtaagacaggtgccttcagttcactctcagtaaggggctggttgcctgcatgagtgtgtgctctgtgtcactgtggattggagttgaaaaagcttgactggcgtcattcaggagctggatggcgtgggacatgtgcaaccaggactctgagtctgtatggagtgacatcgagtgtgctgctctggttggtgaagaccagcctctttgcccagatcttcctgaacttgatctttctgaactagatgtgaacgacttggatacagacagctttctgggtggactcaagtggtgcagtgaccaatcagaaataatatccaatcagtacaacaatgagccttcaaacatatttgagaagatagatgaagagaatgaggcaaacttgctagcagtcctcacagagacactagacagtctccctgtggatgaagacggattgccctcatttgatgcgctgacagatggagacgtgaccactgacaatgaggctagtccttcctccatgcctgacggcacccctccaccccaggaggcagaagagccgtctctacttaagaagctcttactggcaccagccaacactcagctaagttataatgaatgcagtggtctcagtacccagaaccatgcaaatcacaatcacaggatcagaacaaaccctgcaattgttaagactgagaattcatggagcaataaagcgaagagtatttgtcaacagcaaaagccacaaagacgtccctgctcggagcttctcaaatatctgaccacaaacgatgaccctcctcacaccaaacccacagagaacagaaacagcagcagagacaaatgcacctccaaaaagaagtcccacacacagtcgcagtcacaacacttacaagccaaaccaacaactttatctcttcctctgaccccagagtcaccaaatgaccccaagggttccccatttgagaacaagactattgaacgcaccttaagtgtggaactctctggaactgcaggcctaactccacccaccactcctcctcataaagccaaccaagataacccttttagggcttctccaaagctgaagtcctcttgcaagactgtggtgccaccaccatcaaagaagcccaggtacagtgagtcttctggtacacaaggcaataactccaccaagaaagggccggagcaatccgagttgtatgcacaactcagcaagtcctcagtcctcactggtggacacgaggaaaggaagaccaagcggcccagtctgcggctgtttggtgaccatgactattgccagtcaattaattccaaaacagaaatactcattaatatatcacaggagctccaagactctagacaactagaaaataaagatgtctcctctgattggcaggggcagatttgttcttccacagattcagaccagtgctacctgagagagactttggaggcaagcaagcaggtctctccttgcagcacaagaaaacagctccaagaccaggaaatccgagccgagctgaacaagcacttcggtcatcccagtcaagctgtttttgacgacgaagcagacaagaccggtgaactgagggacagtgatttcagtaatgaacaattctccaaactacctatgtttataaattcaggactagccatggatggcctgtttgatgacagcgaagatgaaagtgataaactgagctacccttgggatggcacgcaatcctattcattgttcaatgtgtctccttcttgttcttcttttaactctccatgtagagattctgtgtcaccacccaaatccttattttctcaaagaccccaaaggatgcgctctcgttcaaggtccttttctcgacacaggtcgtgttcccgatcaccatattccaggtcaagatcaaggtctccaggcagtagatcctcttcaagatcctgctattactatgagtcaagccactacagacaccgcacgcaccgaaattctcccttgtatgtgagatcacgttcaagatcgccctacagccgtcggcccaggtatgacagctacgaggaatatcagcacgagaggctgaagagggaagaatatcgcagagagtatgagaagcgagagtctgagagggccaagcaaagggagaggcagaggcagaaggcaattgaagagcgccgtgtgatttatgtcggtaaaatcagacctgacacaacacggacagaactgagggaccgttttgaagtttttggtgaaattgaggagtgcacagtaaatctgcgggatgatggagacagctatggtttcattacctaccgttatacctgtgatgcttttgctgctcttgaaaatggatacactttgcgcaggtcaaacgaaactgactttgagctgtacttttgtggacgcaagcaatttttcaagtctaactatgcagacctagattcaaactcagatgactttgaccctgcttccaccaagagcaagtatgactctctggattttgatagtttactgaaagaagctcagagaagcttgcgcaggtaacatgttccctagctgaggatgacagagggatggcgaatacctcatgggacagcgcgtccttccctaaagactattgcaagtcatacttaggaatttctcctactttacactctctgtacaaaaacaaaacaaaacaacaacaatacaacaagaacaacaacaacaataacaacaatggtttacatgaacacagctgctgaagaggcaagagacagaatgatatccagtaagcacatgtttattcatgggtgtcagctttgcttttcctggagtctcttggtgatggagtgtgcgtgtgtgcatgtatgtgtgtgtgtatgtatgtgtgtggtgtgtgtgcttggtttaggggaagtatgtgtgggtacatgtgaggactgggggcacctgaccagaatgcgcaagggcaaaccatttcaaatggcagcagttccatgaagacacgcttaaaacctagaacttcaaaatgttcgtattctattcaaaaggaaatatatatatatatatatatatatatatatatatatataaattaaaaaggaaagaaaactaacaaccaaccaaccaaccaaccaaccacaaaccaccctaaaatgacagccgctgatgtctgggcatcagcctttgtactctgtttttttaagaaagtgcagaatcaacttgaagcaagctttctctcataacgtaatgattatatgacaatcctgaagaaaccacaggttccatagaactaatatcctgtctctctctctctctctctctctctcttttttttttctttttccttttgccatggaatctgggtgggagaggatactgcgggcaccagaatgctaaagtttcctaacattttgaagtttctgtagttcatccttaatcctgacacccatgtaaatgtccaaaatgttgatcttccactgcaaatttcaaaagccttgtcaatggtcaagcgtgcagcttgttcagcggttctttctgaggagcggacaccgggttacattactaatgagagttgggtagaactctctgagatgtgttcagatagtgtaattgctacattctctgatgtagttaagtatttacagatgttaaatggagtatttttattttatgtatatactatacaacaatgttcttttttgttacagctatgcactgtaaatgcagccttcttttcaaaactgctaaatttttcttaatcaagaatattcaaatgtaattatgaggtgaaacaattattgtacactaacatatttagaagctgaacttactgcttatatatatttgattgtaaaaacaaaaagacagtgtgtgtgtctgttgagtgcaacaagagcaaaatgatgctttccgcacatccatcccttaggtgagcttcaatctaagcatcttgtcaagaaatatcctagtcccctaaaggtattaaccacttctgcgatatttttccacattttcttgtcgcttgtttttctttgaagttttatacactggatttgttaggggaatgaaattttctcatctaaaatttttctagaagatatcatgattttatgtaaagtctctcaatgggtaaccattaagaaatgtttttattttctctatcaacagtagttttgaaactagaagtcaaaaatctttttaaaatgctgttttgttttaatttttgtgattttaatttgatacaaaatgctgaggtaataattatagtatgatttttacaataattaatgtgtgtctgaagactatctttgaagccagtatttctttcccttggcagagtatgacgatggtatttatctgtattttttacagttatgcatcctgtataaatactgatatttcattcctttgtttactaaagagacatatttatcagttgcagatagcctatttattataaattatgagatgatgaaaataataaagccagtggaaattttctacctaggatgcatgacaattgtcaggttggagtgtaagtgcttcatttgggaaattcagcttttgcagaagcagtgtttctacttgcactagcatggcctctgacgtgaccatggtgttgttcttgatgacattgcttctgctaaatttaataaaaacttcagaaaaacctccattttgatcatcaggatttcatctgagtgtggagtccctggaatggaattcagtaacatttggagtgtgtattcaagtttctaaattgagattcgattactgtttggctgacatgacttttctggaagacatgatacacctactactcaattgttcttttcctttctctcgcccaacacgatcttgtaagatggatttcacccccaggccaatgcagctaattttgatagctgcattcatttatcaccagcatattgtgttctgagtgaatccactgtttgtcctgtcggatgcttgcttgattttttggcttcttatttctaagtagatagaaagcaataaaaatactatgaaatgaaagaacttgttcacaggttctgcgttacaacagtaacacatctttaatccgcctaattcttgttgttctgtaggttaaatgcaggtattttaactgtgtgaacgccaaactaaagtttacagtctttctttctgaattttgagtatcttctgttgtagaataataataaaaagactattaagagcaataaattatttttaagaaatcgagatttagtaaatcctattatgtgttcaaggaccacatgtgttctctattttgcctttaaatttttgtgaaccaattttaaatacattctcctttttgccctggattgttgacatgagtggaatacttggtttcttttcttacttatcaaaagacagcactacagatatcatattgaggattaatttatcccccctacccccagcctgacaaatattgttaccatgaagatagttttcctcaatggacttcaaattgcatctagaattagtggagcttttgtatcttctgcagacactgtgggtagcccatcaaaatgtaagctgtgctcctctcatttttatttttatttttttgggagagaatatttcaaatgaacacgtgcaccccatcatcactggaggcaaatttcagcatagatctgtaggatttttagaagaccgtgggccattgccttcatgccgtggtaagtaccacatctacaattttggtaaccgaactggtgctttagtaatgtggatttttttcttttttaaaagagatgtagcagaataattcttccagtgcaacaaaatcaattttttgctaaacgactccgagaacaacagttgggctgtcaacattcaaagcagcagagagggaactttgcactattggggtatgatgtttgggtcagttgataaaaggaaaccttttcatgcctttagatgtgagcttccagtaggtaatgattatgtgtcctttcttgatggctgtaatgagaacttcaatcactgtagtctaagacctgatctatagatgacctagaatagccatgtactataatgtgatgattctaaatttgtacctatgtgacagacattttcaataatgtgaactgctgatttgatggagctactttaagatttgtaggtgaaagtgtaatactgttggttgaactatgctgaagagggaaagtgagcgattagttgagcccttgccgggccttttttccacctgccaattctacatgtattgttgtggttttattcattgtatgaaaattcctgtgattttttttaaatgtgcagtacacatcagcctcactgagctaataaagggaaacgaatgtttcaaatct

SEQ ID NO: 44720 - DNA, 357 bp, Homo Sapiens
atggtgcttacagccatggtgggaaaaatccataggaaaagactcacatacacaaatgcaggcagaataaaaaaactcacacaaacaaacgttgcagatgttgttaagttacataaaggagatatgcatggctgtgcatggtggctcgtgcctgtaatcttagcacttggggaggccaaggcaggtggatcacttgaggccaggagctcaagaccagcctggccaacatggcgaaaccctgtctctactaaaaatacaaaaattagccaggcatggtggtccatgcctatgatctcagctacttgggagactgaggtgggaggatcacttgggcccaggaggcagagggtacagtga

SEQ ID NO: 44721 - DNA, 552 bp, Homo Sapiens
atgccgctagtccgctacaggaaggtggtcatcctcggataccgctgtgtagggaagacatctttggcacatcaatttgtggaaggcgagttctcggaaggctacgatcctacagtggagaatacttacagcaagatagtgactcttggcaaagatgagtttcacctacatctggtggacacagcagggcaggatgagtacagcattctgccctattcattcatcattggggtccatggttatgtgcttgtgtattctgtcacctctctgcatagcttccaagtcattgagagtctgtaccaaaagctacatgaaggccatgggaaaacccgggtgccagtggttctagtggggaacaaggcagatctctctccagagagagaggtacaggcagttgaaggaaagaagctggcagagtcctggggtgcgacatttatggagtcatctgctcgagagaatcagctgactcaaggcatcttcaccaaagtcatccaggagattgcccgtgtggagaattcctatgggcaagagcgtcgctgccatctcatgtga

SEQ ID NO: 44722 - DNA, 1110 bp, Homo Sapiens
atgcctgacgagctgacggagcccgggcgcgccacgccggcccgcgcctcctccttcctcatcgagaacctgctggcggccgaggccaagggcgcaggggacccagggcgacggcagccgggaggacgaggaggaggacgacgacgaccccgaagacgaggacgccgagcaggccggcgacggctacagcggcggcgacagttgctcgcgggcaccgggcccggcggggaggcgcgggcccgtgcgctgctcgggccgggcgcgctgggcctcggtcctcggccgccccccggtcccgggccgcccttcgctctgggctgcggaggcgcagcgcgctggtacccacgggcgcacggtggctatggaggcggcctcagtcctgacaccagcgaccgggactcaccggagacgggcgaggagatgggccgtgcggagggcgcctggccgcgaggccccgggagcggtgcagcgggaggcagcggagctggcggcgcgtggcccggcggccggcacggaggaggcgagctggccgaggtccctgcggcggctggggagacacgcggcggcgttggcgtgggcggcggccgaaagaagaagacgcgcacagtcttctcccgcagccaggtcttccagctggaatccaccttcgacctgaagcgctacctgagcagcgccgagcgcgccggcctggccgcctccctgcagctcaccgagacgcaggttaagatctggttccagaaccgccgcaacaagtggaagcggcagctggcagccgagctggaggcggccagcctgtccccgccgggagcggcctggtccgcgtgccggtgctctaccacgaaagccccccggccgcagccgccgctgggcccccggccaccctgcccttcccgctggcgcccgccgcgcccgcgccgcccccaccgctgctcggcttctccggggccctcgcctacccgctggccgccttcccggccgccgcctccgtgccctttctgcgggcgcagatgcctggcctggtgtgagccccgcctgccgggccctctccccacgaccctgtggacctgtgtggacgcgcgagcggcaggcgcagggctcagggggcgttag

SEQ ID NO: 44723 - DNA, 1010 bp, Homo Sapiens
cgggtcccggcctgagtcgcggccacccgcaggtctgagctgtgggctgaggcagcgcagccgctgccgcagggtgcgcgatgccttgaacctgggaaactatgtgaagcaacactctggattttgaaagacatcttttcatcatgggacagcaaatttcggatcagacacagttggttattaacaagttaccagaaaaagtagcaaaacatgttacgttggttcgagagagtggctccttaacttatgaagaatttcttgggagagtagctgagcttaatgatgtaacggctaaagtggcttctggccaggaaaaacatcttctctttgaggtacaacctgggtctgattcctctgctttttggaaagtggttgtacgggtggtctgtaccaagattaacaaaagcagtggcattgtggaggcatcacggatcatgaatttataccagtttattcaactttataaagatatcacaagtcaagcagcaggagtattggcacagagctccacctctgaagaacctgatgaaaactcatcctctgtaacatcttgtcaggctagtctttggatgggaagggtgaagcagctgaccgatgaggaggagtgttgtatctgtatggatgggcgggctgacctcatcctgccttgtgctcacagcttttgtcagaagtgtattgataaatggagtgatcgacacaggaattgccctatttgtcgcctacagatgactggagcaaatgaatcttgggtggtatcagatgcacccactgaagatgatatggctaactatattcttaacatggctgatgaggcaggccagccccacaggccatgaccttgaagtgaaagtcttctgttgctattgtgggctcaaatatttggtcatgggggaagaatgtagggttgtggcactggcacagacacaggaaaatccattttccccactcttttatttttgctattctgatcatttgtcccccttttaaaaataaacttcccatgtcttcca

SEQ ID NO: 44724 - DNA, 3134 bp, Homo Sapiens
cggcggcggcggcggcggtggttactatggcggagtcggccggagcctcctccttcttcccccttgttgtcctcctgctcgccggcagcggcgggtccgggccccggggggtccaggctctgctgtgtgcgtgcaccagctgcctccaggccaactacacgtgtgagacagatggggcctgcatggtttccattttcaatctggatgggatggagcaccatgtgcgcacctgcatccccaaagtggagctggtccctgccgggaagcccttctactgcctgagctcggaggacctgcgcaacacccactgctgctacactgactactgcaacaggatcgacttgagggtgcccagtggtcacctcaaggagcctgagcacccgtccatgtggggcccggtggagctggtaggcatcatcgccggcccggtgttcctcctgttcctcatcatcatcattgttttccttgtcattaactatcatcagcgtgtctatcacaaccgccagagactggacatggaagatccctcatgtgagatgtgtctctccaaagacaagacgctccaggatcttgtctacgatctctccacctcagggtctggctcagggttacccctctttgtccagcgcacagtggcccgaaccatcgttttacaagagattattggcaagggtcggtttggggaagtatggcggggccgctggaggggtggtgatgtggctgtgaaaatattctcttctcgtgaagaacggtcttggttcagggaagcagagatataccagacggtcatgctgcgccatgaaaacatccttggatttattgctgctgacaataaagataatggcacctggacacagctgtggcttgtttctgactatcatgagcacgggtccctgtttgattatctgaaccggtacacagtgacaattgaggggatgattaagctggccttgtctgctgctagtgggctggcacacctgcacatggagatcgtgggcacccaagggaagcctggaattgctcatcgagacttaaagtcaaagaacattctggtgaagaaaaatggcatgtgtgccatagcagacctgggcctggctgtccgtcatgatgcagtcactgacaccattgacattgccccgaatcagagggtggggaccaaacgatacatggcccctgaagtacttgatgaaaccattaatatgaaacactttgactcctttaaatgtgctgatatttatgccctcgggcttgtatattgggagattgctcgaagatgcaattctggaggagtccatgaagaatatcagctgccatattacgacttagtgccctctgacccttccattgaggaaatgcgaaaggttgtatgtgatcagaagctgcgtcccaacatccccaactggtggcagagttatgaggcactgcgggtgatggggaagatgatgcgagagtgttggtatgccaacggcgcagcccgcctgacggccctgcgcatcaagaagaccctctcccagctcagcgtgcaggaagacgtgaagatctaactgctccctctctccacacggagctcctggcagcgagaactacgcacagctgccgcgttgagcgtacgatggaggcctacctctcgtttctgcccagccctctgtggccaggagccctggcccgcaagagggacagagcccgggagagactcgctcactcccatgttgggtttgagacagacaccttttctatttacctcctaatggcatggagactctgagagcgaattgtgtggagaactcagtgccacacctcgaactggttgtagtgggaagtcccgcgaaacccggtgcatctggcacgtggccaggagccatgacaggggcgcttgggaggggccggaggaaccgaggtgttgccagtgctaagctgccctgagggtttccttcggggaccagcccacagcacaccaaggtggcccggaagaaccagaagtgcagcccctctcacaggcagctctgagccgcgctttcccctcctccctgggatggacgctgccgggagactgccagtggagacggaatctgccgctttgtctgtccagccgtgtgtgcatgtgccgaggtgcgtcccccgttgtgcctggttcgtgccatgcccttacacgtgcgtgtgagtgtgtgtgtgtgtctgtaggtgcgcacttacctgcttgagctttctgtgcatgtgcaggtcgggggtgtggtcgtcatgctgtccgtgcttgctggtgcctcttttcagtagtgagcagcatctagtttccctggtgcccttccctggaggtctctccctcccccagagcccctcatgccacagtggtactctgtgtctggcaggctactctgcccaccccagcatcagcacagctctcctcctccatctcagactgtggaaccaaagctggcccagttgtccatgacaaaagaggcttttgggccaaaatgtgagggtggtgggtgggatgggcagggaaggaatcctggtggaagtcttgggtgttagtgtcagccatgggaaatgagccagcccaagggcatcatcctcagcagcatcgaggaagggccgaggaatgtgaagccagatctcgggactcagattggaatgttacatctgtctttcatctcccagatcctggaaacagcagtgtatatttttggtggtggtgggtttggggtggggaagggaagggcgggcaaggagtggggagggagtctggggtgggagggaggcatctgcatgggtcttcttttactggactgtctgatcagggtggagggaaggtgagaggtttgcatccacttcaggagccctactgaagggaacagcctgagccgaacatgttatttaacctgagtatagtatttaacgaagcctagaagcacggctgtgggtggtgatttggtcagcatatcttaggtatataataactttgaagccataacttttaactggagtggtttgatttctttttttaattttattgggagggtttggattttaactttttttaatgttgttaaatattaagtttttgtaaaaggaaaaccatctctgtgattacctctcaatctatttgtttttaaagaaatccctaaaaaaaaaaa

SEQ ID NO: 44725 - DNA, 1764 bp, Homo Sapiens
gacgaccagcggctacgacccatggcgcccggactctcggaggccgggaagctcctggggctggagtaccctgagcgccagaggctggcagctgcggttggatttctcatgtccggtgttatctccatgtctgcccctttctttctggggaagatcatcgatgccatctataccaaccccactgtggactacagcgacaacctgacccgcctctgccttggcctcagtggcgtgtttctatgtggtgctgccgccaatgccattcgtgtctacctcatgcaaacttcacgtcagcgcgttgtgaagaggctgagaacttcgttattctcctccattctggggcaggaggttgctttctttgacaaggctggcacaggggaattgattaaccgcctctcatcggacactgcactcctggggcgctcagtgactgaaaacctctcagatgggctcagggccggggcccgggcttctgtaggcatcaggatgatgttttgtgtctcacctaatcgggccacctttgttgtgagtgtggtgcgtctagtgtcaatcattgatgtaatttatggacgatatctacggaaactgaccaaagtcacccaggattcgctggcacaagccactcaggaggaacgtattggaaatagaactgttcgagcttttgggaaagaaatgactgaaatagaaaaaggccagcaaagtggaccatgtgatgtagtcagcaaggaaagaggcattcgctcgggctggcttctttggagaactaggctgtccggaaacctgattgtgctttctgtcctgtacaaaggggggctgctgatgggcagtgcccacatgaccatgggtgaactctcttccttcatgtatgctttcggggttggaataagcattggaggtctgagctctttctactcggagctgatgaaaggactgggtgccggggggcgcctctgggagctcctggagagagagcccaatctgccttttaaggagggggttatcttaaatgagaaaagcttccagggtgctttggagtttaagaacgtgcattttgccgatcccgcttgcccggaggcgcccatatttcaggatttcagcctttccattccgtcaggatctgtcacggcactggttggcccaggtggttctggcaaatcaacagtgctttcgctcctgctgaggttgttcgaccctgcttctggaaccatcagtcttgatggccatgacatccgtcagctaaacccagtgtggctgagatccaagattgggacagtgagacaggaacccattttgttttcttgctctatcactgagaacattgcttatggtgctgatggcctttctgtgaccgctgagcaagtccagagagtggctgaagtggccaatgcagtggtcttgatccggaatttcccccaagggttcaacactgtggttggagaaaagggtgttctcctctcaggtgggcagaaacagcggattgcaattgcccgtgctctgctgaagaatcccaaaattcttctcctagatgaagcaaccagtgcgctggatgctgaaaatgagtaccttgttcaagaagctctagatccactgatggatggaagaacagcgttagttattgcccatcatctctccaccattaagaatgctaatatggttgctgttcttgatcaaggaaaaattactgaatatggaaaacatgaagagctgctttcaaaaccaaatgggatatacagaaaactaatgaacaagcaaagttttatttca

SEQ ID NO: 44726 - DNA, 3279 bp, Homo Sapiens
agagctcgctcggcctcgtctcctcgtgggatggtgcgagtctgcgacctgctcctgaagaagaagccgccgcagcagcagcaccacaaggccaagcgtaaccggacttgccgaccccccagcagcagcgaaagcagtaacaacagcgaggaagaagaggacgacgacgacgaggaagaggaggtggagtctttcattttggatcaggatgatttggaaaatccaatgctggaaacagcttccaagttgctcttatcaggtactgctgatggtgcagacctcaggacagtagatccagaaacacaggctagactggaagctttactagaagctgcaggaataggaaaattgtccacggctgatggtaaagcctttgcagatcctgaagtacttcggaggttgacatcgtctgttagttgtgcgttggatgaagctgctgctgcacttacccgtatgagagctgaaagcacagcaaatgcagggcagtcggacaaccgcagtttggcagaagcctgttcagaaggagatgtaaatgctgtgcgaaagttactcattgaagggcgaagtgtaaatgaacacacagaggaaggggagagcctcctttgtttagcttgttctgctggatactatgagcttgcacaggttttgttggcaatgcatgcaaatgtggaagataggggaatcaaaggtgacattacacctttaatggctgctgctaatggaggacatgtcaaaattgtgaagttgctgctagctcataaagcagatgttaatgcacagtcttcaacaggcaatacagcacttacatatgcttgtgctggaggctatgtagatgttgtaaaggtgctcttggaatccggtgctagtattgaggaccataatgaaaatggtcatacccctcttatggaagctggaagtgctggacatgtggaagtagccagattgctgctagaaaatggggctggcattaatacgcattctaatgaatttaaagagagtgcccttaccttagcttgttacaaaggacacttagagatggtgcgatttcttttggaagcaggcgcggatcaagagcataaaacagatgaaatgcacactgctctgatggaggcttgcatggatggccatgttgaagtagctaggttacttcttgacagcggtgcccaagtgaacatgcctgctgattcatttgagtcaccattaactttggctgcatgtggtgggcatgtggaacttgcggctttacttattgaaagaggagctagcctggaagaggtcaatgatgaaggttatacaccattgatggaagcagctcgagaaggacatgaagaaatggtggcattacttcttggtcaaggagcaaatatcaatgcacagacagaagaaactcaagaaactgccttgactctggcttgctgtggaggctttctggaagtggcagactttctaattaaggcaggagccgatatagaactagggtgttctacccctttaatggaagctgctcaagagggtcatttggagttagttaaatacttattagctgcaggagctaacgttcatgcaacaacagcaacaggggatacagcactaacatatgcctgtgaaaatggtcatactgatgtagcagatgtcttacttcaggcaggcgcagatctggaacatgaatctgaaggtggaagaactcctttaatgaaagctgcaagagctggtcatgtttgtactgttcagttcttaattagtaaaggtaggagcgaatgtgaagaaccacagctaataatgaccatactgtccctggcttgtgcagggggtcatctggcagtggtggaactacttttggctcatggggcagatcctactcaccgtttgaaagatggctcaactatgttgatagaagcagcaaaaggtggccatacaagtgttgtttgctatctcttggattatcctaataacttgctttcagcccctccaccagatgtcactcagttaactcccccatcccacgatttaaatagggctcctcgtgtaccagttcaagcactgcccatggttgttccacctcaggagcctgacaaaccacctgccaatgttgccaccactcttcccatcaggaataaagctgcttctaaacaaaagtccagcagccatttgccagcaaacagccaggatgtacagggttacatcaccaatcagtctccagagagcattgtagaagaggctcagggaaagttaacagaactggaacagaggataaaagaagccatagaaaagaatgcacagctgcagtccttggaactggctcatgctgaccaacttaccaaggagaagatcgaggagctcaacaaaacaagggaggaacaaattcagaagaaacaaaagattttggaggaactacagaaagtagaacgagagttacaactgaaaactcagcagcagctaaaaaagcagtatctagaggttaaagctcaaagaattcaacttcagcaacagcagcaacagtcttgccaacacctgggattactaactcctgttggagttggagagcagctttctgagggagactatgcacggttacagcaagtggatcctgttttacttaaagatgaaccccagcagactgctgctcagatgggttttgcgccaatccagcctctggcgatgcctcaagctttgcctctggcggcaggtcccttgcctccagggtccatcgcaaatcttacagaactgcaaggagtgatagttggacagccagtactgggccaagcacagttggcagggctggggcaaggaattctgacagaaacacaacaagggttaatggtagccagccctgctcagaccctcaatgacacgctggatgacatcatggcagcagtcagtggaagagcatctgcaatgtcaaacactcctacccacagtattgctgcatccatttcccaacctcagactccaactccaagtcctatcatctctccttcagccatgcttcctatctaccctgccattgatattgatgcacagactgagagtaatcatgacacggcactaacacttgcctgtgctggtggccacgaggaactggtacaaacactgctagagagaggagctagtatagagcaccgagacaagaaaggttttactccactcatcttggctgccacatggtcatgttggtgttgtggaaatattgctggacaatggtgcacattgaagcccagtctgaaagaaccaaggacacaccactctccttggcttgttctgggggaagacaggaggtaa

SEQ ID NO: 44727 - DNA, 294 bp, Homo Sapiens
tcttcttgtcctccatcacctccagaaatcagtgctggtgaaatctactttgtggaactggttaaagaagatgggacacttggattcagtgtaactggtggcattaacaccagtgtgccatatggtggtatctatgtgaaatccattgttcctggaggaccagctgccaaggaagggcagatcctacagggtgaccgactcctgcaggtggatggagtgattctgtgcggcctcacccacaagcaggctgtgcagtgcctgacgggtcctgggcaggtgagtggactgttgctg

SEQ ID NO: 44728 - DNA, 2621 bp, Homo Sapiens
ccatgggatcgctgcttgcgctcctggcactgctgctgctgtggggtgctgtggctgagggcccagccaagaaggtgctgaccctggagggagacttggtgctgggtgggctgttcccagtgcaccagaagggcggcccagcagaggactgtggtcctgtcaatgagcaccgtggcatccagcgcctggaggccatgctttttgcactggaccgcatcaaccgtgacccgcacctgctgcctggcgtgcgcctgggtgcacacatcctcgacagttgctccaaggacacacatgcgctggagcaggcactggactttgtgcgtgcctcactcagccgtggtgctgatggctcacgccacatctgccccgacggctcttatgcgacccatggtgatgctcccactgccatcactggtgttattggcggttcctacagtgatgtctccatccaggtggccaacctcttgaggctatttcagatcccacagattagctacgcctctaccagtgccaagctgagtgacaagtcccgctatgactactttgcccgcacagtgcctcctgacttcttccaagccaaggccatggctgagattctccgcttcttcaactggacctatgtgtccactgtggcgtctgagggcgactatggcgagacaggcattgaggcctttgagctagaggctcgtgcccgcaacatctgtgtggccacctcggagaaagtgggccgtgccatgagccgcgcggcctttgagggtgtggtgcgagccctgctgcagaagcccagtgcccgcgtggctgtcctgttcacccgttctgaggatgcccgggagctgcttgctgccagccagcgcctcaatgccagcttcacctgggtggccagtgatggttggggggccctggagagtgtggtggcaggcagtgagggggctgctgagggtgctatcaccatcgagctggcctcctaccccatcagtgactttgcctcctacttccagagcctggacccttggaacaacagccggaacccctggttccgtgaattctgggagcagaggttccgctgcagcttccggcagcgagactgcgcagcccactctctccgggctgtgccctttgagcaggagtccaagatcatgtttgtggtcaatgcagtgtacgccatggcccatgcgctccacaacatgcaccgtgccctctgccccaacaccacccggctctgtgacgcgatgcggccagttaacgggcgccgcctctacaaggactttgtgctcaacgtcaagtttgatgccccctttcgcccagctgacacccacaatgaggtccgctttgaccgctttggtgatggtattggccgctacaacatcttcacctatctgcgtgcaggcagtgggcgctatcgctaccagaaggtgggctactgggcagaaggcttgactctggacaccagcctcatcccatgggcctcaccctcagccggccccctgcccgcctctcgctgcagtgagccctgcctccagaatgaggtgaagagtgtgcagccgggcgaagtctgctgctggctctgcattccgtgccagccctatgagtaccgattggacgaattcacttgcgctgattgtggcctgggctactggcccaatgccagcctgactggctgcttcgaactgccccaggagtacatccgctggggcgatgcctgggctgtgggacctgtcaccatcgcctgcctcggtgccctggccaccctctttgtgctgggtgtctttgtgcggcacaatgccacaccagtggtcaaggcctcaggtcgggagctctgctacatcctgctgggtggtgtcttcctctgctactgcatgaccttcatcttcattgccaagccatccacggcagtgtgtaccttacggcgtcttggtttgggcactgccttctctgtctgctactcagccctgctcaccaagaccaaccgcattgcacgcatcttcggtggggcccgggagggtgcccagcggccacgcttcatcagtcctgcctcacaggtggccatctgcctggcacttatctcgggccagctgctcatcgtggtcgcctggctggtggtggaggcaccgggcacaggcaaggagacagcccccgaacggcgggaggtggtgacactgcgctgcaaccaccgcgatgcaagtatgttgggctcgctggcctacaatgtgctcctcatcgcgctctgcacgctttatgccttcaagactcgcaagtgccccgaaaacttcaacgaggccaagttcattggcttcaccatgtacaccacctgcatcatctggctggcattcctgcccatcttctatgtcacctccagtgactaccgggtacagaccaccaccatgtgcgtgtcagtcagcctcagcggctccgtggtgcttggctgcctctttgcgcccaagctgcacatcatcctcttccagccgcagaagaacgtggttagccaccgggcacccaccagccgctttggcagtgctgctgccagggccagctccagccttggccaagggtctggctcccagtttgtccccactgtttgcaatggccgtgaggtggtggactcgacaacgtcatcgctttga

SEQ ID NO: 44729 - DNA, 273 bp, Homo Sapiens
atggcagcagcacggcacagcatgctcgacttcacgctcggcgccaaagctgatggtgagactgttctaaaaggcctccagtccattttccaggagcaggggatggcagagtcggtgcacacctggcaggaccatggctatttagcaacctacacaaaaaagaacggcagctttgccaatttgagaatttacccacatggattggtgttgctggaccttcagagttatgatggtgatgtgcaaggcaaagaagagatcgacagtattttgaac

SEQ ID NO: 44730 - DNA, 150 bp, Homo Sapiens
atgggaaaacctttgtcacatgttacacaattgacggcaactacagctttaggtagaatttcaacttctaatttttactactatgcaaattatcagaatatttatgatgttaactttttaaaaaggtttttaaatagaaactttatttaa

SEQ ID NO: 44731 - DNA, 1795 bp, Homo Sapiens
gtccagcattggcctctgcagcgtggatctcccggccaggctctcagctgtcagatcctacaaccagaactctgcgccccaggatggaggctccagcccagaaggctgggcagggaggactccccaaggccgatgcccagggtgcctccggggcccgggagaagaggcccgaggagccgaggcccctcgaagaggaccgagctgggagccgccccactcaaaagggggacctgcgtggagcggcgggcggtaggacgactcccccaggcgggggctcccggggctgcagcctcggggtgagccccggcccggggacccggcacagcgccgggaccagacccctcgtgcgggagccgtgcggccccacctcttctcagaaccctgagctggttatccccgaggggctgcaagcccgggagggcccctgtaggagcccagcgcgtggcggggactgcagcaggaactcctgcctggcgtggcatcgcggggcgcccgctggggagacgccacccgtgtgtgacccctgtccggagcggatccagaaccacccccggactcaactgtgtgaggtccacacggactgttggccgtgccaaccagggactggcgctccgacctgcccgaggaccccaaagccgacctcccgcgggaggaaccccttggtggagcagccccgggcttgcgcgtgcggcgaggcctttgcgtggagggccctgcggatcccccaggagaggctgcaggcgacggaggagccccgtccgtgtgcccggtgcgggaagcgcttccgccccaaccagcagcagcaggcgggcaagagtcccccagtgtgtcctgagtgcggccaaacctcgcgacctcgccctattgtccccgaccccccggcccagcgactgtacgcttgcgacgagtgcggcaaggccttcacgcgcacctccagcctgctgcagcaccagcgcatccacacgggcgagcggccctacgagtgcgccgagtgcggcaaggccttcgtgcgctgctccggcctgtaccgccaccagaagacgcactcggccgagcgccaccggcgtggccccgtcctggcgcggcgcgccttccggctggggtgcccgccctgcggggactacagcgagcggagtccccgacgggggtcgggagccggggagaagccgtacgagtgcgccgactgcgccaaggccttcgggctgttctcgcacctcgtggagcaccggcgcgtgcacaccggcgagaagccctacgcgtgccccgagtgcggcaaggccttcaaccagcgctcgaacctgagccggcaccagcgcactcacagcagcgccaagccctacgcgtgcccactgtgcgaaaaggccttcaagggccgctcgggcctggtgcaacaccagcgcgcgcacaccggcgagcggccctatggctgctccgagtgcggaaagaccttccgcggctgctccgagctgcgccagcacgagcgcctgcactcgggcgagaagccctacatctgccgcgactgcggcaaggccttcgtgcgcaactgcagcctggtgcgccacctgcgcacgcacacgggcgagcggccctacgcgtgcggagattgcggccgcgccttcagccaacgctccaacctcaacgagcaccggaagcggcacgggggccgcgccgcgccttgactgcagggagccgagagtcgacgcgtcgcccaagcgaaccctgcgtcgaggaggggcctttgtcccggaaaacccaccaacgtttgtaactttgattaaacttcactttgtacaca

SEQ ID NO: 44732 - DNA, 591 bp, Homo Sapiens
atgggggggcggaagcgggagcgcaaggctgccgtcgaggaggacacctccctgtcggagagtgaggggccccgccagcccgatggggatgaggaggagagcacagccctcagcatcaacgaggagatgcagcgcatgctcaaccagctgagggagtatgattttgaggacgactgtgacagcctgacttgggaggagactgaggagaccctgctgctttgggaggatttctcaggctatgccatggcagctgcagaggcccagggagagcaggaagatagcctggagaaggtgattaaagatacggagtccctgttcaaaacccgggagaaggagtatcaggagaccattgaccagatagagctggagttggccacggccaagaacgacatgaaccggcacctgcacgagtacatggagatgtgcagcatgaagcgcggcctggacgtgcagatggagacctgccgccggctcatcacccagtctggagaccgaaagtctcctgctttcactgcggtcccgcttagcgacccgccgccgcaagcgaggctgaggactccgatcgcgatgtctcatctgacagctccatga

SEQ ID NO: 44733 - DNA, 1657 bp, Homo Sapiens
ctccataaggcacaaactttcagagacagcagagcacacaagcttctaggacaagagccaggaagaaaccaccggaaggaaccatctcactgtgtgtaaacatgacttccaagctggccgtggctctcttggcagccttcctgatttctgcagctctgtgtgaaggtgcagttttgccaaggagtgctaaagaacttagatgtcagtgcataaagacatactccaaacctttccaccccaaatttatcaaagaactgagagtgattgagagtggaccacactgcgccaacacagaaattattgtaaagctttctgatggaagagagctctgtctggaccccaaggaaaactgggtgcagagggttgtggagaagtttttgaagagggctgagaattcataaaaaaattcattctctgtggtatccaagaatcagtgaagatgccagtgaaacttcaagcaaatctacttcaacacttcatgtattgtgtgggtctgttgtagggttgccagatgcaatacaagattcctggttaaatttgaatttcagtaaacaatgaatagtttttcattgtaccatgaaatatccagaacatacttatatgtaaagtattatttatttgaatctacaaaaaacaacaaataatttttaaatataaggattttcctagatattgcacgggagaatatacaaatagcaaaattgaggccaagggccaagagaatatccgaactttaatttcaggaattgaatgggtttgctagaatgtgatatttgaagcatcacataaaaatgatgggacaataaattttgccataaagtcaaatttagctggaaatcctggatttttttctgttaaatctggcaaccctagtctgctagccaggatccacaagtccttgttccactgtgccttggtttctcctttatttctaagtggaaaaagtattagccaccatcttacctcacagtgatgttgtgaggacatgtggaagcactttaagttttttcatcataacataaattattttcaagtgtaacttattaacctatttattatttatgtatttatttaagcatcaaatatttgtgcaagaatttggaaaaatagaagatgaatcattgattgaatagttataaagatgttatagtaaatttattttattttagatattaaatgatgttttattagataaatttcaatcagggtttttagattaaacaaacaaacaattgggtacccagttaaattttcatttcagataaacaacaaataattttttagtataagtacattattgtttatctgaaattttaattgaactaacaatcctagtttgatactcccagtcttgtcattgccagctgtgttggtagtgctgtgttgaattacggaataatgagttagaactattaaaacagccaaaactccacagtcaatattagtaatttcttgctggttgaaacttgtttattatgtacaaatagattcttataatattatttaaatgactgcatttttaaatacaaggctttatatttttaactttaagatgtttttatgtgctctccaaattttttttactgtttctgattgtatggaaatataaaagtaaatatgaaacatttaaaatataatttgttgtcaaagtaatcaa

SEQ ID NO: 44734 - DNA, 1563 bp, Homo Sapiens
atggaaagtggatctagtaatgcaatgaacatgaatgtacaacatgaaagggaagataaaaatattcaaaaaatgttaacagaatcagttccatgctatagtcaacacctccgtttcagtacacatcaaatgaaagatcctgacccttgcaaatcaggatctgaaccgaagagtcccgaaggcagatcttggaatttgtctcacatagtgcaaaaaacaaagcaagaaacacactttagagaaactgttttagagcctatttctggatacatgatgaaacaaagtcctcatatgcaagaaggaataaaatgtatggaaggtctaaagacttcatttcccaaaacagggaaatcaaagattggttcaataccacgtgataccccttgggatgaaaatcctagaaggaaatgggatagttctatttctgagaaaactgcatggaatcaaaaaaacttacaaacagtcttaaaacctttagatttctccagcctcatgtcatctgaatatgaaagccggagctatacattagagtttataggcaagaaaagtatgagtcccaaatgtgtaactttgaaggcaaagcaactacgaattttgcagttgtttaatatcataagatattctacagaaaaccacagaaagaaaaagcaacaccgttttaagtacaagatgaaagggaagcaatggtacacaagtataggagaggcattactcagtgccactgaatatgctaagagtacaacatccaaatcaatgattgataaactcttatacaatacagcagcgaggtgcattctatctaacagaacacgccgacaaaatctggatggtcatattacagaggaaaaggaagaggaagaagtacaagaaaactcacctgcaactttcctgggtcctttagatttcttcatgcctgttttatctgactctaaaaaccagataaacacaatacagttatcagaaaggaaaattatattgaatcccaaatgtttaactatgaaggaaaagaaaccaccaatttcacagatacataaaatcagtgggcagtttactacaaaacataggaagaaacttgaatccaatttaaaaaccaaactgaaagcaatgtggcaaggtgaaaatgtggctgatacatttccaaatacaacttccttcactccagattcctctgacattaaaaggcaaagtggattccaaacagagatagacatgagaatatcagggttaagtcatacacaaccaacacaaatagagtcactagctgaagggatagcaaggtattctgatcccattgacaagagaagaacttccaacttggtaaagggagcaaaactacatgatagagaaagtggggaagagaagcaagaacatcttacagaaatggatccattctatgcagaaaacttcatggcaaacacatatcttagaaaggatcgtcatcttggtaaatcagaggatgtgcttttgggagaaacttttttctcaaaaagtcagatttacaaagggaattcagaaaaaaatgtaaaaatagaaaaaaacaaaaatggaaaagaaagtctcaaa

SEQ ID NO: 44735 - DNA, 4410 bp, Homo Sapiens
ccagtgtaagagttccgctattcggtctcacacctacagtggactacccgatttttcgcttctcttcagggatgagtcatgtggtggtgaaaaatgaccctgaactggaccagcagcttgctaatctggacctgaactctgaaaaacagagtggaggagcaagtacagcgagcaaagggcgctatatacctcctcacttaaggaacagagaagcatctaaaggattccatgataaagacagttcaggttggagttgcagcaaagataaggatgcatatagcagttttgggtctcgagattctagaggaaagcctggttatttcagtgaacgtggaagtggatcaaggggaagatttgatgatcgtggacggagtgactatgatggtattggcaatcgtgaaagacctggctttggcagatttgaacggagtggacatagtcgttggtgtgacaagtcagttgaagatgattggtcaaaaccacttccaccaagtgaacgcttggagcaagaactgttttctggaggaaacacggggattaactttgagaaatatgatgatataccagtagaggcaaccggcagtaactgtcctccacatattgagaattttagcgatattgacatgggagaaattatcatggggaacattgaacttactcgctatactcgtcctactccagtgcaaaaacatgccattcctattattaagggaaaaagagacttaatggcttgtgcccaaacaggatctgggaaaactgcagcatttcttttacccatactgagtcagatatatacagatggtccaggagaagctttgaaggctgtgaaggaaaatggaaggtatgggcgccgcaaacaatatccaatatccttggttttagccccaacaagagaattggctgtacagatctatgaggaagccagaaaattttcctaccgatctagagttcgtccttgtgtagtttatggtggtgctgatattggtcagcagattcgggacttagaacgtggatgccacttgttagtagccactccaggacgtctagtggatatgatggaaagaggaaagattggattagacttctgcaagtacttagtgttggatgaagctgataggatgctggatatgggatttgaacctcagatacgtcgtatagttgaacaagatactatgccaccaaagggcgttcgtcacaccatgatgtttagtgctacttttcctaaggaaatacagatgcttgctcgtgactttttggatgaatatatctttttggctgtaggcagagtaggctctacctctgagaacatcacacagaaagtagtttgggtggaagacttagataaacggtcatttctactggacattttaggtgcaacagggagtgattcacttactttagtgtttgtggagaccaaaaagggagcagattccctggaggatttcttataccatgaaggatatgcttgtactagtattcatggagaccggtcacagagagatcgagaggaggcccttcaccagtttcgctcaggaaaaagcccaattctagtggctacagctgtggcagcacgaggactagacatttcaaatgtgagacatgttatcaattttgatttgccaagtgatattgaagaatatgtgcatcgtattggccgtacaggacgtgtaggaaacctgggccttgccacctcattctttaatgaaaaaaatatgaatattacaaaggatttgttggatcttcttgtagaagctaaacaagaagtgccttcttggttggaaaatatggcttatgaacaccactacaagggtggcagtcgtggacgatctaaaagtaatagattcagtggaggatttggtgccagagactatcgacaaagtagtggttccagcagttctggctttggtgctagtcgcggaagcagcagccgcagtggtggaggtggttacggcaacagcagaggatttggtggaggtggctatggaggcttctacaatagtgatggatatggaggaaattataactcccagggggttgactggtggggcaactgaatctgctttgcagcaaagtcacccttacaaagaagctaatatggaaaccacatgtaacttagccagactatattgtgtagcttcaagaacttgcagtacattaccagctgtgattctcctgataattcaagggagctcaaagtcacaagaagaaaaatgaaaggaaaaaacagcagccctattcagaaattggtttgaagatgtaattgctctagtttggattaaactcttcccctcctgctttagtgccaccccaaactgcatttataattttgtgactgaggatcgtttgtttgttaacgtactgtgactttaactttagacaacttactactttgatgtcctgttggctcagtaatgctcacgataccaattgttttgacaaaataaatttactaaacttggcctaaaatcaaaccttggcacagaggtatgatacaactttaacaggagtcatcaattcatccataaatataaaaagggaaaaaaacttaaggcagtagtctgcattaggactgtttgagttttgcagacttggggttgggagaacatcttaaagcattaaagcatagttttttgtatggccaaccttactaaattaagttctgacttgctcactctatcctggataggcacttgggaacttacactctttaagccattccagtcatgatgaggtggaatgtatcagtataccaattaatatttttgaaagagctcttttaggttaatttaagtacagcaatttctcatgtaatgtttagggagtttattctaacctaggcaaacggcatgctatcacaagaaaggtttaaagctttgataaaatgggggagatttaatcagtttttttaatgcctgctataaaaatttgaaatattagaatggccgaccatggcagtgaccaggcctcactacaggcctggttggattctggtctttaatgcatgctagtgttgatgttttttggtcaagaacggtttaaacaggaaggattgtgcagcaggctttaatttaatgtagattcatactgctctgttaaagctgcattgaaatgttaaaatggcttacacttgcagactttgcaaatcttaagactaacaaatccttgaaatcacacagcttgcaaatacgtactaaactgcacaaggtgtgtgttctatatgtgcagttttagcgtattttagttgcataggtttccatggtatttatagtctcttgtgctaaatttggccaaagatgattgtccaccactaaaaatgcctctcccacttggaattctgtactgattttgtggccagatgcaatgatctttaaaaacaaatcttttcaatggcataagaagttgacaaaaatttcttaaagtgcaatagattttcaagtgtattgtgccttgttctaaaacttttaagtaggtgcacttgacagtattgaggtcatttgttaaggtgctatttcaattagtgtaggtttagactcttgtacatttctcccataactttttacaaagtattttgttgcacattcagagaattttatatatatatgtcttgtgtgggtgtcctcgaccttccaatcttatttcgtctcttggagattgttgaatgcagccagtgaagaagtagattcctaaattttattggggaccatggaatggtagttgagaagaaaactatttgcacacaacagattttagatactttttgctgctagttgtgtaatatttattgaacattttgacaaatatttatttttgtaagcctaaaaatgattctttgaaagtttaaagaaacttgaccaaaagacagtacaaaaaacactggcacttgaatgttgaatgtcaccgtatgtgaaataatatattttggggtagtgtgagcttttaatgttaagtctgttaaacttgagtcaaattaagcagacccggcattggcaatgtagctgtaattttctgacaaaatttaagacaaaattgtcaacttgaaactaaaacatgccaaggttttgatatacttgtcttaagatattaatgaaacacttctgaacactgataggaagtgtccacatccacaaagtttctcttgagttttgttatgtgttttgttgtgtttgattttcagtgattgtctggtatatttacagtcctcaaacatggttatttctgtcagtgacttaacattcggttttatcagccagcagtattcttcagtaaataaagaatggaattgctgaatgtaatcattgaacctcgagtcactgtaaaagttcagtaattgcttattgtattagttttagatgctggcactgcatgtgctctgtttattctgattttactaaaataaaaagttcaaaagtc

SEQ ID NO: 44736 - DNA, 1039 bp, Homo Sapiens
catgtggctgctggggccgctgtgcctgctgctgagcagcgccgcggagagccagctgctccccgggaacaacttcaccaatgagtgcaacataccaggcaacttcatgtgcagcaatggacggtgcatcccgggcgcctggcagtgtgacgggctgcctgactgcttcgacaagagtgatgagaaggagtgccccaaggctaagtcgaaatgtggcccaaccttcttcccctgtgccagcggcatccattgcatcattggtcgcttccggtgcaatgggtttgaggactgtcccgatggcagcgatgaagagaactgcacagcaaaccctctgctttgctccaccgcccgctaccactgcaagaacggcctctgtattgacaagagcttcatctgcgatggacagaataactgtcaagacaacagtgatgaggaaagctgtgaaagttctcaagaacccggcagtgggcaggtgtttgtgacttcagagaaccaacttgtgtattaccccagcatcacctatgccatcatcggcagctccgtcatttttgtgctggtggtggccctgctggcactggtcttgcaccaccagcggaagcggaacaacctcatgacgctgcccgtgcaccggctgcagcaccctgtgctgctgtcccgcctggtggtcctggaccacccccaccactgcaacgtcacctacaacgtcaataatggcatccagtatgtggccagccaggcggagcagaatgcgtcggaagtaggctccccaccctcctactccgaggccttgctggaccagaggcctgcgtggtatgaccttcctccaccgccctactcttctgacacggaatctctgaaccaagccgacctgcccccctaccgctcccggtccgggagtgccaacagtgccagctcccaggcagccagcagcctcctgagcgtggaagacaccagccacagcccggggcagcctggcccccaggagggcactgctgagcccagggactctgagcccagccagggcactgaagaagtataa

SEQ ID NO: 44737 - DNA, 531 bp, Homo Sapiens
gggccagcaggcacaggaaaaaccgaaaccaccaaggacttggctaaagctcttgctgtacagtgtgtggtgttcaactgttctgatgggctagattatctagcaatgggaaagttttttaaaggactggcttcttctggtgcttgggcttgctttgatgaattcaatcgaattgagttggaagtgttgtcagtggtagctcaacagatcctttgcattcagagagctattcaacagaagttggttgtgtttgtttttgaagggacagaacttaagctcaatccgaattgttttgtagctattaccatgaatcctggctatgcaggacgctctgaattgccggacaatcttaaggttctttttagaacagtggctatgatggttccaaactatgcgcttatagcagaaatctccctctactcttacggatttttgaatgcaagacctctgtctgtgaaaatagtaatgacctataggctttgctcagagcagctctcatcgcaatttcattacgactatggaatgcgagca

SEQ ID NO: 44738 - DNA, 255 bp, Homo Sapiens
agccagaaggaagcccggtgccagccagccttcctgaaagaccaagcccgcgccatccggcttcctccagtggacgcctgcaggacccaggtgagacacggaaccggttggggacgcgagccagggatcctgaccggttgggggcggcgagcaagggatcctgacttgggggcgttgcctcccggaatccaagcggccttttgcccgggtctcccgagatgcatcgaaattgagctcgtccacacagccccctga

SEQ ID NO: 44739 - DNA, 2726 bp, Homo Sapiens
tcctgcccccaccttacaggtctgggatgtacctttccatctgttgctgctttcttctatgggcccctgccctcactctcaagaacctcaactactccgtgccggaggagcaaggggccggcacggtgatcgggaacatcggcagggatgctcgactgcagcctgggcttccgcctgcagagcgcggcggcggagggcgcagcaagtcgggtagctaccgggtgctggagaactccgcaccgcacctgctggacgtggacgcagacagcgggctcctctacaccaagcagcgcatcgaccgcgagtccctgtgccgccacaatgccaagtgccagctgtccctcgaggtgttcgccaacgacaaggagatctgcatgatcaaggtagagatccaggacatcaacgacaacgcgccctccttctcctcggaccagatcgaaatggacatctcggagaacgctgctccgggcacccgcttccccctcaccagcgcacatgaccccgacgccggcgagaatgggctccgcacctacctgctcacgcgcgacgatcacggcctctttggactggacgttaagtcccgcggcgacggcaccaagttcccagaactggtcatccagaaggctctggaccgcgagcaacagaatcaccatacgctcgtgctgactgccctggacggtggcgagcctccacgttccgccaccgtacagatcaacgtgaaggtgattgactccaacgacaacagcccggtcttcgaggcgccatcctacttggtggaactgcccgagaacgctccgctgggtacagtggtcatcgatctgaacgccaccgacgccgatgaaggtcccaatggtgaagtgctctactctttcagcagctacgtgcctgaccgcgtgcgggagctcttctccatcgaccccaagaccggcctaatccgtgtgaagggcaatctggactatgaggaaaacgggatgctggagattgacgtgcaggcccgagacctggggcctaaccctatcccagcccactgcaaagtcacggtcaagctcatcgaccgcaacgacaatgcgccgtccatcggtttcgtctccgtgcgccagggggcgctgagcgaggccgcccctcccggcaccgtcatcgccctggtgcgggtcactgaccgggactctggcaagaacggacagctgcagtgtcgggtcctaggcggaggagggacgggcggcggcgggggcctgggcgggcccgggggttccgtccccttcaagcttgaggagaactacgacaacttctacacggtggtgactgaccgcccgctggaccgcgagacacaagacgagtacaacgtgaccatcgtggcgcgggacgggggctctcctcccctcaactccaccaagtcgttcgcgatcaagattctagacgagaacgacaacccgcctcggttcaccaaagggctctacgtgcttcaggtgcacgagaacaacatcccgggagagtacctgggctctgtgctcgcccaggatcccgacctgggccagaacggcaccgtatcctactctatcctgccctcgcacatcggcgacgtgtctatctacacctatgtgtctgtgaatcccacgaacggggccatctacgccctgcgctcctttaacttcgagcagaccaaggcttttgagttcaaggtgcttgctaaggactcgggggcgcccgcgcacttggagagcaacgccacggtgagggtgacagtgctagacgtgaatgacaacgcgccagtgatcgtgctccccacgctgcagaacgacaccgcggagctgcaggtgccgcgcaacgctggcctgggctatctggtgagcactgtgcgcgccctagacagcgacttcggcgagagcgggcgtctcacctacgagatcgtggacggcaacgacgaccacctgtttgagatcgacccgtccagcggcgagatccgcacgctgcaccctttctgggaggacgtgacgcccgtggtggagctggtggtgaaggtgaccgaccacggcaagcctaccctgtccgcagtggccaagctcatcatccgctcggtgagcggatcccttcccgagggggtaccacgggtgaatggcgagcagcaccactgggacatgtcgctgccgctcatcgtgactctgagcactatctccatcatcctcctagcggccatgatcaccatcgccgtcaagtgcaagcgcgagaacaaggagatccgcacttacaactgccgcatcgccgagtacagccacccgcagctgggtgggggcaagggcaagaagaagaagatcaacaaaaatgatatcatgctggtgcagagcgaagtggaggagaggaacgccatgaacgtcatgaacgtggtgagcagcccctccctggccacctcccccatgtacttcgactaccagacccgcctgcccctcagctcgccccggtcggaggtgatgtatctcaaaccggcctccaacaacctgactgtccctcaggggcacgcgggctgccacaccagcttcaccggacaagggactaatgcaagcgagacccctgccactcggatgtccataattcagacagacaattttcccgcagagcccaattacatgggcagcaggcagcagtttgttcaaagacaacactttctcttctttttctttatatgtatttcagtagctccacgtttaaggacccagaaagagccagcctga

SEQ ID NO: 44740 - DNA, 887 bp, Homo Sapiens
gggtagccgactggggtctcctggcgacgaccatggcgggggatgtgggcggtcgcagctgcacggactcggaactgctgctgcacccggagctgctgtcccaggagttccttctcctcactctggagcagaagaacatagctgttgaaactgatgtaagagtaaacaaagacagtcttactgacctttatgtccaacatgcaataccattgcctcagagggatttgccgaagaatagatgggggaaaatgatggaaaagaaaagagaacaacatgagattaaaaatgagactaaaaggagtagcactgtagatgggttaaggaaaagacccctcatcgtatttgatggaagttcaacaagtacaagcataaaagtgaaaaagacagagaatggagataatgatcgactgaagcctcccccgcaggcaagctttaccagtaatgcctttagaaaattatcaaattcctcttcgagtgtttcacccctaattttgtcttccaatttgcctgtgaacaataaaacggaacacaataataatgacgctaaacagaaccatgacttaacgcataggaaaagtccttcaggccctgtgaagtcgccaccattgtcccctgttggaactactccagtgaagttaaagagagctgctcctaaagaagaggcagaggccatgaataacctgaagcccccacaagcaaaaaggaagatacaacatgttacttggccctgaagaaaagtttccaaaaatgtaaatatactgtaactgtagtttttcaaatatgttcatatatattgacaatatttacagaaatcctgattattgtggaattttcttaagaggtttcaaataggtttaaaaaaataaaggatttattttccttccctt

SEQ ID NO: 44741 - DNA, 879 bp, Homo Sapiens
atggagggggttttgtacaagtggaccaactatctcacaggttggcagcctcgttggtttgttttagataatggaatcttatcctattatgattcacaagatgatgtttgcaaagggagcaaaggaagcataaagatggcagtttcagacaacacaagaatggaattaatcattcctggagagcagcatttctacatgaaggcagtgaacgcagctgaaagacagaggtggctggtcgctctggggagctccaaagcatgtttgactgatacaaggactaaaaacgaaaaagaaagaagtgaaaccagtgaatcgctgaaaaccaaaatgtctgaacttcgcctctactgtgacctcttaatgcagcaagttcatacgatacaggaatttgttcaccacgatgagaatcattcatctcctagtgcagagaacatcaatgaagcctcttctctgcttagtgccacgtgtaacacgttcatcacaacgcttgaggaatgtgtgaagatagccaatgccaggtttaaacctgagatgtttcaacggcaccatccggatcccttagtttctcctgtgtcaccttctcctgttcaaatgaggaagcgttctgtcagccaccctggttcttgcaccaggaggagtagccactgtataaaagaaccagtatctgcacttcaccgactctcccagcgacgccgaagaacctactcagatacagattcttgtagtgatattcctcttgaagacccagatagacctgttcactgttcaaaaaatacacttaatggagatttggcatcagcaaccattcctgaagaaagcagacttatggccaaaaaacaatctgaatcagaagatactcttccatccttctcttcctga

SEQ ID NO: 44742 - DNA, 633 bp, Homo Sapiens
aaactgtgggcccaggttaaccctggggcctgtgggggctggtgcagagctgaggatgaacacatccccacaccaggggctccccactcagaccccggagccagaggggaaactagggatgcctccctgttccactgccagggcccaggccacgctgtcggtggacaagtggccaggcaggttcttgtcgactcaagcccagtgaacgaggcagctggaggacagactcgcggtcggcgctgggaccgaggcggccctggggggccgtgctgcccacctcagctttgcctccagcatcagctgctcagcttgtcccttaccctggggtcttctggactcggtttccctgtgttaccctactcccgccctgacggctcagaccctctcgtggcagtggctcacctctggcgtttcctgaaggtttgcaaaacggtgatcttcggatcccatcactccttctgcgtttactcgctggagatcctctggaaagagctttctcccccaaacttcatcccattgaccaacgacgagctggaattccacaggacagtctgtggccaccagaaaatcctccatggcctctgccacaggctctgtctgactgtggagcagatggatgtttccgcgaacaca

SEQ ID NO: 44743 - DNA, 999 bp, Homo Sapiens
atgaggctgtgtcttatccctcagaacacgggcaccccacagagggtcctgcctcctgtggtctggagccccccttcaaggaagaaacccatgctgtctgcttgcaactccatgatgtttggacacctcagccccgtgaggatccctcatctgagaggcaagtttaaccttcaacttccttcattagatgagcaggtgatcccagccaggctcccgaagatggaggtgagggcagaagagcccaaagaagcaacggaggtgaaagaccaggtagagacccaggggcaggaggacaataaaaggggcccctgtagcaatggggaagcagcctccacctctagtctcctggagactcagggaaacctcacttcctcctggtacaatcccaggcccttggagggaaatgtccacctcaagagcttgatagaaaagaaccagactgacaaggcccaggtgcatgcagtgagtttctactccaaggaccatgaagtcgccagttcacacagccctgctggaggcatcctttcttttgggaagcctgacccacttccaacagtgctccctgccccagttccgggctgctccctgtggccagagaaggcggccttgaaggtgctgggtaaagaccacctgcccagctctccaggcttgctgatggtgggggaggacatgcagcccaaggatcctgcagctcttggatcaagtaggtcttctccatccagagctgccagccacagttcccacaaaagaaaactgtcggagccaccgctgcagctgcaaccgacccctcccctgcaactgaagtgggatagagacgaggggcccccaccggctaagtttccatgtctatctcctgaggccctgttggtgagtcaggcttcccaaagagaaggacgcctccagcagggcaacatgtgtaagaacatgagggtgttaagtagaacatcaaaattcaggagactaagagagctgcttaggaggagaaagaagagacggcag

SEQ ID NO: 44744 - DNA, 416 bp, Homo Sapiens
agacgtgctatgtccagggtgcttctccttgccagagctattatgttcaagctcctgcaagtggctcaacctcccagtactgtgtcactgacccatgctctgctccctgttccaccagctactgctgtctggctccccggaccttcggggtgagtcccctgagacgctggattcagcggccccagaactgcaacacaggatcatctggctgctgtgagaattcgggaagctctggatgctgtggttctgggggctgtggctgcagctgtggatgtggcagctctgggtgctgctgtttgggaattatccccatgaggtcccgaggtcctgcatgctgtgaccatgaggatgactgctgctgctaaacatacgacagctcaactccagaatgcactgccccgctaccccttctggaa

SEQ ID NO: 44745 - DNA, 927 bp, Homo Sapiens
ggttttctttcagttactgagtggataaggcccaactctaaagccctggtagtaatattgtcatctggtgcccttagtattggacagataatcctgggaggcttggcttatgtcttccgagactggcaaaccctgcacgtggtggcgtctgtacctttctttgtcttctttcttctttcaaggtggctggtggaatctgctcggtggttgataatcaccaataaactagatgagggcttaaaggcacttagaaaagttgcacgcacaaatggaataaagaatgctgaagaaaccctgaacatagaggaggagctggatgcagcacagaccaaaactactgtgtgtgacttgttccgcaaccccagtatgcgtaaaaggatctgtatcctggtatttttgagatttgcaaacacaatacctttttatggtaccatggtcaatcttcagcatgtggggagcaacattttcctgttgcaggtactttatggagctgtcgctctcatagttcgatgtcttgctcttttgacactaaatcatatgggccgtcgaataagccagatattgttcatgttcctggtgggcctttccattttggccaacacgtttgtgcccaaagaaatgcagaccctgcgtgtggctttggcatgtctgggaatcggctgttctgctgctactttttccagtgttgctgttcacttcattgaactcatccccactgttctcagggcaagagcttcaggaatagatttaacggctagtaggattggagcagcactggctcccctcttgatgaccttaacggtattttttaccactttgccatggatcatttatggaatcttccccatcattggtggccttattgtcttcctcctaccagaaaccaagaatctgcctttgcctgacaccatcaaggatgtggaaaat

SEQ ID NO: 44746 - DNA, 1809 bp, Homo Sapiens
atggcggcggaacggcgctgtggaagtatgcgagacttaagagctcaagtgactagtggtctcctgccatttccagaagtgactcttcaagcccttggagaagacgaaataacattagaatctgtgcttcgtggaaagtttgctgcggggaaaaatggacttgcttgcttggcttgtggtccacaacttgaggtagtaaactctataacaggagagcgattgtctgcttacagattcagtggagtcaatgaacagcctcctgtagttttagctgtgaaagaattctcttggcagaagagaactggattattaataggattggaagaaacagaagggagtgttctctgtctttatgaccttggaatatcaaaagtagttaaagcagttgttcttcctggaagggtaacagctattgaacctataattaatcatggaggagccagtgcaagcactcagcatttacatccaagtctgcgatggctttttggagtggcagctgtggtcactgatgttggacagatccttcttattgacctatgtttggatgacttgtcatgcaatcaaaatgaagttgaagcatcagatcttgaagttctaactggtatcccagctgaagtaccacacattagagaaagtgtgatgagagaagggcgccatctgtgtttccagttagtaagtccaacaggaacagccgtttcaactcttagttacataagcaggacaaatcagcttgctgcaggtttttctgatggctatctagcactttggaacatgaaaagcatgaaaagagaatattacatacaattggaaagtggacaagttcctgtatatgctgtcacttttcaagaacctgagaatgatcgtcggaattgctgctacttgtgggctgttcagtctacacaagatagtgaaggggatgttttgagtttgcatctactgcagctggcctttggtaatagaaagtgtttggcatcaggacaaatcttatatgagtggttagaatactgtgaagaaagatacactctggacctgacaggtggcatgttccctttgaggggacagacgagtaataccaaattgttgggatgccagagtatagagaaatttcgatctcatggtgacagggaggaaggcgtgaatgaagctctatcgcctgacactagtgtttcagtctttacctggcaggtgaatatatatggacagggaaagccttctgtatatttggggctttttgatataaatcgttggtatcatgcacaaatgccagattcgttaaggtcaggagaatatctacataattgctcttattttgcactgtggtcattggagtctgttgtaagtaggacttctccacatggcatcttggatatattagtacatgagagaagtttaaatagaggagtccctccttcatatccacctcccgagcagttttttaacccaagcacttataattttgatgccacttgtttgttaaactcgggagttgttcatttaacttgtactggctttcagaaggagactttgacttttttaaagaaatcaggtccatcactcaatgaactcattcctggtggttataatcgacgtcttgtagctggccttctttccccaagttttgttgatgttcagccttccagtttaagccaagaagaacagttagaagctatattgtcaacagcaattcagactagttccctgggacttttgactggttatatccgaagatggataacagaagaacaaccaaattctgccactaatttgcgctttgttcttgaatggacgtggaataaagtggttctcaca

SEQ ID NO: 44747 - DNA, 264 bp, Homo Sapiens
aagaaccacaacacacacaaccagtccccaaaatggcacagaaatggcatcaggaaaccccgatcacaaagatacaaatgtcttaatggggtggacctcaagttcctaaggagcatgcaccttgccaagaagcacaacaagaagggcctaaaaaagatgcaggccaacaatgccgaggccatgagggcacgtgctgaggctatcaaggtcctcaagcccaaggaggttaagcccaagatcccaaagggtgtcagccgcaagctc

SEQ ID NO: 44748 - DNA, 1170 bp, Homo Sapiens
ttaaatcttgggagttattcatctattcagcctgaagaatattccagcgtagttagtgacgttgtacttcaagacttactggcatatgtgtcctcaaaacattcctacctcagagatcttcctccgagacagcctcagagggtgaacagtatagactttgtagaattggagcaccttcaacctgatgtgttagtccacgcagtactaagagttgttgatttcatactgacagaggcagtatacagttatagaggacagaagcagaaaaaagttatgttaacagtggaacaggcccaagatcaacattatgcgcttgtattatggggtcctggagcagcctggtaccctcaacttcaaaggaaaaaaggttatatttgggaatttaaatatctttttgttcagcgcaattacacactagaaaacctagaattgcatacaacgccttggtcatcctgtgagtgcttgtttgatgatgatataagggcaattacatttaaagcaaaatttcaaaaaagtgcaccctcctttgtgaagatatcagacttagcaacccacctagaggataagtgttcaggagtggttctaattaaagcccagatttcagagctggcatttcctcttacagcagctcagaagatagctctaaatgctcacagttctctgaagagtattttttcttctcttcccaacatcatatatactggctgtgcaaaatgtggattggaactagaaacagatgagaacaggatctacaaacaatgttttagctgcttgccatttactatgaagaaaatatattataggccagcgttaatgactgccgttgatggaagacataatgtttacatccgtgtagaatcaaaactgatagagaagattcttctcaacatttctgcacactgcctcaacagagtgataggcaatatatcagtgtgccatcaagaagttgttttattcaggagtataaatgttccttcctcagagatcacctatgggatggttgtggcagacctgttccactccttgttggcagtcagcgcagaaccttgtgtattgaagattcagagcctttttgtgttagatgaaaacagctatccattacaacaagatttctccctcctggatttttatcctgacatggtaaagcatggagccaatgcccgtctctga

SEQ ID NO: 44749 - DNA, 576 bp, Homo Sapiens
tatactggagagctttgccagtccaagattgattactgcatcctagacccatgcagaaatggagcaacatgcatttccagtctcagtggattcacctgccagtgtccagaaggatacttcggatctgcttgtgaagaaaaggtggacccctgcgcctcgtctccgtgccagaacaacggcacctgctatgtggacggggtacactttacctgcaactgcagcccgggcttcacagggccgacctgtgcccagcttattgacttctgtgccctcagcccctgtgctcatggcacgtgccgcagcgtgggcaccagctacaaatgcctctgtgatccaggttaccatggcctctactgtgaggaggaatataatgagtgcctctccgctccatgcctgaatgcagccacctgcagggacctcgttaatggctatgagtgtgtgtgcctggcagaatacaaaggaacacactgtgaattgtacaaggatccctgcgctaacgtcagctgtctgaacggagccacctgtgacagcgacggcctgaatggcacgtgcatctgtgcacccgggtttacaggc

SEQ ID NO: 44750 - DNA, 570 bp, Homo Sapiens
atgaaaacaagggcctctgctgtctcagacccaggaggcctgaaactccgtgacagcctggttctagacatgggcttcctggccactccctgggcaccatgcatcaggcagtgtccctatcatataagcacacctgtgagctatacctggcaccaagagggattccttcttctaagacttcctctattggagaaaaacagatcaggacgacctcagcagtcttcaccacctaagaccccaacagctgtcctcaatgctgtggacataacagcattggccactgggaccctgcaatcttcagcatcactgccctcagctgatgtagctgcacctagactatgtagactatgcccaaatcagaacgggaaccacatcatcccacccagtgcacaaatagtcttaacacatttaagaaagttgaaatcatctagtatcttttccaaccacaatggtatgaaactagaaatcaacaggaggaaaactagaaagttcacaaatatagtcatgtgtagtataataacatttccgtcagggactaactgcatatactactgtggtcccattagatag

SEQ ID NO: 44751 - DNA, 1002 bp, Homo Sapiens
atgttgaccaagcctctacaggggcctcccgcgccccccgggacccccacgccgccgccaggaggcaaggatcgggaagcgttcgaggccgagtatcgactcggccccctcctgggtaaggggggctttggcaccgtcttcgcaggacaccgcctcacagatcgactccaggtggccatcaaagtgattccccggaatcgtgtgctgggctggtcccccttgtcagactcagtcacatgcccactcgaagtcgcactgctatggaaagtgggtgcaggtggtgggcaccctggcgtgatccgcctgcttgactggtttgagacacaggagggcttcatgctggtcctcgagcggcctttgcccgcccaggatctctttgactatatcacagagaagggcccactgggtgaaggcccaagccgctgcttctttggccaagtagtggcagccatccagcactgccattcccgtggagttgtccatcgtgacatcaaggatgagaacatcctgatagacctacgccgtggctgtgccaaactcattgattttggttctggtgccctgcttcatgatgaaccctacactgactttgatgggacaagggtgtacagccccccagagtggatctctcgacaccagtaccatgcactcccggccactgtctggtcactgggcatcctcctctatgacatggtgtgtggggacattccctttgagagggaccaggagattctggaagctgagctccacttcccagcccatgtctccccagactgctgtgccctaatccgccggtgcctggcccccaaaccttcttcccgaccctcactggaagagatcctgctggacccctggatgcaaacaccagccgaggatacccctcaacccctccaaaggaggccctgcccctttggcctggtccttgctaccctaagcctggcctggcctggcctggcccccaatggtcagaagagccatcccatggccatgtcacagggatag

SEQ ID NO: 44752 - DNA, 2384 bp, Homo Sapiens
gacggaggcagcccggggaagcgagccggagcggcgcccgcactgaggcggctgcagtgctgacaccactcagggcaagggtgtccgacggctggagcgttctgttttgaacccaaagtggatgatgctgtcagagctgaaccactgaaaggaggctgtgaaaatttcccatcttctcattggccatcagttgagataagatggaagactcttacaaggataggacttcactgatgaagggtgccaaggacattgccagagaggtgaagaaacaaacagtaaagaaggtgaatcaagctgtggaccgagcccaggatgaatacacccagaggtcctacagtcggttccaagatgaagaagatgatgatgactactacccggctggagaaacctataatggtgaggccaacgatgacgaaggctcaagtgaagccactgaggggcatgatgaagatgatgagatctatgagggggagtatcagggcatccccagtatgaaccaagcgaaggacagcatcgtgtcagtggggcagcccaagggcgatgagtacaaggaccggcgggagctggaatcagaaaggagagctgacgaggaagagttagcccagcagtatgagctgataatccaagaatgcggtcatggtcgttttcagtgggcccttttcttcgtcctgggcatggctcttatggcagacggtgtagaggtgtttgtcgttggcttcgtgttacccagtgctgagacagacctctgcatcccaaattcaggatctggatggctaggcagcatagtgtacctcgggatgatggtgggggcgttcttctggggaggactggcagacaaagtgggaaggaaacagtctcttctgatttgcatgtctgtcaacggattctttgccttcctttcttcatttgtccaaggttatggcttctttctcttctgtcgcttactttctggattcgggattggaggagccatacccactgtgttctcgtactttgctgaagtcctggcccgggaaaagcggggcgaacacttgagctggctctgcatgttctggatgatcggtggcatctacgcctctgccatggcctgggccatcatcccgcactacgggtggagcttcagcatgggatcggcctaccagtttcacagttggcgtgtgtttgtcatcgtctgtgcactcccctgtgtctcctccgtggtggccctcacattcatgcctgaaagcccacgattcttgttggaggttggaaaacatgatgaagcttggatgattctgaagttaattcatgacaccaacatgagagcccggggtcagcctgagaaggtcttcacggtaaacaaaataaaaactcctaaacaaatagatgagctgattgaaattgagagtgacacaggaacatggtataggaggtgttttgttcggatccgcaccgagctgtacggaatttggttgacttttatgagatgtttcaactacccagtcagggataatacaataaagcttacaattgtttggttcaccctgtcctttgggtactatggattatccgtttggttccctgatgtcattaaacctctgcagtccgatgaatatgcattgctaaccagaaatgtggagagagataaatatgcaaatttcactattaactttacaatggaaaatcagattcatactggaatggaatacgacaatggcagattcataggggtcaagttcaaatctgtaactttcaaagactctgtttttaagtcctgcacctttgaggatgtaacttcagtgaacacctacttcaagaactgcacatttattgacactgtttttgacaacacagattttgagccatataaattcattgacagtgaatttaaaaactgctcgttttttcacaacaagacgggatgtcagattacctttgatgatgactatagtgcctactggatttattttgtcaactttctggggacattggcagtattgccagggaacattgtgtctgctctgctgatggacagaattgggcgcttaacaatgctaggtggctctatggtgctttcggggatcagctgtttcttcctttggttcggcaccagtgaatccatgatgataggcatgctgtgtctgtacaatggattgaccatctcagcctggaactctcttgacgtggtcactgtggaactgtaccccacagaccggagggcaacaggctttggcttcttaaatgcgctatgcaaggcagcagccgtcctgggaaacttaatatttggctctctggtcagcatcaccaaatcaatccccatcctgctggcttctactgtgctcgtgtgtggaggactcgttgggctgtgcctgcctgacacacgaacccaggttctgatgtaa

SEQ ID NO: 44753 - DNA, 1395 bp, Homo Sapiens
atgtcttccagaagtaccaaagatttaattaaaagtaagtggggatcgaagcctagtaactccaaatccgaaactacattagaaaaattaaagggagaaattgcacacttaaagacatcagtggatgaaatcacaagtgggaaaggaaagctgactgataaagagagacacagacttttggagaaaattcgagtccttgaggctgagaaggagaagaatgcttatcaactcacagagaaggacaaagaaatacagcgactgagagaccaactgaaggccagatatagtactaccacattgcttgaacagctggaagagacaacgagagaaggagaaaggagggagcaggtgttgaaagccttatctgaagagaaagacgtattgaaacaacagttgtctgctgcaacctcacgaattgctgaacttgaaagcaaaaccaatacactccgtttatcacagactgtggctccaaactgcttcaactcatcaataaataatattcatgaaatggaaatacagctgaaagatgctctggagaaaaatcagcagtggctcgtgtatgatcagcagcgggaagtctatgtaaaaggacttttagcaaagatctttgagttggaaaagaaaacggaaacagctgctcattcactcccacagcagacaaaaaagcctgaatcagaaggttatcttcaagaagagaagcagaaatgttacaacgatctcttggcaagtgcaaaaaaagatcttgaggttgaacgacaaaccataactcagctgagttttgaactgagtgaatttcgaagaaaatatgaagaaacccaaaaagaagttcacaatttaaatcagctgttgtattcacaaagaagggcagatgtgcaacatctggaagatgataggcataaaacagagaagatacaaaaactcagggaagagaatgatattgctaggggaaaacttgaagaagagaagaagagatccgaagagctcttatctcaggtccagtttctttacacatctctgctaaagcagcaagaagaacaaacaagggtagctctgttggaacaacagatgcaggcatgtactttagactttgaaaatgaaaaactcgaccgtcaacatgtgcagcatcaattgcatgtaattcttaaggagctccgaaaagcaagaaatcaaataacacagttggaatccttgaaacagcttcatgagtttgccatcacagagccattagtcactttccaaggagagactgaaaacagagaaaaagttgccgcctcaccaaaaagtcccactgctgcactcaatgaaagcctggtggaatgtcccaagtgcaatatacagtatccagccactgagcatcgcgatctgcttgtccatgtggaatactgttcaaagtag

SEQ ID NO: 44754 - DNA, 648 bp, Homo Sapiens
ttcatggatatctgcttcacaacagtcatagtgcctaagatgctggtgaattttctatcagagacaaaggttatctcctatgtgggctgcctggcccagatgtacttctttatggcatttgggaacactgacagctacctgctggcctctatggccatcgaccggctggtggccatctgcaaccccttacactatgatgtggttatgaaaccacggcattgcctgctcatgctattgggttcttgcagcatctcccacctacattccctgttccgcgtgctacttatgtctcgcttgtctttctgtgcctctcacatcattaagcactttttctgtgacacccagcctgtgctaaagctctcctgctctgacacatcctccagccagatggtggtgatgactgagaccttagctgtcattgtgacccccttcctgtgtatcatcttctcctacctgcgaatcatggtcactgtgctcagaatcccctctgcagccgggaagtggaaggccttctctacctgtggctcccacctcactgcagtagcccttttctatgggagtattatttatgtctattttaggcccctgtccatgtactcagtggttagggaccgggtagccacagttatgtacacagtagtgacaccc

SEQ ID NO: 44755 - DNA, 543 bp, Homo Sapiens
ggggaagaggaggagtgcccgatctgcacagagccctacgggcccagagagcgccgcctggccctgctgaactgtagccacggcctgtgtgtgggctgcctgcacaggctgctgggctcggcctccagtgccgacctgggccgggtgcgctgcccgctgtgccgccagaagacgcccgtgctggaatgggagatctgccggctacaggaggagctgctacaggccgacgggccctcacgccagccccgccgagaggcccctgcatcctatcaccgcaaccctgggccctggggctccctggagcaccgctaccagctgcgcttcctggcagggcccgtgggcggccggggctgcctgcccttcctgccctgtccaccctgcctgggtgcccggctctggaccctgcgggagcggggaccctgtgcccgccgcctggcgctgctgagcctgctggcccttgagcttctggggctgctgctggtcttcacgccgctcctgctgctgggactgctcttcgtgctcctggaccgctctggccgctga

SEQ ID NO: 44756 - DNA, 1086 bp, Homo Sapiens
atggagacagtgtttgaagagatggatgaagaaagcacaggaggagtttcatcttcgaaagaagaaatagtccttggccagagactccatctaagctttccttttagcattatcttctcaactgttctctactgtggtgaggttgcctttggtttatacatgtttgaaatttatcgaaaagctaatgacacattctggatgtcatttaccatcagctttattattgtgggggcaattttggatcaaattatcctgatgtttttcaacaaagacttgaggagaaataaggctgcattacttttttggcacattcttcttttaggacctattgtgaggtgtttgcacaccattagaaattaccacaaatggttgaaaaatcttaaacaggagaaggaagagactcaagttagcatcacaaagagaaacacgatgctggaaagggagattgcattctcaatccgggataatttcatgcagcagaaggctttcaagtacatgtcagtgattcaggcttttctcggttctgttccacaattaattttgcagatgtatatcagtctcactatacgagaatggcctttgaatagagcattgctgatgacattttccctgttatcagttacttatggggccattcgctgcaatatactggccatccagatcagcaatgatgatactaccattaagctaccgccgatagaattcttctgtgtcgtgatgtggcgttttttggaggttatctcacgtgtagtgactctggcatttttcattgcatctctgaaactgaagagcctacccgttttgttaatcatatattttgtatcattgttggcaccgtggctggagttttggaaaagtggagctcatcttcctggcaacaaagaaaataattccaatatggtgggtacagtactgatgcttttcttgatcacactgctatatgctgccatcaacttctcctgctggtcagcagtgaaactgcagttgtcagatgacaaaataattgacgggagacagaggtggggccatagaatcctacactacagctttcagtttagaaaatgtgataatgatattggtatttag

SEQ ID NO: 44757 - DNA, 706 bp, Homo Sapiens
gggttctaggcttaggcgcagacgggttaggggagccaacatgccagtggcccggagctgggtttgtcgcaaaacttacgtgaccccgcggagatcctttgagaaatctcgtctcgaccaagagctgaagctgatcgaagagtatgggctccggaataaacgtgaggtctggagggtcaaatttaccctggccaagatccgcaaggccgcccgggaactgctgacgcttgatcagaaggacccacggcgtctgttcgaaggcaatgccctgctgtggcggctggtctgcattggggtgctggatgagggcaagatgaagctggattacatcctgggcctgaagatagaggatttcttagagagacgcctacagacccaggtcttcaagctgggcttggccaagtccatccaccacgctcgcgtgctgatccgccagcgccatttcagggtccgcaagcaggtggtgaacatcccgtccttcattgtccgcctggattcccagaagcacatcgacttctctctgtgctctccctatgggggtggccgcccgggccgcgtgaagaggaagaatgccaagaagggccagggtggggctggggctggagaccacaaggaggaggattaagcccacctgtccctcctgggctgctgcattgtctagttttcctgccaaataaacaggatcagcgctttaaaaaaaaaaaaa

SEQ ID NO: 44758 - DNA, 2486 bp, Homo Sapiens
caaaaggacagatgcagaggacaggcgccaggcacagataccatctcccttccccaagccagctgcccccaaccctccccctgcccgcaattagtcctctggggcgggagcggggcacagagcagagccctcttgggggaggggaagcccgatccgcacccacccttcctttgcccccctcttccttctgctgctccaatatcaatttcagccagtgacctctccaccaatttgcacatccccactctcccggtccgtttcaccgccagacatcggttccatttcgaccctcactggcggtcattcccaccccctctgctggtcaatttcaccccttttggcggtcaagtgcagtcccccatttcccgggcaatttccccctcccctccttctccctctcccctcccctccccagcagtgtcactcccagctgctccccacctcccgcgctccgcgctcgctgcggccagtctcgggcgtcccggtcagtgtccagctgccgcggcctcggccccggcgactcccgcccccagccccccttccctccgcgggcagcggctccctccctccccagaacagctgaaggtctcagtcacctccgaggggagcgcagggggaggggaggggcgggggacgcggcggaggggaggtgggggagccttgacgctgctgcccgggacgcggcccggggctggtgggaacaggggcgtcctcctgcgcgcccccctccccagcgtcccacctcccggcggcggcggggaaagtctctccgaaagcgtgaagggggattggaggaggtttttatttccctttgtgcgggtggctggggccggatcgaggcggcgggggccgcgggactgggggctccccgctgagccgagaggagcgcgacaaaggatgcgtcccgccggggtcacagtctccgcggcccaactttgcgcgcggcgcccgcgcccctggggagcccgcccgctgcgctgagaacccaggcgtccgggctgggagaggggccgggagcgtccgcaggtggcgctggcccggatctcccgaccccaggaagggatcccggagcttcctggaggcggcgggcggccgtgtcgctccagggaaccgcgctgcccgcggaaactccgcgcgcctccgcggatgcccctcgccctagcccccagcgcgcggggttcggggccctgcgaggtccccccttcccccgcggtgcttcccaagctgggctaaggcgggcttctcttcctccctcctctgtcgcctccttttcctccccctcgttcaccttttccttccctctatccatccagagccccgccaaagggcgcacctgatctttctcatccttccctgctcttcccttcctctccacctcctcctcctccttggggaaaggggcccggagaagggcatgtgggggcccctctgacagtggcccgattggggtgacaggcgcccaaatggccaagtggctacgggactacctgagctttgggggtcggaggccccctccgcagccgcccaccccggactacaccgagagcgacatcctgagggcctaccgcgcgcagaagaacctggacttcgaggacccctatgaggacgcggagagccgcttggagccggaccccgcgggccctggggactccaagaaccccggagatgccaagtatggttctcccaagcaccggctcatcaaggtggaggctgcggatatggccagagccaaggcccttctgggcggccccggggaggagctggaagccgacactgagtatttagacccctttgatgctcagcctcatcctgcacccccggatgatgggtacatggagccctacgatgcccaatgggtcatgagtgaacttcccggcagaggggtgcagctctatgacaccccttatgaggaacaggacccagagacagcagatggacccccttctgggcagaagcctcggcagagccggatgccccaggaagatgaacggccagcagatgagtatgatcagccctgggagtggaagaaagaccacatctccagggcgtttgcagtgcagtttgacagtccagagtgggagaggactccaggctcagccaaggagctccggagacctccgcccagaagcccccagcctgcggagcgtgtggacccagccctgcccctggagaaacagccgtggtttcatggccccctgaacagggcggatgcagagagcctcctgtccctctgcaaggaaggcagctacctagtgcggctcagtgagaccaacccccaggactgctccttgtctctcaggagcagccagggcttcctgcatctgaagttcgcgcggacccgtgagaaccaggtggtgctgggccaacacagcgggcccttccccagcgtgcccgagctcgtcctccactacagttcacgcccactgccggtgcagggtgccgagcatctggctctgctgtaccccgtggtcacgcagaccccctga

SEQ ID NO: 44759 - DNA, 513 bp, Homo Sapiens
atgaacggagatgacacctttgcaaggagacccacggttggtgctcaaataccagagaagatacaaaaggccttcgatgatattgccaaatacttctctaaggaagagtgggaaaagatgaaagtctcggagaaaatcgtctatgtgtatatgaagagaaagtatgaggccatgactaaactaggtttcaaggccatcctcccatctttcatgcgtaataaacgggtcacagacttccaggggaatgattttgataatgaccctaaccgtgggaatcaggttcaacgtcctcagatgactttcggcaggctccagggaatcttcccgaagatcatgcccaagaagccagcagaggaaggaaatgtttcgaaggaagtgccagaagcatctggcccacaaaacgatgggaaacagctgtgccccccgggaaaaccaactacctctgagaagattaacatgatatctggtgtccttcagagatactgcaggttcggttccagaccactgcaataa

SEQ ID NO: 44760 - DNA, 2019 bp, Homo Sapiens
aaagtcatatttgtaattcatcacataaacagaactaaaggcaaaaaacacatgattatctcaacagacccagaaaaggcctttggtaaaattcaacatcccttcatgttaaaaactctcaataaactaggtattgaaagagcatacctcaaaataaccagagccatatatgataaatccacagccaatatgatactgaatgggcaaaagttagaagcatttcctttgaaaacaacaaggatgcctctttcaacattcccgttcaacacagtattggaagttctggccagggcaatcaggcaagagaaagaaataaaggatattcaaacaggaagagaagaagtcaaattatctttgtttgcagatgacataatcctgtatctagaaaaccccaccgtctcagcccaaaagctccttaagctgataagcaatttcagcaaagtctcaggatacaaaatcaatgtgcaaaaatcgctaacgttcctatacaccaacaacagaaaagcggagattatgaatgaactcccattcacaattcctacaaagagaataaaatacctaggaatacagctaacaagaaaagtgaaggacctcttcaaggagaactacaaaccactgctccaagaaatcaaagacacaaataaatggaaaaacattccatgctcatggataggaagaatcaataccaagaaaatggccatactccccaaagtaatttatagattcaatgttgttcccactaaacgaccattgacgtttttcacagaattagaagaaactattttaaaattcataaaacccaaaaggagcatagccacaacaatcctaagcaaaaagaacaaagctggaggtatcacactacctgacttcaaactatacaaggctacagtaaccaaaacgtactggtacaaaaacagagacatagaccaatggaacagaatagggaactcacaaataagactgcacgtctacaaccatctgattttttacaaacctgacaaaaacaagcaatggggaaaggattccctatttaataaatggtgctgggaaaactggctagccatatgcagaaaattaaaactggaccccttccttataccttatacaaaaggtaactcaagatggattaaagacttaaatgtaaaacccaaaattataaaaaccctagaagaaaatctaggctatattcaggacataggcaaaggcaaagagtttatgacaaaaacaccaaaagccacagcaacaaaaaaagacaaatgggatctaatcctacagaacttctgcatagcaaaagaaactattatcagactgaacagacaacctaatgagaaaatttctgcaatctatccatccgacaaaggtctaatattcagagtctacaagaaaaaacaaatttacaggaaacaaacaaccccatttaaaagttggaaggacatgaacagacacttctcaaaagaagacattcatagagccagtaaacatatgaaaaaatcaacatcactcatcattagagaaataaaaatcaaaatcacaatgagataccatcttactccagtcagaatggtgattattaaaaagtcaagaaacaacaaaggccagattgcagagaaaacacttttacactgtttatgggggtgtaaattatttcaaccattgaaagtgtggcaattcctcaaagacctagaggcagaaataccatttgtaccatttgacccagcaatcccattactgggtatatacccaaaggattataaatcattctattataaagatacttgcgcacatatgttccatgcagcactattcacaacagcaaaaacatggcatcagcccaaatgcccatcaatgacagactggataaagaaaatgtggtacatggaatactatgcagccataaaaaggaaaaacataatttcctttgcagggacatggatggagctggaagcagttatccttagcaaactaacacaggaacagaaaaccaaacaccacgtgttcttatttataaatgggagctga

SEQ ID NO: 44761 - DNA, 1779 bp, Homo Sapiens
tccctccccccaactcccccctcccccgcccgccggggcaggggagcgccacgaattgaccaagtgaagctacaactttgcgacataaattttggggtctcgaaccatgtcgctgaccaacacaaagacggggttttcggtcaaggacatcttagacctgccggacaccaacgatgaggagggctctgtggccgaaggtccggaggaagagaacgaggggcccgagccagccaagagggccgggccgctggggcagggcgccctggacgcggtgcagagcctgcccctgaagaaccccttctacgacagcagcgacaacccgtacacgcgctggctggccagcaccgagggccttcagtactccctgcacggtctggctgccggggcgccccctcaggactcaagctccaagtccccggagccctcggccgacgagtcaccggacaatgacaaggagaccccgggcggcgggggggacgccggcaagaagcgaaagcggcgagtgcttttctccaaggcgcagacctacgagctggagcggcgctttcggcagcagcggtacctgtcggcgcccgagcgcgaacacctggccagcctcatccgcctcacgcccacgcaggtcaagatctggttccagaaccaccgctacaagatgaagcgcgcccgggccgagaaaggtatggaggtgacgcccctgccctcgccgcgccgggtggccgtgcccgtcttggtcagggacggcaaaccatgtcacgcgctcaaagcccaggacctggcagccgccaccttccaggcgggcattcccttttctgcctacagcgcgcagtcgctgcagcacatgcagtacaacgcccagtacagctcggccagcaccccccagtacccgacagcacaccccctggtccaggcccagcagtggacttggtgagcgccgccccaacgagactcgcggccccaggcccaggccccaccccggcggcggtggcggcgaggaggcctcggtccttatggtggttattattattattataattattattatggagtcgagttgactctcggctccactagggaggcgccgggaggttgcctgcgtctccttggagtggcagattccacccacccagctctgcccatgcctctccttctgaaccttgggagagggctgaactctacgccgtgtttacagaatgtttgcgcagcttcgcttctttgcctctccccggggggaccaaaccgtcccagcgttaatgtcgtcacttgaaaacgagaaaaagaccgaccccccacccctgctttcgtgcattttgtaaaatatgtttgtgtgagtagcgatattgtcagccgtcttctaaagcaagtggagaacactttaaaaatacagagaatttcttcctttttttaaaaaaaaataagaaaatgctaaatatttatggccatgtaaacgttctgacaactggtggcagatttcgcttttcgttgtaaatatcggtggtgattgttgccaaaatgaccttcaggaccggcctgtttcccgtctgggtccaactcctttctttgtggcttgtttgggtttgttttttgttttgtttttgtttttgcgttttcccctgctttcttcctttctctttttattttattgtgcaaacatttctcaaatatggaaaagaaaaccctgtaggcagggagccctctgccctgtcctccgggccttcagccccgaacttggagctcagctattcggcgcggttccccaacagcgccgggcgcagaaagctt

SEQ ID NO: 44762 - DNA, 900 bp, Homo Sapiens
atgtccgccaagcctgaagtcagcttagtgcgcgaggcttctcggcagatcgtggccggtggttctgcaggtcttgtagaaatttgcctgatgcaccccctagatgtggtgaaaaccaggtttcagattcagagatgtgcaaccgatccaaacagttataaaagcttggtagacagctttcgaatgattttccaaatggaagggttatttggtttttacaagggaattctgccacctatcttggctgaaaccccaaaaagagcagtgaagtttttcacctttgagcagtacaagaaattgctgggatatgtgtcactgtcaccagcattgacattcgccattgctggattgggatctggactaacagaagccattgtagttaacccttttgaggtagtaaaagttggcttgcaagcaaatcggaacacatttgcagagcaaccatccactgtgggttatgcaagacaaatcattaagaaggaaggctggggactccagggcctcaacaaaggattaactgcaactttgggacgacatggagttttcaacatggtttattttggcttctactacaatgtcaaaaacatgattcctgtcaataaggatccaatcttggagttttggagaaaatttgggattggtcttctctcggggacaatagcctcagtcattaacatcccttttgatgttgccaaaagtaggattcaagggcctcaaccagttcctggagagatcaagtacagaacctgttttaaaacaatggcaacagtctatcaggaagaagggattttagctttgtacaaaggcctgcttcccaagattatgagacttggaccaggtggtgcagtgatgctgctggtttatgaatacacctattcatggcttcaagagaactggtga

SEQ ID NO: 44763 - DNA, 1168 bp, Homo Sapiens
ttctcatccctgtgctcagagctctcaagcacccacgatggccttctcaggccgagcgcgcccctgcattatcccagagaacgaagaaatcccccgagcagcccttaacactgtccacgaggccaatgggaccgaggacgagagggctgtttccaaactgcagcgcaggcacagtgacgtgaaagtctacaaggagttctgtgacttttatgcgaaattcaacatggccaacgccctggccagcgccacttgcgagcgctgcaagggcggctttgcgcccgctgagacgatcgtgaacagtaatggggagctgtaccatgagcagtgtttcgtgtgcgctcagtgcttccagcagttcccagaaggactcttctatgagtttgaaggaagaaagtactgtgaacatgactttcagatgctctttgccccttgctgtcatcagtgtggtgaattcatcattggccgagttatcaaagccatgaataacagctggcatccggagtgcttccgctgtgacctctgccaggaagttctggcagatatcgggtttgtcaagaatgctgggagacacctgtgtcgcccctgtcataatcgtgagaaagccagaggccttgggaaatacatctgccagaaatgccatgctatcatcgatgagcagcctctgatattcaagaacgacccctaccatccagaccatttcaactgcgccaactgcgggaaggatctgactgccgatgcacaggagctgaaaggggagctatactgcctgccatgccatgataaaatgggggtccccatctgtggcgcttgccgacggcccatcgaagggcgtgtggtgaacgccatgggcaagcagtggcatgtggagcattttgtttgtgccaagtgtgagaaaccctttcttggacatcgccattatgagaggaaaggcctggcgtattgtgaaactcactataaccagctatttggtgatgtttgcttccactgcaatcgtgttatagaaggtgatgtggtctctgctcttaataaggcctggtgcgtgaactgctttgcctgttctacctgcaacactaaattaacactcaaggataagtttgttgaaattgacctaaagccagtctgcaaacactgttatgagaaaatgccagaagaatttaagaggcgactt

SEQ ID NO: 44764 - DNA, 2166 bp, Homo Sapiens
gctctctccccaggttgcctgtcccatccaaggagtgcagcctgaatgtcacctgcctcgatggcagcccatgtgagggtggctctcccgctgccaactgcagctgcctggagggtcttgctggccagaggtgtcaggtccccactctcccctgtgaagccaacccctgcttgaatgggggcacctgccgggcagctggaggggtgtctgaatgtatctgcaatgccagattctccggccagttctgtgaagtggcgaagggcctgcccctgccgctgccattcccactgctggaggtggccgtacctgcagcctgtgcctgcctcctcctcctcctcctgggcctcctttcagggatcctggcagcccgaaagcgccgccagtctgagggcacctacagcccaagccagcaggaggtggctggggcccggctggagatggacagtgtcctcaaggtgccaccggaggagagactcatctaggccagcctggctgctggcaccagcacctggaggtcctgaatggtttctacctggagacccaaggaagctgcttccagggctcgggacattgctacggaagtgtccccttggctggcagcctctgcctctgcctctgccccatcctggatggaggacgaggggagcaactcagggaaacagaggcctagagaggctgcggacttctccatcccaccctcggggttccgccttggcaggtgtacggctgtgcgtgggagggcacacgtgggttcacagtgtgttcaggagtgtgtgtatctggaggagtgtgtgtgtgagtgtgtacctgggcctgtgttagtctgcagatgctagtgtgagtgtgtcctgacatggctccagggcgtgtctgccgtgtttactgtgtgtctatgactgtgatgggtgtagctgatcccaggaggtggcggctgcgccatggggtcaaccattacagtcctagggcaggggcggcccaaggctgcatgttctccaggaggccaggccggggttgcccaggcacctccttccccgcctctgggggctgctcctgctgtggaggcagctgggaagtcagggaaggccactagcagaggctgagtgggcttctggctcctagaacaaatgtcccttcaggcaggtctgtctgccagaagccagagccagtcatgcgagggaaccacagacccacccgccccctcagccggagcagcccgagggagcagaggaggggctgcctggagcttcccaccctgctgtggtcatttgtcaaagggggaaggcacccactgcctacctcacagggctgttgtgaggatcagagaggacgacagtggggaaagaatctggaagtcttcaactgccgtctgatgggaaggaccgtctgggtgtccttctgggatgaggatgacagagcaacccttctcctgccctgaacccccccagctcacctgaccacctctggttctccagctccggtccttcctagcagcctggtgagctcactccttcccctgatgactggctgcctctacacagactcggcgagaggacttgaaggaagccctctgggttgtctgctgagtacaggggctcagtgaacactggcgctgcctctgagtcggggctgggcctgcagaggccgactcagaggagactctgctgcttgctcccagccccttccccggcgatgcccatcacactgtgacctcccatccctgaagggcacctgcctgagggcctggcctccttccagcttcatggacctggagatgtgccctttcatccttcctgcttcccaggccagtagatccgtttacacttttgggtcgacagtcagcttttccttttggttttggcgggtcccagaggcatgggtgtccagtccaatgtggggagccacgtgacaacgtgggggactgggacatgggactgggaagtcagcagacgctgggatagagagggccctgaacaccaggctcaggggcttgcttggtccttatcctgtaggaggtgggaccacctttccctgaactttctctacaacccttgggagcgtggggaggaggcggctggttccagggtcagtttactaagttagagatttggaaaacctgtgtcagctgtaactcctaggatattttatgtggaacctaacatgcagatg

SEQ ID NO: 44765 - DNA, 753 bp, Homo Sapiens
attccttttaagattgggcagcccaagaaacagattgtgcccaaaacagtggagagagactttgaaagggagtatggaaaacttcagcagctggaagagcagacccggaggctgcagaaagacatgaagaagagcaccgacgcagacctggccatgtcaaaatctgccgtgaagatatccttggacttactctccaatcccctctgtgagcaagaccaggaccttctgaacatggtgacggccctggacacggccatgaagcggatggatgccttcaatcaggaaaaggtgaaccagatccagaagactgtgatcgagcccttaaaaaagttcggcagtgtcttcccgagcctcaacatggctgtgaagaggcgggaacaggccttgcaggactacaggaggctgcaggccaaggtggagaagtatgaggaaaaggagaagacggggccagtgctggccaagctccaccaggcacgagaggagctgcggcctgtgcgggaggactttgaagccaagaacaggcagctgctggaggagatgccgcgcttctacggcagccgcctcgactacttccagcccagctttgagtccctcatccgagctcaggttgtgtactactcggaaatgcacaagatctttggagacctgtcccatcagcttgaccagccaggccactccgatgagcagcgggagcgggagaacgaggccaaactcagtgagctccgggccctctccattgtggccgatgactga

SEQ ID NO: 44766 - DNA, 567 bp, Homo Sapiens
atgttcagttggagcgccaagatcgtgaagcccaatggcaagaagccagagtccggcatctcccaggctcttctggagctggaaaagaactcggacctcaaggctcagctcacagagctgaatattatggcagccaaggaaattgaagttggtggtggtcagaaagctatcacaatctttgttcccgttcctccactgaaatctttccagaaaatccaagtccggctagtatgcgaactggagaaaaagttcagtggaaagcatattatctttatcgctcagaggagaattctgcctaagccaattcgaaaaagccgcacaaaaaataagcaaaagcgtcccaggagtactctgacagctgtgcacgacgcaagccttgaggacttgatcttcccaagcgaaattgtgggcaagagaattcacgtgctggatggcagccggctcataaaggttcgtttggacaaagcccagcagaacaacgtggaacacagagaaactttttctggtgtctctaagaagctcacgggcaaggatgttaattttgaattcccagagtttcaattgtaa

SEQ ID NO: 44767 - DNA, 2025 bp, Homo Sapiens
gtagtgtgacattcctgcctgcctgaggaagaaatggtgagcaggggctgcaattgcagacaagtgtcacccagaagccacaagtttctgtgagcaccaggtctacaaactacccaaggcatagcaatggcattatcactggaagaattcgtccactcccttgacctcaggaccctacccagggttctagaaatccaggcaggcatctatcttgaaggctctatttatgaaatgtttggaaatgaatgctgtttttcaacaggagaagtgattaaaattactggtctcaaagttaagaagatcatagctgaaatttgtgagcagattgaaggttgtgagtctctacagccatttgaactgcctatgaattttccaggtctttttaagattgtggctgataaaactccataccttactatggaagaaatcacaaggaccattcatattggaccaagtagactagggcatccttgcttctatcatcagaaggatataaaactagagaacctcatcataaagcagggtgagcaaatcatgctcaactcagttgaagagattgatggagaaataatggtgagctgtgcagtagcaaggaatcatcaaactcactcatttaatttgcctttgtcacaagaaggagaattctacgagtgtgaagatgaacgtatttacactctaaaggagattgttgaatggaagattcctaagaacagaacaagaactgtaaaccttacagatttttcaaataagtgggactcaacgaatccatttcctaaagacttttatggtaccctgattctcaagcctgtttatgaaattcaaggtgtgatgaaatttcgaaaagatataatccgcatcctccccagtctagatgtcgaagtcaaagacatcactgattcttacgatgctaactggtttcttcagctgttatcaacagaagatctttttgaaatgactagtaaagagttccccatagtgactgaagtcatagaagcacctgaaggaaaccacctgccccaaagcattttacagcctgggaaaaccattgtgatccacaaaaagtaccaggcatcaagaatcttagcttcagaaattagaagcaattttcctaaaagacacttcttgatccccactagctataaaggcaagttcaagcggcgaccgagggagttcccaacggcctatgacctagagatcgctaagagtgaaaaggagcctcttcacgtggtggccaccaaagcgtttcattcccctcatgacaagctgtcatccgtatctgttggggaccagtttctggtgcatcagtcagagacgactgaagtcctctgtgagggaataaaaaaagtggtgaatgttctggcctgtgaaaaaatcctcaaaaagtcctatgaggctgcgctgctccctttgtacatggaaggaggttttgtagaggtgattcatgataagaaacagtacccgatttctgagctctgtaaacagttccgtttgcccttcaatgtgaaggtgtctgtcagggatctttccattgaagaggacgtgttggctgccacaccaggactgcagttggaggaggacattacagactcttacctactcataagtgactttgccaaccccacggagtgctgggaaattcctgtgggccgcttgaatatgactgttcagttagttagtaatttctctagggatgcagaaccatttctagtcaggactctggtagaagagatcactgaagagcaatattacatgatgcggagatatgaaagctcagcctcacatcccccacctcgccctccgaaacacccctcagtagaggaaacaaagttaaccctgctaaccttagcagaagaaaggacggtagacctgcccaagtctcccaagcgtcatcacgtagacataaccaagaaacttcacccaaatcaagctggcctggattcaaaagtactgattggtagtcagaatgatttggtggatgaagagaaagaaaggagcaaccgtggggccacagcaatagcaggtact

SEQ ID NO: 44768 - DNA, 3707 bp, Homo Sapiens
tagtgcgacgcacgcaggcgtagtacggtcccccgggcgacagcggtggcggctcctcggggtgctcggctccctcccacctaggccggccccggcccgactcgccctcagaaactcactgtttggggctgcggactttctcgtcgtgccccacaaaagtaaagcttggggacctggggggagccggaagtatcgcttcgagatccccaaatactatcggggaaacggaagtggccgtcggtggcaggtttgggggagaccggaagtgacgagacctgtcggccatggagcctaatgatagtaccagtaccgctgtggaggagcctgacagcttggaggtgttggtgaagaccttggactctcaaactcgtacctttattgtgggggcccagatgaatgtaaaagagtttaaggagcacattgctgcctctgtcagcatcccatctgaaaaacaacggctcatttaccagggacgagttctgcaagatgataagaagcttcaggaatacaatgttgggggaaaggttatccacctggtggaacgggctcctcctcagactcacctcccttctggggcatcttctgggacggggtctgcctcagccactcatggtgggggatccccccctggtactcgggggcctggggcctctgttcatgaccggaatgccaacagctatgtcatggttggaaccttcaatcttcctagtgacggctctgctgtggatgttcacatcaacatggaacaggccccgattcagagtgagccccgggtacggctggtgatggctcagcacatgatcagggatatacagaccttactatcccggatggagtcttaccctgcctttggtatcctgactctcccctaccttcagtgtcgaggagggccccaaccgcagcacagtcagccgcccccgcagccaccggctgtgaccccggagccagtagccttgagctctcaaacatcagaaccagttgaaagtgaagcacctccccgggagcccatggaggcagaagaagtggaggagcgtgccccagcccagaacccggagctcactcctggcccagccccagcgggcccaacacctgccccggaaacaaatgcacccaaccatccttcccctgcggagtatgtcgaggtgctccaggagctacagcggctggagagtcgcctccagcccttcttgcagcgctactacgaggttctgggtgctgctgccaccacggactacaataacaatcacgagggccgggaggaggatcagcggttgatcaacttggtaggggagagcctgcgactgctgggcaacacctttgttgcactgtctgacctgcgctgcaatctggcctgcacgcccccacgacacctgcatgtggtccggcctatgtctcactacaccacccccatggtgctccagcaggcagccattcccatacagatcaatgtgggaaccactgtgaccatgacaggaaatgggactcggccccccccaactcccaatgcagaggcacctccccctggtcctgggcaggcctcatccgtggctccgtcttctaccaatgtcgagtcctcagctgagggggctcccccgccaggtccagctcccccgccagccaccagccacccgagggtcatccggatttcccaccagagtgtggaacccgtggtcatgatgcacatgaacattcaagattctggcacacagcctggtggtgttccgagtgctcccactggccccctgggaccccctggtcatggccaaaccctgggacagcaggtgccaggcttcccaacagctccaacccgggtggtgattgcccggcccactcctccacaggctcggccttcccatcctggagggcccccagtctctgggacactgcagggcgccggtctgggtaccaatgcctcgttggcccagatggtgagcggccttgtggggcagcttcttatgcagccagtccttgtggctcaggggaccccaggtatggctccaccgccagcccctgccactgcttctgccagtgctggcaccaccaacacagctaccacagctggccccgctcctggggggcctgcccagcctccacccacccctcaaccctccatggctgatcttcagttctctcagcttctggggaacctgctagggcctgcagggccaggggctggagggtctggtgtggcttctcccaccatcactgtggcgatgcctggtgtccctgcctttctccaaggcatgactgacttcttgcaggcaacacagacagcccctccaccacccccacctcctccacccccaccacctgccccagagcagcagaccatgcccccaccaggctccccttctggtggcgcagggagtcctggaggcctgggtcttgagagcctgtcaccggagttttttacctcagtggtgcagggtgtgctcagctccctgctgggctccctgggggctcgggctggcagcagtgaaagtattgctgccttcatacaacgcctcagtggatccagcaacatctttgagcctggagctgatggggcccttggattctttggggccttgctttctcttctgtgccagaacttctctatggtggacgtagtgatgcttctccatgggcatttccagccactacaacggctccagccccagctgcgatccttcttccaccagcactacctgggtggtcaggagcccacacccagtaacatccggatggcaacccacacattgatcacggggctagaagagtatgtgcgggagagtttttccttggtgcaggttcagccaggtgtggacatcatccggacaaacctggaatttctccaagagcagtttaatagcattgctgcgcatgtgctgcattgcacagatagtggatttggggcccggttgctggagttgtgtaaccaaggcctgtttgaatgcctggccctaaacctgcactgcttggggggacagcagatggagcttgctgctgttatcaatggccgaattcgtcgtatgtctcgtggggtgaatccctccttggtgagctggctgaccactatgatgggactgaggcttcaggtggtactggagcacatgcctgtaggccctgatgccattctcagatacgttcgcagggttggtgatcccccccagccacttcctgaggagccaatggaagttcagggagcagaaagagcttcccctgagcctcagcgggagaatgcttccccagcccctggaacaacagcagaagaggccatgtcccgaggtccacctcctgctcctgaggggggctcccgggatgaacaggatggagcttcagctgagacagaaccttgggcagctgcagtccccccagaatgggtccctattatccagcaggacattcagagccagcggaaggtgaaaccgcagccccctctgagtgatgcctacctcagtggtatgcctgccaagagacgcaagacgatgcagggtgagggcccccagctgcttctctcagaggctgtgagccgggcagctaaggcagccggagctcggcccctgacgagccccgagagcctgagccgggacctggaggcaccagaggttcaggagagctacaggcagcagctccggtctgatatacaaaaacgactgcaggaagaccccaactacagtccccagcgcttccccaatgcccagcgggcctttgctgatgatccttag

SEQ ID NO: 44769 - DNA, 273 bp, Homo Sapiens
atggtaaaggacatcctggctgaagagggactgcactttgatgagttgaacaagctgtgggtgttggactcagaggttacccagcagaccacagagctcaaagaagagtgcaagaactttgcggacaaaactggccagtttcagaaaacagttggtggtttaattgagcttgttgataaacttgcaaaaaaagcgaaatgcgaagatgagggccatggtgctccgaacttgctcaaatcaatagcaaagcagagagaagctcaacaacttcag

SEQ ID NO: 44770 - DNA, 735 bp, Homo Sapiens
atgcattacggagcagcaacccacatacagaactcgagaagccacggcctggagactgtacctggacaccaaagactggagagaggagctggtggggaaaccccagagttcccagggtgccactccccagctccaccagagaactttgggaatgagctgctgcccctgagtgcccctctccagggcctcagtgagggtctctaccctccagggaggaacaaaaccttgccagctggggtcctgcgagagggggcagttcaattcctccacaggggactctgcaactccaatctttcgagtgaagcatctgcgaggccctcagggacccaggatgaactgcatagcagcagaaggaagacaggccagaccaggcgggagggagcccggaaacatctggtttgtagtttcagactctacccgttcacagttcacacagtctcaccgggaaactcacaccttgccctgtaccaagtttttaaggcagttaagctctgcccatccgagacttcatttttcttgagtagaaaatcactgaaatcatcagatccatggcacccaccttcactttctcctaacagctggaaccgtcaggctggcttcagggcctggtcttcgcacttgatatcactatccctcacctgctcagacagccagagcaggcgggtgagttcctcccaacaacctccactgcattctctcagctcccaccgcagggcagcccacgtgcctgagtga

SEQ ID NO: 44771 - DNA, 1288 bp, Homo Sapiens
agctgagagggcgtcaccagcgtgtcggcgcctgcggttttcttcgggctgtccccaggcgtcgtgcccgcgtccgtcacgcgcggtggcttgcaggggcgcaccgcgacagccttaaaggaaaacctgttagggacaagggctgctgtgggcagcgagggttatagactcatgtgtgttctgaattctggtgggggtagtgatggacgctgacccagttcacagaattatctgactggcgaagtaaaggtacttgaattgcaggaaaaaaggtcaaggtgaactgaagaaaataagtctttccccaaaggaggtagaagatggggaagatgagatgtcagaagctaaggacaatggcagtagagatgaggttcttgtccctcataagaattgcaggaagaataccactgtcccgggaaagaaaggggaggaaaagtctctggctcctgtgtttgctgagaagttaatatcaccaagcaggaggggagccaagctcaaggaccgtgagagccaccaggagaatgaagacaggaacagtgagttggaccaggatgaggaagataaagaatccttctgtagggggttcccgatgagtggctgtgagttagagacaagctgctgtgtgtgccattctacagcacttggggagaggttctgttaaaaatccatccctctgaaaactgccttggcaattcccggctgattcttcgggatgggcctcattgatggggagtctcagtggatgtttgacttttgctttctacctgaccctagtcagagattttttctttttccttttttttttttttttttttctgagacagagtcttgctctgtcacccaggttggagtgcattggtgtggtcttggctcactgcagcctctgcctcctgagtagctgggactacaggcgcacaccaccacactggctaatttttgtatttttagtagagatggggtttcgccatgttggccaggccatcttgaactcctgacctgaagtgaccttcccaccttggccccccaaagtgctgggattacaggcatgagccaccatgcctagcccagaaattttctctttgaatactatacattgatgagttctgtctttatgcttatgatccacgcaggtaggtcgtctcagatttaattttcagtggtttttttctgtcttgatggagtctgtgtaacatttaaaatattgctaccaaagcagtaattcttactatagttattaaaatgcaagaacaatatatttaaaattatttcataataaagttaaaatgag

SEQ ID NO: 44772 - DNA, 456 bp, Homo Sapiens
aagggtgagtctgagttgaaaatgcagaagaggagaggcaggttctggagcaggtggcggggtgcatttcaacaaccacagcagactgcccagtggttcgctgtgggggatggtgtggatcagaagcacagaccagtggacacacttgggtcagatggaggcccctgtctctccgcatcttccctcttcccaccccccagaaatgtccagttccatccaacatgccaaccccttttcatgcatccatgcatgtacacatttttctttgtactcagaatgccctacctggcaaaaattcccagccttcaaaacgcccctcagagatcactgcttctggtctgttctgcctctttattgcacctgttgtaccatgatgacatttttcccgtctgcctcacctgtctgcattccttagggaaacttgtctgccttcgaaatcgtcagcggagcttttga

SEQ ID NO: 44773 - DNA, 777 bp, Homo Sapiens
tcaagagtggggtcagcaagagaaactctacggctatgggagagcctgcgttcacctcttttccgagcccacctgttctggggaagctcaaaagaaacatgatgccctgggctttacagaagaaacgagaaatccacatggccaaggcccatcggagacgagctgcgaggtctgctctccccatgagactcaccagctgcatcttccggaggccggtgacaaggatcaggtctcatcctgacaaccaggtcagacgcagaaaaggggacgagcacctggagaagccgcagcaactctgcgcctaccggagactgcaggccctgcagccctgcagcagccaaggagaaggttcaagtccactgcatttggagagcgtcttaagtatccttgcaccggggacggccggtgaatctctggacagggctggtgctgagcgtgtgcgcagcccgcttgagcctacccctgggcggtttccagctgtggcaggggggccaaccccaggaatgggttgtcagctcccaccgcccctctctggccaattggtgactcctgcagatatccggagacaggccaggagggtgaagaaagccagggagagactggccaaggccttgcaggcagacaggctggccaggcaggcagaaatgctgacaggtggatgaagctcagtcctgggctttcggtccctttcttttaatgcccatcctcattcctactctgaattgtcacacttttcccttccccaccagttctttaataaaagtatttgaaaggcaa

SEQ ID NO: 44774 - DNA, 468 bp, Homo Sapiens
atggctaaaagaccgggaccccctggaagccgggaaatgggactgttgacattcagagacatagctatagaattctctctggaggaatggcaatgcctggattgtgctcagcggaatttatatagagatgtgatgttagagaactacagaaacttggtctccctgggtattgctgtctctaagccagacttgatcacctgtctggagcaaaataaagagtcccagaatataaagagaaatgagatggtagccaaacgcccagatgtccagttttcaacatcatctgttgaagggattatattttctccattgtctgctcatggcaaccttgaggcagattatttggtcatacacagaagagttcattgctgggctttctattttgttctatcatgtctttatctgtctttttgtgaataccacatagttattgttattgcagctttttattatgttttgaaattatga

SEQ ID NO: 44775 - DNA, 1010 bp, Homo Sapiens
cctcgcccaccactgccgcctccttctgccgctcctggtgctgcttgtgtgctcgtttggtgcggacctggtacctcttttgtgaagtggcagctgaggagaccggcgctcgccatggccgacgaaaagcccaaccaaggagtcaagtcggagaacaacgatcatactaatttgaaggtggcggggcaggatggttctgtggtgcagtttaagattaagaggcatacaccacttagtaaactaatgaaagcctattgtaagcaacagggattgtcaatgaggcagatcagattccgattcgacgggcaaccaatcaaggaaacagacacacctgcacagttggaaatggagaatgaagatacaattgatgtgttccaacagcagacgggaggtgtctactgaaaagggaacctgcttctttactccagaactctgttccttaaagaccaagattacattctcaattagaaaactgcaatttggttccaccacatcctgactactaccatatggttttctctgttctttcatttcccccttccccattcctttattgtacataactggtatatgtgcacaagcatattgcattttttttaactaaacagccaatggtatgttttgattgacatcaagtggagacgggatggggaaaaagtactgattctgtgaaaataccccctttctccattagtggcatgctcattcagctctttatattccagtaagttattttgctctcactgttttaacaacaaaaaaaacacacaaaaatccttgcataccttgttcaattgcagaattttaatgtttttcacttatcattgtaaaaccaaggacaattttataacttttttgtacatagctgttacatgtagggcaatctgtctttaagtagggacaaattaaaacaaaaaaagaaacctagatagttttcccttcaagtcaagcgtcttgttgtttaaataaacttcttgtttaaaaaaaaaaaaagaaagaaagaaaagaaa

SEQ ID NO: 44776 - DNA, 524 bp, Homo Sapiens
gcctgtcttttctgtgggatacacaggacagtgccatgattctagtagatggtagatgtgagccagcccgaaggaacatcaaggagagttccaggaatgaaccgtgaaatccctaaggatccaaaaggatatgcagaaagaagagcagcacgtcatacccaagaccaacatctctcagtgtttcacgctaacccaaggagagacactagcagtcttctctgcaggaccccttgaatttacattgaattccatccccagccgagcaggtgcttaaagtcaacaggggacactccattttcttggaatttcattctggcaaagagggtgtgagcagcaataaggtgcttcacatcatgaagggatatttttccatcatcttgggatttcattctgggacatagagtatgagccacaataaggtcagagaggagtgaggatacaatcttgtgaggggtgaactgggtccagcaactttgcctgcaaaaataaataaattaattaattaattagtaaatgaagacaga

SEQ ID NO: 44777 - DNA, 351 bp, Homo Sapiens
atgtcatcattgccaagaagagcgaaagtacaggtccaggatgtggtactgaaagatgaattttcttcattctctgagttatcatctgcctctgaagaagatgacaaggaagatagtgcctgggagccccaaaagaaagttcccagaagccgtaaacagccccctcccaaggaatccaaaccaaagaggatgcctcgggtgaagaagaatgccccacagatcagtgatggctcagaagtcgttgttgttaaggaggagctgaatagctctgtggctattgctgatactgctttagaagacagaaaaaataaattggatactgtacagactctgaaaacagccaagacaaaa

SEQ ID NO: 44778 - DNA, 1170 bp, Homo Sapiens
atgagctgccacttcccagggagccctccgtgggctcttgctggtcagcccggggcctcagcccccgactggtccacacctgacccattcgccgccttcctgctctcccaggtgcaagccctggaacagcgcaaccagctgctggagacacgctggagcttcctgcagggccaggactcagccatcttcgacctcgggcatctctatgaggaatatcagggccggctgcaggaggaactgcgcaaagtgagccaggagcgggggcagctggaggccaacctgctgcaggtgctggagaaggttgaggagtttcgaatcaggtatgaggatgagatctccaagcgcacagacatggagttcacctttgttcagctgaagaaggacctggatgcagagtgtcttcatcggactgaactggaaaccaagttaaaaagcctggagagcttcgtggagttgatgaaaaccatctatgagcaggagctgaaggacctggcagcacaggtgaaggatgtgtcggtgaccgtcggcatggacagccgctgccacatcgacctgagcggcatcgtggaggaggtgaaggcccagtatgacgccgtcgcggctcgcagcctggaggaggccgaggcatactctcggagccagctggaggagcaggccgcccgctcggccgagtatgggagcagcctccagagcagccgcagcgagatcgcggatctcaatgtgcgcatccagaagctgcggtcccagatcctctctgtcaagagccattgcctgaaactggaggagaacatcaagacagctgaggagcagggtgagctggccttccaggatgccaagaccaagctggcccagctggaggccgccctgcagcaggccaagcaggacatggcgcggcagctgcgcaagtaccaggagctgatgaacgtcaagctggccctggacatcgagatcgccacctacaggaagctggtggagggcgaggagggcaggatggactcgccctcagccactgtggtcagcgctgtgcagtccaggtgcaaaaccgctgcctccagatcaggcctctccaaggccccctcccgaaagaagaagggcagcaaaggccccgtgatcaaaatcaccgaaatgtcagagaagtacttctcgcaggagtcggaggtctcagagtaa

SEQ ID NO: 44779 - DNA, 570 bp, Homo Sapiens
gcagctcctgccaaaaagccagtggctgtggccccagctcctggatgtaccctggacatcaatgacccacaggtccagagtgcggccattcgtatccaggcctcttaccggggccacaggtcccggaaggagctgcgcgagaaggggccgccgcgggtgctggagccgctgaaggacgtggtgctgatcgaaggcagcgcggccaagctcacttgccgcatttcggctttcccggacccattcatccgctggagtaaggacggcaaggagctacgtgacggtcccaagtaccgctacgtcttcgaggaccctgacgtggtggcactggtggtgcgcgacggcgagctggcagacctgggccagtacagcatcaacgtcaccaaccccttcggccagtgctccgactcggcgcgcatcctcgtggaagtcccgacgaagattcaaaagggacccgacaacactaaggcgcgcaaaggcaccaccgtgacgctgactgcggagatcctgggagagcctgcgcccgacgtaggctggaccaaggacggggaggacatcgaggaggatgacagg

SEQ ID NO: 44780 - DNA, 1033 bp, Homo Sapiens
cggagctgctctgccgcggggactgcaccgcccgccctgccagacccgcccggaacggggctcgtcgccgccagtagccgcagcaccgcagccttgggcctcgcgccggctatggccgtgccctggggctgagccctcagggttgtgaccgagattcccgacgagagagactgaggggaagagaggaaggaggggcgggctcctggcaaggcattcgctcctgagcggaatcctgcaaaggatggagaaggaggagacaacccgggagctgctgctgcccaactggcagggtagtggctcccacgggctgaccatcgcccagagggacgacggcgtctttgtgcaggaggtgacgcagaactcccctgcggcccgcactggggtggtcaaggagggggaccagattgtgggtgccaccatctactttgacaacctgcagtcgggtgaggtgacccagctgctgaacaccatggggcaccacacggtgggcctgaagctgcaccgcaagggggaccgctctcccgagcctggccagacctggacccgtgaagtcttcagctcctgcagctctgaagtggttctgaacacaccacagccatcagcactggaatgcaaagaccagaacaaacagaaggaagccagcagccaagccggggcagtttcagtctccaccccaaatgcaggactgtagaagcggccaggaagaaaaccaccccctcttaaggttgtttttgtgaccgttctttggagcattgttctaaaaatgggaaattacatattgctgtgccaagggcaacaaacacctgcagttaaaggaataccttccgcgaggcggcttttcggagcatgcatgtttatagctccagccaggccagaccgagggctgctgcataagccctgcttggtgcatttctttacttgcaaggggacagagtgtgggcttaggtttgggactagagggggctttggcaactatggtgctcaggtgattatccttcgctcgtttatccaataaacatttatcaagcatctg

SEQ ID NO: 44781 - DNA, 246 bp, Homo Sapiens
atgttttctctgtttattgagaacagatatcttcatctccttcatgcattatccttagtaacagatgtcagtaggatccagagccattttggaactttaccaaggattaaggatgagcacagatcacatcaagagtctaaatatcactttggaggccatgtgcagatcagatttggaagtgaccaagactggaggcagggacaccagagttttctgttaaaaactggtccatgcaagaaaagatga

SEQ ID NO: 44782 - DNA, 1329 bp, Homo Sapiens
gtacttcccaaacatagtaagttaaacacaattgcagtgtgtaaaaacgtaaatgctggtggacaaagtggtagtctttccattgatacagaactgttagaacaacatatttctttcaaaaagcaaagtccccatgaaaactcatcactcatcagaaaattcccacagccaacccttgtgtgtgcttctgaccgtgatctgcacagcccgaggaagaaagatactcaagttctttcagagtcagaattccatgtgactccagaaaaaaacaaacaatatcatgtatggtttcaagaaagaaatacatgtgaatctgttgatttaaggacccagagaaatgctactggttcagctgtttcatgtgaaactcagatttctgaagattttgttgatattcagacagatattgagagtccagctgacttggacgagtgttcatgtcttgaagtaagtgagagtgaggaatgtgtgtttctggaagccaactcttatttaagtcaggaatcagaaaacattctatttgaattacagacaggcattcctttggaaaatgtctacaaaatcacgactgatttgaaatcattttacagtgaagattcaggttcccattgtactagagagtgcagaaaggaaaccttaattattacaccaccttcctgtaagtcccacaaaagcaggaaatatagatcatcttccaaaatgaaatctcctgactggttgtgtcatagttcatcaaatactgcggaaattcagtctaggtcatctagtgtatcattcagtgaagagaagatttcatggactaccaagagcagaacaagttactcttcagctcccttaactgaatcaaatattaaatcacatcttgcaaaaaaccaaggcaagtctcacaggcacccagaaagccaagaaagaaagaaggccagatctgatttatttaggaagaacagcagtcattgggaccacgattacagttgtacacacagcaaagggaaacgtgacagaaagaagagagtgtatgattatgagtcagaaagattggattgtttccaaagcaaacataaatcagcatcaaaacctcatcatgacgatatcaacttctattctgaaagaaaacaaaaccggccctttttttttgcctgtgtaccggcagactcactggaggttatacccaaaaccattcgctggactattccccctgaaaccttaaggaaaagaaacttcagaattcccctagtggcaaagatttcaagttcttggaatatatggagttcctccaaaaagttgttggggtcgctctcggggtcccttactaccgtttttcatagctga

SEQ ID NO: 44783 - DNA, 1899 bp, Homo Sapiens
agtagaatcaaggtgtttgccaacaggaccctggtggtgaaatcaatgacagacaaagacgccggagattacctgtgtgtagctcgaaataaggttggtgatgactgcgtggtgctcaaggtggatgtgatgatgaaaccggccaagattgaacacaaggaggagaacgaccacaaagtcttctacaggggtgacctgaaagtggactgtgtggccactggacttcccaatcccgagatctcctggagcctcctggatgggagtctggtgaactccttcatgcagtcagatgacagtggtggacgcaccaagcactatgtggtcttcaacaatgggacactctacttcagtgaagtggggatgagggaggaaggagactacacctgctttgctgaaaatcaggttgggaaggatgagatgagagtcagagtcaagatggtgacacctgccaccatctggaacaagacttacttggcagttcaggtaccctatggagatgtggtcactgtaacctgtgaggccaaaggagaacccatgcccaaggtgacttggttgtccccagccaacagggtgatccccacctcctctgagaagtatcagatataccaatatggcactctccttattcagaaagcccagtgctctgacagcggcaactacacctgcctggtcaggaacagtgccggagaggataggaagacagtgtggattcacgtcaacctccagccacccaagatcaatggtaaccccaaccccatcaccaccgtgtgggagatagcagccgggggcagtcggaaactgattgactgcaaagctgaaggcatccccaccccgagggtgttatgggcttttcccgagggtgtggttctgccagatccatactatggaaaccggatcactgtccatggcaacggttccctggacatcaggagtttgaggaagagcgactccgtccagctggtatgcatggcacgcaacgagggaggggaggcgaggttgatcgtgcagctcactgtcctggagcccatggagaaacccatcttccacgacccgatcagcgagaagatcacggccatggcgggccacaccatcagcctcaactgctctgccgcggggaccctgacacccagcctggtgtgggtccttcccaatggcaccgatctgcagagtggacagcagctgcagcgcttctaccacaaggctgacggcatgctacacattagcggtctctcctcggtggacgccggggcctaccgctgcgtggcccgcaatgccgcgggccacacggagaggctggtctccctgaaggtgggactgaagccagaagcaaacaagcagtatcataacctggtcagcatcatcaatggtgagaccctgaagctcccctgcacccctcctgcagctgggcagggacatttctcctggacactccccaatggcatgcatctggagggcccccaaaccctgggacgcgtttctcttctggacaatggcaccctcacggttcgtgaggcctcggtgtttgacaggggtacctatgtatgcaggatggagacggcgtacggcccttcggtcaccagcatccccgtgattgtgatcgcctatcctccccggatcaccagcgagcctaccccagtcatctacacccgtcccgggaacaccgtgaaactgaactgcatggctatggggattcccaaaggtgacatcacgtgggagttaccggataagttgcatctgaaggcaggggttcaggctcgtctgtatggaaacagatttcttcacccccagggatcactgaccatccagcaggccagacggagagacgctggcttctacaagtgcacggcaaaaaacattctcagcagtgactccaaaacaacttatatccatgtcttctga

SEQ ID NO: 44784 - DNA, 1473 bp, Homo Sapiens
atggatccttttgtggtccttgtgctctgtctctcatgtttgcttctcctttcaatctggagacagagctctgggagaggaaaactccctcctggccctactcctctcccagtgattggaaatatcctacagatagatattaaggatgtcagcaaatccttaaccaatctctcaaaaatctatggccctgtgttcactctgtattttggcctggaacgcatggtggtgctgcatggatatgaagtggtgaaggaagccctgattgatcttggagaggagttttctggaagaggccatttcccactggctgaaagagctaacagaggatttggaatcgttttcagcaatggaaagagatggaaggagatccggcgtttctccctcatgacgctgcggaattttgggatggggaagaggagcattgaggaccgtgttcaagaggaagcccgctgccttgtggaggagttgagaaaaaccaaggcttcaccctgtgatcccactttcatcctgggctgtgctccctgcaatgtgatctgctccattattttccagaaacgtttcgattataaagatcagcaatttcttaacttgatggaaaaattgaatgaaaacatcaggattgtaagcaccccctggatccagatatgcaataattttcccactatcattgattatttcccgggaacccataacaaattacttaaaaaccttgcttttatggaaagtgatattttggagaaagtaaaagaacaccaagaatcgatggacatcaacaaccctcgggactttattgattgcttcctgatcaaaatggagaaggaaaagcaaaaccaacagtctgaattcactattgaaaacttggtaatcactgcagctgacttacttggagctgggacagagacaacaagcacaaccctgagatatgctctccttctcctgctgaagcacccagaggtcacagctaaagtccaggaagagattgaacgtgtcgttggcagaaaccggagcccctgcatgcaggacaggggccacatgccctacacagatgctgtggtgcacgaggtccagagatacatcgacctcatccccaccagcctgccccatgcagtgacctgtgacgttaaattcagaaactacctcattcccaagggcacaaccatattaacttccctcacttctgtgctacatgacaacaaagaatttcccaacccagagatgtttgaccctcgtcactttctggatgaaggtggaaattttaagaaaagtaactacttcatgcctttctcagcaggaaaacggatttgtgtgggagagggcctggcccgcatggagctgtttttattcctgaccttcattttacagaactttaacctgaaatctctgattgacccaaaggaccttgacacaactcctgttgtcaatggatttgcttctgtcccgcccttctatcagctgtgcttcattcctgtctga

SEQ ID NO: 44785 - DNA, 2487 bp, Homo Sapiens
atgcgcttggagggagagggccgctcagcgagggcgggacagaacctctcccgggctgggagtgcacggcgcggtgcgcccagggacctcagcatgaacaacctcacagagcttcagcctggcctcttccaccacctgcgcttcttggaggagctgcgtctctctgggaaccatctctcacacatcccaggacaagcattctctggtctctacagcctgaaaatcctgatgctgcagaacaatcagctgggaggaatccccgcagaggcgctgtgggagctgccgagcctgcagtcgctagacctgaattataacaagctgcaggagttccctgtggccatccggaccctgggcagactgcaggaactggggttccataacaacaacatcaaggccatcccagaaaaggccttcatggggaaccctctgctacagacgatacacttttatgataacccaatccagtttgtgggaagatcggcattccagtacctgcctaaactccacacactatctctgaatggtgccatggacatccaggagtttccagatctcaaaggcaccaccagcctggagatcctgaccctgacccgcgcaggcatccggctgctcccatcggggatgtgccaacagctgcccaggctccgagtcctggaactgtctcacaatcaaattgaggagctgcccagcctgcacaggtgtcagaaattggaggaaatcggcctccaacacaaccgcatctgggaaattggagctgacaccttcagccagctgagctccctgcaagccctggatcttagctggaacgccatccggtccatccaccccgaggccttctccaccctgcactccctggtcaagctggacctgacagacaaccagctgaccacactgcccctggctggacttgggggcttgatgcatctgaagctcaaagggaaccttgctctctcccaggccttctccaaggacagtttcccaaaactgaggatcctggaggtgccttatgcctaccagtgctgtccctatgggatgtgtgccagcttcttcaaggcctctgggcagtgggaggctgaagaccttcaccttgatgatgaggagtcttcaaaaaggcccctgggcctccttgccagacaagcagagaaccactatgaccaggacctggatgagctccagctggagatggaggactcaaagccacaccccagtgtccagtgtagccctactccaggccccttcaagccctgtgagtacctctttgaaagctggggcatccgcctggccgtgtgggccatcgtgttgctctccgtgctctgcaatggactggtgctgctgaccgtgttcgctggcgggcctgtccccctgcccccggtcaagtttgtggtaggtgcgattgcaggcgccaacaccttgactggcatttcctgtggccttctagcctcagtcgatgccctgacctttggtcagttctctgagtacggagcccgctgggagacggggctaggctgccgggccactggcttcctggcagtacttgggtcggaggcatcggtgctgctgctcactctggccgcagtgcagtgcagcgtctccgtctcctgtgtccgggcctatgggaagtccccctccctgggcagcgttcgagcaggggtcctaggctgcctggcactggcagggctggccgccgcgctgcccctggcctcagtgggagaatacggggcctccccactctgcctgccctacgcgccacctgagggtcagccagcagccctgggcttcaccgtggccctggtgatgatgaactccttctgtttcctggtcgtggccggtgcctacatcaaactgtactgtgacctgccgcggggcgactttgaggccgtgtgggactgcgccatggtgaggcacgtggcctggctcatcttcgcagacgggctcctctactgtcccgtggccttcctcagctttgcctccatgctgggcctcttccctgtcacgcccgaggccgtcaagtctgtcctgctggtggtgctgcccctgcctgcctgcctcaacccactgctgtacctgctcttcaacccccacttccgggatgaccttcggcggcttcggccccgcgcaggggactcagggcccctagcctatgctgcggccggggagctggagaagagctcctgtgattctacccaggccctggtagccttctctgatgtggatctcattctggaagcttctgaagctgggcggccccctgggctggagacctatggcttcccctcagtgaccctcatctcctgtcagcagccaggggcccccaggctggagggcagccattgtgtagagccagaggggaaccactttgggaacccccaaccctccatggatggagaactgctgctgagggcagagggatctacgccagcaggtggaggcttgtcagggggtggcggctttcagccctctggcttggcctttgcttcacacgtgtaa

SEQ ID NO: 44786 - DNA, 2879 bp, Homo Sapiens
ttcgtcccgggcggtgcgttccactgctctggggccggcgccgcgcccagtcccgcttcgggccgcaagccccaccgctcccctccccgggcaggggcgccgcgcagcccgctcccgccgccacctcctcccctgccgccctcctagccggcaggaattgcgcgaccacagcgccgctcgcgtcgcccgcatcagctcagcccgctgccgctcggccctcggcaccgctccgggtccggccgccgcgcggccagggctccccctgcccagcgctcccaggccccgccacgcgtcgccgcgcccagctccagtctcccctccccggggtctcgccagccccttcctgcagccgccgcctccgaaggagcgggtccgccgcgggtaaccatgcctagcaaaaccaagtacaaccttgtggacgatgggcacgacctgcggatccccttgcacaacgaggacgccttccagcacggcatctgctttgaggccaagtacgtaggaagcctggacgtgccaaggcccaacagcagggtggagatcgtggctgccatgcgccggatacggtatgagtttaaagccaagaacatcaagaagaagaaagtgagcattatggtttcagtggatggagtgaaagtgattctgaagaagaagaaaaagcttcttttattgcagaaaaaggaatggacgtgggatgagagcaagatgctggtgatgcaggaccccatctacaggatcttctatgtctctcatgattcccaagacttgaagatcttcagctatatcgctcgagatggtgccagcaatatcttcaggtgtaacgtctttaaatccaagaagaagagccaagctatgagaatcgttcggacggtggggcaggcctttgaggtctgccacaagctgagcctgcagcacacgcagcagaatgcagatggccaggaagatggagagagcgagaggaacagcaacagctcaggagacccaggccgccagctcactggagccgagagggcctccacggccactgcagaggagactgacatcgatgcggtggaggtcccacttccagggaatgatgtcctggaattcagccgaggtgtgactgatctagatgctgtagggaaggaaggaggctctcacacaggctccaaggtttcgcacccccaggagcccatgctgacagcctcacccaggatgctgctcccttcttcttcctcgaagcctccaggcctgggcacagagacaccgctgtccactcaccaccagatgcagctcctccagcagctcctccagcagcagcagcagcagacacaagtggctgtggcccaggtacacttgctgaaggaccagttggctgctgaggctgcggcgcggctggaggcccaggctcgcgtgcatcagcttttgctgcagaacaaggacatgctccagcacatctccctgctggtcaagcaggtgcaagagctggaactgaagctgtcaggacagaacgccatgggctcccaggacagcttgctggagatcaccttccgctccggagccctgcccgtgctctgtgaccccacgacccctaagccagaggacctgcattcgccgccgctgggcgcgggcttggctgactttgcccaccctgcgggcagccccttaggtaggcgcgactgcttggtgaagctggagtgctttcgctttcttccgcccgaggacaccccgcccccagcgcagggcgaggcgctcctgggcggtctggagctcatcaagttccgagagtcaggcatcgcctcggagtacgagtccaacacggacgagagcgaggagcgcgactcgtggtcccaggaggagctgccgcgcctgctgaatgtcctgcagaggcaggaactgggcgacggcctggatgatgagatcgccgtgtaggtgccgagggcgaggagatggaggcggcggcgtggctggaggggccgtgtctggctgctgcccgggtaggggatgcccagtgaatgtgcactgccgaggagaatgccagccagggcccgggagagtgtgaggtttcaggaaagtattgagattctgctttggagggtaaagtggggaagaaatcggattcccagaggtgaatcagctcctctcctacttgtgactagagggtggtggaggtaaggccttccagagcccatggcttcaggagagggtctctctccaggactgccaggctgctggaggacctgcccctacctgctgcatcgtcaggctcccacgctttgtccgtgatgcccccctaccccctcactctccccgtctccatggtcccgaccaggaagggaagccatcggtaccttctcaggtactttgtttctggatatcacgatgctgcgagttgcctaaccctccccctacctttatgagaggaattccttctccaggcccttgctgagattgtagagattgagtgctctggaccgcaaaagccaggctagtccttgtagggtgagcatggaattggaatgtgtcacagtggataagcttttagaggaactgaatccaaacattttctccagccggacattgaatgttgctacaaagggagccttgaagctttaacatggttcaggcccttggtgtgagagcccagggggaggacagcttgtctgctgctccaaatcacttagatctgattcctgttttgaaagtcctgccctgccttcctcctgcctgtagcccagcccatctaaatggaagctgggaattgcccctcacctcccctgtgtcctgtccagctgaagcttttgcagcactttacctctctgaaagccccagaggaccagagcccccagccttacctctcaacctgtcccctccactgggcagtggtggtcagtttttactgc

SEQ ID NO: 44787 - DNA, 312 bp, Homo Sapiens
atgtccatcaggttgacccagaagtcctacaaggcgtccacctctatccccgggaccttcagtaggtgctcttatgccagggggcctggggctcacattggctccttgagcttctcccgagtaggcagcagcagattccagggtaccctaggcagaggccatggtggggccagcagtataaccagggccatggtcaaccagagcctgctgaacccccttaacctggaggtggacccaaacatccaggccgtgtgcacccaggagaagaagcagattaagactctcagcaagtttgcctccttcatcgacaag

SEQ ID NO: 44788 - DNA, 291 bp, Homo Sapiens
atggaagcgcccgcagagcgggcgcttccacgtctgcaggctctggctcggccgccgccacccataagctacgaggaggagctttacgactgcctggactactactacctgcgcgacttcccggcctgcggggcagggcgcagcaagggccggactcggcgcgagcaggcggcaccaactggcctgcacctggcgggcacgagcgcaaggtcgcgcagaagctcctcaatggccagcgcaagcgccgccagcgccagctgcatcccaagatgcgcactcgcctcacctgag

SEQ ID NO: 44789 - DNA, 969 bp, Homo Sapiens
atggaaagagccaggcgaaggggaggcggcggcggccgcggccgcggaggcaagaatgtagggggctctggcctaagcaagagtagactctatccccaggcccagcactcccactacccccactacgcggcctcagccacccctaatcaggccgggggcgcagccgaaatccaggagctggcctccaaacgagtggacatccagaaaaagaggttttacctagacgtgaagcaaagctcccggggccgcttcctaaagatagccgaagtctggatagggagaggccggcaggacaacatcagaaagagtaaactgaccctctccctgtctgtggcagcggagctgaaggactgtctaggggacttcatcgagcactatgcccacctgggcctgaaaggccaccggcaagagcatggccacagcaaagagcaaggctccagaaggaggcagaagcactcggcaccctccccaccagtctcggtggggtccgaagagcatcctcacagtgtcctgaaaacagactatatcgagagggacaataggaaatattacctagacctaaaggaaaatcagcggggtcgcttcctacggattagacaaaccatgatgcgggggactggcatgataggttattttggccacagtttgggccaagaacagactattgtcctcccagcacaaggaatgattgagtttcgtgatgccttggttcagctgattgaagactatggcgaaggagacatagaagaacgaagaggtggagacgatgacccgcttgaactcccagaggggacttctttcagagtggacaataaaaggttctactttgatgtgggctctaataaatatggaattttcctgaagctcacaaattaccccaaatccagagagaatatcaacctttttcactgttgtcaaatcaagcataaggaacagccccatgatactacaaaaacagttgaggaataa

SEQ ID NO: 44790 - DNA, 963 bp, Homo Sapiens
gcccaagcaaagcaggatttcgttcagcactactcccagatcgttagggtgctgactgaggatgagatggggcacccagagacaggagatgctactgcccggctcaaggaggtcctggagtacaatgccattggaggcaagtatcaccgaggtttgatggtgctagtagcgttccgggagctggtggagccgaggaaactggatgctgatagtctccagtgggcaccgactgtgggctggtatgcgcaactgctgcaagctttcttcctggtggcagatgacattatggattcatcccttacctgccagggacagatctcctggtatcagaagctgggcatgggtttggatgccatcaatgatgctatccttctggaagcatgtatctactgcctgctgaagctgtattgccgggagcagccctattacctgaacctgatggagctcttccagcagaattcttatcagactgagattgggcagaccctcgacctcatcacaaccccccagggcaatgtggatcttcgcagatgcaccgaaaaaaggcacaaatctgttgtcaagtacaagacagctttctactccttctaccttcctgtagctgcagccatgtacatgtcaagaatggatgacaagaaggagcacaccagtgccaagaagatcctgctggagattcaagagttctttcagattcaggatgattaccttgacttctctggggaccccagtgtgactggcagagttggcaatgacttccaggacaacaaatgcagctggctggtggttcagtgtctgctacaggccactccagaacagtaccagatcctgaaggaaaattacaggcagaaggaggccgagaaggtggcccgggtgaaggcactatacgaggagctggatctgccagccgtgttcttgcagtatgagaaagacagttacagccacgttatgggtctcatcgaatag

SEQ ID NO: 44791 - DNA, 14758 bp, Homo Sapiens
atgtcgggtgaggacgctgaggtccgggcagtctctgaagatgtctccaatggaagcagtggctcgcccagccctggggacacactgccctggaaccttgggaaaacgcagcggagccggcgcagcgggggtggcgctgggagcaacgggagtgtcctggacccagctgagcgggcggtcattcgcatcgcagatgagcgggatcgtgtgcagaagaaaaccttcaccaagtgggtcaacaagcacctcatcaaggcccagaggcacatcagtgacctgtatgaagacctccgcgatggccacaacctcatctccctgctggaggtcctctcgggggacagcctgccccgggagaaggggaggatgcgtttccacaagctgcagaatgtccagattgccctggactacctccggcaccgccaggtgaagctggtgaacatcaggaatgatgacatcgctgacggcaaccccaagctgacccttggcctcatctggacaatcattctgcacttccagatctcagatatccaggtgagtgggcagtcggaggacatgacggccaaggagaagctgctgctgtggtcgcagcgaatggtggaggggtaccagggcctgcgatgcgacaacttcacctccagctggagagacggccgcctcttcaatgccatcatccaccggcacaagcccctgctcatcgacatgaacaaggtgtaccggcagaccaacctggagaacctggaccaggccttctctgtggcggagcgggacctgggagtgacgcggctcctggaccctgaggacgtggatgtccctcagcccgacgagaagtccatcatcacctacgtctcgtcgctgtatgacgccatgccccgcgtgccggacgtgcaggatggggtgagggccaacgagctgcagctgcgctggcaggagtaccgggagctggtgctgctgctgcttcagtggatgcgacaccacacggccgcctttgaggaacgcaggttcccctccagcttcgaggagattgagatcctgtggtctcagttcctgaagtttaaggagatggagctaccagccaaggaggccgacaagaacaggtccaagggcatctaccaatccctggagggagcggtgcaagcaggccagctcaaggtgccccctggctaccacccgctggatgtggagaaggagtggggcaagctgcacgtggccatcctggagcgggagaagcagctccgcagcgagtttgagaggctggagtgtcttcagcgcatcgtgaccaagctgcagatggaggcggggctgtgtgaggagcagctgaaccaggccgacgccctgctgcagtcggatgtccggctgctggctgcaggcaaagtgccacagcgggcgggggaggtggaacgggacttggacaaggcggatagcatgatccggctgctcttcaacgacgtgcagaccctcaaggatggacggcacccgcagggcgagcagatgtaccgcagggtgtaccgtctgcacgagcgcctggtagccatccgcaccgagtacaacctacggctgaaggcaggcgtggcggcccctgcaacccaggtggcccaggtgactctgcagagtgtgcagaggcgccccgagctggaggactccactctgcgctacctgcaggacctgctggcctgggtggaggagaaccagcaccgtgtggatggcgctgagtggggtgtggacctgcccagcgtggaggcgcagctgggcagccaccgaggcctgcaccagtccatcgaagaattccgggccaagatcgagcgggcacggagtgacgagggccagctctcccccgccacccggggtgcctaccgtgactgcctgggtcggctggacctgcagtacgccaagctgctgaactcctccaaggcccgcctcaggtccctggagagcttgcacagctttgtggcagccgccactaaggagctaatgtggctgaatgagaaggaggaggaggaggtgggcttcgactggagcgaccgcaacaccaacatgaccgccaagaaggagagctactcggcgctgatgcgggagctggagctgaaggagaagaagatcaaggagctccaaaatgctggggaccggctgctgcgggaggaccacccggcccggcccacggtggagtccttccaggcggccctgcagacgcagtggagctggatgctacagctgtgctgctgtatcgaggcacacctgaaggagaacgctgcctactttcagttcttctcagatgtgcgggaggccgaggggcagttgcagaagctgcaggaggcactgcgtaggaaatacagttgtgatcgctccgccaccgtcacccggctggaggacctgctgcaggatgcccaggacgagaaggaacagctgaacgagtacaagggccacctctcaggcctggccaagcgggccaaggccgtcgtgcagctgaagccccgccacccagcccaccccatgcggggccgcctgcccctgctggccgtgtgcgactataagcaggtggaggtgactgtgcacaagggtgacgagtgccagctggtgggccctgcacagccgtcccactggaaggtgctcagcagctccggcagcgaggccgccgtgccctccgtgtgcttcctggtgcccccgcccaaccaggaggcccaggaggccgtcaccaggctggaggcccagcaccaggccctggtcacgctgtggcaccagttgcacgtggacatgaagagccttctggcctggcagagccttcgccgcgacgtgcagctcatccgctcctggtccctggccacgttccgcaccctgaagccagaggagcagcgccaagccctgcacagcctggagctgcactaccaggccttcctgcgggacagccaggacgcgggcggcttcggacccgaggaccggctgatggctgagcgcgagtacggctcctgcagccaccactaccagcagctgctgcagagcctggaacagggtgcacaggaagagtctcgctgccagcgctgcatctccgagctcaaagacatccggctgcagctggaggcctgtgagacgcgcaccgtgcaccgcctgcggctgccgctggacaaagagccggcacgggagtgtgcccagcgcatcgccgagcagcaggcaggggccaaggcacaggcagaggtggaggggctgggcaagggggtcgcccggctctctgccgaggccgagaaggtcttggccctaccagagccatcgcctgcggcccccacgctgcgctcggagctggagctgacgctgggcaagctggagcaggtccgcagcctgtctgccatctacctggagaagctcaagaccatcagcctggtgatccgcggcacgcagggggccgaggaggtgctcagggcccacgaggagcagctcaaggaggcccaggccgtgccggccaccctcccggagctcgaggccaccaaggcctctctgaagaagctgcgggcccaggccgaggcacagcagcccacgttcgacgccctgcgggatgagctgcggggggcacaggaggtgggggagcgactgcagcagcggcacggggagcgggacgtggaggtggagcgctggcgggagcgggtcgcccagttgcttgagcgctggcaggctgtgctggcccagaccgacgtgcggcagcgcgagctcgagcaactgggccgccagctgcgttactaccgcgagagtgcagaccccttgggcgcctggctgcaggacgccaggcggcggcaggagcagatccaggccatgccgctggccgacagccaggctgtgcgggagcagctgcggcaggagcaggccctgctggaggagatcgagcgccacggcgagaaggtcgaggagtgccagaggtttgcgaaacagtacatcaacgccatcaaggactatgaactccagctggtgacgtacaaggcgcagcttgagccggtggcctccccggccaagaagcccaaggtccagtcgggatcagagagtgtcatccaggagtacgtggacctgcgtacgcactacagcgagctgaccacactgacgagccagtacatcaagttcatcagcgagactctgcggcgcatggaggaggaggagaggctggctgagcagcagcgggcagaggagcgcgagcggctggccgaggtggaggccgcgctggagaagcagcggcagctggccgaggcgcacgcccaggcaaaggcacaggcggagcgggaggcgaaggagctgcagcagcgcatgcaggaggaggtggtgcggcgggaggaggcggcggtggacgcgcagcagcagaagcgcagcattcaggaggagctgcagcagctgcggcagagctcggaggcggagatccaggccaaggcccggcaggcagaggcggctgagcgcagccggctgcgcatcgaggaggagatccgcgtggtgcgcctgcagttggaggccaccgagcgccagcgtggcggggctgagggggagctgcaggcactgcgtgcacgggcggaggaggctgaggcacaaaagcgacaggcgcaggaggaggccgagcgcttgcggaggcaggtgcaggacgagagccagcgtaagcggcaggcggaggtggagctggcctcgcgcgtgaaggccgaggccgaggcggcgcgcgagaagcagcgggccctgcaggccctggaggagctgcggctgcaggcggaggaggcggagcggcgcctgcggcaggccgaggtggagcgagcgcggcaggtacaggtggccctggagacggcgcagcgcagtgcagaggcggagctgcagagcaaacgcgcctccttcgccgagaagacggcacagctggagcgctccctgcaggaggaacacgtggctgtggcacagctgcgggaggaggctgagcggcgggcacagcagcaggccgaggccgagcgggcgcgcgaggaggcagagcgggagctggagcgctggcagctcaaggccaacgaggcgctacggctgcggctgcaggcggaggaggtggcgcagcagaagagcctggcgcaggccgaggctgagaagcagaaggaggaggcggagcgcgaggcgcggcggcgcggcaaggcggaggagcaggccgtccggcagcgggagctggctgaacaagagctggagaagcagcggcagctggcggaaggcaccgcgcagcagcgcctggccgcggagcaggagttgatccggctgcgggccgagacggagcagggggagcagcagcggcagctgctggaggaggagctggcccggctgcagcgtgaggcggctgcagccacgcagaaacggcaggagctggaagccgagctggccaaggtgcgggccgagatggaggtgctgctggccagcaaggcgagggctgaggaggagtcgcgctccaccagcgagaagtccaagcagaggctggaggccgaggccggccggttccgcgagctggccgaggaggccgcccgcctgcgtgccctggcggaagaggccaagcggcagcggcagctggccgaggaagacgcggcgcggcagcgggccgaggcggagcgggtgcttgcggagaagctggccgccatcggcgaggccacgcggctcaagacggaggcggagatcgcgctcaaggagaaggaggcggagaacgagcgcctgcggcggctggcggaggacgaggccttccagcggcggcggctggaggagcaggccgcgcaacacaaggctgacatcgaggagcgcctggcccagctgcgcaaggcatcggacagcgagctggagcggcagaaggggctggtggaggacacgctgaggcagcggcggcaggtggaggaggagatcctggcgctgaaggcgagcttcgagaaggcggccgctggcaaggcggagctggagctggagctgggacgcatccgcagcaacgcggaggacacgctgcgcagcaaggagcaggccgagctggaggctgcgaggcagcggcagctggcggcggaggaggagcggcggcgccgtgaggctgaggagcgcgtgcagaagagcctggcggccgaggaggaggccgcacggcagcggaaggcggcgctggaggaagtcgagcggctgaaagccaaggtggaggaggcgcggcgcctgcgggagcgagcggagcaggagtcggcgcggcagctgcagctggcccaggaggccgcccagaagcggctgcaggcggaagagaaggcacacgccttcgcggtgcagcagaaggagcaggagctacagcagacgctgcagcaggagcagagcgtgctggaccagctgcgcggcgaggcggaggcggcccggcgggcggctgaggaggcggaggaggcccgggtgcaggcggagcgtgaggcggcgcagtcccggcggcaggtggaagaggccgagcggctgaagcagtcggcagaggagcaggcacaggcccgggctcaggcacaggcggctgcagagaagctgcgcaaggaggccgagcaagaggcggcgcggcgggcacaggcggagcaggcggccctgcggcagaagcaggcagctgacgcggagatggagaagcataagaaattcgccgagcagacgctgcggcagaaggcgcaggtggagcaggagctgacaacactgcggctgcagctggaggagaccgaccaccagaagaacctgctggacgaggagctgcagcggctgaaggcggaggccacggaggccgcacgccagcgcagccaggtggaggaggagctcttctcggtgcgcgtgcagatggaggagctgagcaagctcaaggcacgcatcgaggctgagaaccgcgcactcatcttgcgtgacaaggacaatacgcagcgcttcctgcaggaggaggctgagaagatgaagcaggtggcggaggaggccgcgcggctgagtgtggcggcccaagaggctgcgcgactgcggcagctggcagaggaggacctggcacagcagcgggccttggcagagaagatgctcaaggagaagatgcaggcggtgcaggaggccacgcgactcaaggctgaggcggaactgctgcagcagcagaaggagcttgcgcaggagcaggcgcggcggctgcaggaggacaaggagcagatggcgcagcagctggcggaggagacgcagggcttccagcggacgctggaggccgagcggcagcggcagctggagatgagcgctgaggctgagcgcctcaagctgcgtgtggccgagatgagccgagcccaggcccgcgctgaggaggacgcccagcgcttccggaagcaggcggaggagatcggtgagaagctgcaccgcacggagctcgccacccaggagaaggtgaccctggtgcagacactggagatccagcgacagcagagtgaccatgatgccgagcgcctgcgggaggccatcgctgagctggagcgtgagaaggagaagctccaacaggaggccaaactgctgcagctcaagtctgaggagatgcagacggtgcagcaggagcagctgctgcaggagacgcaggccctgcagcaaagcttcctctctgaaaaggacagcctgctacagcgggagcgcttcatcgagcaggagaaggccaagctggagcagctcttccaggacgaggtggccaaggcacagcagctgcgtgaggagcagcagcggcagcagcagcagatggagcaggaacggcagcggctggtggccagcatggaggaggcgcggcggcggcagcatgaggccgaggagggcgtgcggcgcaagcaggaggagctgcagcagctggagcagcagcggcggcagcaggaggagctgctggctgaggagaaccagaggctgcgtgagcagctgcagctcctggaggagcagcaccgggccgcgctggcgcactcagaggaggtcactgcctcgcaggtggctgccacaaagaccctgcccaatggccgggatgcacttgatggccccgcggcagaggcagagccggagcacagcttcgatggcctgcggcggaaggtgtcagctcagaggctgcaggaggccggcatcctgagtgcggaggagctgcagcggttggcgcagggccacaccacggtggacgagctcgcacggcgggaagacgtgcgccactacctgcagggccgcagcagtatcgcagggctgttgctgaaggccaccaatgagaagctgagtgtttacgccgccctgcagaggcagctgctgagtcccggcacggccctcatcctgctggaggcgcaggcggcctcaggcttcctgctggaccctgtgcggaaccggcggctgaccgtcaacgaggctgtgaaggagggtgtggtgggccccgagctgcaccacaagctgctgtcggccgagcgcgccgtcactggctacaaggacccctacactggccagcagatctctctcttccaagccatgcagaagggcctcatcgtccgggagcacggcatccgcctgctggaggcccagatcgccacgggcggcgttatcgaccccgtgcacagccaccgcgtgcccgtggacgtggcctaccggcgcggctacttcgacgaggagatgaaccgcgtcctggcggaccccagcgacgacaccaagggcttctttgaccccaacacgcacgagaacctcacgtacctgcagctactggagcgctgcgtggaggaccccgagacgggcctgtgccttctgccactcacggataaggctgccaagggcggggagctggtctacactgactccgaggcccgggacgtctttgagaaggccaccgtgtctgcgccgttcggcaagttccagggcaagacggtgaccatttgggagatcatcaactcggaatacttcacggcagagcagcggcgggacctgctgcggcagttccgcacgggccggatcacagtggagaagatcatcaagatcatcatcacggtggtggaggagcaggagcagaagggccggctttgctttgagggcctgcgcagcctggtgccagccgccgagctgctggagagcagggtcatcgaccgcgagctctaccagcagctgcagcgaggtgagcgctctgtgcgagacgtagccgaggtggacactgtgcggcgggctctccggggtgccaacgtcatcgcgggtgtatggctggaggaggcggggcagaagctgagtatctacaatgccctgaagaaagacctgctgccatccgacatggccgtggccctgttggaagcccaggccggcaccgggcacatcatcgaccccgccaccagcgcccggctgaccgtggacgaggcagtgcgtgctggcctggtgggccccgagtttcatgagaagctgctatcagccgagaaggctgtgacagggtacagggacccctacacagggcagagcgtctccctgttccaggccctgaagaagggcctcattccccgggagcagggcctgcgcctgttggacgcccagctgtccacgggcggcatcgtggaccccagcaagagccaccgcgtgcccctggatgtcgcctgcgcccgaggctgcctggatgaggagaccagcagggccctgtcggcaccaagggccgacgccaaggcctacagtgaccccagcacaggggagccggccacctacggcgagctccagcagcggtgccggcccgaccagctgaccgggctgagcctgctgccgctctcagaaaaggctgctcgggcccggcaggaggagctctactcagagctgcaggcccgtgagacctttgaaaagaccccggttgaggtccccgtgggtggcttcaagggcaggacggtgacggtgtgggagctcatcagctctgagtacttcactgcggagcagcggcaggagctgttgcgtcagttccgcacgggcaaggtcaccgtggagaaggtcatcaagattctcattaccatcgtggaggaggtggagaccctgcggcaggagaggctgtccttcagcggcctccgtgcccctgtgccagccagcgagctcctggcttccggggtcctcagcagagcccagtttgagcagctcaaggacggcaagacgacggtcaaggacctttcggagctgggctccgtgcggacgctgctgcagggcagtggctgcctcgccggcatctacctggaggacaccaaggagaaggtgtccatctacgaggccatgcgccggggcctgctgagagccacaacggctgcgctcctgctggaggcgcaggcggccactggcttcctggtggaccccgtgcggaaccagcgcctgtatgtccacgaggccgtgaaggcgggcgtggtgggccccgagcttcacgagcagctgctgtctgccgagaaggccgtcaccggctacagagacccctactcgggcagcaccatctccctcttccaggccatgcagaagggcctggttctccggcagcacggcatccgcctgctggaggcccagatcgccacgggcggcatcatcgaccccgtgcacagccaccgcgtgcctgtggacgtggcctaccagcgcggctacttcagtgaggagatgaaccgcgtcctggcggaccccagcgacgacaccaagggcttctttgaccccaacacgcatgagaacctcacgtacaggcagctgctggagcggtgcgtggaggaccccgagacgggcttgcgccttctgccactgaaaggggcggagaaggctgaggtggtggagaccacgcaggtgtacactgaggaggagacaagaagggcatttgaagagacacagatcgacattcccggcggcggcagccacggcggctccaccatgtccctgtgggaggtgatgcagtcggacctgatccccgaggagcagcgggcccagctgatggctgacttccaggccggccgggtgaccaaggaacgcatgatcatcatcatcatcgagatcattgagaagacagagatcatccgccagcagggtctggcctcctacgactacgtgcgccgccgcctcacggctgaggacctgttcgaggctcggatcatctctctcgagacctacaacctgctccgggagggcaccaggagcctccgtgaggctctcgaggcggagtccgcctggtgctacctctatggcacgggctccgtggctggtgtctacctgcccggttccaggcagacactgagcatctaccaggctctcaagaaagggctgctgagtgccgaggtggcccgcctgctgctggaggcacaggcagccacaggcttcctgctggacccggtgaagggggagcggctgactgtggatgaggctgtgcggaagggcctcgtggggcccgagctgcacgaccgcctgctctcggctgagcgggcggtcaccggctaccgtgacccctacaccgagcagaccatctcgctcttccaggccatgaagaaggagctgatccctactgaggaggccctgcggctgctggatgcccagctggccaccggcggcatcgtggacccccgcctgggcttccaccttcccctggaggtggcttaccagcgtggctacctcaacaaggacacgcacgaccagctgtcagagcccagcgaggtgcgcagctacgtggacccgtccaccgacgagcgcctcagctacacgcagctgctcaggcggtgccgtcgtgacgacggcaccggccagctgctcctgccactgtcggacgcccgcaagctgaccttccgtggcctgcggaagcagatcaccatggaggagctggtgcgctcgcaggtcatggacgaggccacggcgctgcagctgcgggagggcctgacctccatcgaggaggtcaccaagaacttgcagaagttcctggaaggcaccagctgcatcgctggtgtcttcgtggacgccaccaaggaacggctctcggtgtaccaggccatgaagaagggcatcatccgccccggcacagcctttgagctcctggaggcgcaggcggccaccggttacgtcatcgaccccatcaagggactgaagctgacggtggaggaggctgtgcgtatgggcattgtgggccccgagttcaaggacaagctgctgtcggccgagcgcgccgtcactgggtacaaggacccctactctgggaagctcatctccctcttccaggccatgaagaagggcctgatcctgaaggaccatggcatccgcctgctggaggcccagatcgccacgggcggcatcatcgaccctgaggagagccaccggctgcccgtggaggtggcctacaagcgcggcctcttcgatgaggagatgaacgagatcctgaccgacccctcggacgacaccaagggcttctttgaccctaacacggaggagaacctcacctacctgcagctgatggagcgttgtatcactgacccccagacgggcctgtgtctcttgccgctgaaggagaagaagcgggagcggaagacgtcctccaagtcctccgtgcgcaagcgccgagtggtcatcgtggaccccgagacgggcaaggagatgtcagtgtacgaggcctaccgcaagggcctgattgaccaccagacgtacctggagctgtccgagcaggagtgcgagtgggaggagatcaccatctcctcctcggacggcgtggtcaagtccatgatcatcgaccgccgctccgggcgccagtacgacatcgatgatgccatcgccaagaacctcatcgaccgctcggcactggaccagtaccgcgccggcacgctctccatcaccgagttcgccgacatgctctcgggcaacgccggtggtttccgctcccgttcctcctcggtgggatcctcctcctcctaccccatcagccccgccgtctccaggacccagctggcctcctggtcagaccccactgaggagacgggccccgtggctggcatcctggacacggagacgctggagaaggtgtccatcaccgaggccatgcaccggaacctggtggataacatcacggggcagcggctgctggaggcgcaggcctgcaccgggggcatcatcgaccccagcaccggtgagcgcttccctgtcaccgacgccgtcaacaagggcctggtggacaagatcatggtggaccgcatcaacctggcccagaaggccttctgcggcttcgaggacccacgcaccaagaccaagatgtcggccgcccaggccctgaagaagggctggctctactacgaggccggccagcgcttcctggaggtgcagtacctgaccggcggcttgatcgagcccgacacgccgggccgcgtgcccctggacgaggccctgcagcgcggcacggtggacgcccgcaccgcacagaagctgcgtgacgtgggcgcctactccaagtacctcacctgccctaagaccaagctcaagatctcctataaggacgcgctggaccgcagcatggtggaggagggcacggggctgcggctgctggaggctgccgcgcagtccaccaagggctactacagcccctacagcgtcagcggctccggctctaccgctggctcccgcaccggctcgcgcaccggctcccgggccggctcccgccgcggcagctttgacgccaccggctccggcttctccatgaccttctcttcatcctcctactcctcctcgggctacggccgccgctacgcctcggggtcctcggcctccctggggggccctgagtctgccgtggcctgaggctgcctgcgcccaccccgctctgcatgcggcccagcccggctcccaccgaggcgcgggggccgttttcaacgcttaaaggtgtcttcctcccaagtggtgcctaaagtttaaccaaaaagaccagactaatatattaatatatatctgctgtccagacagcctgtatcttgggggacagggctggcccagccctgctggccgcctcaccccctcgggtctcctcactcccttctacctgccactcacacagccaggtgccttggagggtcccaagctgggccccagcccaccctcctgtcttcccagggtagcccgcctgccagtcctagctgcacagggcagctgggcccaaccctgtctgtagagggccctggtgtttctagcactggcctgcacggtgggccttgctggggacggggggccccagtcagcctctctcccagtctacccagagaagccccttccccatgggaagacgaggccctcgggcccagcccccacagtgctgtctgatctgtgctttccagctcaccccccacactcactcctgagacccctggcctccggcgtcagcctccagcctctgttcccctagtaagtgccttccatgtcggcctctaaccccaggccccgaggacccagacccagtggggaggcggacgttccagccggcatggctgggaactgcagacctgtcctcctggtgggtccaggggcccctccagcttgtggagccccacactggggtgccgcctgcccgtctctctcccatggagccccagccccctttgggcccagggacaccagccaggctctgtgctgaccctcctgttgcacccagccctggtctcagcagcgaccacccctgcctccaccctctgagctttgcatgttccactaaccccgggcgggtggcaggtggaggtgtcaggctgctggcgcctctgcaagggcagaacactaacctgaccgtgggcggggccttgcggtatccgcccccaataaaagcaattccaacctt

SEQ ID NO: 44792 - DNA, 1401 bp, Homo Sapiens
cactgcccagatgatgctattaataacacatgcataactaatggacgttgctttgccatcatagaagaagatgaccagggagaaaccacattagcttcagggtgtatgaaatatgaaggatctgattttcagtgcaaagattctccaaaagcccagctacgccggacaatagaatgttgtcggaccaatttatgtaaccagtatttgcaacccacaccccctgttgtcataggtccgttttttgatggcagcattcgatggctggttttgctcatttctatggctgtctgcataattgctatgatcatcttctccagctgcttttgttacaaacattattgcaagagcatctcaagcagacgtcgttacaatcgtgatttggaacaggatgaagcatttattccagttggaaaatcactaaaagaccttattgaccagtcacaaagttctggtagtgggtctggactacctttattggttcagcgaactattgccaaacagattcagatggtccggcaagttggtaaaggccgatatggagaagtacggatgggcaaatggcatggcgaaagagtggcggtgaaagtattctttaccactgaagaagccagctggtttcgagaaacagaaatctaccaaactgtgctaatgcgccatgaaaacatacttggtttcatagcggcagatattaaaggtacaggttcctggactcagctctatttgattactgattaccatgaaaatggatctctctatgacttcctgaaatgtgctacgctggacaccagagccctgcttaaattggcttattcagctgcctgtggtctgtgccacctgcacacagaaacgtatggcacccaaggaaagcccgcaattgctcatcgagacctaaagagcaaaaacatcctcatcaagaaaaatgggagttgctgcattgctgacctgggccttgctgttaaattcaacagtgacacaaatgaagttgatgtgcccttgaataccagggtgggcaccaaacgctacctggctccagaagtgctggacgaaagcctgaacaaaaaccacttccagccctacatcatggctgatatctacagcttcggcctaatcatttgggagatggctcgtcgttgtatcacaggagggatcgtggaagactaccaattgccatattataacatggtaccgagtgatccgtcatacgaagatatgcgtgaggttgtgtgtgtcaaacgtttgcggccaattgtgtctaatcggtggaacagtgatgaatgtctacgagcagttttgaagctaatgtcagaatgctgggcccacaatccagcccccagactcacagcgttgagaattaagaagacgcttgccaagatggttgaatcccaagatgtaaaaatctga

SEQ ID NO: 44793 - DNA, 710 bp, Homo Sapiens
gcgcactcagggtctgaggcagctagtagccggagggtcaccatgaagttcaatcccttcgttacctcggaccgcagtaaaaaccgcaaacgtcacttcaatgccccctcacacgtgcgcaggaagatcatgtcatccccgctctccaaggagctgcggcagaagtacaatgtccgctccatgcccatccgcaaggacgacgaggtccaggtagttcgaggacactacaaaggtcagcaaattggcaaggtagtccaggtgtacagaaagaaatatgtcatctacatcgagcgggtgcagcgtgagaaggccaacggcacaactgtccacgtgggcattcacccaagcaaggtggttatcaccaggctaaaactggacaaggatcggaaaaaaattcttgaacgcaaagccaagtctcgacaagttggaaaagagaaaggcaaatataaagaagaacttattgagaaaatgcaggaataaatagaacctgttgtgcaaccacggtttaaccggagattttgaggctagggtgtgtttctttcgaacttttcggaatgtctggaacatttcatttcctgttttgttacctgtgcctctgtaaatctacttttgcaattttaagtaataattttatgaataaaaatgggaaatgcttcctaattccacatagtatttgcattgttttataaataaattccacttactatcaa

SEQ ID NO: 44794 - DNA, 222 bp, Homo Sapiens
atgcagctctttgtccgcgcccaggagctacacacccttgaggtgactggccaggaggcagctgcccaaatcaaggcacatgtagcctcactgaagggcactgcctgggaagatcaacctgtgctcctggcaagcacacccctagaggatgagactaccctgggcaagtacagtgtggaggccctgattaccctggaagtagccatccacatgcttagaggg

SEQ ID NO: 44795 - DNA, 417 bp, Homo Sapiens
atgttagctaatgatgtaaggcatcaacaagaaatgtgggggttcaggaaagtggaaggtggggtcgtccaaagcctgggaaagtcttcagttgaaggcgagacagatgggactattagtgagtttcgagagatccaacgcctcgccgccttcgcttcatttttgtctcacgccccacccttgaacgcgcggcgccttttgaccccgccgccgcgccgtagaccgcgctgcacgccggcggcagccatggcggatgtgtcagagaggacactgcagttgtccgtgctagtagccttcgcttctggagtactcctgggctggcaggcgaaccgactgcggaggcgctacttggactggaggaaaaggaggctgcaggacaagctggcggcgacgcagaagaagctggacctggcctga

SEQ ID NO: 44796 - DNA, 414 bp, Homo Sapiens
caggtgtcgctcgttaggacaatgccttccaggtgccactgtcacagccccatccttcctaacccgccctctttgcccccttcccttccaactctcatacctcccccctttctcctctgggggaggttctcacattcgcactcccaaaccccagctcctcgcatctgggcacagggccccaggtctagagatgcgggcagggggccggcacccaagggcaggggtggcagaggctccgcctgctgcctgccgtggggccgctccgaggtgccaggaactccggtaagggtcccggcggcggcagcccgggagtgggcaaagagggaacatgcgtgtatttcaaagaaaccagcgcggtctctggacttccctgtcttcgctctccacccccgctccccctcaacacacacataa

SEQ ID NO: 44797 - DNA, 5070 bp, Homo Sapiens
atgaggctacccctgctcctggtttttgcctctgtcattccgggtgctgttctcctactggacaccaggcaatttttaatctataatgaagatcacaagcgctgcgtggatgcagtgagtcccagtgccgtccaaaccgcagcttgcaaccaggatgccgaatcacagaaattccgatgggtgtccgaatctcagattatgagtgttgcatttaaattatgcctgggagtgccatcaaaaacagactgggttgctatcactctctatgcctgtgactcaaaaagtgaatttcagaaatgggagtgcaaaaatgacacacttttggggatcaaaggagaagatttattttttaactacggcaacagacaagaaaagaatattatgctctacaagggatcgggtttatggagcaggtggaagatctatggaaccacagacaatctgtgctccagaggttatgaagccatgtatacgctactaggcaatgccaatggagcaacctgtgcattcccgttcaagtttgaaaacaagtggtacgcagattgcacgagtgctgggcggtcggatggatggctctggtgcggaaccactactgactatgacacagacaagctatttggatattgtccattgaaatttgagggcagtgaaagcttatggaataaagacccgctgaccagcgtttcctaccagataaactccaaatccgctttaacgtggcaccaagcgaggaaaagctgccaacaacagaacgctgagctcctgagcatcacagagatacatgagcaaacatacctgacaggattaaccagttccttgacctcaggactctggattggacttaacagtctgagcttcaacagcggttggcagtggagtgaccgcagtcctttccgatatttgaactggttaccaggaagtccatcagctgaacctggaaaaagctgtgtgtcactaaatcctggaaaaaatgctaaatgggaaaatctggaatgtgttcagaaactgggctatatttgcaaaaagggcaacaccactttaaattcttttgttattccctcagaaagtgatgtgcctactcactgtcctagtcagtggtggccgtatgccggtcactgttacaagattcacagagatgagaaaaaaatccagagggatgctctgaccacctgcaggaaggaaggcggtgacctcacaagtatccacaccatcgaggaattggactttattatctcccagctaggatatgagccaaatgacgaattgtggatcggcttaaatgacattaagattcaaatgtactttgagtggagtgatgggacccctgtaacgtttaccaaatggcttcgtggagaaccaagccatgaaaacaacagacaggaggattgtgtggtgatgaaaggcaaggatgggtactgggcagatcggggctgtgagtggcctcttggctacatctgcaagatgaaatcacgaagccaaggtccagaaatagtggaagtcgaaaaaggctgcaggaaaggctggaaaaaacatcacttttactgctatatgattggacatacgctttcaacatttgcagaagcaaaccaaacctgtaataatgagaatgcttatttaacaactattgaagacagatatgaacaagccttcctgactagtttcgttggcttaaggcctgaaaaatatttctggacaggactttcagatatacaaaccaaagggacttttcagtggaccatcgaggaagaggttcggttcacccactggaattcagatatgccagggcgaaagccagggtgtgttgccatgagaaccgggattgcagggggcttatgggatgttttgaaatgtgatgaaaaggcaaaatttgtgtgcaagcactgggcagaaggagtaacccacccaccgaagcccacgacgactcccgaacccaaatgtccggaggattggggcgccagcagtagaacaagcttgtgtttcaagctgtatgcaaaaggaaaacatgagaagaaaacgtggtttgaatctcgagatttttgtcgagctctgggtggagacttagctagcatcaataacaaagaggaacagcaaacaatatggcgattaataacagctagtggaagctaccacaaactgttttggttgggattgacatatggaagcccttcagaaggttttacttggagtgatggttctcctgtttcatatgaaaactgggcttatggagaacctaataattatcaaaatgttgaatactgtggtgagctgaaaggtgaccctactatgtcttggaatgatattaattgtgaacaccttaacaactggatttgccagatacaaaaaggacaaacaccaaaacctgagccaacaccagctcctcaagacaatccaccagttactgaagatgggtgggttatttacaaagactaccagtattatttcagcaaagagaaggaaaccatggacaatgcgcgagcgttttgcaagaggaattttggtgatcttgtttctattcaaagtgaaagtgaaaagaagtttctatggaaatatgtaaacagaaatgatgcacagtctgcatattttattggtttattgatcagcttggataaaaagtttgcttggatggatggaagcaaagtggattacgtgtcttgggccacaggtgaacccaattttgcaaatgaagatgaaaactgtgtgaccatgtattcaaattcagggttttggaatgacattaactgtggctatccaaacgccttcatttgccagcgacataacagtagtatcaatgctaccacagttatgcctaccatgccctcggtcccatcagggtgcaaggaaggttggaatttctacagcaacaagtgtttcaaaatctttggatttatggaagaagaaagaaaaaattggcaagaggcacgaaaagcttgtataggctttggagggaatctggtctccatacaaaatgaaaaagagcaagcatttcttacctatcacatgaaggactccactttcagtgcctggactgggctgaatgatgtcaattcagaacacacgttcctttggacggatggacgaggagtccattacacaaactgggggaaaggttaccctggtggaagaagaagcagtctttcttatgaagatgctgactgtgttgttattattggaggtgcatcaaatgaagcaggaaaatggatggatgatacctgcgacagtaaacgaggctacatatgccagacacgatccgacccttccttgactaatcctccagcaacgattcaaacagatggctttgttaaatatggcaaaagcagctattcactcatgagacaaaaatttcaatggcatgaagcggagacatactgcaagcttcacaattcccttatagccagcattctggatccctacagtaatgcatttgcgtggctgcagatggaaacatctaatgaacgtgtgtggatcgccctgaacagtaacttgactgataatcaatacacttggactgataagtggagggtgaggtacactaactgggctgctgatgagcccaaattgaaatcagcatgtgtttatctggatcttgatggctactggaagacagcacattgcaatgaaagtttttactttctctgtaaaagatcagatgaaatccctgctactgaacccccacaactgcctggcagatgcccggagtcagatcacacagcatggattcctttccatggtcactgttactatattgagtcctcatatacaagaaactggggccaagcttctctggaatgtcttcgaatgggttcctctctggtttccattgaaagtgctgcagaatccagttttctgtcatatcgggttgagccacttaaaagtaaaaccaatttttggataggattgttcagaaatgttgaagggacgtggctgtggataaataacagtccggtctcctttgtcaactggaacacaggagatccctctggtgaacggaatgattgtgtagctttacatgcgtcttctgggttttggagtaatattcactgttcatcctacaaaggatatatttgtaaaagaccaaaaattattgatgctaaacctactcatgaattacttacaacaaaagctgacacaaggaagatggacccttctaaaccgtcttccaacgtggccggagtagtcatcattgtgatcctcctgattttaacgggtgctggccttgccgcctatttcttttataagaaaagacgtgtgcacctacctcaagagggcgcctttgaaaacactctgtattttaacagtcagtcaagcccaggaactagtgatatgaaagatctcgtgggcaatattgaacagaatgaacactcggtcatctagtacctcaatgcgattctgagatatttgaatttcataaaattgtaactgaaatttaaaatttttagttcaatgtgattgttttctttaaaatgagtactgaattgtactggtctgtccttttttcctttgcctaattgaagaaataattgcttgttttctagcctggcaagatattttcataaaagagggataacaatgctgattactaccttttaaaatattttagataaatgcacagcaccacagcaccacatctaagcattagtgatgggtagctgatgtcagcttcatgtggattttaagcactctagaaacaatgaagcttcttggcatattttaaggagctcccaaaatgtgttacctattaaattgtaactcagcaagtagaagaccatttgaaaagtcaggtacaaatttcctcaagtggcataaaaatgtagtcagttttctcttttaccagtttttatttccactccaattatttagaactttatttgtacatgtgcagaagaataaggcagctgagaatcttgtttcccccaagagagttttacaggctgagtgttgcaaatgtgttctttgtcctgttatatgtatatcaggaatacaaggatgtgaaataaaactgtaaatttgcataactggatgtacttagataatgtgaaataaacattaaagacaaggtctatttttaataga

SEQ ID NO: 44798 - DNA, 1417 bp, Homo Sapiens
ccccgcttctgcctgcgctgtgaacccccccccagccgccggcacggccccgcccccgctgccccggtggtggcccacggccccccggctgcccgtggtcaaactggagtcgctgaagcgctggaacgaagagcggggcctctggtgcgagaagggggtgcaggtgctgctgacgacggtgggcgccttcgccgccttcggcctcatgaccatcgccatcagcactgactactggctctacacgcgcgccctcatctgcaacaccaccaacctcacggccggcggcgacgacgggaccccccaccgcgggggcggcggcgcctcggagaagaaggaccccggcggcctcacgcactcgggcctctggaggatctgctgcctggaagggttgaaaagaggcgtctgcgtgaagatcaatcatttcccggaggacacggactacgaccacgacagcgcggagtatctactccgagttgtccgggcctccagcatcttccccatccttagcgccatcctgctgctgctcgggggtgtgtgcgtggcggcctcccgcgtctacaagtccaagaggaacatcattctgggcgcagggatcctgttcgtggcagcaggcctgagcaacatcatcggcgtgatcgtgtacatctccgccaacgcgggcgagccgggcccgaagcgggacgaggagaagaaaaaccactactcgtacggctggtccttctacttcggcgggctgtcgttcatcctggccgaggtgataggcgtgctggccgtcaacatctacatcgagcgcagccgcgaggcgcactgccagtctcgctcggacctgctcaaggccggcgggggcgcgggcggcagtggcgggagcggcccctcggccatcctccgtctgcccagttaccgcttccgctaccgccgccgctcccgctctagctcccgctccagcgagccgtcgccgtcgcgggacgcgtctcccggcggccccgggggcccgggctttgcctccacggacatctccatgtacacgctcagccgcgacccctccaagggcagcgtggccgcggggctggcgggggccggcggcggcggcggcggcgccgtgggggcgttcggcggcgcggccgggggcgccgggggcggcggcggaggcggcggcggggcgggtgccgagcgggaccgcgggggggcgtccggcttcctcacgctgcacaacgccttccccaaggaggcgggcggcggcgtcacggtcacggtcaccgggccgcccgccccgcccgcgcccgcgccacccgcgccctctgcgcccgcccccgggaccctggccaaggaggccgccgcctccaacaccaacacgctcaacaggaaaaccacgcctgtgtaggggcgcggcgggggagccgaggggcgtgtccggggc

SEQ ID NO: 44799 - DNA, 1898 bp, Homo Sapiens
atggtgtctgggcccttggcactccggtggtgcgcgtgggcagggcgcggggacatggggcccgacatggagctgcccagccactcgaagcagctcctgctgcagctgaaccagcagaggaccaagggcttcctgtgtgacgtcatcatcatggtggagaactccatcttccgggcccacaagaacgtcctagccgccagcagcatctatttcaagtccctggtcctgcacgacaacctcatcaacctggacacagacatggtcagctccacagtgttccagcagatcttggacttcatctacacaggcaagctgctgcccagcgaccagccagccgagcccaacttcagcaccctcctcactgccgccagctacctccagctgcccgagttggcagccctctgccgccgcaaactcaagcgagccggcaagccctttggctctgggagggcggggtccactggcatggggcggcccccccgcagccagcggctgtccacggcctctgtcatccaagctcggtatcaggggctcgtggatgggcgcaagggggcccacgccccccaggagctcccccaagccaaaggctcagacgatgaactctttcttggtggctctaaccaggatagcgtgcaaggtctgggccgggctgtctgcccagctggcggggaggcgggtctggggggctgcagcagcagcaccaacgggagcagcgggggctgcgagcaggagctgggcttggacctgtccaagaaaagcccacccttgccccctgccaccccaggtccccacctcactcccgatgacgcagcccagctgagcgacagccaacatggctcgccccctgcggcctctgctcctcccgttgccaacagtgcctcttattctgagctggggggcacccctgatgagcccatggatctggagggggccgaggacaaccacctgagcctgctggaggcgcctggtgggcagcctcggaagagcctccggcactccactcggaagaaggagtggggcaagaaggagcctgtggctggctccccctttgagcggagagaagcagggcccaagggtccctgcccgggagaggagggtgagggggtcggggacagggttcccaatggcatcctggctagtggggctggccctagcgggccctatggggagcccccctacccctgcaaggaggaggaggagaacggcaaggatgcaagtgaagacagtgcgcagagcgggagcgaggggggcagcggccatgccagcgcccactacatgtaccggcaggagggctacgagacggtgtcctacggggacaacttgtatgtgtgcattccctgcgccaagggcttccccagctctgagcagctcaatgcgcacgtggagactcacacggaggaagagctgttcatcaaggaagagggggcctacgagacaggcagtgggggtgccgaggaggaggccgaggacctgtcagcacccagtgcggcctacacggctgagccccggcccttcaagtgttcggtctgcgagaagacctacaaggacccagccacgctgcggcagcacgagaagacgcactggctgacacggcccttcccctgcaacatctgtggcaaaatgttcacgcagcgcggcaccatgacgcgtcacatgcggagccacctgggcctgaagcccttcgcctgcgatgagtgtggcatgcgcttcacccgtcagtaccgcctcacggagcacatgcgtgtgcactcgggcgagaaaccttacgagtgccagctgtgcgggggcaagttcacccagcagcgcaacctcatcagccacctgcgcatgcacacctccccctcctagaagccaaagacccgcgggcgccctctgccaccttgctccccgggaaccca

SEQ ID NO: 44800 - DNA, 1550 bp, Homo Sapiens
tgctgaataagggtcagtgtgtgacaaagtactatcgctggatgcagaagaacggaggatatatttggatacagtccagtgccaccatagctattaatgccaagaatgcaaatgaaaagaatatcatctgggtgaattaccttcttagcaatcctgagtacaaggacacacccatggacatcgcacagctcccccatctgccggagaaaacttccgaatcctcggagacatccgactctgagtcagactctaaagacacctcaggtattacagaggacaacgagaactccaagtccgacgagaaggggaaccagtccgagaacagcgaagacccggagcccgaccggaagaagtcgggcaacgcgtgtgacaacgacatgaactgcaacgacgacggccacagctccagtaacccggacagccgcgacagcgacgacagcttcgagcactcggactttgagaaccccaaggcgggcgaggacggcttcggtgctctgggcgcgatgcagatcaaggtggagcgctacgtggagagcgagtcggacctgcggctgcagaactgcgagtcactcacgtccgacagcgccaaggactcggacagcgcaggcgaggcgggcgcgcaggcctccagcaagcaccagaagcgcaagaaaaggcggaaacggcaaaagggcggcagcgccagccgccggcgcctgtccagcgcgtcgagcccaggcggcctggacgcgggcctggtggagcccccgcggctgctgtcctcccccaacagtgcctcggtgctcaagatcaagacggagatctcagaacccatcaatttcgacaatgacagcagcatctggaactacccgcccaaccgggagatctccaggaacgagtccccctacagcatgaccaagccccccagctctgagcacttcccgtccccgcagggcggcggcggtgggggtggcggtggcggggggctgcacgtggccattcccgactcgactcagttcggcgcctcggccaccgcggccctggcccccgtcgcctccgacccgctgtcacccccgctctcggcgtccccgcgggacaagcaccccgcgtccaactccttgctgtacactggggacctggaggcgctgcagaggttgcaggcgggcaacgtcgtgctcccgctggtgcacagggtgaccgggaccctggccgccaccagcacggccgcgcagagggtctacaccacgggcaccatccgctacgcgcccgccgaggtgaccctggccatgcagagcaacctgctgcccaacgcgcacgctgttaacttcgtggacgttaacagccccggctttggcctcgaccccaagacgcccatggagatgctctaccaccacgtgcaccggctcaacatgtcaggaccgttcggcggcgcagtgagcgcagctagcctgacgcagatgcccgccggcaacgtgttcaccacggccgagggactcttctccacgctgcccttccccgtctacagcaacggcatccacgcggcacagactctggagcgcaaggaggactga

SEQ ID NO: 44801 - DNA, 138 bp, Homo Sapiens
caggatccacctctgatgttcagtgaagaggaccggaaaagtctgctagagcagtgccatctgggtctggatcaaaaacgcagaaaatacgtggttggagagctcatctggaattttgccgatttcatgactaaccag

SEQ ID NO: 44802 - DNA, 399 bp, Homo Sapiens
atgtccctggaacaggaggaggaaacgcaacctgggcggctcctaggacgcagagacgccgtccccgccttcattgagcccaacgtgcgcttctggatcaccgagcgccaagtacggcccgggcccggcgcgactaggggcagggagggggcgggccgggccgcgtggagtcgggctgacccgggtgaccttggccaggccacgtgggcgccccctgtctccgtttcctcctctcggagttgtgccgggaacgcgcaccaccggccttcaccccttagggcgcggcaggggacgcaggggaaatcgaagctgccagatgcccacgaccacaacgtcaccctccagattgccctctcggaggggcccagtccgcgcaggtggctgctccctactgcctga

SEQ ID NO: 44803 - DNA, 2386 bp, Homo Sapiens
ctagtcccgattatggttattacagtttgatgaaatgtggctgagatcattggcactgtggagattaagaaatgtgaggtcagagtgttgggtaaattgttcctgcgagtgttaaggttgtcaggataatggtgggaatggggtgaagatgacaactcagcaatgacacaagaagagagtgacacagaaagattcagtagctgagaacttgagcgtagatatgttgtgggcaggagggaaatgatttggatggaagtagccaagtaagtgagaaaggaaagactttccaacaaaacttggcttagctcactcagatccctgagctgcaaacttcttctatacctttcttaccttttccagtgctgctgacttcaccccacttgcagggcatttgtgcagatggttgtttgttgaggaggaatgtgcttaatgttttaggaaccagttacattcaaggatgcctctgtggccttcaccgaggaggagtgaggtcacctggactctgctcccaggaagctgtgcggagctgtgatgctgggcaactacagaaacttggtcttggagacttgaatgaaaattctgtggagaatcttcagcagaaaacacttcaggatctgttacatgagctttcctcctggctagttttggaaggcatggccagtacaattactggaagtcaggattgtattgtgaatcatcgaggggaagtggatggggagcctgaactagatatttccccttgtcaacagtggggagaagcatcttctcctatttccagaaacagggacagtgtgatgactcttcaaagtggttgtttcgaaaacattgaaagtgaaacatatttgcctttgaaagtctcaagccaaatagacacacaagactcttcagtgaagttctgtaagaatgagcctcaggatcatcaggaaagcagacgtctctttgtaatggaagaaagcactgagagaaaagtgataaagggggaaagttgttcagagaaccttcaagttaaactggtgtctgatggacaagaactggcctcgccattgttaaatggtgaggcaacttgccagaatggccagttaaaagaatctttggatcccattgactgtaactgcaaagacattcatggatggaaatcacaggtggtcagttgtagtcagcagagagctcatacagaggagaaaccctgtgaccataataactgtgggaaaatacttaacaccagcccagatggtcatccatatgagaaaatccacactgcagagaaacaatacgaatgtagtcagtgtggtaagaacttcagtcaaagctcagagctactacttcatcagagagaccacacagaagaaaaaccctacaaatgtgagcaatgtgggaagggcttcacaaggagctcgagtctgcttatccatcaggcagtccacacagatgagaagccttataagtgtgacaagtgtgggaagggcttcaccaggagctcaagtctgctcatccatcatgccgtccatacaggcgaaaaaccttataaatgtgacaagtgtgggaagggctttagtcagagctccaaactgcacatccaccagcgagtccacactggagagaagccctatgagtgtgaggagtgtggtatgagcttcagtcagcgctcaaacctgcacatccaccagcgagtacacacaggagagaggccctacaagtgtggtgagtgtgggaagggcttcagtcagagctcgaaccttcacattcaccggtgcatccacacaggagagaagccttaccaatgctatgagtgtgggaagggtttcagccagagctcggatcttcgcatccatctcagagtccacactggagagaagccctatcactgtggcaagtgtgggaagggatttagccagagttccaaactcctcatccaccagagagtacatactggagagaagccctatgagtgcagcaagtgtgggaagggcttcagccagagctccaaccttcacatccaccagcgggttcacaagaaagatcctcgctaactgacattagcccattcaggtcttcacagcgctcatactgtaaaaactgttaaatatttagtatcactcttactttatattctacaaaggagagagatgtaagggttatttagatatgttccctcactgaaaaatcactcattcaaaatatttaagtatcaagcactttgttatgctgtacaatgaatggattgttcttgtttctcagatgggtagagtaaaagtgtctgtactttacaattcaactacatgttctacccagcattttaacggcaagaactttatatttattctcaagcagggcatgtttccctttgttcacattctctgagaaattgaaactctggtttctcttc

SEQ ID NO: 44804 - DNA, 1172 bp, Homo Sapiens
ggcagctgagtcagtgagcagcgccatgatgaggggcagtccctgccagcaccaacaggggctggaaacccagcgataggagcatcagcatctccgaggggtcctgtggctgtctgtggtctccgaggtgctgtacattctgctgctggtggttggcttcagcctcatgtgtctcgagctcttccactccagcaatgtcatcgacgggctcaagctcaatgccttcgcggctgtcttcacggtgctctcaggcctcctgggaatggtcgcccacatgatgtacacgcaggtgttccaggtcaccgtgagcctcggtcctgaggactggagaccccattcctgggactacgggtggtccttctgcctggcgtggggctcctttacctgctgcatggcagcctctgtcaccacgctcaactcctacaccaagacggtcattgagttccggcacaagcgcaaggtctttgagcagggctaccgggaagagccgaccttcatagaccctgaggccatcaagtacttccgggagaggatggagaagagggacgggagcgaggaggactttcacttagactgccgccacgagagataccctgcccgacaccagccacacatggcggattcctggccccggagctccgcacaggaagcaccagagctgaaccgacagtgctgggtcttggggcactgggtgtgaccaagacctcaacctggcccgcggacctcaggccatcgctggcaccagcccctgctgcaagaccaccagagtggtgcccccagaaccctggcctgtgtgccgtgaactcagtcagcctgcgtgggagatgccaggcctgtcctgcccatcgctgcctgggtcccatggccttggaaatggggccagggcaggcccaagggaatgcacagggctgcacagagtgactttgggacagcagccccggactcttgccatcatcacatgagccctgctgggcacagctgcgatgccaggagacacatggccactggccactgaatggctggcacccacaagccagtcaggtgcccagaggggcagagccctttggggggcagagagtggcttcctgaaggagggggcagtggcgcaggcactgcaggggtgtcacacagcaggcacacagcaggggctcaataaatgcttgttgaacttg

SEQ ID NO: 44805 - DNA, 466 bp, Homo Sapiens
gtgccaatatacagttagaatatcattaatttgcactgtttggggaccccatttaagaatgctgaattttgccaactaagaagtaagcaaatgcaatttaaaaagtaaatttgagcattctgtattaaatatgtgcagttattatcacatgaagaaacgcagtgtgtcgggctgtaatattaccatatttgctgtcatgttctcccatctcagtgctgggaaatcaccatgtggaaaccaagcaaacgtgttgtgcatcagccggcttgagtttgttcaatatcaaagctgaaaactagcgaggtctgctgtactgcttattgaagtattgtgattattttaggcattgattcttacaaaatatatactgtaacagtatactttgtacagatttaaattttatttgaaaaaatgaaataaagtaggcaaaaaaataaagatgtttatttttcatgtgactgtataa

SEQ ID NO: 44806 - DNA, 1491 bp, Homo Sapiens
atggatgacgtccccgccccaacccctgcaccagcaccgcccgccgctgccgcccccagggtcccgtttcactgcagtgaatgtggcaagagcttccgctaccgctcagacctgcggcgccactttgcccggcacacagcgctcaagccccacgcatgtccgcgctgcggcaagggtttcaagcacagcttcaacctagccaaccacctgcgctcgcacaccggggagcggccctaccgctgctctgcctgccccaaggggttccgcgactccaccggcctgctgcaccaccaggtcgtccacactggtgagaaaccctactgctgcctggtctgcgagctccgcttctcctcacgctccagcctgggccgccacctcaagcgccagcaccgtggggttctcccctctcccctgcagcccggccctggcctgcccgccttgagtgcgccctgctccgtctgctgcaatgtggggccctgctcggtgtgcgggggctcaggggccggcggcggagagggccccgagggggcaggcgcgggtctgggcagctgggggctggcagaggcggcagctgcggccgcggcctccttgcccccatttgcgtgcggcgcctgcgcgcggcgcttcgaccacggccgcgagctggcggcccactgggcggcgcacaccgacgtgaagcccttcaagtgcccgcgctgcgagcgcgacttcaacgcgcccgcgctgctggagcggcacaagctgacgcacgacctgcagggcccgggcgcgcccccagcgcaggcctgggccgcggggccaggcgcagggcccgagacggcgggcgaaggcaccgctgcggaggcgggcgacgctcctctggcttcggaccgcaggctgctcctgggccccgcggggggcggcgtgcccaagctcggggggctgctccccgagggcggtggggaggcgcctgcacctgcggcggccgccgagccctcggaagacaccctgtaccagtgcgactgcgggaccttctttgcgtcggccgcggccctggccagtcacctggaggcccactcgggcccggccacctacggctgcggccactgcggggctctgtacgcggcgctggccgccttggaggagcaccggcgggtcagccacggtgagggcggcggggaggaggcggcgaccgccgcccgggaaagggaaccggcgtccggggaacccccgtctggctccggccgcggcaagaagatcttcggctgctccgagtgcgagaagctgttccgctcaccgcgagacctggagcggcacgtgctggtgcacactggcgagaagccgttcccgtgcctggagtgcggcaagttcttccgccacgagtgctacctcaagcgccaccggctgctgcacggcaccgagcggcccttcccttgccacatctgcggcaagggcttcatcacgctcagcaacctctccaggcacctgaagctgcaccggggcatggactga

SEQ ID NO: 44807 - DNA, 1838 bp, Homo Sapiens
ggagctgcgggctgcgtggccgggatgagcgccagcacgggcggtggtggggacagcggcggcagcggcggcagtagcagcagctcacaggcctcctgcgggcccgagtcctcgggctccgaactagccctggccacaccggtgcctcagatgctgcagggccttctgggctccgacgacgaggaacaggaagaccccaaagactactgcaagggcggctaccaccctgtgaagatcggcgacgtgttcaatgggcggtaccacgtggtgcgcaaactgggctggggccacttctccaccgtctggctctgctgggacatccagcgcaagcgctttgtggccctcaaagtggtgaagagtgcggggcattacacggagacagctgtggatgagatcaagctcctgaaatgtgtccgggacagcgaccccagtgaccccaaaagagagaccattgtccagctcattgatgacttcaggatctcaggagtcaatggagtccatgtgtgcatggtgctggaggtgctgggccaccagctcctcaaatggatcatcaagtccaactaccagggcctgcccgtgccctgcgtgaagagcatcgtgaggcaggtgctgcacggcctggactacctccacaccaagtgcaagatcatccacacggacatcaagcccgagaacatcttgctgtgtgtgggggacgcttacatcaggcgcctggctgccgaggccacggagtggcaacaggcaggggcgccgcccccctcccgctccatagtcagcactgccccccaggaggtcttgaccggtaagctgtccaaaaacaagaggaagaagatgaggcgcaaacggaaacagcagaagcggctgctggaggagcggctgcgggacctgcagaggctggaggccatggaggctgccacccaggctgaggactctggcttgagactagacgggggcagcggctccacatcctcttcaggctgcttctccggctccctcttctctcctgcctcctgctccatcctctccggctcgtccaatcagcgagagaccgggggcctcctgtcgcctagcacaccattcggtgcctcgaacctcctggtgaaccccctggagccccaaaatgcagataagatcaagatcaagatcgcagacctgggcaacgcctgctgggtgcacaagcacttcacggaagacatccagactcggcagtaccgggccgtcgaggtgctgatcggcgccgaatacggccccccggcagacatctggagcacagcctgcatggccttcgagctggccactggtgactacctgttcgagccgcattctggagaagactacagtcgtgatgaggaccacatcgctcacatagtggagcttctgggggacatccccccagccttcgccctctcaggccgctattcccgggagttcttcaaccggagaggagagctgcggcacatccacaatctcaagcactggggcctgtacgaggtactcatggaaaagtacgagtggcccctagagcaggccacacagttcagcgcctttctgctgcccatgatggagtacatccccgaaaagcgggccagtgccgctgactgcctccagcacccctggctcaacccctaggcccggctgtggctccacctccagctctccgtgccttaagggaaaagcgggacagctcccaccaccctgctgggcgccagttctccacaaccacagggcagagagacgctggagccaggcccggctctcagagcgtgttctgcctgagacccccgtgagggctctcggagaaagtgtgtgtattcctttcttaataaagtgtggactga

SEQ ID NO: 44808 - DNA, 1699 bp, Homo Sapiens
aggtgagcggttgctcgtcgtcggggcggccggcagcggcggctccagggcccagcatgcgcgggggaccccgcggccaccatgtatgtgggctatgtgctggacaaggattcgcccgtgtaccccggcccagccaggccagccagcctcggcctgggcccgcaagcctacggccccccggccccgcccccggcgcccccgcagtaccccgacttctccagctactctcacgtggagccggcccccgcgcccccgacggcctggggggcgcccttccctgcgcccaaggacgactgggccgccgcctacggcccgggccccgcggcccctgccgccagcccagcttcgctggcattcgggccccctccagactttagcccggtgccggcgccccctgggcccggcccgggcctcctggcgcagcccctcgggggcccgggcacaccgtcctcgcccggagcgcagaggccgacgccctacgagtggatgcggcgcagcgtggcggccggaggcggcggtggcagcggtaagactcggaccaaggacaagtaccgcgtggtctacaccgaccaccaacgcctggagctggagaaggagtttcattacagccgttacatcacaatccggcggaaatcagagctggctgccaatctggggctcactgaacggcaggtgaagatctggttccaaaaccggcgggcaaaggagcgcaaagtgaacaagaagaaacagcagcagcaacagcccccacagccgccgatggcccacgacatcacggccaccccagccgggccatccctggggggcctgtgtcccagcaacaccagcctcctggccacctcctctccaatgcctgtgaaagaggagtttctgccatagccccatgcccagcctgtgcgccgggggacctggggactcgggtgctgggagtgtggctcctgtgggcccaggaggtctggtccgagtctcagccctgaccttctgggacatggtggacagtcacctatccaccctctgcatccccttggcccatctgtgcagtaagcctgttggataaagaccttccagctcctgtgttctagacctctgggggataagggagtccagggtggatgatctcaatctcccgtgggcatctcaagccccaaatggttgggggaggggcctagacaaggctccaggccccacctcctcctccatacgttcagaggtgcagctggaggctgctgtggggaccacactgatcctggagaaaagggatggagctgaaaaagatggaatgcttgcagagcatgacctgaggagggaggaacgtggtcaactcacacctgcctcttcctgcagcctcacttctacctgcccccatcataagggcactgagcccttcccaggctggatactaagcacaaagcccatagcactgggctctgatggctgctccactgggttacagaatcacagccctcatgatcattctcagtgagggctctggattgagagggaggccctgggaggagagaagggggcagagtcttccctaccaggtttctacacccccgccaggctgcccatcagggcccagggagcccccagaggactttattcggaccaagcagagctcacagctggacaggtgttgtatatagagtggaatctcttggatgcagcttcaagaataaatttttcttctcttttcaaa

SEQ ID NO: 44809 - DNA, 1101 bp, Homo Sapiens
gatgatatcgcggcgctcgtcattgacaacagctccggcatgtgcaaggctggcttcacaggggatgatgacccctgggccatcttcccttccatggtggggcgccccaggcaccagggcgtgatggtgagcatgggtcagaaggattcctatgtgggtgacgaggcccagagcaagagaggcatcctgaccctgaagtaccccatcgagcacggcatcgtcaccaactgggacgacatggagaagatctggcaccacatcttccacaatgagctgcgtgtggctcccaagcagcaccccgtgctgctgaccaagcccctgaaccccaaggccaaccgtgagaagatgacccacatcatgtttgagacctttaacacggcagccatgtacgtggccatccaggctctgctgtccctgtacgcctctggccgtaccactggcatcatgatggactctggtgacgaggtcacccacactgtgcccttctacggggggtatgccctcccccacgccatcctgtgtctggacctggctggccgggacctaactgactacctcatgaagatcctcacggagcgcggctacagcttcaccactacggctgagcaggaaatcgtgcatgacatcaaggagaagccgtgttacatcgccctggacttcgagcaggagatggccacgggggcctccagctcctccctggagaagagctacaagctgcctgatagccaggtcatcatcaaagcagttgctgctctgaggcactcttccagccttccttcctgggcatgtaatggcatccatgaaactaccttcaactccatcacgaagtgtgacgtggacatctgcaaagacctgtactccaacacagtgctgtctggcagcaccaccactctggcctgcatagcggacaggatgcagaaggagatcaccgccctggcccccagcacgatgaagatcaagatcattgctcctcccgagcgcaagtactccgtgtggatcggcacctctatcctggcctctctgtccaccttccagcagatatggatcagcaagcaggaggagtatgacaagtctggcccctccactgtccactgcgaatgc

SEQ ID NO: 44810 - DNA, 6999 bp, Homo Sapiens
atggagtttgcggagctgattaagaccccgcgggtggacaatgtggtgctgcaccggcctttctacccggctgtcgagggcaccctgtgcctgacgggccaccacttgatcctgtcctcccggcaggacaatacggaggagctgtggctcctccattcaaacatcgacgccatcgacaagcgatttgtaggatcactgggtaccatcatcataaaatgtaaagattttcgaattattcagttggatattcctggaatggaggaatgcttgaatatagccagttccattgaggcattgtctactctggactccatcactctgatgtaccctttcttttaccgtcctatgtttgaagtgatagaagatggctggcattccttccttcctgagcaagaatttgaactctattcttcagctaccagtgaatggaggctaagctatgtcaataaggaatttgctgtctgtccctcttacccaccaattgtcacagtgcccaaatccatcgatgatgaagctcttcggaaggtagctacatttcgacatggagggcgcttcccagtactaagctattaccacaaaaaaaatgggatggtaattatgcgaagtggtcagccactcactggtacaaacgggaggaggtgcaaggaggacgagaagctgataaatgctaccctcagggctggaaagcgtggctacatcattgacacccgatccctgaacgtggctcagcaaactagagccaaaggaggtggctttgaacaagaagctcattatcctcagtggaggcgaattcataagtccattgagaggtatcacattcttcaggagagcttaatcaaacttgtggaagcttgtaatgaccaaacacataacatggaccgatggctcagtaaattggaggcctctaactggctgactcacatcaaagagattctgacaactgcctgcctagcggctcagtgcatcgacagggaaggagcatcaatattgattcacggaacagaaggaactgattccacactccaggtgacctccttggcccagatcatcttagagccaagaagcaggaccattcgtggttttgaggccctgattgaaagagagtggctgcaggctggtcacccattccagcagcgctgtgcacagtcagcctactgtaacaccaagcagaagtgggaggctcctgtatttcttctcttcttggactgcgtgtggcagatccttcgtcagtttccctgttcttttgagtttaatgagaatttcctcatcatgctctttgagcatgcttatgcctcacagtttggaacatttctgggcaacaatgaaagtgaaagatgtaagttgaagctacagcagaagacgatgtctttgtggtcctgggttaatcagcccagtgagctgagtaaattcaccaatcccctctttgaagccaacaaccttgtcatctggccttcagttgctccgcagagtcttccactgtgggaaggtattttcctacgttggaatagatcctctaagtatttggatgaagcatatgaagaaatggttaacatcattgaatataataaagaattacaagcaaaagtcaatatccttcgaaggcagttggcagaactggaaacagaggacgggatgcaggagagtccctgaaaggtctcctcgcacccttcgcaaggaccttcttgggcctgtgtccgccgttctctccttgtgcccttcagttcacttttacacggtagccttgaagtgaaggctttagatgtgggacccccctaatgtaatggatttctcaatactgtatgaataatgaaacttactatcataaaccatgtttcatgtggcctgttagggcctgtcactttgggagccggaaggaggtgctagtcattttatttttacgtgaaatagatgacctatttaatgccatttgtgtttcatgccattttatccaaagctttttctctgtgtccactctccaaacagcattctagagcagtcaaggagacagctaatctctctagggactatttggtggtttaaaaaaagggtcagacttttaaacactctgaccatagaaatgtttttcaaaatggcaacaatggataaaccaaggattttgtgtttaacaatccatttccagtgtcttcgccacataaaatagccattttctttaaaatagttttggactaacgaagctgaaatctattctcattcttgtttgtcaagaaaggaaaatctgttattcaaggtaaattatttctacaagggcaacaggtatggtcctccgatatttacattaagaagagttaaatttattttaacgtagacactaaaagtatgtgcaatatacaattaaagtaggaatttgttactgattgagaattgttactggtgaattggttttcaggttttgagcatacatatacaatgtgtttcaaatgctgcttgtaaaattaaaccatcatctagaatagagttaatttattataatcaagctacaaataggttttcttaaaccagagatgcactgcccttgtctaaagttcttattgcactggtttatatgtgtatgtgtgttttattgtgtgtttttttaatttgtaagtattctaagagtttcctaatactaaggttaaaattttcatgttgacctgagccttttgcaaatttgctttggctctattgatttgtccattatgtgttaggcaaatataacttaagtggagggggaagtttatgaatataatatagctctgtgttttaaacctcagaaacagatttgagtgtttcagtattatagaaacagtgatgactattcatgctctgctagtctatgcctgcaactccaaatgtttgtggttcagtatttcccacctacatttctgtttggtgacattgctcattttaacaaatatgaccgagtctagtttttctttaaaaggatagtttatgagtaatctttaaaaccatttccataccatctgtatataaccatttcggtagagaacacactacactgaaccctgctttagagctgtgtgttgagctaaaaatataattttttaaaaattgactagcaaaatctatggccacactgagaagcctttgaaaatggcaaatacttttcatcaccaattgcccaattcatctttcttctgcttcctcagccttgtagcaaaggctacacagcagcccacagtccacagtctttttgggaaaattggcctgccaccttctttaagctcagtttatttttgacttactttctttgctgtagttatgaaccttggggcattaaaatcccatggcaaggagcataagagatgttctcgtagctctgcgttgtgtgaaatgtccatcttagttttgttaaaaaaaaaaaaaaaaaaaggaaacagcctcacttttttgtgctccctcagaattgcttgctatgtctgttaatacagctgagctttttgttttcttctctttttgtctcaagattgtatatgaaggaggcttttcttctcagctaacaggcatataaggaaaaccatctagagagttttctttagaagtgactcccattagcctggtgtggtggtgtgtgcctatagtcccagccactaggaaagctgaggcagaaggatcccttgagcctaggaggttgaggctgcagtgagctatgatcgcatcagtccactccagcctgagcaacagagcgagaccctgtgtctaagtaaagaaaaagccagaagtgactcccactgcttctgttgatcggccatagggcttccatgggtggaaacttgtgagggagtttgtattaggtctggtcatggagggatgatgtaccatcaaggtagacccatcttcctgatgcacatttgctgtgcgagccagagtacagtcataacacggtattcgcatttcgttttctctgtctcactgagacaacaatctatactgttttggcaagtttgcattttagtattaatttataattagggattgttcaaacttcagatctgtttacaggttgtaaaaataaacttcggtatcagtgcatctacagaagtgttatttggtaatccaaatattagagttttcccaaatccaaaaacggtcagaaataagtccattatcaatataatttgaagaagatttttagtagtactgtgaagttcgtgcttacctggatgagaagaataaatgacacggatacactcctgagaagacactcgttaaacattgcatcggagagctgcctttgataaatgtgctgttaaacacttgaatgaagagaatggtggcagaatgagtgagcaagcagattgccccagaggggccggtaataatcacgtgagggataatcagattcctgcgtattcagcatcttctctattcatgtggagtgaaagctggtttttatacaggagatacgtaaagtaggccccacaaataatatttttaaaatacaaaggatcaccacaatcctctattgaacatataaggatcctcagatttaaataagtactttttttttttttaatcagaagaacattgttgtttgattatatgtttttaaaaacctgaagcttttttggtggcaggacctttcaataaatatttatttggtcaaaattttttattttgattttattaaatgggaagaaagcaagcagaaatagtaaaattcagtaggtttaaaacaatctataaatgtattttatttccaagaaaacttagggtctcaaagcaagattttaaagtgatttttgagaagacttgggggggacaataatagacattcatgtcagatcccatatgggggatttttaaacatttctttgaactttgaggcctgatttaggggtgggattttattgctttttgttttaaaggatgaaattttgtggggttttagtctttgattcagtcagtatttggtttatgttaaataaaaaatcagtatcatggaaaagatatgaccataatttagtctcctcaagtgaaaaacaggagtaatgtttcgttgcactttgaaagatctgcttcaaggcataactcgtgtagttgtctggtttcagggatagctgtttgaattgtcattctaaagtaggtcatcaggttcacttattatccgaccttaatctgggataaaggttttggtatttgcccacttctagatagaatgaatgaaaacaacacaagcgttttatgagcactctttatcagaaaggtatttcctggaccagaaatgggcaatagttacaatagttgatcctctgttctggaagctttgaaatttatcagagaatgaagtcattcagtacatctgataaagttttgttgttgttgttgttgttgttgttttaattgggcaaccctcagaactgaagaggttcagagaactttccaggtttatactatacctcaagaccacatagattagctactgcttattctttcacatgggctaggcctgttctcctcctccagacctagtattctaagttattaccacatagtatttttatgttacccatcatctttaaaaacattataggctgggcatggtggcttacgcctgtaatcccagcactttgggaggccaaggcgggcggatcatgaggtcaggagatcgagaccatcctggctaacacggtgaaaacccatgtctactaaaaatacaaaaaattagccaggtgtggtggcgggcgcctgtagtcccagctactcaggaggctgaggcaggagaatggtgtgaacccgggaggcagagcttgcagtgagccgagatcgcaccactgcactccagcctgggcgaaagggcaagactccatctcaaaaaaaaaaaaaaaaaaagactcatttatccatttacatttattctcagatgataaaatatatactgatactataactttcttatggtatcagttttctttattttcttgaataaaattacttctaccttcatttggtctttataatccactgtccacagcatcttcctttaaaccaatagtcccagaagagaccctctgaaattctaggactggatattaaaatgcctgaacctgttatctaaatcctttttaagaaacttaatgttccagctcttgaactacactgtggaacagtaatttgtgcccaatttagtggaagataatgaggctcactgtaaacactacattgtcctgcaaagtaattctgatgagagtttactgacttctagagccattctctttaaccgtctgcaggtctaaggattaactatatttgtgatttgtaataaaactgagttgtacaacactgcctgtgtttgtctggccaagacatttgcttcacttttaaaatgcacgttatctttggagaggtgaattattctacaaaatgcaccctaaatctcattgtttaaaaccttactgatctaataccatctacacaaaaaaatgttgtagttgcagaacttagtttataaaaacaaagaatgtgtatttcttcaatagccgggtatttggattgttctcttgataatatttgaatgtgactcttggatttaagtgcactattattcatggcttatacaataaaattgcactgtatggcaaatatgtctataatgtatgctttgctgaaacctcaagagtgctgtaaggtacaggtttccatattgtgaacctgtgtacgcacacacacatatacatacagtcttagggaaaaaaaaaagcagaacttttgtaagtctgtgtaacattttaatattgtttgtaatattcactaggtgataatttcccctgtaccctataactgtaatcattcaccttgggttggccggtttgtcaagcttggtttactgaatcaagaaagagtcttgtcgaatgtggtactgttcttagtgtgtaatatttgcgtatggtgttcctctgcctcagaggacagttgcacagatggctagtgttaaatttctatagacgatggtaataaaatctgaatatatttaagtgctaa

SEQ ID NO: 44811 - DNA, 1590 bp, Homo Sapiens
atgggccggctgctgcgggccgcccggctgccgccgctgctttcgccgctgctgcttctgctggttgggggagcgttcctgggtgcctgtgtggctgggtctgatgagcctggcccagagggcctcacctccacctccctgctagacctcctgctgcccactggcttggagccactggactcagaggagcctagtgagaccatgggcctgggagctgggctgggagcccctggctcaggcttccccagcgaagagaatgaagagtctcggattctgcagccaccacagtacttctgggaagaggaggaagagctgaatgactcaagtctggacctgggacccactgcagattatgtttttcctgacttaactgagaaggcaggttccattgaagacaccagccaggctcaagagctgccaaacctcccctctcccttgcccaagatgaatctggttgagcctccctggcatatgcctcccagagaggaggaagaagaggaagaggaagaggaggagagggagaaggaagaggtagagaaacaagaggaggaggaagaggaggagctgctccctgtgaatggatcccaagaagaagccaagcctcaggtccgtgacttttctctcaccagcagcagccagaccccaggggccaccaaaagcaggcatgaagactccggggaccaggcctcatcaggtgtggaggtggagagcagcatggggcccagcttgctgctgccttcagtcaccccaactacagtgactccgggggaccaggactccaccagccaagaggcagaggccacagtgctgccagctgcagggcttggggtagagttcgaggctcctcaggaagcaagcgaggaagccactgcaggagcagctggtttgtctggccagcacgaggaggtgccggccttgccttcattccctcaaaccacagctcccagtggggccgagcacccagatgaagatccccttggctctagaacctcagcctcttccccactgctcctggccctggtggaagaggtgctgccccgccatggcagtggccaccatggggcctggcacatctctctgagcaagcccagcgagaaggagcagcaccttctcatgacactggtgggcgagcagggggtggtgcccactcaagatgtcctttccatgctgggtgacatccgcaggagcctggaggagattggcatccagaactattccacaaccagcagctgccaggcgcgggccagccaggtgcgcagcgactacggcacgctcttcgtggtgctggtggtcattggggccatctgcatcatcatcattgcgcttggcctgctctacaactgctggcagcgccggctgcccaagctcaagcacgtgtcgcacggcgaggagctgcgcttcgtggagaacggctgccacgacaaccccacgctggacgtggccagcgacagccagtcggagatgcaggagaagcaccccagcctgaacggcggcggggccctcaacggcccggggagctggggggcgctcatggggggcaagcgggaccccgaggactcggacgtgttcgaggaggacacgcacctgtga

SEQ ID NO: 44812 - DNA, 1100 bp, Homo Sapiens
ctgaagacaaaggacctatcacctgagcacaactacctcatgggggttcacccccatggcctcctgacctttggcgccttctgcaacttctgcactgaggccacaggcttctcgaagaccttcccaggcatcactcctcacttggccacgctgtcctggttcttcaagatcccctttgttagggagtacctcatggccaaaggtgtgtgctctgtgagccagccagccatcaactatctgctgagccatggcactggcaacctcgtgggcattgtagtgggaggtgtgggtgaggccctgcaaagtgtgcccaacaccaccaccctcatcctccagaagcgcaaggggttcgtgcgcacagccctccagcatggggctcatctggtccccaccttcacttttggggaaactgaggtgtatgatcaggtgctgttccataaggatagcaggatgtacaagttccagagctgcttccgccgtatctttggtttctactgttgtgtcttctatggacaaagcttctgtcaaggctccactgggctcctgccatactccaggcctattgtcactgtggttggggagcctctgccactgccccaaattgaaaagccaagccaggagatggtggacaaataccatgcactttatatggatgctctgcacaaactgttcgaccagcataagacccactatggctgctcagagacccaaaagctgtttttcctgtgaatgaaggtactgcatgcccaggagcacaggagtgcctgccttgaagaagagactcatctgccactaaccaaagacaggcaggagatgagggaggttatatgtggtaggggagggcatgaggaattccttctttgccttcttgccacagggtccttacaggaattctttctgaagagctgcacacagtcattcctcaaaggagggcatcctagtgcccctcatgctggggcctgatgcctggtcatcatttgagtcctctgggacacattagcagtcactgcatattcccccagcccctgggcaactatctactttctgtctctgtggatttgccaattctgaacattttatataaatggaataatacaata

SEQ ID NO: 44813 - DNA, 1374 bp, Homo Sapiens
gtcgccgcgccctgacgtccagccgactggcggcgcggtcgcccgggagaccgggaaagccgtttcacacccgtcctagtcgaagtcgaggtgagggacgatggctttcctcagcctgggatgacccggtcctccaaatgcagttccggagtggaggcgtgctcgcacccggggagagagccagaaagctgagccgcggcgccccagcgagagcacgaggccccgggtctggactccgccaccacgctcctctgcggccccttcctggtgtctgccagcccgcggggcccaggcgcggtccgccttcctcccagccccggggaacgcgcggctctgcttcctcacccccgcaccctcctcctcctcctcttccggccactgcaggtccagggggaacggggttagaaagggacagatttgaaagccattccagcagttttgtctggccttgcggttggtttctgtgtggaagagcctgccgcttcaggaaagtcttaggatgtgaactcccgccttcacctgcccctgacctgctcgttgtgggtgattcacgccatgggaatggttctttacgtaagggcttgaaagctgaacgtgagttaatggcctgacgtgacactagtgtgagaaacggaattggaaacgaacaaggacgtgtctgcattttaaaaaatgtcttttcggtgatcttgttagagaggaggttcacaaacacccacgtagctgcagccacttatcactgcacctcttgccaaagtgcggtccacatacgtgcaatgagaaaggattaaagggacttgtttgataacacacgcaaaactatgtaagactaaatttaaaaaattacagattttccctgttgccaaaagggaaagacccttcttttttcttgagaaacttagtatttgtgaatgcttcctctatttaatatgtatgcaaatgtttttaaagacctaggaatgcttttcttgaggacctggaagccatttctttaaaatgtaaacatcaaggaagatagggccccagtctccttgtcactttgggagtttaacctaggtgcgttattcctaattgtaaacacctgtttcgttatggagctgtgcattacttaggaggaaagccgttagctaacacaggtggttaccccaattaccagatgaattaaagaggaaatataaaagaatgtatagaacactatgttaagccctcttacatgaggacacgttaccagtttccttgagaatgtgtaatggattgtgtctccttggctgtataaaagagggatttccttctctctttgtaacctcattagcagattagccgtgatgtgcatcaaagtctagttgaatgcctaataaaattgttgtctttctg

SEQ ID NO: 44814 - DNA, 1888 bp, Homo Sapiens
gcggcgtgccgaagttcctcttctctgccccggttccgggcggtccgctgggaggtggcgcccggagggacacccgtgcctggggtcggggccagtgctcttctcggagctccagaagttctgctgagaagcgcggcggcagcaagacgacttctccggagccgccgagctggagttagaggtggagctccgtggggccgggcccccggctgcggggcagcggctcctgcaggcggaggccccggcggagaatgagccggagccggaggtggtggtggtctcctggcagagcggtgggaccgggagcaagctgcggtggttcaccaccttgatgctgtgtgcctccttcctggggctgggattgagtgttgctatagtgggacccacgtttcaagatttggcaacaaacgtgaaccgaaatatcagtagtctgtctttcatttttgtgggtcgtgccttgggatatttgagtggctctgtgattggtggatttcttgtcgatgtcatgaattattttttacttttgggaatctcaatgtcggctaccaccgttggtctttatcttgttcctttttgcaagacagcaatattactcactgtcatgatgtctatcttcggtgtttcaattggcattctggatacaggtggtaacgtccttatcttggctatttggggggacaaaggagccccacatatgcaggccttacacttctcttttgccttgggtgcctttttggctccactgctagctaaactggctttgggtccgacagcgtctgctgaaaaccacacagagtctgacttccatcctgcactcaaccaatcatctgatgctgactcagaagctctgtttggagtacctaatgataagaatttactgtgggcttatgctgttatcggtacttacatgttcttagtttctgtcatttttttttgtctgtttttaaagaatagctcaaagcaagaaaaagcaagagcatctgctgagacatttcgaagagcaaaatatcacaacgcccttctttgtctcctttttctgttcttctttttttatgttggagctgaggtaacatatggctcttatgttttctcatttgcaaccacccatgctggcatgaaagaaagtgaagctgctgggttgaactccatcttctgggggacatttgcagcctgcaggggcctggcaatcttttttgctacctgtttacagcctggaaccatgattgtgttgagcaacattggcagcctgacttcatctttatttctggtgctttttgacaagaacccaatttgtctctggatagcaacttcagtgtatggggcttcaatggcaaccacatttccgagtggtgtttcttggattgagcagtacacgaccatccatgggaaatctgcagcattttttgtaattggtgcttccctgggagaaatggctattcctgcagtcattggaattcttcaaggaaaataccctgatttgcctgtagttctgtatacctctttgggagcatcaatagctactggtattttatttcctgtgctatataaattagccacttcacctcttgatcgccagcgaaaagaagacagaaagagtgaggaccagaaagctctgctctctagctccgggctaaatgaatatgaggaagagaatgaagaggaggatgcagaaaaatggaatgaaatggattttgaaatgattgaaacgaatgatacaatgaggcattctataatagagacatctagaagtagtctgacggagcccacagctgaagtctataatcaatacccatcaaatgcactggtgtttgagtcttctccttttaatactggcagtgcccatgtgaagcacttgccagaaaccaggacaaaagggactaacgtttag

SEQ ID NO: 44815 - DNA, 1552 bp, Homo Sapiens
gttttcctagagatgtcagcctacaaaggacacaatctctcttcttcaaattcttccccaaaatgtcctttcccaacagctctcctgctgctaatacttttttagtagattccttgatcagtgcctgcaggagtgacagtttttattccagcagcgccagcatgtacatgccaccacctagcgcagacatggggacctatggaatgcaaacctgtggactgctcccgtctctggccaaaagagaagtgaaccaccaaaatatgggtatgaatgtgcatccttatatacctcaagtagacagttggacagatccgaacagatcttgtcgaatagagcaacctgttacacagcaagtccccacttgctccttcaccaccaacattaaggaagaatccaattgctgcatgtattctgataagcgcaacaaactcatttcggccgaggtcccttcgtaccagaggctggtccctgagtcttgtcccgttgagaaccctgaggttcccgtccctggatattttagactgagtcagacctacgccaccgggaaaacccaagagtacaataatagccccgaaggcagctccactgtcatgctccagctcaaccctcgtggcgcggccaagccgcagctctccgctgcccagctgcagatggaaaagaagatgaacgagcccgtgagcggccaggagcccaccaaagtctcccaggtggagagccccgaggccaaaggcggccttcccgaagagaggagctgcctggctgaggtctccgtgtccagtcccgaagtgcaggagaaggaaagcaaagaggaaatcaagtctgatacaccaaccagcaattggctcactgcaaagagtggcagaaagaagaggtgcccttacactaagcaccaaacgctggaattagaaaaagagttcttgttcaatatgtacctcacccgcgagcgccgcctagagatcagtaagagcgttaacctcaccgacaggcaggtcaagatttggtttcaaaaccgccgaatgaaactcaagaagatgagccgagagaaccggatccgagaactgaccgccaacctcacgttttcttaggtctgaggccggtctgaggccggtcagaggccaggattggagagggggcaccgcgttccagggcccagtgctggaggactgggaaagcggaaacaaaaccttcaccgctctttgtttgttgttttgttgtattttgttttcctgctagaatgtgactttggggtcattatgttcgtgctgcaagtgatctgtaatccctatgagtatatatatatatatatatatatatatataaaaacttagcacgtgtaatttattattttttcatcgtaatgcagggtaactattattgcgcattttcatttgggtcttaacttattggaactgtagagcatccatccatccatccatccagcaatgtgactttttcatgtctttcctaacacaaaaggtctatgtgtgtggttagtccatgaactcatggcattttgaatacatccagtactttaaaaatgacatatatattt

SEQ ID NO: 44816 - DNA, 675 bp, Homo Sapiens
ctgcttgaggctctggactgcatcctaccaccaactcgtccaactgacaagccctgcctccaggatgtctacaaaattgatggtattggtactgttcctattggccaagtggagactggtgttctcaaacctggtatggtggtcatctttgctccagtcaacattacaactgaagtaaaatctgtcaaaaggcaccatgaagatttgagtgaagctcttcctggggacaatgtgggcttcaatgtcaagaatgtgtctgtcaaggatctttgtcgtggcaactttgctggtgacagcaaaaatgacccaccaatggaagcagctggcttcactgctcagatgattatcctgaaccgtccaggcctaatcagccctggctacgtccctgtactggattgccacatggctcaccttgcatgcaagtttgctgagctggaaaagattgatcgccattctggtaaaaagctggaagatggccctaaattcttgaagtctggtgatgctgccatcgttgacatggttcctgtaaagcccatgtgtgttaagagcttctcagactatccacctctggatcgctttgctgttcatgatatgagacagacagttgtcatgggtgtcatcaaagcagtggacaagaaggctgctggagctggcaaggtagccaagtctgcctag

SEQ ID NO: 44817 - DNA, 699 bp, Homo Sapiens
atggatgccctgcaactagcaaattcggcttttgccgttgatctgttcaaacaactatgtgaaaaggagccactgggcaatgtcctcttctctccaatctgtctctccacctctctgtcacttgctcaagtgggtgctaaaggtgacactgcaaatgaaattggacaggttcttcattttgaaaatgtcaaagatgtaccctttggatttcaaacagtaacatcggatgtaaacaaacttagttccttttactcactgaaactaatcaagcggctctacgtagacaaatctctgaatctttctacagagttcatcagctctacgaagagaccgtatgcaaaggaattggaaactgttgacttcaaagataaattggaagaaacgaaaggtcagatcaacaactcaattaaggatctcacagatggcaagcactttgagaacattttagctgacaacagtgtgaacgaccagaccaaaatccttgtggttaatgctgcctactttgttggcaagtggatgaagaaattttctgaatcagaaacaaaagaatgtcctttcagagtcaacaaggtatgtggggcagcatgtagcagtaaaaggagcccaattatagatgtgaaaaatgatagggacagagtggggcataaatccattccaatgaggaacctgagggcacggccggcaaagtgcctttcctga

SEQ ID NO: 44818 - DNA, 406 bp, Homo Sapiens
tcagccatcccggttaccggtggcaggatgatttcctttcatcccaacctttatttccacagtgaaatcatcatgaaggagcactgtgttggcatcctcggctacagggtgtctcattccactgcagtccagcggttctgggatcacgaaggtcaagcctccagctgcaggcagtacacctcctacctgagctcattcagctgtttggctgaacatgactgcccgggttttggcaggattgctgagttggagtctcactgtgtcatccaggctgcagtcaagtggcaaactctcagatcactgcaacctctccctccagcttcaaaggattcctctgcctgctgatgctgcttttcccccacatgaggagaacatgcagacagttataaaaaattctgtgcctggg

SEQ ID NO: 44819 - DNA, 1596 bp, Homo Sapiens
attcgggtcaccgtcaagacccccaaggacaaggaggaaattgtgatctgcgatcgagcctcggtcaaggagttcaaagaggaaatctcccggaggtttaaggctcagcaggatcagctggtcctgatcttgtcaggcaagatcctcaaggatggggacacactgaaccagcacggaatcaaggacgggctcactgtccatctggtcatcaagacccctcagaaggctcaagatccagctgctgccactgctactgcgtccatactctctggctttgggggcatcctggggctgggcagcctgggcctgggctctgccaacttcatggagctgcagcagcagatgcagaggcagctgatgtccaatcctgagatgctgttgcagatcatggagaaccccctggtccaggatatgatgtctaaccctgacctgatgcgtcacatgattattgccaaaccccagatgcagcagttgatggagcggaaccctgagatcagccacatgctcaataaccctgaactcatgaggcagacaatggagcttgctcggaatccagccgtgatgcaagagatgatgcggaaccaggaccgggccctgagcaaccttgagagcatccctggagggtataatgccctccgccgcatgtacacggacatccaggagcccatgttcagtgctgcccgggaacagtttggcaacaatcccttctcttccctggccgggaactccgacagctcatcctcccagcctctgcggactgagaatcgagagcccctccctaacccctggagcccctcgccccccacctcccaggcccccgggtccggtggggagggcaccggaggatcggggaccagccaggtgcacccgacagtcttgaacccctttgggatcaatgcggctagcctgaggtcagggatgttcaatagcccagaaatgcaagccctcctccagcagatctctgagaacccccagctgatgcagaatgtgatctcagcaccctacatgcgcagcatgatgcagacgcttgcccagaaccccgacttcgctgctcagatgatggtgaatgtgccgctcttcgcggggaacccccaactgcaggagcagctccgcctgcagctcccagtcttcctgcagcagatgcagaacccagagtcactctccatccttaccaatccccgagccatgcaggcattgctgcagatccagcagggactacagaccttgcagaccgaggcccctgggctggtacccagccttgtctccttcgggatgtcccggaccccagcaccctcagcaggcagcaacgcagggtctacgcccgaggcccccacttcctcaccagccacgccagccacatcttctccaacaggggcttccagcacccagcagcaactcatgcagcagatgatccagcttttggctggaagtggaaactcacaggtgcagacgtcagaagtgagatttcagcagcagctggagcagctcaactccatgggcttcatcaatcgtgaggccaacctgcaggccctgattgccacaggaggggacatcaacgcagctatcgagagactgctgggctcccagctctcctaa

SEQ ID NO: 44820 - DNA, 372 bp, Homo Sapiens
taccaggaaacgagggaacagttggccatgcggctgaagggtttggggtgccaggccggaccccacaatcccacacccccacactccctagacatgttcgctgaggaagtggcagagggggaactggagaccccaacccctacccagagaggagaagcagagttgccaggagatggtctggtggatgtgatgtgggaatataagtgggagaacccgggggatgccgagctgcatgggcccttcaccagcgaccagatgcagacctgggtgagcgaaggctactttcctgatggtgtttactgccggaagctggacccccttcgtggtcagttctacaactccaaacgcattgactttgacctctacacctga

SEQ ID NO: 44821 - DNA, 1758 bp, Homo Sapiens
atgggaaacagctgttacaacatagtagccactctgttgctggtcctcaactttgagaggacaagatcattgcaggatccttgtagtaactgcccagctggtacattctgtgataataacaggaatcagatttgcagtccctgtcctccaaatagtttctccagcgcaggtggacaaaggacctgtgacatatgcaggcagtgtaaaggtgttttcaggaccaggaaggagtgttcctccaccagcaatgcagagtgtgactgcactccagggtttcactgcctgggggcaggatgcagcatgtgtgaacaggattgtaaacaaggtcaagaactgacaaaaaaaggttgtaaagactgttgctttgggacatttaacgatcagaaacgtggcatctgtcgaccctggacaaactgttctttggatggaaagtctgtgcttgtgaatgggacgaaggagagggacgtggtctgtggaccatctccagccgacctctctccgggagcatcctctgtgaccccgcctgcccctgcgagagagccaggacactctccgcagatcatctccttctttcttgcgctgacgtcgactgcgttgctcttcctgctgttcttcctcacgctccgtttctctgttgttaaacggggcagaaagaaactcctgtatatattcaaacaaccatttatgagaccagtacaaactactcaagaggaagatggctgtagctgccgatttccagaagaagaagaaggaggatgtgaactgtgaaatggaagtcaatagggctgttgggactttcttgaaaagaagcaaggaaatatgagtcatccgctatcacagctttcaaaagcaagaacaccatcctacataatacccaggattcccccaacacacgttcttttctaaatgccaatgagttggcctttaaaaatgcaccactttttttttttttttgacagggtctcactctgtcacccaggctggagtgcagtggcaccaccatggctctctgcagccttgacctctgggagctcaagtgatcctcctgcctcagtctcctgagtagctggaactacaaggaagggccaccacacctgactaacttttttgttttttgtttggtaaagatggcatttcaccatgttgtacaggctggtctcaaactcctaggttcactttggcctcccaaagtgctgggattacagacatgaactgccaggcccggccaaaataatgcaccacttttaacagaacagacagatgaggacagagctggtgataaaaaaaaaaaaaaaaaagcattttctagataccacttaacaggtttgagctagtttttttgaaatccaaagaaaattatagtttaaattcaattacatagtccagtggtccaactataattataatcaaaatcaatgcaggtttgttttttggtgctaatatgacatatgacaataagccacgaggtgcagtaagtacccgactaaagtttccgtgggttctgtcatgtaacacgacatgctccaccgtcaggggggagtatgagcagagtgcctgagtttagggtcaaggacaaaaaacctcaggcctggaggaagttttggaaagagttcaagtgtctgtatatcctatggtcttctccatcctcacaccttctgcctttgtcctgctcccttttaagccaggttacattctaaaaattcttaacttttaacataatattttataccaaagccaataaatgaactgcatatgata

SEQ ID NO: 44822 - DNA, 447 bp, Homo Sapiens
gacatcaaagtggctttgcctagaagccaaggccattggtccaacgcagacatcttgaggttactggaatgcatggagaataatctcccatatgatgacaacggcacgttcagctcaactcagtcacacatggactggggaaaagtagcttttaaaaacttttctggtgaaatgtgcagactcaaatggttagagatttcttgcagcttgagaaaattcagcactttgaaaaaattagtcctggaagctaagaaatgtgttaaaaatacaaacaaaagccaaaaaggcaggaaccatccagactttccaaagaggctccttactgcttatatccgcttcttcaaggagaattggccccagtactcccaaatgtaccctgggatgagaagccaggaagtgaccaaaatcctgtcaaagaaatacaaggagctcccagagcagatgaaa

SEQ ID NO: 44823 - DNA, 10464 bp, Homo Sapiens
gcggcagaggcggagccgctgtggcactgctgcgcctctgctgcgcctcgggtgtcttttgcggcggtgggtcgccgccgggagaagcgtgaggggacagatttgtgaccggcgcggtttttgtcagcttactccggccaaaaaagaactgcacctctggagcggacttatttaccaagcattggaggaatatcgtaggtaaaaatgcctattggatccaaagagaggccaacattttttgaaatttttaagacacgctgcaacaaagcagatttaggaccaataagtcttaattggtttgaagaactttcttcagaagctccaccctataattctgaacctgcagaagaatctgaacataaaaacaacaattacgaaccaaacctatttaaaactccacaaaggaaaccatcttataatcagctggcttcaactccaataatattcaaagagcaagggctgactctgccgctgtaccaatctcctgtaaaagaattagataaattcaaattagacttaggaaggaatgttcccaatagtagacataaaagtcttcgcacagtgaaaactaaaatggatcaagcagatgatgtttcctgtccacttctaaattcttgtcttagtgaaagtcctgttgttctacaatgtacacatgtaacaccacaaagagataagtcagtggtatgtgggagtttgtttcatacaccaaagtttgtgaagggtcgtcagacaccaaaacatatttctgaaagtctaggagctgaggtggatcctgatatgtcttggtcaagttctttagctacaccacccacccttagttctactgtgctcatagtcagaaatgaagaagcatctgaaactgtatttcctcatgatactactgctaatgtgaaaagctatttttccaatcatgatgaaagtctgaagaaaaatgatagatttatcgcttctgtgacagacagtgaaaacacaaatcaaagagaagctgcaagtcatggatttggaaaaacatcagggaattcatttaaagtaaatagctgcaaagaccacattggaaagtcaatgccaaatgtcctagaagatgaagtatatgaaacagttgtagatacctctgaagaagatagtttttcattatgtttttctaaatgtagaacaaaaaatctacaaaaagtaagaactagcaagactaggaaaaaaattttccatgaagcaaacgctgatgaatgtgaaaaatctaaaaaccaagtgaaagaaaaatactcatttgtatctgaagtggaaccaaatgatactgatccattagattcaaatgtagcaaatcagaagccctttgagagtggaagtgacaaaatctccaaggaagttgtaccgtctttggcctgtgaatggtctcaactaaccctttcaggtctaaatggagcccagatggagaaaatacccctattgcatatttcttcatgtgaccaaaatatttcagaaaaagacctattagacacagagaacaaaagaaagaaagattttcttacttcagagaattctttgccacgtatttctagcctaccaaaatcagagaagccattaaatgaggaaacagtggtaaataagagagatgaagagcagcatcttgaatctcatacagactgcattcttgcagtaaagcaggcaatatctggaacttctccagtggcttcttcatttcagggtatcaaaaagtctatattcagaataagagaatcacctaaagagactttcaatgcaagtttttcaggtcatatgactgatccaaactttaaaaaagaaactgaagcctctgaaagtggactggaaatacatactgtttgctcacagaaggaggactccttatgtccaaatttaattgataatggaagctggccagccaccaccacacagaattctgtagctttgaagaatgcaggtttaatatccactttgaaaaagaaaacaaataagtttatttatgctatacatgatgaaacatcttataaaggaaaaaaaataccgaaagaccaaaaatcagaactaattaactgttcagcccagtttgaagcaaatgcttttgaagcaccacttacatttgcaaatgctgattcaggtttattgcattcttctgtgaaaagaagctgttcacagaatgattctgaagaaccaactttgtccttaactagctcttttgggacaattctgaggaaatgttctagaaatgaaacatgttctaataatacagtaatctctcaggatcttgattataaagaagcaaaatgtaataaggaaaaactacagttatttattaccccagaagctgattctctgtcatgcctgcaggaaggacagtgtgaaaatgatccaaaaagcaaaaaagtttcagatataaaagaagaggtcttggctgcagcatgtcacccagtacaacattcaaaagtggaatacagtgatactgactttcaatcccagaaaagtcttttatatgatcatgaaaatgccagcactcttattttaactcctacttccaaggatgttctgtcaaacctagtcatgatttctagaggcaaagaatcatacaaaatgtcagacaagctcaaaggtaacaattatgaatctgatgttgaattaaccaaaaatattcccatggaaaagaatcaagatgtatgtgctttaaatgaaaattataaaaacgttgagctgttgccacctgaaaaatacatgagagtagcatcaccttcaagaaaggtacaattcaaccaaaacacaaatctaagagtaatccaaaaaaatcaagaagaaactacttcaatttcaaaaataactgtcaatccagactctgaagaacttttctcagacaatgagaataattttgtcttccaagtagctaatgaaaggaataatcttgctttaggaaatactaaggaacttcatgaaacagacttgacttgtgtaaacgaacccattttcaagaactctaccatggttttatatggagacacaggtgataaacaagcaacccaagtgtcaattaaaaaagatttggtttatgttcttgcagaggagaacaaaaatagtgtaaagcagcatataaaaatgactctaggtcaagatttaaaatcggacatctccttgaatatagataaaataccagaaaaaaataatgattacatgaacaaatgggcaggactcttaggtccaatttcaaatcacagttttggaggtagcttcagaacagcttcaaataaggaaatcaagctctctgaacataacattaagaagagcaaaatgttcttcaaagatattgaagaacaatatcctactagtttagcttgtgttgaaattgtaaataccttggcattagataatcaaaagaaactgagcaagcctcagtcaattaatactgtatctgcacatttacagagtagtgtagttgtttctgattgtaaaaatagtcatataacccctcagatgttattttccaagcaggattttaattcaaaccataatttaacacctagccaaaaggcagaaattacagaactttctactatattagaagaatcaggaagtcagtttgaatttactcagtttagaaaaccaagctacatattgcagaagagtacatttgaagtgcctgaaaaccagatgactatcttaaagaccacttctgaggaatgcagagatgctgatcttcatgtcataatgaatgccccatcgattggtcaggtagacagcagcaagcaatttgaaggtacagttgaaattaaacggaagtttgctggcctgttgaaaaatgactgtaacaaaagtgcttctggttatttaacagatgaaaatgaagtggggtttaggggcttttattctgctcatggcacaaaactgaatgtttctactgaagctctgcaaaaagctgtgaaactgtttagtgatattgagaatattagtgaggaaacttctgcagaggtacatccaataagtttatcttcaagtaaatgtcatgattctgttgtttcaatgtttaagatagaaaatcataatgataaaactgtaagtgaaaaaaataataaatgccaactgatattacaaaataatattgaaatgactactggcacttttgttgaagaaattactgaaaattacaagagaaatactgaaaatgaagataacaaatatactgctgccagtagaaattctcataacttagaatttgatggcagtgattcaagtaaaaatgatactgtttgtattcataaagatgaaacggacttgctatttactgatcagcacaacatatgtcttaaattatctggccagtttatgaaggagggaaacactcagattaaagaagatttgtcagatttaacttttttggaagttgcgaaagctcaagaagcatgtcatggtaatacttcaaataaagaacagttaactgctactaaaacggagcaaaatataaaagattttgagacttctgatacattttttcagactgcaagtgggaaaaatattagtgtcgccaaagagtcatttaataaaattgtaaatttctttgatcagaaaccagaagaattgcataacttttccttaaattctgaattacattctgacataagaaagaacaaaatggacattctaagttatgaggaaacagacatagttaaacacaaaatactgaaagaaagtgtcccagttggtactggaaatcaactagtgaccttccagggacaacccgaacgtgatgaaaagatcaaagaacctactctattgggttttcatacagctagcgggaaaaaagttaaaattgcaaaggaatctttggacaaagtgaaaaacctttttgatgaaaaagagcaaggtactagtgaaatcaccagttttagccatcaatgggcaaagaccctaaagtacagagaggcctgtaaagaccttgaattagcatgtgagaccattgagatcacagctgccccaaagtgtaaagaaatgcagaattctctcaataatgataaaaaccttgtttctattgagactgtggtgccacctaagctcttaagtgataatttatgtagacaaactgaaaatctcaaaacatcaaaaagtatctttttgaaagttaaagtacatgaaaatgtagaaaaagaaacagcaaaaagtcctgcaacttgttacacaaatcagtccccttattcagtcattgaaaattcagccttagctttttacacaagttgtagtagaaaaacttctgtgagtcagacttcattacttgaagcaaaaaaatggcttagagaaggaatatttgatggtcaaccagaaagaataaatactgcagattatgtaggaaattatttgtatgaaaataattcaaacagtactatagctgaaaatgacaaaaatcatctctccgaaaaacaagatacttatttaagtaacagtagcatgtctaacagctattcctaccattctgatgaggtatataatgattcaggatatctctcaaaaaataaacttgattctggtattgagccagtattgaagaatgttgaagatcaaaaaaacactagtttttccaaagtaatatccaatgtaaaagatgcaaatgcatacccacaaactgtaaatgaagatatttgcgttgaggaacttgtgactagctcttcaccctgcaaaaataaaaatgcagccattaaattgtccatatctaatagtaataattttgaggtagggccacctgcatttaggatagccagtggtaaaatcgtttgtgtttcacatgaaacaattaaaaaagtgaaagacatatttacagacagtttcagtaaagtaattaaggaaaacaacgagaataaatcaaaaatttgccaaacgaaaattatggcaggttgttacgaggcattggatgattcagaggatattcttcataactctctagataatgatgaatgtagcacgcattcacataaggtttttgctgacattcagagtgaagaaattttacaacataaccaaaatatgtctggattggagaaagtttctaaaatatcaccttgtgatgttagtttggaaacttcagatatatgtaaatgtagtatagggaagcttcataagtcagtctcatctgcaaatacttgtgggatttttagcacagcaagtggaaaatctgtccaggtatcagatgcttcattacaaaacgcaagacaagtgttttctgaaatagaagatagtaccaagcaagtcttttccaaagtattgtttaaaagtaacgaacattcagaccagctcacaagagaagaaaatactgctatacgtactccagaacatttaatatcccaaaaaggcttttcatataatgtggtaaattcatctgctttctctggatttagtacagcaagtggaaagcaagtttccattttagaaagttccttacacaaagttaagggagtgttagaggaatttgatttaatcagaactgagcatagtcttcactattcacctacgtctagacaaaatgtatcaaaaatacttcctcgtgttgataagagaaacccagagcactgtgtaaactcagaaatggaaaaaacctgcagtaaagaatttaaattatcaaataacttaaatgttgaaggtggttcttcagaaaataatcactctattaaagtttctccatatctctctcaatttcaacaagacaaacaacagttggtattaggaaccaaagtgtcacttgttgagaacattcatgttttgggaaaagaacaggcttcacctaaaaacgtaaaaatggaaattggtaaaactgaaactttttctgatgttcctgtgaaaacaaatatagaagtttgttctacttactccaaagattcagaaaactactttgaaacagaagcagtagaaattgctaaagcttttatggaagatgatgaactgacagattctaaactgccaagtcatgccacacattctctttttacatgtcccgaaaatgaggaaatggttttgtcaaattcaagaattggaaaaagaagaggagagccccttatcttagtgggagaaccctcaatcaaaagaaacttattaaatgaatttgacaggataatagaaaatcaagaaaaatccttaaaggcttcaaaaagcactccagatggcacaataaaagatcgaagattgtttatgcatcatgtttctttagagccgattacctgtgtaccctttcgcacaactaaggaacgtcaagagatacagaatccaaattttaccgcacctggtcaagaatttctgtctaaatctcatttgtatgaacatctgactttggaaaaatcttcaagcaatttagcagtttcaggacatccattttatcaagtttctgctacaagaaatgaaaaaatgagacacttgattactacaggcagaccaaccaaagtctttgttccaccttttaaaactaaatcacattttcacagagttgaacagtgtgttaggaatattaacttggaggaaaacagacaaaagcaaaacattgatggacatggctctgatgatagtaaaaataagattaatgacaatgagattcatcagtttaacaaaaacaactccaatcaagcagtagctgtaactttcacaaagtgtgaagaagaacctttagatttaattacaagtcttcagaatgccagagatatacaggatatgcgaattaagaagaaacaaaggcaacgcgtctttccacagccaggcagtctgtatcttgcaaaaacatccactctgcctcgaatctctctgaaagcagcagtaggaggccaagttccctctgcgtgttctcataaacagctgtatacgtatggcgtttctaaacattgcataaaaattaacagcaaaaatgcagagtcttttcagtttcacactgaagattattttggtaaggaaagtttatggactggaaaaggaatacagttggctgatggtggatggctcataccctccaatgatggaaaggctggaaaagaagaattttatagggctctgtgtgacactccaggtgtggatccaaagcttatttctagaatttgggtttataatcactatagatggatcatatggaaactggcagctatggaatgtgcctttcctaaggaatttgctaatagatgcctaagcccagaaagggtgcttcttcaactaaaatacaggcaatatgatacggaaattgatagaagcagaagatcggctataaaaaagataatggaaagggatgacacagctgcaaaaacacttgttctctgtgtttctgacataatttcattgagcgcaaatatatctgaaacttctagcaataaaactagtagtgcagatacccaaaaagtggccattattgaacttacagatgggtggtatgctgttaaggcccagttagatcctcccctcttagctgtcttaaagaatggcagactgacagttggtcagaagattattcttcatggagcagaactggtgggctctcctgatgcctgtacacctcttgaagccccagaatctcttatgttaaagatttctgctaacagtactcggcctgctcgctggtataccaaacttggattctttcctgaccctagaccttttcctctgcccttatcatcgcttttcagtgatggaggaaatgttggttgtgttgatgtaattattcaaagagcataccctatacagtggatggagaagacatcatctggattatacatatttcgcaatgaaagagaggaagaaaaggaagcagcaaaatatgtggaggcccaacaaaagagactagaagccttattcactaaaattcaggaggaatttgaagaacatgaagaaaacacaacaaaaccatatttaccatcacgtgcactaacaagacagcaagttcgtgctttgcaagatggtgcagagctttatgaagcagtgaagaatgcagcagacccagcttaccttgagggttatttcagtgaagagcagttaagagccttgaataatcacaggcaaatgttgaatgataagaaacaagctcagatccagttggaaattaggaaggccatggaatctgctgaacaaaaggaacaaggtttatcaagggatgtcacaaccgtgtggaagttgcgtattgtaagctattcaaaaaaagaaaaagattcagttatactgagtatttggcgtccatcatcagatttatattctctgttaacagaaggaaagagatacagaatttatcatcttgcaacttcaaaatctaaaagtaaatctgaaagagctaacatacagttagcagcgacaaaaaaaactcagtatcaacaactaccggtttcagatgaaattttatttcagatttaccagccacgggagccccttcacttcagcaaatttttagatccagactttcagccatcttgttctgaggtggacctaataggatttgtcgtttctgttgtgaaaaaaacaggacttgcccctttcgtctatttgtcagacgaatgttacaatttactggcaataaagttttggatagaccttaatgaggacattattaagcctcatatgttaattgctgcaagcaacctccagtggcgaccagaatccaaatcaggccttcttactttatttgctggagatttttctgtgttttctgctagtccaaaagagggccactttcaagagacattcaacaaaatgaaaaatactgttgagaatattgacatactttgcaatgaagcagaaaacaagcttatgcatatactgcatgcaaatgatcccaagtggtccaccccaactaaagactgtacttcagggccgtacactgctcaaatcattcctggtacaggaaacaagcttctgatgtcttctcctaattgtgagatatattatcaaagtcctttatcactttgtatggccaaaaggaagtctgtttccacacctgtctcagcccagatgacttcaaagtcttgtaaaggggagaaagagattgatgaccaaaagaactgcaaaaagagaagagccttggatttcttgagtagactgcctttacctccacctgttagtcccatttgtacatttgtttctccggctgcacagaaggcatttcagccaccaaggagttgtggcaccaaatacgaaacacccataaagaaaaaagaactgaattctcctcagatgactccatttaaaaaattcaatgaaatttctcttttggaaagtaattcaatagctgacgaagaacttgcattgataaatacccaagctcttttgtctggttcaacaggagaaaaacaatttatatctgtcagtgaatccactaggactgctcccaccagttcagaagattatctcagactgaaacgacgttgtactacatctctgatcaaagaacaggagagttcccaggccagtacggaagaatgtgagaaaaataagcaggacacaattacaactaaaaaatatatctaa

SEQ ID NO: 44824 - DNA, 3562 bp, Homo Sapiens
tctccgcgaccccctaggatccagccactgtacccgtgctccccaaacccaggctccagccgtcgtctccgcgctcccggggatccagctgtcgcgccagtacccgcgaggacagcggcaccgcccacaccccgcgcgctcagagcccggccgggcctcggcgtggagatgaacgcgccgctggacggcctgtcggtgagctcgtcctccaccggctcgctgggctcggcggccggggcgggcggcggcgggggcgcggggctgcggttactgtctgccaacgtgcgccagctgcaccaagcgctgaccgcgctgctgagcgaggcggagcgggagcagttcacccactgcctgaacgcttaccacgcgcgccgcaacgtcttcgacctggtgcgcaccctgcgcgtgctgctggacagtccggtcaagcggcgcctgctgcccatgcttcgtctggtcatcccgcgctccgaccagctgctcttcgaccaatacacggccgagggcctctacctgcccgccaccaccccctacaggcagcccgcctggggcggccccgacagcgcggggccaggggaggtgcgcctggtgagtttgcggcgtgccaaggcccacgagggcttgggcttcagcatccgtgggggctcggagcacggcgtgggcatctacgtgtctctggtggaaccaggctctctagctgagaaggaaggactgcgggtcggggaccagattctgcgcgtcaacgacaaatccctggcccgggtgacccacgcggaggccgtcaaggctctgaagggctccaagaagctggtgctgtctgtgtactcagcagggcgcatccctgggggctacgtcaccaaccacatctacacctgggtggacccgcagggccgcagcatctccccaccctcgggcctgccccagccccacggtggtgccctgaggcagcaggagggtgaccggaggagcaccctgcacctcctgcaaggaggggatgagaaaaaggtgaacctggtgctgggggacggccggtccctgggcctcacgatccgtgggggagctgagtacggccttggcatttacatcactggcgtggacccaggctctgaagcagaaggcagcgggctcaaggttggggaccagattctagaagtgaatgggcggagctttctcaacatcctacacgacgaggctgtcaggctgcttaagtcatctcggcacctcatcctgacagtgaaggacgtcgggaggctgccccgtgcccgcaccactgtggacgagaccaagtggatcgccagttcccggatcagggagaccatggcgaactcggcagggtttcttggcgatctcacaacagaaggaataaacaagccaggattttacaagggcccagccggctcccaggtgaccctgagcagcctggggaaccagacacgagtgctgctggaggagcaggctcggcacctgctgaacgagcaggaacacgccaccatggcctactacctggatgagtaccgtggtggcagcgtctctgtggaggccctcgtcatggccctgttcaagctgctcaacacccacgccaagttctcactcctctctgaggtgagaggcaccatttccccgcaagacctagaacgcttcgaccacctggtgctgaggcgtgagattgagtccatgaaggcgcggcagcccccaggccccggggctggggacacctactccatggtctcctacagtgacacgggttcatccacaggcagccacggcacctccaccaccgtcagctcggccaggaacactctggacctggaggaaactggcgaggctgtccagggcaatatcaacgccctcccagatgtgtccgtggatgatgtcagatccacctcccaggggctgtcaagcttcaagccactgcctcgcccaccacctctggcccaaggcaacgacctcccactaggccagccaaggaagctggggagagaggacctccagccaccttcctccatgccttcctgctcgggcactgtcttctcggctccacagaaccgcagcccgccagcgggcaccgcacccaccccagggacctcctctgcacaggacttgccctcttcccccatctatgcctccgtctcccctgccaaccccagctccaagaggccgctggacgcccatctggccctggtcaaccaacaccccatcggccccttcccacgggtccagtcacccccgcacctgaaaagcccctctgcagaggccacagtggctgggggctgccttctgcccccatcaccctctggccacccagaccagacaggcacaaaccagcactttgtcatggtggaggtccaccgccccgacagcgagccagacgtcaatgaagtgagggcgctgccccagacgcgcacagcctctacgctctcccacctctcggacagcgggcagactctaagcgaggacagtggtgtggatgctggcgaggcagaggccagcgccccaggccgaggaaggcagtcggtgtccaccaagagcaggagtagcaaggagctgcctcggaacgagaggcccacagatggggccaacaaaccgcctggacttctggagcccacgtccactctggtccgtgtgaagaaaagtgcggccaccctgggcatcgccatcgagggtggcgccaacacccgccagcccctgcctaggattgtcactattcagagaggcggctcagctcacaactgtgggcagctcaaggtgggccacgtgattctggaagtgaatgggctgacgcttcggggcaaggagcaccgggaggccgcccgcattatcgccgaggccttcaagactaaggaccgtgactacattgactttctggtcactgagttcaatgtgatgctctagaggccaaggcctgagggcctcccaccactgcccagcccctggtcccagtccctttccaccgttggcttcatcaagctccttgcggggttggggctgcatggccagggtggcaggaagacatcccccctccatcccagcccactggaccagaactgggagaggaagagagcaggacaaggcagacagaaggtcaggtcaggaactggtgctgtactgggtacacagtaggcgcccaggacaagtgggttgcaagacaggaagaaaggaaaaggaagggcagagtgctggtttctccaggttgggttgggggcactgctgtcccccctccagctaggacccagcccatccccagatgcctgagcctttgtccaaagtgaggtcactcgagaattcatggacacggcccccagtcagggggcatcttgcaagacctttagtgccacaaataagcatcgagcacctccccattcacacccccattcctcctggctccttatcccccatggtgtttattatttatttccctccccatgcccctggggaccccaaggccccagcttccctctgcacccccagcctatcccagaggccttgcaggtgaccagcagtgtcattgtatttatatacagagcttatgactttaatttttcaataaagaaatctgaacaag

SEQ ID NO: 44825 - DNA, 882 bp, Homo Sapiens
gttgcctaaacctctgccacccacctgtgaacttcactttgccacagggaggcactgaactgaaaaactgccttgtaagaggtgtcgcccctctgtctactccctttcttatatcaagaggggaaaaacacgtaactacctctacccgatctggtcaccatacgcctattacctttactgttacaagtaccggatcactctccgggagaagatgctgcctcgttgttataaaagcatcacttataaggaagaggaggacttgacactccagccccgttcctgcctccagtgcgagtccctagtaggcctccaggagggcaaaagcaccgagcagggtaaccacgaccagcttaaagaactgtattcggctgggaacttgacggtgctggctactgaccccctgctccaccaggacccagtacagttagactttcacttccgccttacctcccagacctctgcccattggcacggccttctctgtgaccgtcgactcttcttggatatcccatatcaggccttggatcaaggcaaccgggaaagtttgactgcaaccctggagtacgtggaagagaagacaaatgtggactctgtgtttgtgaacttccagaatgatcggaacgacagaggtgccctgctgcgggccttcagctacatgggctttgaggtggtcagaccagatcaccctgccctccctcccttggacaatgtcatctttatggtgtatccccttgaaagggatgttggccacctgcccagtgagcctccttgaacatgcttattccaacgctttgaggggctggaagccttgacacatggaatcaggggcccgggatgtgattcaggacactttccatcctaggaataaagggtagtgcaatc

SEQ ID NO: 44826 - DNA, 1563 bp, Homo Sapiens
atgagcaaggtggcaagatcatcaagtgagtcagacgtgcagctctgggaaacagaagaggatgacatgacagaaggtgatttagggtatggcctcggaaggaaacctggtgggatttatgaaatagaattttcacataggtctagaaaaagatcagatggaaagaactttagccctcctccatttccgagaaagggagaagaaagaaatgaagcgagttttcagtattccaagcataagagccagcaagatacattccctcaagtgtccagaatttccaattacagacgacaaagtagcactgtagattcgaattcagaattgtcaaatgaagaattaaggcaatgtcttaatgaaactttagaggaggtagaaatgttaaaaactgaacttgaggcatctcaaagacaactcagaggtaaagaggaagcattgaaaattcttcaaagcatggcaatactgggcaaagccacaagtcatacgcaggcagtgcttcaaaaaactatggaacaaaacagatccttggagaaggaaataaatgccttgcagtgggaaatagaatttgatcataatagatttaaaaatatagaggaatcttggatccaaaaatatgacaggctaaactgtgaaaatgcagtcctcaaagagaatttgaaagtgaaaacagaagaaattaaaatgctgaagtctgacaatgcagttttgaatcaacggtatttggaggccctcgccatgcttgatatcaaacagcagaagatggctcaggaaaacatgtgctgtgataaaagtggctttgcagaggcttcaggtcttgaggtaggagcaatgcttttcaatttaaagcttgcggtcctcggagcctgcctttgtcatgggcccggagggaacccctgttcttgtgccagaatggcagcatccactcggaaactgcttcttcagctcaaacaagagttggaaattttgcagaagagtaaagaagaagcttacgtgatggcagatgctttcagaattgcatttgagcaacaattaatgagaaaaaatgaccaggcactacaattgacacaaatggataaaatgcataaaaaagcaacaaaatggatgaattggaagcaccttaaagaggatggatttccatcaccaaggagtaagaagaccttcgggcagagactgttgggtatgctcccttcagaaaacagttctaagaggatggaagaccaggacagtcctcaagaggtccttaagatgctcatagatttgcttaatgataaagaagaagctttggctcatcaaagaaaagttagctacatgcttgctcgggcattggaagacaaagacactgcttcaaacgagaataaagaaaaaaatcctataaaagagaatttccctttcaacaacccctggcgtaagacttcagaattctctgttttgggtgatcctatacattcaagtgtctgcattttaaattctgtgggctgcatttgttcaatccagcactctcaaatagatccaaactatagaactcttaaaagatcccattctttgccatcaagtatcatattttaa

SEQ ID NO: 44827 - DNA, 405 bp, Homo Sapiens
atgctaacacagtgttttgaaaaaggacggatcagatgccatcagtattggccagaggacaacaagccagttactgtctttggagatatagtgattacaaagctaatggaggatgttcaaatagattggactatcagggatctgaaaattgaaaggcatggggattgcatgactgttcgacagtgtaactttactgcctggccagagcatggggttcctgagaacagcgcccctctaattcactttgtgaagttggttcgagcaagcagggcacatgacaccacacctatgattgttcactgcagtgctggagttggaagaactggagtttttattgctctggaccatttaacacaacatataaatgaccatgattttgtggatatatatggactagtagctgaa

SEQ ID NO: 44828 - DNA, 1812 bp, Homo Sapiens
cggccttcgtcgccgccgcctccctgctgctcctcctcctttccccagcccgccgcggccatggcggacagcgccagcgagagcgacacggacggggcggggggcaacagcagcagctcggccgccatgcagtcgtcctgctcgtcgacctcgggcggcggcggtggcggcgggggaggcggcggcggtgggaagtcggggggcattgtcatctcgccgttccgcctggaggagctcaccaaccgcctggcctcgctgcagcaagagaacaaggtgctgaagatagagctggagacctacaaactgaagtgcaaggcactgcaggaggagaaccgcgacctgcgcaaagccagcgtgaccatccaagccagggctgagcaggaagaagaattcattagtaacactttattcaagaaaattcaggctttgcagaaggagaaagaaacccttgctgtaaattatgagaaagaagaagaattcctcactaatgagctctccagaaaattgatgcagttgcagcatgagaaagccgaactagaacagcatcttgaacaagagcaggaatttcaggtcaacaaactgatgaagaaaattaaaaaactggagaatgacaccatttctaagcaacttacattagaacagttgagacgggagaagattgaccttgaaaatacattggaacaagaacaagaagcactagttaatcgcctctggaaaaggatggataagcttgaagctgaaaagcgaatcctgcaggaaaaattagaccagcccgtctctgctccaccatcgcctagagatatctccatggagattgattctccagaaaatatgatgcgtcacatcaggtttttaaagaatgaagtggaacggctgaagaagcaactgagagctgctcagttacagcattcagagaaaatggcacagtatctggaggaggaacgtcacatgagagaagagaacttgaggctccagaggaagctgcagagggagatggagagaagagaagccctctgtcgacagctctccgagagtgagtccagcttagaaatggacgacgaaaggtattttaatgagatgtctgcacaaggattaagacctcgcactgtgtccagcccgatcccttacacaccttctccgagttcaagcaggcctatatcacctggtctatcatatgcaagtcacacggttggtttcacgccaccaacttcactgactagagctggaatgtcttattacaattccccgggtcttcacgtgcagcacatgggaacatcccatggtatcacaaggccttcaccacggagaagcaacagtcctgacaaattcaaacggcccacgccgcctccatctcccaacacacagaccccagtccagccacctccgcctccacctccgccacccatgcagcccacggtcccctcaagccacctcgcagcctactccttcgcaacattcggcgcacccctcctcccagccttaatgcatgagcttagtctgaatttcaagttgggactcatccaatggagccgtctactcaacgccaaaggcttctctggcatatttggatatgacttatttgcactgaggttatctaggcttcactatccattgtgttgtaaatgtttgtcagaaatgcagccagtgttgtgggtctacaacactaaccagacgactttttccatcagtgttttacttgaatcttcatgtacgtccattccctggctggaaccttcgctgtttggtatttggtatttcagcagcagtgtgcaatttttgcttggcccagagcttcattctcctggcttttag

SEQ ID NO: 44829 - DNA, 519 bp, Homo Sapiens
atggcggcggcaggcgtgacggcaaaggcgggaggagggaccagcgcggcagcggcttctctcatccgtgcacggagccccgcatggccgcggcgggcagtaagctgcagcctggcgcggggcaccggagccccgaagtgcgggagtgactcgactccgcctccgcctctaccccgccgcaggagccgtgcgcgccgcggccatcttggaaacggcgaccggccgagcgccggggctacggtgggcggcgagggacaagcctcccagatcggcggcggtggcggcggcggcggcgggcgccggaatgcgaccggacgggggcggagacggcggcagggaggggcggggagcgccgtcaagtgtcggcgcgattcggtcctggagccgggtctcgccagctcgcccggtgtcgccccggccggtggcagtgggggactgtggagcggagccgggctgtgcagcgggctgggagctcgaggcttcccaggcggtcgtcggtctgggagggacgctgggtag

SEQ ID NO: 44830 - DNA, 1404 bp, Homo Sapiens
atgtttatggctcctggagccggtgcaattccaaaaaaccccagaaatcctcagggtggctcttcctccaaaagttggagctcctacttctctctaccaaacccttttcggagctcacctttgggacagaatgacaacagtgagtatgtgccaatgttacctggaaagttcctggggaggggcctagacaaagaagtctcctataactgggaccccaaagatgcagcttcaaagccttcaggtgagggatcattctcaaagcctggagatgggggatcaccttcaaagccttcagatgatgagcccccaaagaataaagctaagagacctaaccgactttcttttattacaaaaggatataaaatcaagccaaaaccacaaaagcccacacatgagcagagagaagctgacagctctagtgactacgtcaacatggacttcactaaaagagagagcaatacaccagctccctctactcaaggactaccagattcgtggggcataattgctgaacccagacagtcagccttttctaattatgtgaatgttgagtttggagtgccatttccaaatccagcaaacgacctctcagatcttttaagagctataccacgtgccaaccccttatctctggacagtgctaggtggccacttcctccccttcccctcagtgctacaggtagcaatgctattgaggaagagggtgactacattgaagtaattttcaactcagcaatgacaccagccatggctcttgctgacagtgccattcgctatgatgctgaaacaggtcgaatctatgtggtcgacccattttctgagtgctgtatggatatttctctctcccccagccgatgttctgaaccaccacctgtagctaggctgctgcaggaagaagagcaggagagaagacgcccacaaagccgttctcaaagtttctttgcagcagccagagccgctgtctctgcttttccaacagacagcctcgagagagacctttccccatcctcagccccggctgtcgcttcggctgcagagccgactttagccctcagccaagttgtagctgcggcctccgcgctcgccgcagccccgggcatcggcgcagcagccgcagctgctggatttgactccgcctctgcccgctggtttcaacctgttgctaatgctgctgatgccgaagcagtaaggggagcccaagacgttgccggtggctcgaaccctggagcccacaacccatctgcaaaccttgccagaggtgataaccaggctggcggggctgccgctgcagctgccgctccggaaccaccacctcgcagtcgccgggtgccaagacccccggagagagaagattctgacaacgacgacgacactcacgtgagaatggattttgccagacgtgat

SEQ ID NO: 44831 - DNA, 1533 bp, Homo Sapiens
ctgctgcggctggaccccagcgggggcgcgctgctgctatgcggcctcgtagcgctgctgggctggagctggctgcggaggcgccgggcgcggggcatcccgcccgggcccacgccctggcctctggtgggcaacttcgggattgatccctcggtcataggcccgcaggtgctcctggctcacctagcccgcgtgtacggcagcatcttcagcttctttatcggccactacctggtggtggtcctcagcgacttccacagcgtgcgcgaggcgctggtgcagcaggccgaggtcttcagcgaccgcccgcgggtgccgctcatctccatcgtgaccaaggagaagggggttgtgtttgcacattatggtcccgtctggagacaacaaaggaagttctctcattcaactcttcgtcattttgggttgggaaaacttagcttggagcccaagattattgaggagttcaaatatgtgaaagcagaaatgcaaaagcacggagaagaccccttctgccctttctccatcatcagcaatgccgtctctaacatcatttgctccttgtgctttggccagcgctttgattacactaatagtgagttcaagaaaatgcttggttttatgtcacgaggcctagaaatctgtctgaacagtcaagtcctcctggtcaacatatgcccttggctttattaccttccctttggaccatttaaggaattaagacaaattgaaaaggatataaccagtttccttaaaaaaatcatcaaagaccatcaagagtctctggatagagagaaccctcaggacttcatagacatgtaccttctccacatggaagaggagaggaaaaataatagtaacagcagttttgatgaagagtacttattttatatcattggggatctctttattgctgggactgataccacaactaactctttgctctggtgcctgctgtatatgtcgctgaaccccgatgtacaagaaaaggttcatgaagaaattgaaagagtcattggcgccaaccgagctccttccctcacagacaaggcccagatgccctacacagaagccaccatcatggaagtgcagaggctaactgtggtggtgccgcttgccattcctcatatgacctcagagaacacaggcaacatactgaataacacccatatgtttccttttgttttagtgctccaagggtataccattcctaaaggcacattgatcttacccaacctgtggtcagtacatagagacccagccatttgggagaaaccggaggatttctaccctaatcgatttctggatgaccaaggacaactaattaaaaaagaaacctttattccttttgggatagggaagcgggtgtgtatgggagaacaactggcaaagatggaattattcctaatgtttgtgagcctaatgcagagtttcgcatttgctttacctgaggattctaagaagcccctcctgactggaagatttggtctaactttagccccacatccatttaatataactatttcaaggagatga

SEQ ID NO: 44832 - DNA, 276 bp, Homo Sapiens
atgacaatggttaaggaaggcctgctgcaaagacctcaaggatatgagggactagagtgccctctgctgtggaagagcctgcgcaaagatcctgaggtgggaggggtcagggagccaactcattttacggtaagtggaggtgggatccaggggaggattctgagcagaggagggacgtggcccaatttgggctttgaaaggatcctgcttgtctgtgtgccagcatcctggtggtggttgggggagtctgcatcaatcctgggtgctgttacctga

SEQ ID NO: 44833 - DNA, 383 bp, Homo Sapiens
acactctaaattttaaaattggtttaacatttttagctggccactgcggttccccagacccgattgtgaacggtcacattagtggagatggcttcagttacagagacacggtggtttaccagtgcaatcctggtttccggcttgtgggaacttccgtgaggatatgcctgcaagaccacaagtggtctggacaaacgcctgtctgtgtccccatcacatgtggtcaccctggaaaccctgcccacggattcactaatggcagtgagttcaacctgaatgatgtcgtgaatttcacctgcaacacgggctatttgctgcagggcgtgtctcgagcccagtgtcggagcaacggccagtggagtagccctctgcccacgtgtcga

SEQ ID NO: 44834 - DNA, 3239 bp, Homo Sapiens
agtaattgacccaggactcattttcaggaaagcctgaaaatgagtaaaatagtgaaatgaggaatttgaacattttatctttggatggggatcttctgaggatgcaaagagtgattcatccaagccatgtggtaaaatcaggaatttgaagaaaatggaaatgtttacatttttgttgacgtgtatttttctacccctcctaagagggcacagtctcttcacctgtgaaccaattactgttcccagatgtatgaaaatggcctacaacatgacgtttttccctaatctgatgggtcattatgaccagagtattgccgcggtggaaatggagcattttcttcctctcgcaaatctggaatgttcaccaaacattgaaactttcctctgcaaagcatttgtaccaacctgcatagaacaaattcatgtggttccaccttgtcgtaaactttgtgagaaagtatattctgattgcaaaaaattaattgacacttttgggatccgatggcctgaggagcttgaatgtgacagattacaatactgtgatgagactgttcctgtaacttttgatccacacacagaatttcttggtcctcagaagaaaacagaacaagtccaaagagacattggattttggtgtccaaggcatcttaagacttctgggggacaaggatataagtttctgggaattgaccagtgtgcgcctccatgccccaacatgtattttaaaagtgatgagctagagtttgcaaaaagttttattggaacagtttcaatattttgtctttgtgcaactctgttcacattccttacttttttaattgatgttagaagattcagatacccagagagaccaattatatattactctgtctgttacagcattgtatctcttatgtacttcattggatttttgctaggcgatagcacagcctgcaataaggcagatgagaagctagaacttggtgacactgttgtcctaggctctcaaaataaggcttgcaccgttttgttcatgcttttgtattttttcacaatggctggcactgtgtggtgggtgattcttaccattacttggttcttagctgcaggaagaaaatggagttgtgaagccatcgagcaaaaagcagtgtggtttcatgctgttgcatggggaacaccaggtttcctgactgttatgcttcttgctatgaacaaagttgaaggagacaacattagtggagtttgctttgttggcctttatgacctggatgcttctcgctactttgtactcttgccactgtgcctttgtgtgtttgttgggctctctcttcttttagctggcattatttccttaaatcatgttcgacaagtcatacaacatgatggccggaaccaagaaaaactaaagaaatttatgattcgaattggagtcttcagcggcttgtatcttgtgccattagtgacacttctcggatgttacgtctatgagcaagtgaacaggattacctgggagataacttgggtctctgatcattgtcgtcagtaccatatcccatgtccttatcaggcaaaagcaaaagctcgaccagaattggctttatttatgataaaatacctgatgacattaattgttggcatctctgctgtcttctgggttggaagcaaaaagacatgcacagaatgggctgggttttttaaacgaaatcgcaagagagatccaatcagtgaaagtcgaagagtactacaggaatcatgtgagtttttcttaaagcacaattctaaagttaaacacaaaaagaagcactataaaccaagttcacacaagctgaaggtcatttccaaatccatgggaaccagcacaggagctacagcaaatcatggcacttctgcagtagcaattactagccatgattacctaggacaagaaactttgacagaaatccaaacctcaccagaaacatcaatgagagaggtgaaagcggacggagctagcacccccaggttaagagaacaggactgtggtgaacctgcctcgccagcagcatccatctccagactctctggggaacaggtcgacgggaagggccaggcaggcagtgtatctgaaagtgcgcggagtgaaggaaggattagtccaaagagtgatattactgacactggcctggcacagagcaacaatttgcaggtccccagttcttcagaaccaagcagcctcaaaggttccacatctctgcttgttcacccggtttcaggagtgagaaaagagcagggaggtggttgtcattcagatacttgaagaacattttctctcgttactcagaagcaaatttgtgttacactggaagtgacctatgcactgttttgtaagaatcactgttacattcttcttttgcacttaaagttgcattgcctactgttatactggaaaaaatagagttcaagaataatatgactcatttcacacaaaggttaatgacaacaatatacctgaaaacagaaaatgtgcaggttaataatatttttttaatagtgtgggaggacagagttagaggaatcttccttttctatttatgaagattctactcttggtaagagtattttaagatgtactatgctattttacttttttgatataaaatcaagatatttctttgctgaagtatttaaatcttatccttgtatctttttatacatatttgaaaataagcttatatgtatttgaacttttttgaaatcctattcaagtatttttatcatgctattgtgatattttagcactttggtagcttttacactgaatttctaagaaaattgtaaaatagtcttcttttatactgtaaaaaaagatataccaaaaagtcttataataggaatttaactttaaaaacccacttattgataccttaccatctaaaatgtgtgatttttatagtctcgttttaggaatttcacagatctaaattatgtaactgaaataaggtgcttactcaaagagtgtccactattgattgtattatgctgctcactgatccttctgcatatttaaaataaaatgtcctaaagggttagtagacaaaatgttagtcttttgtatattaggccaagtgcaattgacttcccttttttaatgtttcatgaccacccattgattgtattataaccacttacagttgcttatattttttgttttaacttttgttttttaacatttagaatattacattttgtattatacagtacctttctcagacattttgtag

SEQ ID NO: 44835 - DNA, 1347 bp, Homo Sapiens
atggccacagcaggaaatccctggggctggttcctggggtacctcatccttggtgtcgcaggatcgctcgtctctggtagctgcagccaaatcataaacggcgaggactgcagcccgcactcgcagccctggcaggcggcactggtcatggaaaacgaattgttctgctcgggcgtcctggtgcatccgcagtgggtgctgtcagccgcacactgtttccagaactcctacaccatcgggctgggcctgcacagtcttgaggccgaccaagagccagggagccagatggtggaggccagcctctccgtacggcacccagagtacaacagacccttgctcgctaacgacctcatgctcatcaagttggacgaatccgtgtccgagtctgacaccatccggagcatcagcattgcttcgcagtgccctaccgcggggaactcttgcctcgtttctggctggggtctgctggcgaacggcagaatgcctaccgtgctgcagtgcgtgaacgtgtcggtggtgtctgaggaggtctgcagtaagctctatgacccgctgtaccaccccagcatgttctgcgccggcggagggcacgaccagaaggactcctgcaacggtgactctggggggcccctgatctgcaacgggtacttgcagggccttgtgtctttcggaaaagccccgtgtggccaagttggcgtgccaggtgtctacaccaacctctgcaaattcactgagtggatagagaaaaccgtccaggccagttaactctggggactgggaacccatgaaattgacccccaaatacatcctgcggaaggaattcaggaatatctgttcccagcccctcctccctcaggcccaggagtccaggcccccagcccctcctccctcaaaccaagggtacagatccccagcccctcctccctcagacccaggagtccagaccccccagcccctcctccctcagacccaggagtccagcccctcctccctcagacccaggagtccagaccccccagcccctcctccctcagacccaggagtccagcccctcctccctcagacccaggagtccagaccccccagcccctcctccctcagacccaggggtccaggcccccaacccctcctccctcagactcagaggtccaggcccccaacccctccttccccagacccagaggtccaggtcccagcccctcctccctcagacccagcggtccaatgccacctagactctccctgtacacagtgcccccttgtggcacgttgacccaaccttaccagttggtttttcattttttgtccctttcccctagatccagaaataaagtctaagagaagcgc

SEQ ID NO: 44836 - DNA, 381 bp, Homo Sapiens
atgccggagccagcgaagtccgctcccgcgcccaagaagggctcgaagaaagccgtgactaaggcgcagaagaaggacggcaggaagcgcaagcgcagccgcaaggagagctactccgtatacgtgtacaaggtgctgaagcaggtccaccccgacaccggcatctcctctaaggccatgggaatcatgaactccttcgtcaacgacatcttcgaacgcatcgcaggtgaggcttcccgcctgccgcattacaacaagcgctcgaccatcacctccagggagatccagacggccgtgcgcctgctgctgcccggggagttggccaagcacgccgtgtccgagggcaccaaggccgtcaccaagtacaccagcgctaagtaa

SEQ ID NO: 44837 - DNA, 419 bp, Homo Sapiens
gcctcaccaggaaactactaaagttcctggggaagcaaagtagaatttcataagaacaaaatggatggagaggagaaaacctatggtggctgtgaaggccctgatgccacgtatgtcaaattgatatcatctgatggccatgaatttattgtaaaaagagaacatgcattaacatcaggcacgataaaagccatgttgagtggcccaggcgtcagtttgctgagaacgaaaccaatgaggtcaattttagagagataccttcacatgtgctatcgaaagtatgcatgtattttacctacaaggttcgctacactaacagctccatcgagattcctgaattcccaattgcacctgaaattgtactagaactgctgatggctgcgaacttcctagattgttaaataaaataaattataata

SEQ ID NO: 44838 - DNA, 2332 bp, Homo Sapiens
gcgtcctgttcccgcctctccagttaaggccgctggtgtgagccggggctctgcgcgagcgagggacgacggaagggacgggcaggtgtgggcgcggggccacgcagcccgacggcgggagtcgcaggtgctgggtgcatgggccagtgaggacgcacagagatccctcgccgcgcggaggaggagcagcgcgggagccaggcgctgccccaagaccctgcctgcgtccgagcgagcggaacctcgcgcttcgcccggggacaatccgaagtccgcgctatggaagaggagaaatatttgcctgagctgatggcagagaaagatagcctggatccatcttttgtgcatgcgtcgcgccttttggcagaagaaattgaaaagtttcaaggttctgatggaaaaaaggaagacgaagaaaagaagtatcttgatgtcatcagcaacaaaaacataaagctctcagaaagagtactgattcctgtcaagcagtatccaaagttcaattttgtggggaaattgcttggaccaagaggaaactccttgaagaggctacaggaagaaacaggtgctaaaatgtctatcctgggcaaaggatcaatgagagataaagctaaggaagaagaactaaggaagagtggggaagccaaatatgcccacttgagtgatgagcttcatgtattaattgaagtgtttgctccacctggggaagcttattcacgtatgagtcatgcattggaagagattaaaaaattcctggttcctgactacaatgatgaaattcgtcaggaacaactacgtgaattatcttacttaaatggctcagaggactctggtcgtggcagaggtattagaggcagagggatcagaatagctcccacagctccttcaaggggccgtgggggtgccattcctcctcccccaccacctggacgaggtgttctcacccctcggggaagcactgtaacccgtggagcgcttccagtgccacctgtagcaagaggtgtccctacccctcgagcccggggggcaccaacagtgccaggatacagggcacctcctcctccagcccatgaagcttatgaagaatatggttatgatgatggctacgggggtgaatatgatgaccagacctatgagacttatgataacagctatgcgacccaaacacaaagtgtgcctgaatactatgactacggtcatggagtaagtgaggatgcctatgacagctacgcaccagaagaatgggccacaacccgctctagcttgaaggcaccaccgcaaaggtcagccagagggggatacagggaacacccctatggtagatattgaaggtccttcccacctgtgacctcacctcaaagacaattcatagcctgtggtctccacataaacagcaacaagacaagtaatagtcctttttttgtttgtttgtttctattctagggataactgctcatgattactcccatatatttctagtatttccctctgtactgttggcgtgacattgacactagtattattttacaaaacagactgaaaaagacattagcaagcatagtctataaacctttcagtaggatgatattctcttggttgtttttcattgttgtgtgtaatcttttttttttctttttcttttttttttttttgaggaaaagcatgaatttgttaacagattttgagtctcaaccaactagcagaaactttgtttagggttgctaaaagactgtaatatgatttttgaactagctgataataaagttgtagataagatgttttaacctgtcttttaatatctgttagttagacaaagatgtttgatattaagtttgtaaatttaattttaatgctgttttaatggggttgaaaacaagcagctactgtatgtatgtagctaactgaatttgttcagtgttttaacctgtatttgttaaaaaagaaaaaaaaacacacataaagttccatgtgtaagcttctctaaataggaaaccacaatttgtcaaatatgtttgccataatttgtcaataaagctgaaaacttttgtaaaaattaaatttggaattacttgttttctagctttaaatgcctgctttatttcttcttcaagagatgcctaaaatgttttctatttaaaaattacaaaaatgaacccaagtctgttttaagatatttgtgtaatacttaaaaatgtattaataacttatggttgttaaataatttaaaagttaacaaactaaactgttacatgaatcatggttagtaaacactaatgtataacatgttaatggaaaaaaatggatttagaataataaatggattttaaactat

SEQ ID NO: 44839 - DNA, 888 bp, Homo Sapiens
atggtgcattacggccactccaaccagctgcgccaggcacgggccatgggtgactacctcatcgtaggcgtgcacaccgatgaggagatcgccaagcacaaggggcccccggtgttcactcaggaggagagatacaagatggtgcaggccatcaaatgggtggacgaggtggtgccagcggctccctacgtcactacactagagaccctggacaaatacaactgtgacttctgtgttcacggcaatgacatcaccctgactgtagatggccgggacacctatgaggaagtaaagcaggctgggaggtacagagaatgcaagcgcacgcaaggggtgtccaccacagacctcgtgggccgcatgctgctggtaaccaaagcccatcacagcagccaggtgaggcagcacctgggaggcctcccccgccaacctgctccctctcttggcttgcagtgccctggtgggcggaacccctggaccggggtatcccagttcctgcagacatctcagaagatcatccagtttgcttctgggaaggagccccagccaggggagacagtcatctatgtggctggtgccttcgacctgttccacatcgggcatgtggacttcctggagaaggtgcacaggctggcagagaggccctacatcatcgcgggcttacactttgaccaggaggtcaatcactacaaggggaagaactaccccatcatgaatctgcatgaacggactctgagcgtgctggcctgccggtacgtgtcagaagtggtgattggagccccgtacgcggtcacagcagagctcctaagtcacttcaaggtggacctggtgtgtcacggcaagacagaaattatccctgacagggatggctccgacccataccaggtg

SEQ ID NO: 44840 - DNA, 306 bp, Homo Sapiens
atgtctgacctggaggcaaaaccttcaactgagcatttgggggataagataaaagatgaagatattaaactcagggttattggacaggatagcagtgagattcatttcaaagtgaaaatgacaacacctctcaagaaactcaagaaatcgtactgtcagagacagggcgttccagtgaattccctcaggtttctctttgaaggtcagagaattgctgataatcatactccagaagaactgggaatggaggaagaagatgtgattgaggtttatcaggaacaaatcggaggtcattcaacagtttag

SEQ ID NO: 44841 - DNA, 396 bp, Homo Sapiens
atggagatgggcaaatggattcatttagagctgcggaacaggacgccctccgatgtgaaagaacttttcctggacaacagtcagtcaaatgaaggcaaattggaaggcctcacagatgaatttgaagaactggaattattaaatacaatcaacataggcctcacctcaattgcaaacttgccaaagttaaacaaacttaagaagcttgaactaagcagtaacagagcctcagtgggcctagaagtattggcagaaaagtgtccaaacctcatacatctaaatttaagtggcaacaaaattaaagacctcagcacaatagagcccctgaaaaagttagaaaacctcgagagcttagaccttttcacttgcgaggtaaccaacctgaacaactactga

SEQ ID NO: 44842 - DNA, 1125 bp, Homo Sapiens
gttaaagccaattcacaaggagactggtcaagagaaataagagaattacccttacttaatgcaatgccactacatagttggctcatactctatagcaggagcagtcacagagaagccatgtccttaaagggtcatctacagagtgtcacagcccccatgggcataactatgaaaccagcagaaatatggtttttctttcctgtatcactgttgttgtatcttagggaatgtcatgttgttttcaaggtgatttgtatcctgcccaatgatgacaaacgtagatatgacagcataaaaagatacctatgtaccaaatgcccaattccaagccagtgtgtggtgaaaaagaccttagaaaaagtccaggcaaggaccatcgtcaccaagattgcccagcagatgaattgcaagatgggaggagccctctggaaggtggagacagacgtacaaagaacaatgttcgttggcattgattgtttccacgatatcgtaaatcgacagaaatcaatagcaggatttgttgcaagtaccaatgctgaattaacaaataacggtttatttactttttctgatttcctcttagctgccctggatgtctggtgtaaaaacgaatcatcgatgccacattctgttattgtgtatcgggatggagtgggagatggtcagcttcaagcattgcttgaccatgaagcgaaaaagatgtcgacctacttaaaaaccatctctcctaacaatttcactctagctttcattgtggtgaagaaacgaataaacactagattttttcttaaacatggaagcaattttcaaaatccacctccaggaacagttattgatgtagagttgactaggaatgaatggtatgacttttttattgtgagtcagtctgtgcaagatgggactgttacccccactcattataacgtcatctatgacacgattggcttgagcccagatacagtacagcgtttaacatattgtctatgccacatgtattataatttgccaggcatcatccgagttccagcgccttgccactatgcccacaagctggcttacctcgtggggcagtccattcaccaggaaccgaatcgttccttgtcaactcgtctcttttacctttga

SEQ ID NO: 44843 - DNA, 2412 bp, Homo Sapiens
agggcgatggagggtcaatgagagctcgcggggtgacgccattctgctggggttctggagaggccaaagctggagacggtcccgtttgtggtcagcacggccttttactttctggccgtgactggcaactgcaccaacgtcctcctctccctcccactgcacactcccacttcctcagcgaccgggcccttctccacctcctgccacagcactcgcagcttctcccaagtgctagttaaccgcgggggctcaggcaaatccatggcccgcgtgggtgtgcggtgcggccctctgaggcctctggctcctggtctggcctggccgcgccggctccgggagctgccattccgccctgacgtcgccgcgtacacgtacctggggcggtgcagtcaccgctgcctctgccagttcgtgtgtgggacgccggccatcaccgcatttccgcgtggacgccggcagggtggaacgcctggctttccccggccaccccagccgccctggcgcctctcgcgcgacttggcctcggcccctcgggggcagtgcactgctgcgcatgcggtctcagcgcccggccttcccgcgcggctgccgccctttccacggtgacgccgtctgcactagcgccgcacccgcttcaactgcctgcaaccgccgctgaattccctcatccccacgctgagaggacgagaaaggcgccctggggaaggctctcgggaaagcccgcagccgctggacgcgggaggacatggaggtaggcgggaacactcaccccgcgatttcgtgtggtccgcgaagctttttctcttcaggacaacactgcacaatggcatccattaataatacgatggggaacgggggccgcggcgctcgcctgcagtcccagcgctttggcaggccaaggcgggcagatcgcttgagctcaacagttccagaccagcctgggcaatacagcgagaacccatcgctaccagaaatgtaaaaaattagccgggctagtggcgcctgcctttagtcctagttacttgggaggctgaagcgggaggatcgcttgagaccaggagtttgaggcttcagtgagctctaatcacaccactgcactccagcctgggcaactgagcaaaaccctatctctaaaaaaagaaaaaagcgccgagattgtgccactgcactccagcctggacgacagagcaagactcagtctcaaaacaaaaacaaaaacaaacaaacaaacaaacaaaaagcggcagggatgtgaatgtgaatggagcaaggcgttctctctttcaggggtctcagactttgtatctttgcttgcaggtggactgactgccccatgtccttcaaagttaattgcaaaagagttcattgcaagagatgatgtgctggtggaaagatagatgctgctacttctttccttagtggggttttacaggcagataatgactgctttgcagctcatttgtgactctgattccactgagcggtaatgtcattagatcagatacaagagtaaggagacagcatggcagaaacgcacgtgtgtgtctgtggtgagtgttttctggggtacacttgttcccacaggcctttttgttctgaattttccagacccctgtgcagatgacactgttacttcctcaggctgttacctgccccctcaggccctaagcaggtaacatgtatctgcctaagagcagtgtttcctttacatttcaggttatatgtcacttacaacatcaatttaagtgcggcaaacattcgttattctaggttagcataaaatggattagaaaatttcacagaggactatgcatggtagtgagtcagttgtgtatatgtgtgtgtgaaatgtgtttcttacaccgatataaaagtttgaaagtcactgctttagagagtttctgttggaacaagcttccaagcaacccatatgtctgtactagaggaaaatctaggaatatcactttaaggaaacatagggtcgtgtatgggaagatatggactcaaagagtttgtagagcaaggaaatcacagctgcttagcatgggagagtttgccaggataaatgatgatgatatgttgacagtgattatgttaatcatgctaattatgataaaaatgaaacttttttcaactcatgcattttcaccttttgacatttctgaagtaggaatattttaagatttagtggcaagtcatagtttttacttcatattttcctttaaaatttacactaaaaaaaggtgcgcttctctgattactgtaaaaataaatgaaattacatctatttccatgaactacttagttcctgtaatggctagttttgtgtcaacgtgactaggctgtagtacccagatatttggttaaacaccagtctgagtgttgctgtgaaagtatttttttcagatgaca

SEQ ID NO: 44844 - DNA, 1152 bp, Homo Sapiens
aaccgtctccgctgcggagagtcatgagctgtctggatgttatgtaccaagtctatggtcctccgcagccctacttcgcagccgcctacaccccctaccaccagaaactagcctattattccaaaatgcaggaagcgcaggagtgcaatgccagccccagcagcagtggcagcggcagctcctcattttccagccaaaccccagccagtataaaagaggaagaaggcagcccagagaaagagcgcccaccagaggcagagtacatcaactcccgctgcgtcctcttcacttatttccagggggacatcagctccgtggtggatgaacatttcagcagggccctgagccaacccagcagctactctcctagctgtaccagcagcaaagcaccaaggagctctgggccctggcgagactgctccttcccgatgagccagcgcagcttccccgcctccttctggaatagcgcgtaccaggcgccagtgcccccgccgctgggcagccctctggccaccgcgcactcggagctgcccttcgccgccgccgacccctactcgcccgccgcgctgcatggccacctgcaccagggcgccacggagccctggcaccacgcgcacccgcaccacgcgcacccgcatcacccctacgccctgggcggcgccctcggcgcccaggccgccccctacccgcgccccgccgccgtgcacgaagtctacgcgccgcacttcgacccgcgctatgggccgctgctgatgccagccgcctcggggcgcccggcccgcctcgcaaccgccccggcgcccgcgcccggcagtcctccctgcgagctctccggcaaaggcgagccggcgggcgccgcgtgggccgggcccgggggacccttcgcgagcccctcgggggacgtggcccagggtctgggcctcagcgtggactcagctcgtcgttattccctctgtggtgcatccctcctgagctgatctgctgacccagggtttccccttccccttcccttctgaccagccttggaggctcagcatctgtgcctctcactccgtggatgaggacatgggggaaggcagagacttcagacttctcagtgtgttgggaaaaccaaaaaccacaactacagaaattcatctaaaaataagtcct

SEQ ID NO: 44845 - DNA, 408 bp, Homo Sapiens
tccctgtttgggggctcccagggtctccgaaaggaccggcccctgcccccaccgtcatcactgaaagcgtcatccagggaactcacagccggtgccccagagctggacgtgctgctgatggtacacctccaagtctgcaaagctctgctgcagaaactggcctcccctaatttatcaaggctggtccaggaatgcctcctggaagaagtggcacagcaaaagcacgttctggagacactttctgtccttgactttgagaaggtcggcaaggcaacatccattgaagagagtcctagtggagggaaacctttcgggtccttgtcatgtgctctccccgagtcaccattcaggtttctgaactggggctttcagtcatcccacaggcctcgcggacgaaggggtgcctga

SEQ ID NO: 44846 - DNA, 1212 bp, Homo Sapiens
atgttggagaactatgtgaacctggcctctgtggaatgggaaatacaacctagaaccaaatggtcatcacttcagcttggttttttgaggaatccaatattcaatgggatacaaatgaggatgatggatggaaactctgagaattgtggagaggtcttcagtgaatggttttgccttaaaacacacatgagagctcagaatggagggaacatctttgagggtaattgttatggaaaagacatcctcagtgtgcacaaggaagcctctattggacaggaactttccaaatttaatccatgtggaaaagtcttcaccttaactccagatcttgctgcacatcttggaattctcaatgcaagacaaccatacaaatgtaaggaatgtagaaaaggctttaagtattttgcaagccttgataatcacatgggaatccacattggagagaaattctgtgaatttcaggaatgtaggagagccatcactcattcctcacacctaaagcagtgtgtaacagttcatactggaaagaaatctaaaaagactaagaaacatgggaaatccttcactaatttttctcaactttctgcacatgtgaaaattcataaaggagagaagtcctttgaatgtaaagaatgtggaagatcctttagaaattcctcatcctttaatgttcacattcaaattcacactggaataaaaccacacaaatatacggaatgtgggaaagccttcactaggtcaactcaccttactcaacatgtaagaactcacactggaataaaaccctatgaatgtaaggaatgtggccaagccttcactcagtacacgggccttgctatacacatacgaaatcacactggagagaaacactatcagtgtaaggaatgtgggaaagccttcaatggatcctcaacccttactcaacataaaataattcacacaggagagaagccttatggatgtgttgaatgtgggaagaccttcattacttcttcctatcgtagtaaacatttgaaaactcaccatgaagaaaggccctttgtatgcaagatatgtgggaaagcatttctatattcctcaccccttaatgttcacctgcaaactcataccagagagaaagccctcatatgtaaagaatgtgggaaagcttttgctgtttcctcacacctaagtagacatgaaagaattcacactggggaggaaccctatgaa

SEQ ID NO: 44847 - DNA, 1498 bp, Homo Sapiens
atggagcccaggagggcggcgcccggggtgcctggctgggggtctcgggaggccgcggggtcggcatcggccgcggagcttgtgtaccatctagccggggccctgggcactgagctgcaggatctggcgcgccgtttcgggccggaggcggcggccgggctggtgccgctagtggtgcgggcgctggagctcttggaacaggctgccgtggggcccgccccggactcgctgcaggtgtcggcgcagccggcggagcaggagctgcggcggctgcgggaggagaacgagcgcctccgcagggagctgcgcgcggggccacaggaggagcgcgcgctgctgcggcagctcaaggaggtcacggaccgacagcgggacgaactccgggcgcacaaccgcgacctgcggcagcgcggccaggagaccgaggcgttgcaggagcagctgcagcgcctcctgctggtgaacgctgagctgcggcacaagctggcggccatgcagacccagctgcgcgccgcgcaggaccgcgagagggagcgccagcagcctggcgaagccgcgactccgcaggctaaagagcgagcgcgggggcaggccgggcggcccgggcaccagcacggacaggagcccgaatgggcgaccgccggcgcaggcgccccagggaaccctgaggacccggcggaggccgcgcagcagctcgggcgcccctcggaggcagggcagtgccgcttcagtcgggaggagtttgagcagatccttcaggagcggaatgaactcaaagccaaagtgttcctgctcaaggaggaactggcctacttccagcgggagctgctcacagaccaccgggtccccggccttctgctcgaggccatgaaggtggctgtccggaagcagcggaagaagatcaaggccaagatgttagggacaccagaggaagcagagagcagtgaggatgaggctggcccatggatcctgctctccgatgacaagggagaccatcccccacccccggagtccaaaatacagagtttctttggcctatggtatcggggtaaagctgaatcctctgaggatgagaccagcagccctgcacccagcaagctagggggagaagaggaggcccaaccacagtctccagctcctgatccgccctgttctgccctccacgaacacctttgtctgggggcctcagccgccccagaggcctgacttaggggtctggctgtggaaggatgtgtggcctcaaatgaggacagggctcccgccttcacagccctcgccaggggtctgccccaatcctggcctgcatcagggcaggacggggtctcagcccgcctccctctctacgtctctgtaccgagcctctggggccagatataagagtgcctctctgagtctcagtttccccatccatgaaatgagagctgactgcctagctcccagggctttgtgcagacggcctgagctcatgtaataaagaactgcccgtaatacacagaaa

SEQ ID NO: 44848 - DNA, 947 bp, Homo Sapiens
agattactccaattgtgtcagcaaactatggctcttcctgtaggacgaggaatgtttacctttttttcgtaccatcctgttccaacagagccattgcctattcctaaattgaatctgactgggcgtgcccctcctcggaacacaacagtagaccttaatagtggaaacatcgatgtgcctcccaacatgacaagctgggccagctttcataatggtgtggctgctggcctgaagatagctcctgcctcccagatcgactcagcttggattgtttacaataagcccaagcatgctgagttagccaatgagtatgctggctttctcgtggctctgggtttgaatgggtaccttaccaagctggcgactttcaatatccatgactacttgaccaagggccatgaaatgacaagcattggactgctacttggtgtttctgctgcaaaactaggcaccatggatatgtctattactcggcttcttagcattcgcattcctgctctcttacccccaacgtccacagagctggatgttcctcacaatgtccaagtggctgcagtggttggcattggccttgtatatcaagggacagctcacagacatactgcagaagtcctgttggctgagataggacggcctcctggtcctgaaatggaatactgcactgacagagagtcatactccttagctgctggcttggccctgggcatggtctgcttggggcatggcagcaatttgataggtatgtctgatctcaatgtgcctgagcagctctatcagtacatggttggaggacgtaggcgctttcaaacaggaatgcatagggagaaacataaatcaccaagttatcaaatcaaagaaggagataccataaatgtggatgtgacttgtccaggtgctactctagctttggctatgatctacttaaaaaccaataacaggtatttcta

SEQ ID NO: 44849 - DNA, 5449 bp, Homo Sapiens
agaacagtccgtttctcgaggatccaggcgcaggaggacagagcaatgggtgagagaactcttcacgctgcagtgcccacaccaggttatccagaatctgaatccatcatgatggcccccatttgtctagtggaaaaccaggaagagcagctgacagtgaattcaaaggcattagagattcttgacaagatttctcagcccgtggtggtggtggccattgtagggctataccgcacaggaaaatcctatctcatgaatcgtcttgcaggaaagcgcaatggcttccctctgggctccacggtgcagtctgaaactaagggcatctggatgtggtgtgtgccccacctctctaagccaaaccacaccctggtccttctggacaccgagggcctgggcgatgtagaaaagagtaaccctaagaatgactcgtggatctttgccctggctgtgcttctaagcagcagctttgtctataacagcgtgagcaccatcaaccaccaggccctggagcagctgcactatgtgactgagctagcagagctaatcagggcaaaatcctgccccagacctgatgaagctgaggactccagcgagtttgcgagtttctttccagactttatttggactgttcgggattttaccctggagctaaagttagatggaaaccccatcacagaagatgagtacctggagaatgccttgaagctgattccaggcaagaatcccaaaattcaaaattcaaacatgcctagagagtgtatcaggcatttcttccgaaaacggaagtgctttgtctttgaccggcctacaaatgacaagcaatatttaaatcatatggacgaagtgccagaagaaaatctggaaaggcatttccttatgcaatcagacaacttctgttcttatatcttcacccatgcaaagaccaagaccctgagagagggaatcattgtcactggaaagcggctggggactctggtggtgacttatgtagatgccatcaacagtggagcagtaccttgtctggagaatgcagtgacagcactggcccagcttgagaacccagcggctgtgcagagggcagccgaccactatagccagcagatggcccagcaactgaggctccccacagacacgctccaggagctgctggacgtgcatgcagcctgtgagagggaagccattgcagtcttcatggagcactccttcaaggatgaaaaccatgaattccagaagaagcttgtggacaccatagagaaaaagaagggagactttgtgctgcagaatgaagaggcatctgccaaatattgccaggctgagcttaagcggctttcagagcacctgacagaaagcattttgagaggaattttctctgttcctggaggacacaatctctacttagaagaaaagaaacaggttgagtgggactataagctagtgcccagaaaaggagttaaggcaaacgaggtcctccagaacttcctgcagtcacaggtggttgtagaggaatccatcctgcagtcagacaaagccctcactgctggagagaaggccatagcagcggagcgggccatgaaggaagcagctgagaaggaacaggagctgctaagagaaaaacagaaggagcagcagcaaatgatggaggctcaagagagaagcttccaggaatacatggcccaaatggagaagaagttggaggaggaaagggaaaaccttctcagagagcatgaaaggctgctaaaacacaagctgaaggtacaagaagaaatgcttaaggaagaatttcaaaagaaatctgagcagttaaataaagagattaatcaactgaaagaaaaaattgaaagcactaaaaatgaacagttaaggctcttaaagatccttgacatggctagcaacataatgattgtcactctacctggggcttccaagctacttggagtagggacaaaatatcttggctcacgtatttaagagcctgaatattccaggtaagaaaatataaaatgaggtttattttattttaataacataacactgttgctcattttgtaagtatatgtgttatagcagtttcattcaagaaaagtttaaaattaaaaagtgattatcaaagaatatcagggcctgacatccacaaaaaacaaacttaattttgattgaactaataatttataaacatgggaaacaagtcagaagtagtgacattattcctagaaaagatttaaggaaagcaaaaagacaactggtaagattaagaagccattaaccatttgcaatttatattatagtcacagaaataatttcagttatgactagctcttgccgattaatgagaagagagcagctccacaatttttaatttttttaacttttattttagattcaggggtatatgtgcaggtttgttacataggtaaactgcatgtcatgggggtttggtgtgcagataattttatcacacaattattaatcataatacccaataggtttttttctgatcttctccctcctcccaacctacaccctcaagtagaccccagtgtctcttgttctcctctgagtatccatgtgttctctttgtttggcccccatttataagtgagaacatgtggtatttgggtttctgttcctgtgttagtttgcttatgataatggcttccagctccatccatattgctacagaggacatgatcttgttgttttttatggctgcatagtattccatggtgtttgtatataccacattttcattatccagcctattattaatgcacatttaggttgattccttatctttgctattgtgaacagtgctgcaatggacatacacgtgcatgtgcctttatggtacaatgatttatatttccttgggatatgcattcctttgggaataatgggattgctgagttgaatggtaattctgagttctttgaggaatcaccaacctgctttccacagtggctaaactaatttacactcccaccaacagtgtatgtgttccattttctccacaaccttgccagcatctgttatttattgactttctagtaacagccattctgactggtgtgagatggtatgcatttctgtagtgattagtgatgatgagtgatttttatatgctttttaaatgcatatatgtcttcttttgaaatgtgttcatgttctttgcccactttctttttaatggggttgcttgtttttcgcttgtaaattttttgaagcttcttatagattctggatattagatctttgttggatgcatagttggcaaatattttctaccattctgtaggttgtctgttactttgttaattgtttcattttgttttgtttttgttttttgaaacagggtctcactttgacacccaggctggagtgcagtagcacaaacatgggtcattgtagcctcaacctcccaggctcaagcagtcctttcacctcaaccccccacatagctgggactacaggtgcttacacccaagaccagttaattttttgtatttgtttgtagagatgtgtttttccatgttgcccaagctggtcttgaactactgagctcaagcaatctgcctgcttcagcctcccaaagtactgggatttaggcatgagccaccacatctggccaatagtttcttttgatgtgcagaagctctttaatttaattagatctcctttgtcagtttttgtttttgctgcaattgcttatgttatcttcatcatgaaattttagccaagtcttatgtccagaatggtatttcttaggttatttttcagagtttttatagtttaatgttttatatttaagtctttaatccttcttaagttgatttttgtatgcagagtaagctgggggcccagtttcaatcttctgcatatggctagccagtaatcccagcaccatttattaaatggggacttctttccccattgcttgtttttgtcagctttgtccaagatcagatgattgtaggtgtacagcattatttctggactctctgttatgttccatttatctgtgtgtctgtttttctactaataccatgctgttttggttactgtagctctgtagtatggtttgaggtttggtaacttgatgcctccccttttgttctttatgtttaggattgccttggctaggctcttttttggttccatatgaattttaaagtagtttctaattctgtgaagaatgtcattggtagtttgatagggatagcattgaactatttgctcaactcaacattttaggaatttatttctgctgtctagtgctcaaaacttgcagctagaattgagggaagagagagaccttcttatattgttttatattgtttgatactcagtacctgttttaagaaaaaacaacaaggaagtaaaaccaaagacaggcagcccagcgccaggcccaaaaccaggcctgggcctgcctggcctaaacccagtagttaaaaatcaactcattgcctgtaatcccagcactttgggaggccgagacgggtggatcacgaggtcaggagatcgagaccatcctggctaacacggtgaaaccccgtctctactaaaaatacaaaaattagccgggcatggtggcacgcgcctgtagtcccagctacacgggaggctgaggcaggagaatggcgtgaacccaggaggcggagcttgcagtgagtcgagatcgcgccactgcactccagcctgggcgacagagcgaaactccgtctcaaaaaaaaaaaaaaaaaatcaactcataacttagaaaccgatgttattcatagattccagacattgtatagaagaacatttggaaactcactgccttgttctgtttctctctgaccaccagtgcatgcagcccctgtcatgtaccgcctgtttgctcaaatcaatcatgaccctttcatgtgaaatctttagtgttgtgagcccttaaaagggacagaaattgtgcattcaaggagcttggattttaaggcagcagcttgctgatgccaccagctgaaaaaagcccttccttctccaactcggtgtctgagaagttttgtctgcagctcatcctgctacagaatgaactccttgtaattctacaagatatgccatgggccttttcacaggggacacaggcttcttaaaacaacccggcttcctcaccctatgtcctttatttacaaagctgtgctcctattcatgagcatggaatgtttttccatttgtttgtgacatctcttatttctttcaggggtatcttgtaattctcattatatatatcttttgcttccttggttagctgtatttttaggtattttagtcttcttgtggcaattgtgaatgggattgcattcctgatttggctcttggcttaatgttattaacgccacattttttaaatagacaaaaatatgagattaaaaatgttgaattttactaacaataaaagttgttcaaaggaaaa

SEQ ID NO: 44850 - DNA, 114 bp, Homo Sapiens
accacgtcccagctcctcgctctggagagttgctccagaaacagtacctctccattgcagagggtgcggacttctccagctctccgaacctcacggagactcaggtcaaaatct

SEQ ID NO: 44851 - DNA, 176 bp, Homo Sapiens
tgaggattgctgtcctcctcttcaccattttcttctttatgagccaagttctaccagccaggggcaaattcaaggagatctgtgaacgtccaaatggctcctgtcaggacttttgcctcgaaacagaaatccatgtagggagatgtttaaatagccgaccctgctgcctgcctctg

SEQ ID NO: 44852 - DNA, 762 bp, Homo Sapiens
aattcacccatggtgactgacttcatctttctcggcatgacagataactctcagcttgaagtcctgctatttggagtctttcttattgcttacatcatcactgtgttggagaatctaggccttgtggttctgatcagagtcagctcccgcctccaccccatgtactttttcctctctaatcagtccttccttgatgtctgtttctcttccattacaattccacagaatttagcacatttgttttctaagctgcactcatatgcctttttactttctagcctgtgtttcccagttttactttttgccttggtggctacagaatgcttcttcctggctgtaatgtcttatgattgctatatagccacctgtaacccactgcaatacttcagcatcatggaccactggagttgcttacagctagctagtgcctcatgggtggctggatttctggcattcactctcctcattgtcctcatttttcacttaacattctgttccaccaatgtggtcgaacacttccgtgatttgaagcccatcatgaaactggtttgcactgacactgaaagggctttctccacctgttcctcccatcagactgtagttagtctctattatggggtactgagcattgtttatggcttcccatcaagacttattgaagtcttgtatgaagacttattgaagttactttctattctgtatacagtgcttacccctgccctcaaccatatcatttacaccttaaggaacaaggatgggaag

SEQ ID NO: 44853 - DNA, 555 bp, Homo Sapiens
atgtttacaagcagtatacttggtaaaggtcatcgccattctctagtctcaataaaacaggagcacagtgcactgcggaaagccggacctctgcccttgaaagtggggtattgtggtttctccccatgtgatagtctgaaatatggctgggatgagaaagacctgactgtgccccagcccgacacccataaagggtctgtgctgaggtggattagtaaaagaggaaagcctcttgcagttgagatagaggaaggccactgttgcctgcccctgggaactgaatgtctcggtataaaacccgtacatttgttcaattctgagataggagaaaaaccgccctatggtgggagacatgtttgcagcaatgctgccttgttattctttactccgctgagatgtttgggtggagagaaacataaatctggcctacatgcacatccgggcatagtaccttcccttgaacttaatcatgacacagattcttttgctcacatgttttttgctgaccttctccttattatcaccctgctgtcctactacattcctttttgctga

SEQ ID NO: 44854 - DNA, 882 bp, Homo Sapiens
agtccagcacctttctcgggtcacggcctcctcctggctcccaggaccccaccataggcagaggcaggccttcctacaccctactccctgtgcctccaggctcgactagtccctagcactcgacgactgagtctctgaggtcacttcaccgtggtctccgcctcacccttggcgctggaccagtgagaggagagggctggggcgctccgctgagccactcctgcgcccccctggccttgtctacctcttgccccccgaagggttagtgtcgagctcactccagcatcctacaacctcctggtggccttgccgcccccacaaccccgaggtttaaagccaggtacacgaggcaggggacacaccaaggatggagatgttccaggggctgctgctgttgctgctgctgagcatgggcgggacatgggcatccaaggagccgcttcggccacggtgccgccccatcaatgccaccctggctgtggagaaggagggctgccccgtgtgcatcaccgtcaacaccaccatctgtgccggctactgccccaccatgacccgcgtgctgcagggggtcctgccggccctgcctcaggtggtgtgcaactaccgcgatgtgcgcttcgagtccatccggctccctggctgcccgcgcggcgtgaaccccgtggtctcctacgccgtggctctcagctgtcaatgtgcactctgccgccgcagcaccactgactgcgggggtcccaaggaccaccccttgacctgtgatgacccccgcttccaggactcctcttcctcaaaggcccctccccccagccttccaagtccatcccgactcccggggccctcggacaccccgatcctcccacaataaaggcttctcaatccgca

SEQ ID NO: 44855 - DNA, 597 bp, Homo Sapiens
gacagcggcagggggaacccagggagcgcgatgggctgcagggctgcatcagggctcctgccaggagtggccgtggtcctcctgctgctgctgcagagcacacagtcagtctacatccagtaccaaggcttccgggtccagctggaatccatgaagaagctgagtgacctggaggcacagtgggcacccagcccccgcctgcaggcccagagcctcctgcccgccgtgtgccaccaccctgctctgcctcaggaccttcagcctgtctgcgcctcgcaggaggcttccagcatcttcaagaccctgaggaccatcgctaacgacgactgtgagctgtgtgtgaacgttgcgtgtaccggctgcctctgagatagccctgggtaccctgagcccaccagggacacctcgcccttcagcccaccaccctggcaggcttccatccccgtccatgctcaagatgggtccctggccaccatggtcatcaccacccttccagggcctgagcagctggatctggtacaaagcaatcggacatagagttggagggggaggcccctgaggcagcccagctcctgaataaagattctacaacacacg

SEQ ID NO: 44856 - DNA, 1783 bp, Homo Sapiens
aacaccctcctggaggatgctggtgagaggcagggaccaggggtccggctcccggctcgggcctatcgttaggcgctgggcccccaggccctctcctttgcagagtctcgctgcctccctcgacgcagagccttcaagcgccgcagtccccgacggcttccccgcgggccccactgtctccccaagacgcctggcgaggccgccggggctggaggaggcgctgagcgcgctggggctgcagggagaacgcgagtacgccggggacatcttcgccgaagtcatggagtacctgggtctggctggtgacacactttatctggcggttcacctgcttgattcctacctgagcgctggccgcgtgcgtctacatcgcctgcagctgctgggcgtggcttgcctgtttgtggcgtgcaaaatggaagagtgcgtgcttcccgaggaaactgaggtccggaacttggggcctttccagggcagggagtaaagagcccggatccaagactccttcacctccccccgcatcccccatctgcagcccgccttcctctgcctcctgagcgcggactccttctcacgggcggagctgctgcgcgccgagcgtcgcatcctgagccgcctggatttccggctgcaccaccccggcccgctgctgtgcctcgggctgctggccgcgctggcagggagcagcccccaggtgatgttacttgccacctacttcctggagctgtctttgctggaggccgaggcggcgggatgggagccgggtcgtcgtgcggctgcggctctgagcctggcgcaccgcttgctcgacggggcgggctccaggctccagccagaactttacaggtgtagtcttggcggaggaagtgtatggggtcaccgcagcttcagggacttaccttcctggtcatttttacggtctcggagaatgagagacaattattgaggaggaggtggcacctagacttgatttttctgggtgtgggagagaatggggtgggaggaccccattagtccagatctggggtctcttaaccttgccccagagtggaagatagtctcccaggcccagaagatgctcctattgccttccagggctgagaacgaaggatcacccaggcctcgagtcctccatctctgtatctggtggtggatggggtgttcctttagctgctagggccgctaaccatgctaccaggtggcagggcgaaccatggtttccctcagcctgtgcacccagcatagagaggatggctgcccatcctcagctcccctccttgcttcctcgagtgttctgactccgcactagccgcgccctgtaggaagaatagggtgtccacctctccccggtgctcgcctagtcactccagttgaagacgggacgcgtgcccgatctcaagagagcccccgacccgtccgtggggaaccacatcgacgcttcttctcagcctccagtctccagttccaaggatgggtcatctccaaccacttgccctgcctcagtttctccatctccctgctgcagccccgaggaactgggcaccctcgagccgtgcatggcccgcgctgcgctccgaggtcccgcgccgggtcgcgccgcagtcttcctcaagtatgcgcggccccagcgccaggggaccagccttgccgccgcctgcctgctccgccgcctccagtctgagcctccctgagtactgggactcagtcacaaaaaaatcaacaacaaaaaacaaaaccctcccagtgtgtgtccgtctctcatctcaataaaagaatttatttt

SEQ ID NO: 44857 - DNA, 372 bp, Homo Sapiens
atggtggaccccgttggggagctggccgctaagcgaagtggcctgacagtggaagatgtgcgggccaatgtgcctgaggagctgagcatatggattgaccccttcggggtgtcctaccagattggtgagaagggagcagtgaaagtgctgtacctggatgacagtgacggctgtggggccccggagctggacatgaagatcaagagcagtttcactcctgacgaccagatgctctttctcctcggaagccaggacagctccttgtccaactccccgtcgctatgctttgcccatcacccagccccaccttcatcctctgcctcgcccagcccatcaccttcaccatggactcctttgctgccaccaaattag

SEQ ID NO: 44858 - DNA, 369 bp, Homo Sapiens
aggatggcgtcgagcggcagggagctagggagtttatttgaccaccaggtccagagagcagtatgcaacacgtgggccaaatatcgggagggacgacggcctcgtgctgtcaagatatatacaatcaatttggaatctcagtacttattaatacaaggagttcccgctgtaggaaccatgaaggaaatagttgagcgattcgctttgcatggtgcaactgaacagtacaatgttctagatgaataccctgcagaagactttactgaagtctatcttattaaatttataaacttacaaagtgcaaggacagccaagagaaaaatggatgagcagagcttccggtggattgcttcatgtgtgctatgctcc

SEQ ID NO: 44859 - DNA, 1405 bp, Homo Sapiens
caccaggaggaaataattcacaagttggccatgcagctgagacacattggggacaacattgatcataggatggttcgagaggatcttcaacaggatggcagagatgcactagatcattttgtcttctttttctttagaagagttcaggtgttgctgcattttttctggaacaaccatttgctgtaaaaggaaagtaaaggtcaagtggtcaagttctgttttctttttaccctctgagaaacatgaatcccactgggacagatgggaagaacacccttctccgtctccctctttttgtacccatcactgttggtctacacccagtttgttgaagaactgcgggttcacgagccatttgtctcttcggaggagctagctatgagatgtctgcgatcacatcacggtaaagcccaaggagtaattaggaccccaggaagccttgctgcccagaaaacaccagcgctgtggatggtcccagggctccttgtgaggaaaccttgaacatttccttccaggaatgaaagagaacctcgtcctcaaactaaaggccacagaaatgggcactacctcctggcccactccctgggcaccatgccctctggtgacctgttggctccactcttgtcactcatgtccagatctgcagtgccagcttctccttctcggtgacatgtcacctccctgccccaatcctggctccaaccctctctggaaaatcgaagtgaaacatttgtctctaatactcaaattcaacatatggctcatctcatctaccttcccatttccatgcctagaggccccactactaccactagcaccgttgggtgtttccttctcaggctctgattctacaacatttacgttcttttctcacctttgatcccctcactcctctgtgacccccttcaagtcttccttcaccactccagtgttttcccataccactcgaccctgctcgaaggtatctttccctgctctgtcatcctcttttaggcatgcctgcttaaaatcgggagtgcttagtccttggccaacagtcctgccttctagaagaatgtaagacctgaaagagttatgaatctatcactaggcaaaaacttctcttttcctattgctggatggttttgctattattggttggtgggccctttgcctgtggaatgtatttcactcattctctcctgcacgctgttaggcagttctttcacctgcatgcttcttcttttacctttttgtctacctcatagtccctctctcccctcctttaaaagaattataaatattaggaaagcttgttgttataaattaaaagtttacatatgtatcttgagttcttcataggggaagtgttattttaaaaaattctaaaaatgaaataaatattgttattttattgagcatgaaa

SEQ ID NO: 44860 - DNA, 939 bp, Homo Sapiens
atgaaaaaccacacagtaataagaacttttatcctgctgggactgacaggtgacccacacctgcaagttctgctttttatctttctatttctcacctacatgttgagtgtaacagggaacctgactattatcaccctcacattggtggaccaccaccttaaaactcctatgtacttctttctcagaaatttttccttcttagaagtctcatttactacagtctgcattcccagattcttgtacaatatatcaatgggggacaataccattacctacaatgcttgtgccagtcaaatattctttgttattctctttggagcaacagaattttttctcttggcagccatgtcctatgaccgctatgtggccatctgtaaaccccttcattatgtggtcatcatgaacaacagggtgtgtaccttattagttctctgctgttgggtggctggcttgatgatcattgttccaccacttagcttaggcctccagctcgaattctgtgactccaatgccattgatcattttagctgtgatgcaggtcctctcctaaagatctcatgctcagatacatgggtaatagaacagatggttatacttatggctgtatttgcactcattatcaccctagtttgtgtgattctgtcctacttgtacatagtcagaacaattctgaagttcccttctgttcagcaaaggaaaaaggccttttctacctgttcatcccacatgattgtggtttccattgcctatggaagctgcatcttcatctatatcaagccctctgcaaaagatgaggtggccataaataaaggagtttcagttcttactacttctgtcgcacccttgttgaaccccttcatttacaccttgaggaacaagcaagtgaaacaagctttcagtgactctataaagaggattgcatttctctcaaagaagtag

SEQ ID NO: 44861 - DNA, 183 bp, Homo Sapiens
gtcggcgccttcctcaagaatgcctgggacaaggagccagtgctggtcgtgtccttcgtcgtcgggggcctcgaacagtcccatgacactacccccaggatgctccatgatgaccctacactcaaacgtgctcattccatgaccaaccccactgctgcctcctccaggccccacgtatctgtg

SEQ ID NO: 44862 - DNA, 1311 bp, Homo Sapiens
aaaaaaatcaaagaggaggaattagaggccaccaaacccgaaaaacaccccaaaaaagaggaaaaaatctcatctgctctttcagtgttgggcaaagttgtaggtgaaacacatgtcgatcctattcagttgcaggcattacagaatgcaattgctggtgacccagcttcctttataggcggacagttcttgccatactttatccctgggtttgcttcttattttacacctcagctccctggaacagtgcaggggggatacttcccacctgtctgtggcatggagagcctctttccttatggccctacaatgccccagacactggcaggtctgtccccaggtgcactgttgcagcagtaccaacagtatcagcagaacctgcaggagtccctgcaaaagcagcaaaagcaacagcaagaacagcagcagaaaccagttcaggcaaagacatccaaagtagaaagtgaccagccgcaaaactccaacgatgcttcagaaacaaaggaagacaaaagtactgctacagaaagcacaaaagaagaaccccagttagaatccaaaagtgcagacttttcagacacttacgttgttccattcgtcaagtatgagtttatatgcagaaagtgccagatgatgtttactgatgaagacgccgcagtaaatcatcaaaagtccttctgttatttcggtcagcctttgattgacccacaagagacagtgcttcgtgtcccagtcagcaaatatcagtgtcttgcctgtgatgtggctatcagtgggaatgaagcacttagccaacacctccagtcaagcttgcacaaagagaaaacaatcaaacaagcaatgagaaatgccaaagagcatgttagattattacctcactcagtctgctcccctaatcctaacaccacatctacctcgcagtctgcagcttcttctaataacacctatcctcatctttcttgcttctccatgaagtcctggcctaatatccttttccaagcgtctgccaggagagctgcttctcccccttcttctcctccttccctttccttgccttcaacggttacctcaagtttgtgcagcacctcaggggttcaaacctcactacccacagaaagttgttcagatgagtctgacagtgagctgagccagaagctagaagacttagataattctttggaagtgaaggctaagcctgcttctggcctagatggtaatttcaatagcatccgaatggatatgttcagtgtgtaggagtgaagacaggatcccgtgcttaaaaaaataaaaaataaaaaaataaaaaaaaaa

SEQ ID NO: 44863 - DNA, 321 bp, Homo Sapiens
atgcggcccctgctctgcgcgctgaccggactggccctgctccgcgccgcgggctctttggccgggtcccacagtgacaagacttgttttcccacagctgccgaacccttcagccctccgcgaggagactcagctcagagcacagcgtgtgacagacacatggctgtgcaacgccgtctagatgtcatggaggagatggtagagaagaccgtggatcacctggggacagaggtgaaaggcctgctgggcctgctggaggagctggcctggaacctgcccccgggacccttcagccccgctcccgaccttctcggaggtgag

SEQ ID NO: 44864 - DNA, 366 bp, Homo Sapiens
catcattcactgtcgcacatgtttggcagcaagacccagcccactgtcttaggtaagcccaaggctccccgtttggtcactctgttcccgccctcctctgaggagttccaagctaacaaggccaccctagtgtgtctcatgaatgacttctacctgggcaccgtgacagtggcctggaaggcagacggcatcatcatcacccaggacgtggagaccactaagcctcccaaacagagcaagaaacaggccagcagctacctgagcctgatgcctgaacagtggagatcccgcagcagctacaactgctgggccatgcataaaaggagcaccctggagaagacaatggcccatacagaatgttcttag

SEQ ID NO: 44865 - DNA, 2794 bp, Homo Sapiens
agccctttcccaggcggtagcgggggcagtggtgctgttgcccttttaaactgcggcttgacgggagccgcgcctcctgtcggtggagtcggttataaagggagcagccccgcaggccgccacatagctcccgccaagtcctcggtgccccttgccattttccagccgcgctcccacgagggtcacggcggcggggagaggtggagccgcgagagctcggccgggggccccgcctggtggtcgcggccatgacagcggctcgggacaggctccttttccgcgcccctcccgccggaggtgaggggaagatgtccatgtccgggttcaaggccaaaccgaagttactggcctctatcttccaggagaaccaggagccacagccgcggctcacgccccaccgcaacattaagattacaagtggacacctgagtcagcaggacctggaatcccagatgagagagcttatctacacgactcagatcttgttgtcacccccattattgacaatccaaaggtgcagaaagcactctgacaattccaattgctaatccagcatttgtggatagctgcaaactgcgatattgctgatgagcgctttgacgccacattccacactaacgtgttggtgaattcttctgggcattgccagtacctgcctccaggcatattcaagagttcctgctacatcgatgtacgctggtttccctttgatgtgcagcactgcaaactgaagtttgggtcctggtcttacggaggctggtccttggatctgcagatgcaggaggcagatatcagtggctatatccccaatggagaatgggacctagtgggaatccccggcaagaggagtgaaaggttctatgagtgctgcaaagagccctaccctgatgtcaccttcacagtgaccatgcgccgcaggacgctctactatggcctcaacctgctgatcccctgtgtgctcatctccgccctcgccctgctggtgttcctgcttcctgcagattccggggagaagatttccctggggataacagtcttactctctcttaccgtcttcatgctgctcgtggctgagatcatgcccgcaacatccgattcggtaccattgatagcccagtacttcgccagcaccatgatcatcgtgggcctctcggtggtggtgacggtgatcgtgctgcagtaccaccaccacgaccccgacgggggcaagatgcccaagtggaccagagtcatccttctgaactggtgcgcgtggttcctgcgaatgaagaggcccggggaggacaaggtgcgcccggcctgccagcacaagcagcggcgctgcagcctggccagtgtggagatgagtgccgtggcgccgccgcccgccagcaacgggaacctgctgtacatcggcttccgcggcctggacggcgtgcactgtgtcccgacccccgactctggggtagtgtgtggccgcatggcctgctcccccacgcacgatgagcacctcctgcacggcgggcaaccccccgagggggacccggacttggccaagatcctggaggaggtccgctacattgccaaccgcttccgctgccaggacgaaagcgaggcggtctgcagcgagtggaagttcgccgcctgtgtggtggaccgcctgtgcctcatggccttctcggtcttcaccatcatctgcaccatcggcatcctgatgtcggctcccaacttcgtggaggccgtgtccaaagactttgcgtaaccacgcctggttctgtacatgtggaaaactcacagatgggcaaggcctttggcttggcgagatttgggggtgctaatccaggacagcattacacgccacaactccagtgttcccttctggctgtcagtcgtgttgcttacggtttctttgttactttaggtagtagaatctcagcactttgtttcatattctcagatgggctgatagatatccttggcacatccgtaccatcggtcagcagggccactgagtagtcattttgcccattagcccactgcctggaaagcccttcggagagctccccatggctcctcaccaccgagacagttggttttgcatgtctgcatgaaggtctacctgaaaattcaacatttgctttttgcttgtgtacaaacccagattgaagctaaaataaaccagactcactaaatcctttccaataattgactggtggaaggaaaacaaaaaacaaaaactaaaaacctcttagcttttctgcaattcaactttttatttttatttttatttctatcaaagacggtagagagaaacagcttgatgctgtttctacatcaaaaaaaaaaaaaaaaaagacagactgttggtcttactaaggatgtttttaccagcctgcctgacttctgcaaacctaccctgtcaaggagatcaaagggacgcaggtttctgtttattctgaacaagggccaggccccgcggagtgtctttggtggatcccagataactcctaggtgctgctctcagacactgaggagttgagcaaatctgttctattctgcagaacccataggacaaataagagttctactagaattaacagcccaaaagaatagctacagctaagtgaagccacttacgtgggctttaaaaaaataatgtgttagctgattcacatgcactggagttaattagtcttagaaatgtgtgcatccatacaaatgcacaacataaagtgaacatattcctaggccctttctgcctgtgtcagggccaggaagtagaggctgggaactcttctggtccccagtatggcag

SEQ ID NO: 44866 - DNA, 1151 bp, Homo Sapiens
gcgcgggccggcgcgggagcaagcggcatggcgttccggcaggcgctgcagctggcggcctgcgggctggccgggggctcggccgccgtgctcttctcggccgtggcggtagggaagccgcgcgcaggcggggacgcggagccacgcccggctgagccgccggcctgggcggggggcgcgcggccgggccccggtgtctgggaccccaactgggacaggcgagaaccactgtctctgatcaacgtgcggaagaggaacgtggaatctggggaagaagagctggcgtccaagctggaccactacaaagccaaggccacgcggcacatcttcctcatcaggcattcccagtaccacgtggatggctccctggagaaggaccgcactctgaccccgctgggtcgggagcaggctgaactcactgggctccgcctggcaagcttggggttgaagtttaataaaatcgtccattcgtctatgacgcgcgccatagagaccaccgatatcatcagccggcacctgccaggcgtctgcaaagtcagcacagatctgctgcgggaaggcgcccccatcgagccagacccgcccgtgtctcattggaagccggaagctgtgcagtattacgaagacggagcccggatcgaggccgccttccggaactacatccaccgcgcagatgccaggcaggaggaggacagttacgagatcttcatctgtcacgccaacgtcatccgctacatcgtgtgcagcatcccgccgctgttgtccgctggggattttgtgcttctggggtcctgacctctttcacttgctgatctgtgggcgctcccacccgtgtgccagcgtgacggctcggggtgtccgctcccctctgggtcgaggccacagctgagtcacgttgctgctcgggctgctccctcggggggcccttgtccctcaacctgctctggtgccccactctcagcaccacagaatgatccgggttcaggttgcgttttccctgccaccaccctgcaatcagccacttctttaaggagctccagggctgcagccacgttagagggccccttggggggcagggccagctctacggttacatgcctgaaacagtcagaagggttggccaaatctcactaaatgcaaatttgaaacaa

SEQ ID NO: 44867 - DNA, 381 bp, Homo Sapiens
atggcttctgtgaaaaagcctgtggtgaaggggggcaaaaaaaagaagcaggttctgaagttcactcttgaatgcactcaccccgtagaagatggaatcatggatgctgccaattttgagcagtttttgcaagaaaggatcaaagtgaacggaaaagctgagaaccttggtggagggatggcgaccattgaaaggagtaagagcaagatcaacgtgacatccgaggtgcctttctccaaaaggtatttcaaatatctcaccaaaacatatatgaagaataatttacgtgattggttgctcctagttactaacagcaaagatagctacaaattatgttacttccagattaaccaggacaaagaggaggaagatgaggattaa

SEQ ID NO: 44868 - DNA, 945 bp, Homo Sapiens
atggagaacaacacagaggtgactgaattcatccttgtggggttaactgatgacccagaactgcagatcccactcttcatagtcttccttttcatctacctcatcactctggttgggaacctggggatgattgaattgattctactggactcctgtctccacacccccatgtacttcttcctcagtaacctctccctggtggactttggttattcctcagctgtcactcccaaggtgatggtggggtttctcacaggagacaaattcatattatataatgcttgtgccacacaattcttcttctttgtagcctttatcactgcagaaagtttcctcctggcatcaatggcctatgaccgctatgcagcattgtgtaaacccctgcattacaccaccaccatgacaacaaatgtatgtgcttgcctggccataggctcctacatctgtggtttcctgaatgcatccattcatactgggaacactttcaggctctccttctgtagatccaatgtagttgaacactttttctgtgatgctcctcctctcttgactctctcatgttcagacaactacatcagtgagatggttattttttttgtggtgggattcaatgacctcttttctatcctggtaatcttgatctcctacttatttatatttatcaccatcatgaagatgcgctcacctgaaggacgccagaaggccttttctacttgtgcttcccaccttactgcagtttccatcttttatgggacaggaatctttatgtacttacgacctaactccagccatttcatgggcacagacaaaatggcatctgtgttctatgccatagtcattcccatgttgaatccactggtctacagcctgaggaacaaagaggttaagagtgcctttaaaaagactgtagggaaggcaaaggcctctataggattcatattttaa

SEQ ID NO: 44869 - DNA, 2250 bp, Homo Sapiens
gctcaatgacagtcgagctttggctaaggctccggggaaagggtctagccatgctgcatgtgacccggggggtctgggggtccagggtccgagtatggccactgttgcccgcgctcctcgggcccccccgggccctctcatcgctggcagccaaaatgggggagtatcgcaagatgtggaaccccagggagccccgcgactgggcccagcagtaccgcgagcgcttcattcccttctccaaggagcagctgctccgcctcctaatacaggaattccactcgagtccggcagagaaggcggctttggaggcgttctcggcccacgtggacttctgcaccctgttccactaccaccaaatcctggcccggctgcaggccttatatgaccccatcaaccctgacagggagaccctcgatcagccatcactaacggatccccagcgtctgtctaatgagcaggaggtgcttcgggctctggagcccctgctggcccaggccaacttctccccgctgtctgaggacaccctggcctacgcgctggtggtccaccaccctcaggatgaggtccaggtgacagtaaatttggatcagtatgtctacattcacttctgggccctgggccagcgagtcgggcagatgcccctgaagtccagcgtgggctccaggcgtggcttcttcaccaagctgccccctgcggagaggagatactttaagcgggtggtcctggcagcccggaccaaacggggacacctggtactgaagagtttcaaggacacgccgctggaaggcctggagcagctgctgccggagctgaaggtgcgcacgcccaccctgcagcgcgccctgctcaacctcatgctggtagtctccggcgtggcgatcttcgtcaacgtgggcatggtggtgctaaccgacctcaaggtggccacctccctgctgctgctgctcttcgccatcttcatgggcctgcgggcctccaagatgttcgggcagcggcgcagcgcgcaggcgttggagctggcgcacatgctgtactatcgcagtacgtccaacaactcggagctgctcagcgccctggccctgcgcgcgcaggacgagcacaccaaggaggcgctgctggctcacagcttcctggcccggcggccagggggcactcaaggctcgcccgaagagacctccaggtggctccggtcggaggtggagaactggctcctagccaagtcaggctgtgaggtgaccttcaacggaactcgggccctggcgcatctgcaggccctgacccccagcatgggattgtacccacccccgggtttccccaaactagacccagtggctccgatcacttccgagcccccgcaagccacgcccagcagtaacatctcctgagtagaacctacctccctgcccagtcagcaggctaggaactaagccccgcctccttcacgacaggctgtcaattacggttattatacttttcactccaacttccaataactgacaggtgattatttttgctgcactgtgtgcttaagcaaagcagccaatcaaagcagctagcagttgttaagtcttccccgccccttcgatgaacagccaatcaaagcgatttagctctgcttctgttccatttcttagtcccaccctcaccataaacatccaagtgtggtttggctgaggagctgagggtgtctgccaatcacagctgctcagctctggcttctgtaaaccgccaggtagaagagttaaagctgcgccctcccgagactatatatcattgtctttttcagcccgctccgggcaaactgcccatcatgtgcaccaaggccgttagccctgcctcctggcaaacgtccagtgacagctgctgggttccatcaactttgggcagccggttgtcgctgcagggaaggaaccaataagaatttctaaaggaaacctgatcttgctatcaattgctgctgcttaaatggcaggccaactggtcagctgctgatcagggtgtctaggctgaaggagttggagaccttgtgctaggtaggtgaaccagaaaccaccctcgccaccaagactcgctcccaacctggctcccggcaacctcaggtgccttcctcgcccaggtctttcaccctttctacagaaactacctcggtctggatctccccaccaccagcagcctgtgcaatatttattggtctatcaatttctcccgtctcctgtcccaaagtaataaatcatgtttaataagtctgga

SEQ ID NO: 44870 - DNA, 651 bp, Homo Sapiens
tacgtgattcaccatggggatctcaggaagatccacaaagctgccccgggccaagcctggaagctggagaggatgatgaagaagacgacaatggacctgaacataagagatgcgaagaagaggactgctctacactgggcctgtgccaatggccatgcagaagtagtaacacttctggcagatagaaagtaccagcttgacgtccttgatggtgaaaacaggacaactctgatgaaggctctgcaatgccagagggaggcttgtgcaaatattctcatagattctggtgctgatccaaatattgtaggtgtgtatggcaacacagctgtccattatgctgttaacagtgagaatttgtcagtggtggcaaaattgctgtcctgtggtgcagacattgaattgaagaacaaggctggccacacaccacttttattggccataaggaaaagaagtgagcaaattgtggaatttttactgacaaaaaatgcaaatgcaattgcagttgataagtttaaatgcacagccctcatgcttgccatatgtcatggatcatcagagatagttggcatggttcttcagcaaaatgttgacatctgtgctgaagctacatgtggaatgattgcagaacgttatgctgttgcttgtggattt

SEQ ID NO: 44871 - DNA, 702 bp, Homo Sapiens
atggccaaaagaaatctcagcactgtgacagagttcattcttgtagtcttcacagatcaccctgaactggcagttccactcttcctagtgtttctcagtttctatcttgtcacttttctggggaatggggggatgatcattctaatccaagtggatgcccaactccacacccccgtgtacttcttcctgagccaccttgctttcctggatgcctgctgtgcctcagtaatcacccctcagattctggccacactggccacagacaagacagttatctcctatggctgccgtgctgtgcagttctctttcttcaccatatgtgcaggcacagagtgttacctgctgtcagtgatggcctatgaccgctttgttgccattagcaatccactgcactgtaacatgaccatgactccaggtacctgcagggtctttttggccagtgccttcatctgtggggtgtcaggggccattctgcataccacgtgcaccttcaccctctccttctgttgtgacaatcagatcaacttcttcttctgtgacctcccacccctgctgaagctcgcctgcagcagcatgacacaaactgagattgtcattctcctttgtgcaaaatgcatgttcctagccaatgtcatggttatcctgatctgctacatgctcattatcagagccattttgagggtgaagtcggcaggtgggtaa

SEQ ID NO: 44872 - DNA, 1576 bp, Homo Sapiens
cctccaggtcctggcgcacagggtgggagcgctgcgctgcgccgcgctgcgcatcgcggcccgcttgccgcctgccccctgccctagctgggccacctccccgggctgccggtggagggctaagaggcgctaacgttacgctgtttccggttttccagcgggctctgtttcccctcccaaggcggcggcggctgagcggcggagccccccaaatggcctggccagatgcggcaggtttgctgctcagcgctgccgccgccgccactggagaagggtcggtgcagcagctacagcgacagcagcagcagcagcagcgagaggagcagcagcagcagcagcagcagcagcgagagcggcagcagcagcaggagcagcagcaacaacagcagcatctctcgtcccgctgcgcccccagagccgcggccgcagcaacagccgcagccccgcagccccgcagcccggagagccgccgcccgttcgcgagccgcagccgccggcggcatgaggcgcgacccggcccccggcttctccatgctgctcttcggtgtgtcgctcgcctgctactcgcccagcctcaagtcagtgcaggaccaggcgtacaaggcacccgtggtggtggagggcaaggtacaggggctggtcccagccggcggctccagctccaacagcacccgagagccgcccgcctcgggtcgggtggcgttggtaaaggtgctggacaagtggccgctccggagcggggggctgcagcgcgagcaggtgatcagcgtgggctcctgtgtgccgctcgaaaggaaccagcgctacatctttttcctggagcccacggaacagcccttagtctttaagacggcctttgcccccctcgataccaacggcaaaaatctcaagaaagaggtgggcaagatcctgtgcactgactgcgccacccggcccaagttgaagaagatgaagagccagacgggacaggtgggtgagaagcaatcgctgaagtgtgaggcagcagccggtaatccccagccttcctaccgttggttcaaggatggcaaggagctcaaccgcagccgagacattcgcatcaaatatggcaacggcagaaagaactcacgactacagttcaacaaggtgaaggtggaggacgctggggagtatgtctgcgaggccgagaacatcctggggaaggacaccgtccggggccggctttacgtcaacagcgtgagcaccaccctgtcatcctggtcggggcacgcccggaagtgcaacgagacagccaagtcctattgcgtcaatggaggcgtctgctactacatcgagggcatcaaccagctctcctgcaaatgtccaaatggattcttcggacagagatgtttggagaaactgcctttgcgattgtacatgccagatcctaagcaaagtgtcctgtgggatacaccggggacaggtgtcagcagttcgcaatggtcaacttctccaaagccgaggagctgtaccagaagagggtcctgaccatcacgggcatctgcgtggctctgctggtcgtgggcatcgtctgtgtggtggcctactgcaagaccaa

SEQ ID NO: 44873 - DNA, 375 bp, Homo Sapiens
atgaaccccagcgcccccagctaccccatggcctcgctctacgtgggggacctccaccccgacgtgaccgaggcgatgctcaagctcagcgtggccgggcctatcctctccatccgggtctgtagggacctgattacctgccgctgcttgggctacgagtatgtgaacttccagcagccagcggatgtgcgctttgctttggacaccatgaattttgattttataaacgggaagccagtacgcatcatgtggtctcagtgtgaaccatcacttcgcaaaagtcgagtgggcaacatattcattaaaaatctggacaaatccattgataataaaacactgtatgatacattttctgctttttgtaacatcgttaca

SEQ ID NO: 44874 - DNA, 1545 bp, Homo Sapiens
gatccacaattcattgcgcagttgatggaacagcttgatgtcttcatcagtattaaaccaaagcccaaacagccaagcaagtctgtgattgtgaaaagtgttgagcgaaatgccttaaatatgtatgaagcaaggaaatgtctcctcggacttgaaagcagtggggttaccatagcaaccagtccatccccagcatcctgccctgccggcctggcatgtcccagcctggatatcttagcttcagcaggccttggactcactggactaggtcttttgggacccaccaccttatctctgaacacttcaacaaccccaaactcactcttgaatgctcttaatagctcagtcagtcctttgcaaagtccaagttctggtacacccagccccacattatgggcacccccacttgctaatacttcaagtgccacaggtttttctgctataccacaccttatgattccatctactgcccaagccacattaactaatattttgttgtctggagtgcccacctatgggcacacagctccatctccccctcctggcttgactcctgttgatgtccatatcaacagtatgcagaccgaaggcaaaaaaatctctgctgctttaaatggacatgcacagtctccagatataaaatatggtgcaatatccacttcatcacttggagaaaaagtgctgagtgcaaatcacggggatccgtccatccagacaagtgggtctgagcagacatctcccaaatcaagccccactgaaggttgtaatgatgcttttgttgaagtaggcatgcctcgaagtccttcccattctgggaatgctggtgacttgaaacagatgatgtgtccctccaaggtttcctgtgccaaaaggcagacagtggaactattgcaaggcacgaaaaactcacacttacacagcactgacaggttgctctcagaccctgaactgagtgctaccgaaagccctttggctgacaagaaggctccagggagtgagcgcgctgcagagagggcagcagctgcccagcaaaactccgaaagggcccaccttgctccacggtcatcatatgtcaacatgcaggcatttgactatgaacagaagaagctattagccaccaaagctatgttaaagaaaccagtggtgacggaggtcagaacgcccacaaatacctggagtggcctgggtttttctaaatccatgccagctgaaactatcaaggagttgagaagggccaatcatgtgtcctataagcccacaatgacaaccacttatgagggctcatccatgtccctttcacggtccaacagtcgtgagcacttgggaggtggaagcgaatctgataactggagagaccgaaatggaattggacctggaagtcatagtgaatttgcagcttctattggcagccctaagcgtaaacaaaacaaatcaagtgagcgttgtgttttatgcacacttttaggtatccccagattagaatgtgtttatttgggttggagtatcactgactgtggcctctctgacttcaagtgcttggtgtaa

SEQ ID NO: 44875 - DNA, 217 bp, Homo Sapiens
ctctggagcctggtgagtctgcctttttctggttgattccagggctagtgcagatcacagcactcatcagctcatcttggagctcatcaagctcatgcagggctgcagctgcagtctgcctaagccctaagcctggccctgctccccacgatcaagaactaggttttttcctagaaacaggacttcagagagcccatgtcctctatttcaaaaatgg

SEQ ID NO: 44876 - DNA, 1098 bp, Homo Sapiens
atggggaacatcactgcagacaactcctcgatgagctgtaccatcgaccataccatccaccagacgctggccccggtggtctatgttaccgtgctggtggtgggcttcccggccaactgcctgtccctctacttcggctacctgcagatcaaggcccggaacgagctgggcgtgtacctgtgcaacctgacggtggccgacctcttctacatctgctcgctgcccttctggctgcagtacgtgctgcagcacgacaactggtctcacggcgacctgtcctgccaggtgtgcggcatcctcctgtacgagaacatctacatcagcgtgggcttcctctgctgcatctccgtggaccgctacctggctgtggcccatcccttccgcttccaccagttccggaccctgaaggcggccgtcggcgtcagcgtggtcatctgggccaaggagctgctgaccagcatctacttcctgatgcacgaggaggtcatcgaggacgagaaccagcaccgcgtgtgctttgagcactaccccatccaggcatggcagcgcgccatcaactactaccgcttcctggtgggcttcctcttccccatctgcctgctgctggcgtcctaccagggcatcctgcgcgccgtgcgccggagccacggcacccagaagagccgcaaggaccagatccagcggctggtgctcagcaccgtggtcatcttcctggcctgcttcctgccctaccacgtgttgctgctggtgcgcagcgtctgggaggccagctgcgacttcgccaagggcgttttcaacgcctaccacttctccctcctgctcaccagcttcaactgcgtcgccgaccccgtgctctactgcttcgtcagcgagaccacccaccgggacctggcccgcctccgcggggcctgcctggccttcctcacctgctccaggaccggccgggccagggaggcctacccgctgggtgcccccgaggcctccgggaaaagcggggcccagggtgaggagcccgagctgttgaccaagctccacccggccttccagacccctaactcgccagggtcgggcgggttccccacgggcaggttggcctag

SEQ ID NO: 44877 - DNA, 993 bp, Homo Sapiens
tttcccttatttcttttaggtgaatctggactgggaaagttgacattaatcaactcattattcctcacagatttgtattctccagagtatccaggtccttctcagagaattaaaaagactgtacaggtggaacaatccaaagttttaatcaaagaaggtggtattcagttgctgcttacaatagttgataccccaggatttggagatgcagtggataatagtaattgctggcagcctgttatcaattacattgatagtaaatttgaggactacctaaatgcagaatcgcaagtgaacagatgtcagatgcctggtaacagggtgcactgttgtttatacttcattgctccttcaggacatggacttaaaccattggatattgagtttacaaagcatttgcatgaaaaagtgaatatcatcccacttattgccaaagcagacacactcatgccagaggaatgccaacagtttaaaaaacaggtgagcaggatgtataaagaaatccaagaacataaagttaaaatatatgaatttccagaaacagatgatgaagaagaaaaaaaacttgttaaaaagataaaggaccatttacctcttgctgtggtgggtagtaatactatcattgaagttaatggcaaaagggtcataggaaggcagtatccttggagtgttgctgaagttgaaaatggtgaacattgtgattttacagttttaagaaatatgttgataagaacacaccaggacttgaaagatgttactaataatgtccactacgagaactatggaatcagaaaactggcagctgtgacttatcatggagttgataacaagaagaataaagggcagctcactaagagccctctggcacaaatggaagaagaaagaagggagcaagtagctaaaattaagaagatggagatggagatggagcaggtgtttgagatgaaggtcaaagaaaaagttcaaaaactgaaggactctgaagctgaggta

SEQ ID NO: 44878 - DNA, 774 bp, Homo Sapiens
ccgtttctgccgcgtccaccacaacctctgctgtatcagagggggccttcgccgccgccgcccccaccaccgcccctgccgccatcgccacctccgccgctgccgccttggggccctcctccttcaccgcccccttcaccacctctacacgttctaggccttctgtcctggagaagaagctatagtcgttctcccttgtgggcccggggcgcagccatggcggacggcggcggcggcgggggaactggcgcggtgggcggcggcggaactagccaggcctctgccggggcagcgactggcgctactggggccagcgggggcggtggccccatcaacccggcctcgctgcctcccggcgacccgcagctcatcgctctcatcgtggagcagctcaagagccggggcctttttgacagcttccgccgggactgcctggccgacgtggacaccaagccagcttaccaaaacctgaggcagaaagtggataattttgtgtcaacacatctggacaagcaggaatggaatcctacgatgaacaaaaaccagttgcgaaatggtctgaggcagagtgtggttcagtcagggatgttggaagctggagtagacaggattatttctcaggtggtggatccaaaacttaaccacatcttcaggccacaaatagaacgagcaattcatgagttcctggcggcccagaaaaaagcagctgtgccagcaccccctccagagcccgaaggccaggaccctccagctccatctcaggacacttcctaa

SEQ ID NO: 44879 - DNA, 2534 bp, Homo Sapiens
aatgatcatacagtcttagagcaaatgaaagtagcagttgtccagagggggcttgggccagccatccggctggagagaccttcagtaggctcagaacagctgcgctcattcactcactgttccactttcttgtaatgcctgcaccagtcacagtgtggactggggaccagacgcagatgccctggctgtccttggcgggcctggaaagagtggagccccaagttgccggctggcaaacctccagctgtggcccgtggggtttgctccatggtggcctgggccacgcaggctgtaccagccatgagatgccatggagccaaaggctgcgactgtagctgtttgtgctgcagccaacctttacccagttcctgactgctgtttgtttggtttgccatgggtacttctggggacctcctggcagcatgctggcccgtgcaactctcctcatgccagttgtagggtccctgttcctgtttggccaaggaagggatttcctaagtgtatacatatttatttagctttgccatgttttggatggccttggacatagaaactcattgcacattagttaaataactaggccagcattctgaaagacccgactccagacctacttcggtgatggagatgggcacatgcagggtcagggtgctttgaaagagtcacacattcaccttccaacagagcagcctgaggcttccctagtcttgcagggtcaacttgctgaaagctcagcccttggccccaaaggagctctgaggccgcaggcccagagccccgatgtccccgtgagctggtggcagggaagcggaaaaaggctttcacaccgcctcccccacatatgctcacagcctcccctgggccctttcttgcctctcacatggccatcctgtgggttctttggcctgggaggtgctgcttcagcctccctcggccttgaggtgctccaagacagcgtcagcacctgggctagaggtccgtgctgccctgtgcatcctcagagtttgactgtagtgtgcatgtgtgcatgcatgtgcgtgtgtgtgcatgtgtgtgcttgtgtatatgtgtgcatgtgtgtgcttgtgtgcatgtgtgcatgcgcatgtatgcgtgcgcaccgttattttctaatggactgtgcaggcatctgttctcctcatggaccaggaactcagtgatcagggactcccctgtttactttgatattccagctgccctccagagcgcctagcacatagtaggtcttcagtgactgccagatgagaggatatttaaatgagacggcagctttggagggatgacaacagattgtggtctaatctcacgatttttgcctgagagagaattggccctactcgaggcgggctttttttttcttttcttttcttttcttttttttttgagatggagtttcactcttgttgcccacgctggagtgcaatggtgcaatctcagctcactgcaacgtctgcctcccgggttcaagcgattctcctgcctcggcctcctgattagctgggattacaggcatgtgccactacccggccaattttgtatttttagtagagacggggcttctccatgttggtcaggctggtctggaactcctgacctcaagtgatccacctgcctcggcctcccgaaatgctgggattacaggcatgagccactgcgccaggccaaggcgggctttatttgtgtctgttggacacctcacatggcacctcacagggcgctggtttataaagacccaaaccagtgtcgagttccatgctggccccggcgtctgctgtgtgctttcgctgtgtgtatacatgcggaagttcattccggaggcttccagggtagcctcccgggtgctgcagcgggtctcccgctcatcactactctgtacacaatgtcttgatacgctgaggattgaaatggagcagtgatcctgcctcaaggtagacagcaaaacccaggctatgtgggagtcagtgtggtaggactgagggcgtgcctgagggacggatgcaggggcagagagagcagcaggtgaaggctgggcctcctgctgaaagccggtattgctgagactccagggtcagccttccagctcctcctcctgactgaccgctggcaatgtaggggtgactgtcccagcctcctgctgcagggcgctctgccgtcagtagagaatcctcctctgtccccgcggtcccctccccgctgaacagcctggatcctgctttcacagggacatgcgtgaaatgggtcctgcgccgtaattactcctgctggagaccgggattgcaaagatgactgtcatgttgtctcgtgcatcttacatcttttactgtgattaaaaataaatgtcgtggggttcacgtcccacagacccttatgtactgcagaggtcaaactggggcgggtttctcacacgcgtcatcacgcgaggccagtgtccgtcggggtgtgtgtctacaagcacggggcttcgtggcctatctttatgaaccctccagggtgatgtgaagccagccacaaac

SEQ ID NO: 44880 - DNA, 669 bp, Homo Sapiens
atgaactccaacgtggagaaactgcccccgcacatcatccgcctggtgtacaaggaggtgacgacactgaccgcagacccacccgatggcatcaaggtctttcccaacgaggaggacctcaccgacctccaggtcaccatcgagggccctgaagggaccccatatgctggaggtctgttccgcatgaaactcctgctggggaaggacttccctgcctccccacccaagggctacttcctgaccaagatcttccacccgaacgtgggcgccaatggcgagatctgcgtcaacgtgctcaagagggactggacggctgagctgggcatccgacacgtactgctgaccatcaggtgcctgctgatccaccctaaccccgagtctgcactcaacgaggaggcgggccgcctgctcttggagaactccgaggagtatgcggctcgggcccgtctgctcacagagatccacgggggcgccggcgggcccagcggcagggccgaagccgggcgggccctggccagtggcactgcagcttcctccaccgaccctggggccccagggggcctgggaggggctgagggtcccatggccaagaagcatgctggcgagcgcgataagaagctggcggccaagaaaaagacggacaagaagcgggcgctgcggcggctgtag

SEQ ID NO: 44881 - DNA, 1518 bp, Homo Sapiens
agggaactcagctttagattctccctgtactggaaagggatgtcgcaaggttggggacgaaacctctgagtttgcgaccgtagctgtcgctttccggccaacacagaggtgcctgaaggctggttggggtgctcttgttcagcttctggaatttctgagcagccctcgtcagtacaagatggaccccgtagtcttgagttacatggacagtctactgcggcaatcagatgtctcactattggatccgccaagctggctcaatgaccatattattgggtttgcgtttgagtactttgccaacagtcagtttcatgactgctctgatcacgtcagtttcatcagccctgaagtcacccagttcatcaagtgcactagcaacccagcagagattgccatgttccttgaaccactggacctccccaacaagagagttgtatttttagccatcaatgataactccaaccaggcagctggaggaacccactggagtttattggtctacctccaagataaaaatagcttttttcattatgattcccatagcaggagcaactcagttcacgcaaagcaggtagcagagaaactggaggctttcttaggcagaaaaggagacaaactggcctttgtggaagagaaagcccctgcccaacaaaacagctatgactgtgggatgtacgtgatatgtaacactgaggccttgtgtcagaacttctttaggcaacagacagaatcactgctgcagctactcacccctgcatacatcacaaagaagaggggagaatggaaagatctcattaccacacttgctaaaaagtagctattgaagtatatttgcgacttttgaaggctcctctttctgcccttccccatttgttggatggctgcaatctcagtgcctgagggaagatgcctagtagaggaaagcttaatactctttttcctgaaagaatatcatcctctgcattatccccatggaacgtttcactttaaccctgactggggagcaatatgttctgtgaaaatatcttgaaattgtacaccaaaaccttacaaccaacttatttgaacatttattacacacagggtttacgtaagacttttcttattggtatataattaatttcctttggtctcccttatccacattggcttattctggaggaaaagcagtgatctgtaaaacaaatcaagaatatattaaatctagaggaatgcagagaagaaaactataaaacagaaccaaaaacttgttgcacagcctacataattaagagatcaactggctggaagcagatcaaggcctaacttcattcaagacctaaatattatgagactcagttattcggttttatgtgacatctcttccattcaccatgcacaggcttttccagctatctatataatgtttgcaaatatttgataaagatgatgttaccctatcttcctccatctgattcctggaatgcttgaagaaaggggaaatcttgagtaacctcattaaaattaatgtctggtgga

SEQ ID NO: 44882 - DNA, 2457 bp, Homo Sapiens
ggggggtgggcgctctttctttttctcttagaagagggtttagcacaggttttttcgttctcacttccacaccaccttaccgcctcccgaccccccctctccccctccccacctatcgtcatgacggcctctccggattacttggtggtgctttttgggatcactgctggggccaccggggccaagctaggctcggatgagaaggagttgatcctgctgttctggaaagtcgtggatctggccaacaagaaggtgggacagttgcacgaagtgctagttagaccggatcagttggaactgacggaggactgcaaagaagaaactaaaatagacgtcgaaagcctgtcctcggcgtcgcagctggaccaagccctccgacagtttaaccagtcagtgagcaatgaactgaatattggagtagggacttccttctgtctctgtactgatgggcagcttcatgtcaggcaaatcctgcatcctgaggcttccaagaagaatgtactattacctgaatgcttctattccttttttgatcttcgaaaagaattcaagaaatgttgccctggttcacctgatattgacaaactggacgttgccacaatgacagagtatttaaattttgagaagagtagttcagtctctcgatatggagcctctcaagttgaagatatggggaatataattttagcaatgatttcagagccttataatcacaggttttcagatccagagagagtgaattacaagtttgaaagtggaacttgcagcaagatggaacttattgatgataacaccgtagtcagggcacgaggtttaccatggcagtcttcagatcaagatattgcaagattcttcaaaggactcaatattgccaagggaggtgcagcactttgtctgaatgctcagggtcgaaggaacggagaagctctggttaggtttgtaagtgaggagcaccgagacctagcactacagaggcacaaacatcacatggggacccggtatattgaggtttacaaagcaacaggtgaagatttccttaaaattgctggtggtacttccaatgaggtagcccagtttctctccaaggaaaatcaagtcattgtccgcatgcgggggctccctttcacggccacagctgaagaagtggtggccttctttggacagcattgccctattactgggggaaaggaaggcatcctctttgtcacctacccagatggtaggccaacaggggacgcttttgtcctctttgcctgtgaggaatatgcacagaatgcgttgaggaagcataaagacttgttgggtaaaagatacattgaactcttcaggagcacagcagctgaagttcagcaggtgctgaatcgattctcctcggcccctctcattccacttccaacccctcccattattccagtactacctcagcaatttgtgccccctacaaatgttagagactgtatacgccttcgaggtcttccctatgcagccacaattgaggacatcctggatttcctgggggagttcgccacagatattcgtactcatggggttcacatggttttgaatcaccagggccgcccatcaggagatgcctttatccagatgaagtctgcggacagagcatttatggctgcacagaagtgtcataaaaaacatgaaggacagatatgttgaagtctttcagtgttcagctgaggagatgaactttgtgttaatggggggcactttaaatcgaaatggcttatccccaccgccatgtaagttaccatgcctgtctcctccctcctacacatttccagctcctgctgcagttattcctacagaagctgccatttaccagccctctgtgattttgaatccacgagcactgcagccctccacagcgtactacccagcaggcactcagctcttcatgaattacacagcgtactatcccagtgtttgaaagatgtatggtgatcttgaaacctccagacacaagaaaacttctagcaaattcaggggaagtttgtctacactcaggctgcagtattttcagcaaacttgattggacaaacgggcctgtgccttatcttttggtggagtgaaaaaatttgagctagtgaagccaaatcgtaacttacagcaagcagcatgcagcatacctggctctttgctgattgcaaataggcatttaaaatgtgaatttggaatcagatgtctccattacttccagttaaagtggcatcataggtgtttcctaagttttaagtcttggataaaaactccaccagtgtctaccatctccaccatgaactctgttaaggaagcttcatttttgtatattcccgctcttttctcttcatttccctgtcttctgcataatcatgccttcttgctaagtaattcaagcataagatcttggaataataaaatcacaatcttaggagaaagaataaaattgttattttcccagtc

SEQ ID NO: 44883 - DNA, 387 bp, Homo Sapiens
atgctgggttggattttgatcaccttggcaaccattgctgccttagtctcctgctgtgtggcaaagtgctgctctcccctcacctctctgcaacattgctactggaccagccacctccagaatgagagagaactctttgaacaagcagcagagcagcactctcggctcctcatgatgcatcgcataaagaagctatttggcttcattcccgggagtgaagacgtcaaacacatccgcattccttcttgtcaggactggaaagatatttcagtacccactcttttatgcatgggtgatgacttgcaaggtcactatagcttccttggaaatagggtggatgaggataatgaggaagacagatcaagaggtattgaattaaaaccttga

SEQ ID NO: 44884 - DNA, 486 bp, Homo Sapiens
atgcatccctggctggggtcagccttggggtttcccaagtgtagaggaatccatctctgtgcctgtggtaatggctggacaccaggagagcaacagagtgagaccctgtctcaaaacaaaacagaaataacaaaaaataaggtgacttgctggaggccacatggctgtgagccaaatacaggtctgggttatcagggctcacatacttctaagtacaccctactgccttggaatctgctgaagaccaagcccctgcccccaagccatggcaaagaaggagggaaggaagcaaaggtgcccagcggggacaactcggggaggggcgaggtgcccagggcccaggaaggccaagcagcatgtggcagggcagcatcaggtgactcccaagaaggaatgaggagaggatatgaggaaagagccacagcacagaggcctgctgttaggtcagcggagaccacggcccatgggacctggatctacccttga

SEQ ID NO: 44885 - DNA, 747 bp, Homo Sapiens
atgactgctggttcagtgtgtgtccctcagatcataccattacgagtgcctcagcctggaaaagctaaccatgaaattgataacaatacgcttttggaaatgaaatcagacactccagatgtcaacatatattatactctggatggcagcaaacctgaatttctaaagagaattggttatggggaaaataacacatttaagtatataaaacctattactctgcctgatggaaaaatacaagttaaagctattgctgtctctaaagactgcagacagagtggcattgtgacaaaggtgtttcacgtagactatgaaccaccaaatatagtctctcctgaagacaatgttgaaaatgttctcaaagattcttcaaggcaggcaagattcaaaaatggatttgttggatcaaaactaaagaaaaaatataagaactctgaaaatcaacgcagctggaatgttaaccttagaaagtttccagtcccccggttttgcacacgtaagcggtcagaagtgtttgacaagcacggagataatgagaattcaaagggagacagactttctcaagtgtgcccactgccttgccccccggccatcagatccctttgctcgcttctgtcaagaatgtggctctcctgtcccacccatatttggctgtcgtctcccacccccagaaggagctcagatgggcttgtgtgcagaatgcagaagcttggtacccatgaacactcccatctgtgtggtgtgtga

SEQ ID NO: 44886 - DNA, 171 bp, Homo Sapiens
atgggcaagaaaatagcctttgtaaataaaatagaggcaagagatataatgctttacctgcaaagagctataaatacagccatgtaccatataatgatgtttcagttagtgaaggaccacatacgagggtggtcagaacagcaggctataccatatagcctaggtgtgtag

SEQ ID NO: 44887 - DNA, 633 bp, Homo Sapiens
ttttggaggtgtggcctccgtctttcacccaggctggagtgtggtgtcacgatctcagctcactgcaaactctgcctcccgggttcaagtgattctcctccctcagcctcccgagtacctgggaccacaggtggtatacttaataacgccatagcctctataaggaacgtatgtattagtctgctggcaggaattgttttgggattttttgttcgatattttccaagtgaagaccagaaaaaacttacattgaagagaggattccttgttttgactatgtgtgtttctgccgtcttaggcagccaacgtattggtttacatggatctggaggattatgcacactagtgttgagtttcattgcagggacaaaatggtcccaagaaaagatgaaagtccaaaagattattacgactgtatgggatatttttcaaccacttctttttggtttagttggagcagaagtatctgtttcatcgcttgaatcaaatattgttggcatatctgttgccactctaagtttggcattatgtgttcgaattttaaccacatatctattgatgtgctttgctggttttagttttaaggagaaaatatttattgctttagcatggatgcccaaagctacagtacag

SEQ ID NO: 44888 - DNA, 1028 bp, Homo Sapiens
ctttgccaacatgacccccagccaggtacagctcttcctggccaaggttccctgcaaggaggatgagctggtcagggatagccctgctcggaaggcagtgtctcgctacctgcggtgcctgtcacaggccatcggctggagcgtcaccctgctgctgatcatcgcggccttcctggcccgctgcctgaggccctgcttcgaccagacagtcttcctgcagcgcagatactggagcaactacgtggacctggagcagaagctcttcgacgagacctgctgtgagcatgcgcgggacttcgcgcaccgctgcgtgctgcacttctttgccagcatgcggagtgagctgcaggcgcgggggctgcgccggggcaatgcaggcaggagactcgagctccccgcagtgcctgagcccccagaaggcctggatagtggaagtgggaaggcccacctgcgcgcaatctccagccgggagcaggtggaccgcctcctaagcacgtggtactccagcaagccgccgctggacctggctgcatcccccgggctctgcgggggtggccttagccaccgcgcccctaccttggcactgggcacgaggctgtcacaacacaccgacgtgtagggtcctggccaggcttgaagcggcagtgttcgcaggtgaaatgccgcgctgacaaagttctggagtctttccaggccgtggggaccccacggcaggcaccctaagtcttgttagcctcctttttaaagtagcccaatctctgcctagtttctgggtgtggcctccagcgcgcttcacaaactttaatgtggactcggttcaccgagggccttgttaaatacaggttcagacagtgtagccaggaccgagtctgagattctgcattttaaacaagctcctggaggctgatgtgcttttggtcagtgaaccaaactttgagtagcaagaatctaagtaaatctgccatgggttctgggttctagatgtcaattctaaataataataatgaccttagtctgctgcctcgata

SEQ ID NO: 44889 - DNA, 1275 bp, Homo Sapiens
ggtacccctccctggcgtcagaaagaagccaaacaaggagctttctgcagaatgaaacctttcctttcagaagcactgctgacagtttggtggttgccattggggcagtgagccttttgtccattctgaggttgggctggtttctcctcttggccgtgccctacagaccataaaggaaatcagctagaagtccccagaaacatccacagatggccctggacatcagccacattctgagaaacatgtcatgttctgggaggtctaaggcatcaaggcctcagtgcatgggcgctgtccaacctctggtgctgaagcagccaagagacgcaagcctgcgtggctgcctcttaggatatgacagcacagccactggcctctactgaatcctatgcaacctcagaagacacccaggagtgatgccatcatgtggtgcaagagttctgagggaccacaatcctgaagacattgaatggctgtgttcctgctcattgctggaggtactgtcagggtccctgtcctcaacccctggtctgacacttgcagatcaggcaggacattctggaggaatcatgcccttggaaggatccctgaggagtgactgttgttagattaaaaaacagtggcaaagagcaatacagagagttgccaaaattcacaccgctggtccaggtttgaagcaagcagtctgtacctgcagtccttgtctgtaaccatggcaccctggcttctcacacatctcatcgtggagttccaccatgtgtcaggcatggcactgagcaccttcttttaagaatataatttgtaattatgtagattattaattctacttcaaaatgccacacagccttcatgtgataaaatgaaacaattgctcaactgatctcctgggatctctactaagatgttggcagcccggccagctggtctggccctggacgtgccttcatggtctggttatgcttcatgacctgcactgtggtcagtgccattttgcagactctgatcacagtgaaacgttccatgggaacttgggccatgagaaacatccttcctaaccacgtgactgcagaaacatccttatcgcgtcctcctgggcaaaggcccaacagcctgactgcagggacatccttgccatatcctgctgggcagcaagctctaccacccagatccctccctcccagtcccatgattaccccagcctgtgagtggcagttggtgctggcactaagctggtttcctcctccccagggttttgctggcaataaagatgttgct

SEQ ID NO: 44890 - DNA, 609 bp, Homo Sapiens
cctccttgtgggggtggtccttctggctttcccggacgaggtgggggaccttgggactggtttcctccttgtgggggtggtccttctggctttcccggacgaggtgggggaccttgggactggtttcctccttgtgggggtggtccttctggcccggatgaggcgggggaccttgggactggtcctccttgtgggggtggtccttctggctttcccggacgaggcgggggaccttgggactggtttcctccttgtgggggtggtccttctggctttcccggacgaggcgggggaccttgggactggtttcctccttgtgggggtggtccttctggctttcccggacgaggtgggggaccttgggactggtttcctccttgtgggggttgtccttctggctttcccggacgaggtgggggaccttgggactggtttcctccttgtgggggtggtccttctggctttcctggacgaggtgggggaccttgggactggttgcctccttgtgggggtcgtccttctggctttcctggaggaggtggggtacgttggggctggtttcctccttgtgggcgtcgtccttctggctttcctggaggaggtggacac

SEQ ID NO: 44891 - DNA, 912 bp, Homo Sapiens
atggaaagtgccctgccgagtatcttcactcttgtaataattgcagaattcataattgggaatttgagcaatggatttatagtactgatcaactgcattgactgggtcagtaaaagagagctgtcctcagtcgataaactcctcattatcttggcaatctccagaattgggctgatctgggaaatattagtaagttggtttttagctctgcattatctagccatatttgtgtctggaacaggattaagaattatgatttttagctggatagtttctaatcacttcaatctctggcttgctacaatcttcagcatcttttatttgctcaaaatagcgagtttctctagccctgcttttctctatttgaagtggagagtaaacaaagtgattctgatgatactgctaggaaccttggtcttcttatttttaaatctgatacaaataaacatgcatataaaagactggctggaccgatatgaaagaaacacaacttggaatttcagtatgagtgactttgaaacattttcagtgtcggtcaaattcactatgactatgttcagtctaacaccatttactgtggccttcatctcttttctcctgttaattttctccctgcagaaacatctccagaaaatgcaactcaattacaaaggacacagagaccccaggaccaaggtccatacaaatgccttgaaaattgtgatctcattccttttattctatgctagtttctttctatgtgttctcatatcatggatttctgagctgtatcagaacacagtgatctacatgctttgtgagacgattggagtcttctctccttcaagccactcctttcttctgattctaggaaacgctaagttaagacaggcctttcttttggtggcagctaaggtatgggctaaacgatga

SEQ ID NO: 44892 - DNA, 813 bp, Homo Sapiens
ctgttcctgtccatgtgcctggtcacggtgctggggaacctgctcatcatcctggccgtcacccctgactcccacctccacatccccatgtacttcttcctctccaacctgtccttgcctgacatcggtttcacctccaccacggtccccaagatgattgtggacatccagtctcacagcagagtcatctcctatgcaggctgcctgactcagatgtctctctttgccatttttggaggcatggaagacatgctcctgagtgtgatggcctatgaccggtttgtagccatctgtcaccctctatgtcattcagccatcacgaacccgtgtttctgtggctttctagttttgttgtcttttttttttctcagtcttttagacgcccagctgcacaacttgattgccttacaaaggacctgcttcaaggatgtggaaattcctaatttcttctgtgacccttctcaattccgtcttgcatgttgtggcaccttcaccaataacataatcatgtatttccctgctgccatatttggttttcttcccatctcggggacccttttctcttacgataaaattgttttctccattctgagggtttcatcatcaggtgggaagcataaggccttctccaccagggggtctcacctgtcagttgtttgctttatggaacaggcattggaggctacctcagttcagatgtgtcatcttccccgagaagcagtggcctcagtgatgtacacggtggccatccccatgctgaaccccttcatctacagcctgagaaacagggatattaaaagtgtcctgcggcag

SEQ ID NO: 44893 - DNA, 207 bp, Homo Sapiens
atggctatagattgtggtttgacactcctggctgcccactgcagctctggggcaatgtcagtgtttacgttccttcctcaacttggcggcaacagaggaaaggaccttagtagtggttgtggtcaagggtcttttgcttgtatcctgggagctccacaccagagagatgtaggtcagcaattcctcagtgcaatcaccccaggatga

SEQ ID NO: 44894 - DNA, 1196 bp, Homo Sapiens
attcctttaaaaaaaaaccaataccaaagaagcctacaatgttggccttagccaaaattctgttgatttcaacgttgttttattcacttctatcggggagccatggaaaagaaaatcaagacataaacacaacacagaacattgcagaagtttttaaaacaatggaaaataaacctatttctttggaaagtgaagcaaacttaaactcagataaagaaaatataaccacctcaaatctcaaggcgagtcattcccctcctttgaatctacccaacaacagccacggaataacagatttctccagtaactcatcagcagagcattctttgggcagtctaaaacccacatctaccatttccacaagccctcccttgatccatagctttgtttctaaagtgccttggaatgcacctatagcagatgaagatcttttgcccatctcagcacatcccaatgctacacctgctctgtcttcagaaaacttcacttggtctttggtcaatgacaccgtgaaaactcctgataacagttccattacagttagcatcctctcttcagaaccaacttctccatctgtgacccccttgatagtggaaccaagtggatggcttaccacaaacagtgatagcttcactgggtttaccccttatcaagaaaaaacaactctacagcctaccttaaaattcaccaataattcaaaactctttccaaatacgtcagatccccaaaaagttctgcgattagacaatgcaccggaaccttatgatgtgagttttgggaattctagctactacaatccaactttgaatgattcagccatgccagaaagtgaagaaaatgcacgtgatggcattcctatggatgacatacctccacttcgtacttctgtatagaactaacagcaaaaaggcgttaaacagcaagtgtcatctacatcctagccttttgacaaattcatctttcaaaaggttacacaaaattactgtcacgtggattttgtcaaggagaatcataaaagcaggagaccagtagcagaaatgtagacaggatgtatcatccaaaggttttctttcttacaatttttggccatcctgaggcatttactaagtagccttaatttgtattttagtagtattttcttagtagaaaatatttgtggaatcagataaaactaaaagatttcaccattacagccc

SEQ ID NO: 44895 - DNA, 1541 bp, Homo Sapiens
agctgcttctggttgggcccagacctgccttgaggagcctgtagagttaaaaaatgaaccccacggatatagcagacaccaccctcgatgaaagcatatacagcaattactatctgtatgaaagtatccccaagccttgcaccaaagaaggcatcaaggcatttggggagctcttcctgcccccactgtattccttggtttttgtatttggtctgcttggaaattctgtggtggttctggtcctgttcaaatacaagcggctcaggtccatgactgatgtgtacctgctcaaccttgccatctcggatctgctcttcgtgttttccctccctttttggggctactatgcagcagaccagtgggtttttgggctaggtctgtgcaagatgatttcctggatgtacttggtgggcttttacagtggcatattctttgtcatgctcatgagcattgatagatacctggcaattgtgcacgcggtgttttccttgagggcaaggaccttgacttatggggtcatcaccagtttggctacatggtcagtggctgtgttcgcctcccttcctggctttctgttcagcacttgttatactgagcgcaaccatacctactgcaaaaccaagtactctctcaactccacgacgtggaaggttctcagctccctggaaatcaacattctcggattggtgatccccttagggatcatgctgttttgctactccatgatcatcaggaccttgcagcattgtaaaaatgagaagaagaacaaggcggtgaagatgatctttgccgtggtggtcctcttccttgggttctggacaccttacaacatagtgctcttcctagagaccctggtggagctagaagtccttcaggactgcacctttgaaagatacttggactatgccatccaggccacagaaactctggcttttgttcactgctgccttaatcccatcatctacttttttctgggggagaaatttcgcaagtacatcctacagctcttcaaaacctgcaggggcctttttgtgctctgccaatactgtgggctcctccaaatttactctgctgacacccccagctcatcttacacgcagtccaccatggatcatgatctccatgatgctctgtagaaaaatgaaatggtgaaatgcagagtcaatgaactttccacattcagagcttacttaaaattgtattttagtaagagattcctgagccagtgtcaggaggaaggcttacacccacagtggaaagacagcttctcatcctgcaggcagctttttctctcccactagacaagtccagcctggcaagggttcacctgggctgaggcatccttcctcacaccaggcttgcctgcaggcatgagtcagtctgatgagaactctgagcagtgcttgaatgaagttgtaggtaatattgcaaggcaaagactattcccttctaacctgaactgatgggtttctccagagggaattgcagagtactggctgatggagtaaatcgctaccttttgctgtggcaaatgggccctc

SEQ ID NO: 44896 - DNA, 2690 bp, Homo Sapiens
ttccgggttgggagaaaggtggcggcgctttcggagggaataaaatggaaggagaatcaagcagatttgaaatccacactccagtttctgacaagaaaaagaaaaagtgttctatacataaggaaagacctcagaaacattcccacgaaattttcagagactcctccctggtgaatgaacagtctcaaataactaggaggaaaaagaggaaaaaagatttccagcatctcatttcttctcctttgaaaaaatccagaatctgtgatgagactgcaaatgccacttccacactcaaaaagagaaaaaagagaagatatagtgctttggaggtggacgaggaagcaggtgttacagttgtccttgtggataaagaaaatattaacaacacaccaaagcattttagaaaggatgttgatgttgtttgtgttgatatgagcatagaacagaagttaccaagaaagcctaaaacagacaaatttcaggtacttgctaagtcacatgcacataaatcagaagccctgcacagtaaagttagggagaaaaagaataaaaagcatcagaggaaagctgcatcctgggagagccagcgggcaagggacaccctgcctcagtcagaatcccaccaggaggagtcctggctttctgtgggtccagggggtgaaattacagaactaccagcatctgctcataaaaacaagtctaagaaaaaaaagaaaaagtccagtaaccgggaatatgagacactggccatgcctgaaggatcgcaagcaggcagagaggccgggactgatatgcaggaatcccagcctactgtgggcttggatgatgaaactccacaactactaggacctactcacaaaaaaaagtctaagaaaaaaaagaagaaaaagtccaatcaccaggaatttgaggcattggccatgcctgaaggatcacaagtgggcagtgaggttggggctgatatgcaggaatcccggcctgctgtgggcctgcatggtgaaactgcaggaataccagcacctgcttataaaaacaagtctaagaaaaaaaagaaaaagtccaatcaccaggaatttgaggcagtggccatgcctgagagcctcgagagtgcataccctgaaggatcacaggtgggcagtgaggttgggactgtggaaggcagtacagctcttaaagggttcaaggaatccaacagtacaaagaagaagtctaagaaaaggaagcttacgtctgtcaaaagggcacgagtgtctggtgatgatttttcagtgcccagtaagaactctgagagcacactctttgattcagtagaaggtgatggcgccatgatggaagaaggtgtgaaatctaggccccgacaaaagaaaacccaggcctgtttggcaagcaagcacgtgcaagaggcgccaaggttagaacctgcaaatgaagaacacaatgtggaaacagctgaagattccgaaataagatacttatctgcagattcaggagatgccgatgattcagatgcggatttgggttctgccgtgaaacagcttcaggagttcattcctaacatcaaggacagggccaccagcacaatcaagcggatgtaccgggacgacttggaacggtttaaggaatttaaagcacaaggtgtcgctattaaatttggcaagttttctgtaaaggaaaataagcagttagagaaaaatgtggaagactttctagccctgacaggcattgagagtgcagacaagctgctgtacacggacagatatcctgaggaaaaatctgtgatcaccaacttaaaaaggagatactcgtttagattacacattggtaggaacattgcccggccctggaaacttatatactatcgagcaaagaagatgttcgatgtcaacaattacaaaggcaggtatagcgaaggagatactgagaagttaaagatgtaccattctctccttgggaatgactggaagacgattggtgagatggtggcccgaagtagcctctccgtggccctcaagttctcacagatcagcagtcaaagaaatcgtggtgcttggagtaagtctgaaacccggaaactaatcaaggctgtcgaagaagtgattctgaagaagatgtctccccaggagttaaaagaggtggattccaaactccaagaaaatcctgaaagttgcctatcaattgttcgggaaaaactctacaagggcatatcttgggtagaagtagaagctaaagtgcaaaccagaaattggatgcagtgtaaaagtaagtggacagaaattctaaccaagaggatgactaatggtcggcgtatctactatggcatgaatgccctgcgggccaaggtcagccttattgaaaggttgtatgaaataaatgtggaagatactaatgaaatagactgggaagatcttgctagtgccataggtgatgttcctccatcttacgttcaaactaaattttctaggctgaaagctgtctatgttccattttggcagaaaaagacttttccagagatcatcgactacctttatgagacgactctacctttgctgaaggaaaagttagaaaaaatgatggagaaaaaaggcactaaaatccagactcctgcagcacccaagcaagttttcccatttcgagacatcttttattatgaagacgatagtgaaggaggacatagaaaaagaaagcgaagg

SEQ ID NO: 44897 - DNA, 4000 bp, Homo Sapiens
aaatagaaaaagaagaatttatgagaagtaaaaccgattgtgccactcctgattttgttcctgagcctagtcctcatgacttgcctatggatgaacatgttttaccagatgatgctgatataaattttggatactgtgaagtggaagaaaaatgtagacagtcttttgaggcttggcaagagaaacagaaggaattagaagataaagagaaacaaactctcaaagctcagagggatagagaagaaaaacaatttcaagaagaagaagaaaagcgacattgctggatgaaacaatttaaagttgaaaagaagaaattagagaacattcagaagcaagaacaggacaagatgaatgatgaactctataaagaagagaaaatttggaaagagaaatttaaacagcatgaggagtatattagaaacttgcatttacaaatggaagaagaaagaacaagatttaaagaccaacaagaaaaagaaaaaaattctttgttaaaacagcagaataatgcagctgttaaaattcaagctaaatataaagcatttgttgcctatcaaaaatatggcccaattattaaagagcaaattgaaagtaagaaaaggaaagcacaagagtggaaggaaaaggaagcaaaaatacgacaaaaggaggaagaaaatcgaaaaagattagaggaggaacaaaggataaaagaagagagaaaaaagcaaaaggaagaggaaaggaaaaggagagaaaaagaatatgaagaaaaaaagaatattgtgaaacaggaaagagagcaactaataagcaaggaaaaaataatattaagagaagatgcaagccaacagctaataataagtagtgcattaaagaagagcggatataataacaaacatttaagtcttgaagatatttcaaatgataagggtgatatagccaaaaatctagtggatgaaaattcaaagaagcaggaagatgttctcctttggctagttgaggaatcaaatatgaaagaaaatgtagatagacagactatattaaaagaatcaatacaagtaaagttaaaagaatctatatcaagccaaacaattctggcagattttaaaatggaagaaaaaaatgaaaacctagcaaaaaaacgatgttcagaagaattggtcaagcaagaaagaaaatatgaaaatacagataacaaaactgaattgggaaactctgatctaaaaggaaatctgaaagaacagtttccattgcaagaattaaagtctgatgcacaaaaagaagaaaaaatcatgaaacatgtcataaatgagaatacaggacaaaaaacccagataatattaggacataaccaagaaatcagtgaggtgaaaaccaatgaagagcagaaaataatcaaagataatcagcagaaaaagatacaaaaagtagaaaaagaagagatacaagaacagaatggattattatataaagataaggatactttagttatttcagtgaaacaaagatcactctcactaacatcagaaaattccaaagatgtaagagaaaacgtaatattacaagaaaaagaaatttattcaaaatccaaagaaattgaggagaacccaaaagacaatgcttggaatagtggcattgtgatttttaacacaactgataccatgataaatatagaaggcaaaagaaatgaccaagattatgtgttaggtagacatgctccttgtgagggcttgagtaactataatgcagaaagctccatggtatctaaagaagtcaactctcttaaatctgagattagaaatatttcagaaaaatgccatgaaaatgcacctgaacctgatagcatgacctgctgtgtatcagagtcaacccttctatattctattgaagaaaggagactagcctggataaaatcatttaaaccttggcttgaaattttcaagcaaaatcaacaaaagaaaattgttagaagaaagagacctgtgaaatgcccagccaacatgacacccgctttggataaactggaaattcttcgatgtggcccttgggatactttacagcaggttacaacagttacatttcaagatttgccaggctgtgttctctccacactggcagagtgtacaaatcttcagtttctatcccttcgacgctgtggattaacttctttgcacagcctgagtaattgtaaaaaacttaagtacattgatgcacaggaaaaccatattgaggctattgagtgtgaaaatttggaaaatctctgtgttgttcttcttaataaaaatcaactgacttctcttcatggtttggatggctgtactaatattcagtgtcttgaactttcatataataaaattactcgaattggatattccttctttctggaagaaaaacttgttgacaatgcagggttctgccatcacttgggcacctccacttcttacttatccctggcacaagtctggattccaactggattatgttggtcctggatacctattacctcacttacaaaaaattcagattgtaatttccttatctcccacttatactggaattgtggtttagaatctttgaaaaatcttcaacaactaattttggaccacaatcagttaattaatacaaaaggtctttgtgatacacctaccattgtatacctagattgctcccataatcatcttactgatgtagagggcgttgaaaattgtggattgctccaaatattgaagttacagggaaattatctgagtgagcttccatccttggagaatcttgttttactaagagaattgcacttggatgataacagcatttcaactgtggaagcattttcttcatactggctgcctttactacaaaatattactatctctcaaaacagcttgactaaaatcgtaccactttttcattttgtttcattggaaaagctagatgtcagccacaattgtctttctgatcttaaaagtgccataaaatggtttgatgcatgctattctctccatgaattgtctcttactggaaacccacttcttcaagaaacaaactggagggattctctacttaaagtgttgcctgctctgagaatcctcaatggcaatatactaaactctaattcagaaagccgcactgaagaacacaatcaactgggatcagcaggtttcctggcactttgtcagtctcagattcgagaattcaacttgctaattgaaaattatataactggaaaaggagatgtatttaccttggatactgcagaaaatctctgtcattattttaagaaattgatgatacttagtactgaataccgacatgcacacgaacgaggggatgtaactatcaccaagaaagatgaatcagaagcccagaaaaatcatttggcccctacaaacagtgacagcactctgcaaaatggagtcttctactcttgtgcacgtgaaggtgagccagactcaccagatattcctgagaaatggatggactctgtctccagccactccccattaagcaaatccgccacatgtgaaaatatggaaggaagacatcaggaaatattagtatgtcagaagagagaagacagcaaggcaagcagtattcccaccataagaatcccatttaaggaagtagtaatgacaaattctttgctgaggaatcaccaaaatattgagcctagtgaaaaaatgtaagatatataaataatgtttcttttatagatgtatgtttactccttttgatggatgatattagtcaatggtacctagtaatttgctgaaggattcaaatcacaatcatatttcataccgattccattatgttttcgtgaggtgcattatgttttcatgaggtgcacaaatcattaattatagtgcatattaatttgattaaattctcatttaatttctagtagtatttaaatgagtaaatgtgagtttttttctgccttgtaatttctaaataattaatatgttttaaggagaaataaaatatcacagtctaaaaataataaaaacattttctgagt

SEQ ID NO: 44898 - DNA, 515 bp, Homo Sapiens
acactttgtatggcaagtggaaccactggcttggtggattttgctagatttttctgatttttaaactcctgaaaaatatcccagataactgtcatgaagctggtaactatcttcctgctggtgaccatcagcctttgtagttactctgctactgccttcctcatcaacaaagtgccccttcctgttgacaagttggcacctttacctctggacaacattcttccctttatggatccattaaagcttcttctgaaaactctgggcatttctgttgagcaccttgtggaggggctaaggaagtgtgtaaatgagctgggaccagaggcttctgaagctgtgaagaaactgctggaggcgctatcacacttggtgtgacatcaagataaagagcggaggtggatggggatggaagatgatgctcctatcctccctgcctgaaacctgttctaccaattatagatcaaatgccctaaaatgtagtgacccgtgaaaaggacaaataaagcaatgaatac

SEQ ID NO: 44899 - DNA, 297 bp, Homo Sapiens
atgctgcctgtgaacaccatggcaggccaggcatacagcaggagctcggccagtgtctgctgttggcgttgtttttgttgttttcattctccagtcagttgcattctaactctgctgcatcctctctgggtctttcagcacttgtccccactggatctcagtttcctcctctataaaagaggaggagtcacctctccctctcagggttcttgtgaggacagagagctcctgacgtgcaataggggctctgaaaacaggagacccttgccctggaatggagacgcaccccagatgtag

SEQ ID NO: 44900 - DNA, 1779 bp, Homo Sapiens
atggcagtttctggatttactcttggtacctgcatacttctgttgcacattagttatgtggctaattatcccaatggaaaagtaacacagtcatgccatggaatgattcctgaacatggtcatagtccacagtctgttcctgttcatgacatttacgtgagtcagatgacattcaggccaggagatcagattgaagttactttgtcagggcatccatttaaaggctttctcctagaagcgcgtaatgctgaggatctgaatggccctcctattggctccttcacattgattgacagtgaagtgtcacaacttttgacctgtgaagatatacagggatcagcagtgagtcacagaagtgcatctaaaaaaacagaaattaaagtctactggaatgctccaagcagtgctccaaatcacacacagtttctagtcacagttgttgagaagtataaaatctactgggtgaagattcctggtcctataatttcacaaccaaatgcatttccttttacaacacctaaagctacagtagtacctttgccaacgttacctcccgtttcccacttaaccaaaccattcagtgcctcagattgtgggaacaagaagttctgtattaggagtcctttgaactgtgacccagagaaggaggcttcctgtgtcttcttgtccttcacaagagatgaccaatcggtgatggttgaaatgagcggccccagtaaaggctatttatcctttgcattgtctcatgatcagtggatgggtgatgatgatgcttatctgtgtattcatgaagatcagactgtgtacatccagccttcccatttaacggggcgaagtcaccctgtaatggactccagggatacccttgaggatatggcttggaggttggcggacggtgttatgcagtgttctttcagaagaaacattacccttcctggagttaagaatagatttgatctaaacacaagctattacatatttctagcagatggtgcagctaatgatggtcgaatttacaagcactctcagcaacctttgattacctatgaaaaatatgatgtgacagactctccaaagaacataggaggatcccattctgtactccttctgaaggttcatggtgccttaatgtttgtggcatggatgactactgttagcataggtgtactggttgcccggttcttcaagccagtttggtcaaaagctttcttgcttggtgaagcagcttggtttcaggtgcatcggatgctcatgttcaccacaactgtcctcacctgcattgcttttgttatgccgtttatatacaggggaggctggagtaggcatgcaggttaccacccatacctcggctgtatagtgatgactttggcagttcttcagcctcttctggcagtcttcaggccacctttacatgacccaagaaggcaaatgtttaactggactcattggagtatgggaacagctgctagaataatagcagtggcagcgatgttcctgggaatggatttaccaggactgaatcttcctgattcatggaaaacctatgcaatgaccggattcgtagcctggcatgttgggactgaggttgttctggaggtacatgcttatcggctctctcgcaaagttgaaatattggatgatgacagaattcagatccttcagtcatttactgcagtggaaacagagggtcatgcttttaaaaaggcagtgttggcaatttatgtctgtgggaatgttacttttctcatcatatttttatctgcaatcaaccatctatga

SEQ ID NO: 44901 - DNA, 548 bp, Homo Sapiens
cggcgctgcggcagtccagatcaaaaatggcggtagttggtgtgtcctcggtttctcggctgctgggtcggtcccgcccacagctggggcggcctatgtcgagtggcgcccatggcgaagagggctcagctcgcatgtggaagactctcaccttcttcgtcgcgctccccggggtggcagtcagcatgctgaatgtgtacctgaagtcgcaccacggagagcacgagagacccgagttcatcgcctacccccatctccgcatcaggaccaagccgtttccctggggagatggtaaccatactctattccataaccctcatgtgaatccacttccaactggctacgaagatgaataaagagaatctggaccactacccgggcaccagggaccacagcactggtttggaccgttactctgcacatggaccagaaaaagtatatgggaccttaagctcaccttctttacttgtatcaaatgatgactggtatactggtctcccatccctttgcttgtggcaggagatggcttaaataaataacttaaattt

SEQ ID NO: 44902 - DNA, 1294 bp, Homo Sapiens
gtttttgagtccatcacccagttcagatcgagtcagaggccaaggaggagaacatgatgatggacctttttgaaactggctcctatttcttctacttggatggggaaaatgttactctgcagccattagaagtggcagaaggctctcctttgtatccagggagtgatggtaccttgtccccctgccaggaccaaatgcccccggaagcggggagcgacagcagcggagaggaacatgtcctggcgcccccgggcctgcagcctccacactgccccggccagtgtctgatctgggcttgcaagacctgcaagagaaaatctgcccccactgaccggcgaaaagccgccaccctgcgcgaaaggaggaggctaaagaaaatcaacgaggccttcgaggcactgaagcggcgaactgtggccaaccccaaccagaggctgcccaaggtggagattctgcggagcgccatcagctatattgagcggctgcaggacctgctgcaccggctggatcagcaggagaagatgcaggagctgggggtggaccccttcagctacagacccaaacaagaaaatcttgagggtgcggatttcctgcgcacctgcagctcccagtggccaagtgtttccgatcattccagggggctcgtgataacggctaaggaaggaggagcaagtattgattcgtcagcctcgagtagccttcgatgcctttcttccatcgtggacagtatttcctcggaggaacgcaaactcccctgcgtggaggaagtggtggagaagtaactgagcctgcgcttgagaccttctccacgcagcaggaagatcccaccgacccttcctggcctaatcctttagattaggtcacattacattaacatttaggaacccagaccgaaaagttgctgaaagggaaggagacacattcacaaagaaacgttgcgaaaattgcgaaatctgttgtgcatgctcaaatgaaaacgcctttcggctttgggcttttatttttttggaactgcgagtggcttaggtctagcctcattttgtttttgtttggttggttttatactatattaacttttattacggtgatccttttgtgccatgttcaaaagaagttcattcctgtctaaagtgggaaagttgcatttaatgttaggggtatttaatgtatttttgtaaatagtttaacactttctttttttacgtaaacctgaaatatattttaaatgtggaatgatgtatataaaatgtgcgaggatcctggtattgtaatattaaaaagaagtttctatatg

SEQ ID NO: 44903 - DNA, 363 bp, Homo Sapiens
ccatgtttcagcatctacgtcaggggcttggtcctggagtcgattaaaaacaatggaggtgttgcggccatggagaagcgtagctccatcaaatctcaaatgatttatgagattattgataattctcaaggattctacatatgtccagtggggccccaaaatagaagcaagatgaatattccattctgcattggcaatgccaaaggagatgatgctttagaaaaaagatttcttgataaagctcttgaactcaatatgttgtccttgaaagggcataagtctgtgggaggcatctgggcctctctgtataatgctgtcacgattgaagatgttcagaagctagccgccttcatgaaaaaattt

SEQ ID NO: 44904 - DNA, 1927 bp, Homo Sapiens
atgtgcactgctctgagcccaaaggtacgcagtggacctggcctctctgatatgcatcagtatagccaatggctagccagcagacatgaagctaatttgctaccaatgaaagaagatctggccttgtggttaaccaatctattagggaaggagattacagcagaaacttttatggagaagttggacaatggtgccttgctctgtcaacttgcagaaactatgcaggagaaattcaaggagagcatggatgctaacaagcccacaaagaatctaccgttgaagaagatcccatgcaaaaccagtgcaccctcgggctccttttttgccagagacaatacagcaaatttcttatcctggtgccgagatttaggggtggatgaaacgtgtctatttgaatcggaaggtttggtcctccacaagcaacccagagaagtgtgtctctgtctgctagagcttggccggattgcagccaggtatggtgtggagcctcctggtttgataaagctggaaaaagagattgaacaagaagaaacactttctgccccttctccttcaccttctccttcatcaaagtcttctggaaaaaagagtacaggaaacttactggatgatgcagtgaaacgaatttctgaagatcctccttgcaaatgcccaaacaagttctgtgtggagcggctctcccaaggaagataccgagtgggagaaaagatcctcttcattaggatgctgcacaacaaacatgtcatggtccgtgtgggaggaggctgggaaacttttgcagggtatttgttgaaacacgacccctgccgaatgctgcagatctcccgtgtggatggcaaaacatcccctatccaaagcaaatctccaactctaaaggacatgaatccagataactacttggtggtctctgccagttataaggctaagaaggaaattaagtgaaacaaattggtcatgacaaggggaccctcataatggcctgtatccacttctccagtatagtcagtttagttcatatgttctgaaaactgttttggagaaagatagacagaaaaatgtcatcatattgaaaaatgttcaaagagtagcactatttatttttaatgcttctgtagaatatgacctattaaaagaaaatctaaactcaaatttaaattatccaaattttaggcaaattattatttctcaatatgcgaacacagtatttagaacacaatattagaaacacaattctaactaaagataaataaggagaaaacatttaggatttgcagataagtcaacagaaagtgcctgctttacactcatgagtaaaagcactccagacatttttataattgcaagatttttatgcttttttttttttttttttacaaaatgatgattagtgtgataatgtgctgcaaaaaatatccaacagcactacacataagtacagagtattcacaatagtaatatgttactggaaaggccacttccgaaaagtttacattcacttggaaggctgccttaaagtatatctcttatctatgaccaaatatctggggtacttttagaagttttcagtacacccccttagagaatagcttatgagttatttcacacattcctgagcacatggctgtgtttagaatgatctagtgtaattcatacatgagctgacatacgttgatactttgacgagtaaattgtacagtcaaatgttcattgatttcatgttatttcaaagcattttcttattaaaaatatatctttagttaatcctattttgctatgctttctagtaaagtaaattcactgtagctaatgatgttacagacttacgtatacccttgtatacctgggacagggctgttttataccaataaacagcaaaatattgtccttactcattcaagaattaaaaggataaattttaaaaatgtta

SEQ ID NO: 44905 - DNA, 1050 bp, Homo Sapiens
tttccacgctacccacagaggggtgcatacagcattgttctggattccagtcgtaacttaaacggaaactttcacaatgtccggagcccttgatgtcctacaaatgaaggaggaggatgtccttaagttccttgcagcaggaacccacttaggtggcactaatcttgacttccagatggaacagtacgtctataaaaggaagtgatggcatctacatcctaaatctgaagaggacctgggagaagcttctgctggcagctcgtgccattgttgccattgaaaaccctgctgatgtcagtgtcatatcctccaggaatactggccagagggctgtgctgaagtttgctgctgctggaaccactccaattgctgaccgcttcacccctggaaccttcaccaatcagatccaggcagctttccgggagccatggcttcttgtgtttactgaccccagagctgaccaccagcctctcccggagacatcttatgttaacctacctaccattctctgtaacacagattctcctctgtgctatgtggacattgccatcccatgcaacaacaagggagctcactcagtgggtctgatgtggtggatgctggctcgggaagttctgcgcatgcgtggcaccatttcccgtgaacacccataggaggtcatgcctgatctctgcttctacagagatcctgaagagattgaaaaagaagagcaggctgctgctgaaaaggctgtgaccaagaaggaacttcagggcgaatggactgctccagctcctgagttcactgctactcagcctgaggttgcagactggtctgaaggtgtgcaggtgccctctgtgcctatccagcagatccctactgaagactagagctctcagcatgccacggaagactggtctacagctcccactgctcaggccactgaatgggtaggagcaaccactgaatggtcttaagctgttcttgcacaggctcttaagcaacatggaaataaggctgatggaaaataaacatcagtttctaaaaaaaaaaaaagagagaaagaaaaaa

SEQ ID NO: 44906 - DNA, 513 bp, Homo Sapiens
atgggtgctttagaagaaggcttcattgtgcccttctcctctgactctgatgcacattttgatgctgcggttggatatttagaggacattatcatggatgaagatttccagttattacagagaaatttcatcaacaactactaccaggagtttgaggacaccaaagagaataaactcacctacacacctatttttaatgaatatatttctttggcaggaaagtatatagaagaacagtatatagaagaaagaaagtatatagaagaacagttgctggagcaaattcttggctttaccatggcaactttcacaacgttacagcaccacaaagatgaagtggttggtgacatactccaaatgctgctcaaatttacagattttctggcttttaaagaaatgtttctggactgcagagcagaaaaagaaggccagagactggacttaagccgtggtttagtggagacttcattgtgcaaatcatcttctatgacagcttctcagaacaatctgcag

SEQ ID NO: 44907 - DNA, 205 bp, Homo Sapiens
gctaattacaccttttatattgtggacaaactaaaaactttatcagaaacactgctggaaatgtccagccttttccagagaagtggaagtggccagatgttcaaccagctgcaggaggccctgagaaacaaatttgtaagaaactttgtagaaaaccagttgcacattgatgtagacaaacttactgaaaaactccagacatacg

SEQ ID NO: 44908 - DNA, 1047 bp, Homo Sapiens
aaaaagagtgattacattaagctgtatgtgctctgtgtattcatcacagatgaattccatgatatgatgcctaagtaccttaattttgtcaagggtgtggtggactcagatgatctccccttgaatgtttcccttgagactcttcagcaacataaactgcttaaggtgattaggaagaagcttgtttgtaaaactctggacaagatcaagaagattgctggtgagaaatacaatgataatttttggaaagaatttggtaccaacatcaagcttggtgtgattgaagaccactccaatcaaacatgtcttgctaaacttcttatgttccagtcttctcatcatccaactgacattactacactagaccagtatgtggaaagaatgaagggaaaacaagacaaaatctacttcatggctgggtccagcagaaaagaggctgaatctcctccatctgttgaacgacttctgaaaaagggctgtgaagttatttacctcacagaacctgtggatgaacactgcattcaggcctttcccaaatttgatgggaagaggttccagaatgttgtcaaggaaggaatgaagtttgataaaagtgagaaaactaaggagagtcatgaagcagttgagaaagaatttgagcctctgctcaattggatgaaagataaagcccttaaggacaaaattgagaaggctgtggtgtctcagcacctgacagaatctctgtgtgctttggtggccagccagtacggacggtctggcaacacggagagaatcatgaaagcacaagcataccaaacgagcaaggacagctctgcaaattactatgcaagtcagaagaaaacatttgaaattaatcccagacacccactgatcagagacatgcttattaaggaaggtgaagatgataaaatagttttggttcttgctgtagttttgtgtgaaacagcaacgcttcggtcaggatatcttttaccagacactaaagcatatggagatagaatagaaagaatccttcgcagtttgaacattgaccctgatgcaaaggtg

SEQ ID NO: 44909 - DNA, 4529 bp, Homo Sapiens
cttccagtctctgctgatgtgatttcagatgggcgcggctccagaccatcccctgcaatggccagttacgcagcctctccgagccactgcctctctgtggaaggagggcctgaggctgacggggagcagccgcctcgcttggccactctgggacctggggtgatggagggtgcagcggagactgaccaggaggctctgtgtgcaggggagactggggcccagaagccacctggagatcggatgctgtgtccagggaggatggatggtgcagctctgggggaacagccaactgggcagaagggagcctcggcaagggggttctggggaccaagagagaccaaggcgttgggtgtgtgcaaagagtctgggagcgagcctgcggaggacagcagcagggcccacagccgatcagaggaaggtgtctgggaggagaacacgccccccttgggccccctgggttttcccgagacttccagctctccggcggacagcaccaccagcagctgcctccagggcctcccggacaacccagacacccagggtggagtccaggggcctgaaggccccactcctgatgcctctggctccagtgccaaggatcctccaagcttgtttgatgatgaggtctctttctcccagctcttccctccaggcggtcgcttgactagaaagaggaacccgcatgtctacgggaagcgctgtgagaagccggtgctcccgctgccaacccagcccagctttgaggagggcggtgaccccacgctgggcccagcccgcctgcccacggacctcagcgactccagctccctctgcctctgccatgaggacccgtgggaggacgaggatcccgcaggtctgcccgagtccttcctcctggatgggttcctcaatagcagggtgcctggcattgacccctgggcccccggcctcagcctgtgggccctggagcccagcagggaagctggtgcagagaagctgccctcccactgccccgaggacgatcggccggaggccattcctgagctgcacatggtcccagcggcttggcgaggcctggagatgccggcccctgccgatgactcctcctcttctctcggagatgtgagccccgagccccccagcctggagagagaacgctgtgacggtgggcttcccgggaacacccacctgctgccgctccgtgccacggactttgaggtgctcagcaccaagtttgagatgcaagacctgtgctttctgggaccctttgaagaccccgtgggtctccccggccccagcttcttagacttcgagggcacggcgagctcacaggggccacagagccgaaggacagaggaggctgcaggggcagggagggcccaaggcagaggccggccggccaagggcaggcgggcctcctacaagtgcaaagtgtgcttccagcgcttccgcagcctgggcgagctggacctgcacaagctggcccacacgcccgcgccgccgcccacctgctacatgtgcgtggagcgcaggtttggctcgcgggagctgctgcgggggcacctgcaggagaggcacgcgcagagcaaggccgggccctgggcgtgcggcatgtgcctgaaggaggtggccgacgtctggatgtacaacgagcacctgcgtgagcacgcggtccgcttcgcccgcagggggcgcgcggaggtccttgggggacctgcccggaggcctggagggcagcagcgctgtcgcccaccttctgaacagcatcacggaacccgcgcccaaacaccacaggggcaagcgctccgccggcaaggccgccgggagcccgggagacccgtgggggcaagagggagaagccaagaaagacagcccgggcgagagggcgaaaccccgggcacgcagcacccccagcaacccagacggggccgcgaccccagacagcgcctctgccaccgccctggctgacgccggcagcccgggcccccccaggacgacccccagcccgtcccccgacccctgggccggcggggagcccctcctgcaagccaccccggtgcacgaggcctgcaaggacccctcccgcgactgccaccactgcgggaagcgcttccccaagcccttcaagctgcagcgccacctggcggtgcacagcccgcagcgcgtctacctgtgcccccggtgcccccgggtctaccccgagcacggggagctgctggcacacctgggcggggcgcacgggctgctggagcggccggagctgcagcacacgccgctgtatgcctgcgagctctgcgccacggttatgcgcatcatcaagaagtccttcgcctgcagctcctgcaactacaccttcgccaagaaggagcagttcgaccgccacatgaacaagcacctcaggggggggcggcagcccttcgcgttccgcggcgtgcggaggccgggagcgccgggacagaaggcccgggccctcgagggcacactgcccagcaaacggcgcagggtggccatgcccggcagtgcccctgggcccggcgaggacaggcctcctccccggggaagcagccccatcctgagtgagggctctctcccggccctgctccacctgtgttcggaggtggctcccagcaccaccaagggatggcccgagaccctagagaggcctgtagaccccgtgacccacccgatcagaggttgtgagctgccatccaaccaccaggagtgtcccccgccgtctctgtctcccttcccagctgccttggctgatggcagaggagactgcgcgctggacggagccctggagaggccagagaacgaggcttccccaggcagccccgggcctcttctccagcaagctctccctctgggggcatctctgccgcggccgggagccagaggccaagatgcggagggaaagagggctcctctcgtgttctcagggaaacgcagggccccgggtgcccgtggcaggtgtgcccctgaccatttccaggaagaccacctacttcagaaagagaaggaggtgtcctcaagccacatggtgtctgagggggggccccgaggcaccttccacaagggcagcgccaccaagcctgcgggctgccagagctcatcaaaggacaggtcggcagcatccacccccagcaaagcactcaagttcccagtgcacccaaggaaggcggtggggagcctggcacccggggagctggcccgtggcacagagaatgggatgaagcccgccacccccaaagccaaacccggccccagctcccagggcagtggaagccctcgccccggcaccaagacaggaggtggcagccagccccagccagccagcgggcagctccagagcgagacagccaccaccccagccaagcccagcttccccagccggagccctgcaccagagaggctccccgctcgagcccaagccaagagctgcaccaaggggccaagggaagctggtgagcaggggccccacgggagcctaggtcccaaggagaagggagagagcagtacgaagaggaaaaagggccaggtcccagggccagccaggagtgaaagtgtggggagcttcgggagagccccctcagcccctgacaagcccccccggacccctcggaagcaggcaactcccagccgcgtgctcccgaccaagcccaagcccaacagccagaacaaacccaggccgccaccatcagagcagcggaaggcagagccgggccacacacagaggaaggacagactgggcaaggccttcccccaggggagacccctgctcaggccccccaagaggggcacagctgtccacggtgctgaacctgccgagccacacacccaccggacggccgaggcccagagtgacctcctcagccagctcttcgggcagagactaactggcttcaaaatccctttaaagaaagatgcttccgagtaatttctaggagcaagagcctgggaccggagctgggcgttcctgtctcggcctgcctccttggccagctccggctccctgagatggtccactctgtggccacttgacttcttgtgcaactgctcaggccttgatgtcagagctgaggtggtgatgctttgaacagggcccaggtgggcagcattccctttcttgctggaaggctgggggtgaaagacggggccactgcagcccttttgagaccacacagctgttttcttggtaccaagtacttgaagagacagcagcccatcccctcagcccacacccctgcgccctgtgggcaccgacaccacagaagccaatgtttggagatttgcacaacctcccgttcccccacatggagaagggaagtaagttgaggcagccgtgggatggtggtaggttccctcttagtcttgctgctgttgctggaattccaaagtgaccttagaaaccacgtgggggaaggcagtgctcactacttagaagggttgcttctgagccgcctggtcccccaagagcacaacaggcctcctccctctgaccacagggtcatgcctcctccctctgaccacagggtcatgccagcctccat

SEQ ID NO: 44910 - DNA, 939 bp, Homo Sapiens
atgcatcctcatcatcaggaaactctaaaaaagaaccgagtggtgctagccaaacagctgttgttgagcgaattgttagaacatcttctggagaaggacatcatcaccttggaaatgagggagctcatccaggccaaagtgggcagtttcagccagaatgtggaactcctcaacttgctgcctaagaggggtccccaagcttttgatgccttctgtgaagcactgagggagaccaagcaaggccacctggaggatatgttgctcaccaccctttctgggcttcagcatgtactcccaccgttgagctgtgactacgacttgagtctcccttttccggtgtgtgagtcctgtcccctttacaagaagctccgcctgtcgacagatactgtggaacactccctagacaataaagatggtcctgtctgccttcaggtgaagccttgcactcctgaattttatcaaacacacttccagctggcatataggttgcagtctcggcctcgtggcctagcactggtgttgagcaatgtgcacttcactggagagaaagaactggaatttcgctctggaggggatgtggaccacagtactctagtcaccctcttcaagcttttgggctatgacgtccatgttctatgtgaccagactgcacaggaaatgcaagagaaactgcagaattttgcacagttacctgcacaccgagtcacggactcctgcatcgtggcactcctctcgcatggtgtggagggcgccatctatggtgtggatgggaaactgctccagctccaagaggtttttcagctctttgacaacgccaactgcccaagcctacagaacaaaccaaaaatgttcttcatccaggcctgccgtggaggtgctattggatcccttgggcacctccttctgttcactgctgccaccgcctctcttgctctgtaa

SEQ ID NO: 44911 - DNA, 1816 bp, Homo Sapiens
gtctggggccagccacctggcgggccgctccggtgcgcctgcccgcgcttttcactgacaggcgctgttccccacagccagcgccgcccgccacgtcccagctctcggccaacggagctgcgcggcgggtgacctttccgagcccagcgcgatgacggctccttgctcccagccggcgcagcttcctggacgccgccagctcgggctggtgccgttcccgccgccgccgccgcggacgccgctgctgtggctgctgctgctgctgctggccgccgtggcgccggcgcgcggctgggagagcggagacctggagttgtttgacttagtggaggaggtgcagctcaacttctaccagttcctcggggtgcagcaggatgcatcatctgcagacatcagaaaagcatatcgtaagctttcactaactttacatccagacaagaataaagatgaaaatgcagaaactcagtttagacaattggtggccatttatgaagttttaaaggatgatgaacgaaggcagaggtatgatgatattctgatcaatggacttccagattggcgacagcctgtattctactacaggcgggtgagaaaaatgagcaatgctgagctggcattactcttgttcattattctcacagtgggtcattatgctgtggtttggtcaatctacctggaaaaacaactggatgaactactaagtagaaaaaagagagaaaagaaaaaaaagactggcagcaagagtgtggatgtatcaaaactcggtgcttcagaaaaaaatgaaagattgctgatgaaaccacagtggcatgatttgcttccatgcaaactggggatttggttttgccttacactaaaagcattacctcacctcatccaggatgctgggcagttttatgctaaatataaagaaacaagattgaaggaaaaggaagatgcactgactagaactgaacttgaaacacttcaaaaacagaagaaagttaaaaaaccaaaacctgaatttcctgtatacacacctttagaaactacatatattcagtcttatgatcatggaacttccatagaagaaattgaggaacaaatggatgattggttggaaaacaggaaccgaacacagaaaaaacaggcacctgaatggacagaagaggacctcagccaactgacaagaagtatggttaagttcccaggagggactccaggtcgatgggaaaagattgcccacgaattgggtcgatctgtgacagatgtgacaaccaaagccaagcaactgaaggattcagtgacctgctccccaggaatggttagactctccgaactcaaatcgacagttcagaattccaggcccatcaaaacggccaccaccttgcccgatgacatgatcacccagcgagaggacgcagagggggtggcagcggaggaggagcaggagggagactccggtgagcaggagaccggggccactgatgcccggcctcggaggcggaagccagccaggctgctggaggctacagcgaagccggagccagaggagaagtccagagccaagcggcagaaggactttgacatagcagaacaaaacgagtccagcgacgaggagagcctgagaaaagagagagctcggtctgcagaggagccgtggactcaaaatcaacagaaacttctggaactggcgttgcagcagtacccaaggggatcctctgaccgctgggacaaaatagccagatgtgtcccgtccaagagcaaggaagactgtatcgctaggtacaagttgctggttgaactggtccaaaagaaaaaacaagctaaaagctga

SEQ ID NO: 44912 - DNA, 606 bp, Homo Sapiens
atggccaaagcctacgaccacctcttcaagttgctgctgatcggggactcgggggtgggcaagacttgtctgatcattcgctttgcagaggacaacttcaacaacacttacatctccaccatcggaattgatttcaagatccgcactgtggatatagaggggaagaagatcaaactacaagtctgggacacagctggccaagagcggttcaagacaataactactgcctactaccgtggagccatgggcattatcctagcatacgacatcacggatgagaaatctttcgagaatattcagaactggatgaaaagcatcatggagaatgcctcagctggggtggagcacctcttgctagggaacaaatgtgacatggaggccaagaggaaggtgcagaaggagcaggccgataagttggctcgagagcatggaatccgatttttcgaaactagtgctaaatccagtatgaatgtggatgaggcttttagttccctggcccgggacatcttgctcaagtcaggaggccggagatcaggaaacggcaacaagcctcccagtactgacctgaaaacttgtgacataaagaacaccaacaagtgctccctg

SEQ ID NO: 44913 - DNA, 738 bp, Homo Sapiens
aaaatgctcgagcacatccaccataagcaacagaacacctatacttgcctgaaggacatggagcaccatttccatgaacttgaggccatcattctgcatggcaaacagcaggctgtcaacaaaggtgaaaagggcagcaaagacctgcagatcttttgcgcctcctgcaggcggcccatctctaagcgtgtcacctttcaccacatggagcactgctttgccaagtatgagtgccaattgcccgttgggtccctgtaccctacttgtattgaaagggccacatggctcttctgtgatgtctacaatctgaaaagtaagaggtactgtaagcgcctccaggtgctgtgtcctgagcactcttgggaccccaagatgtcaaaggatgaggtgggtggttgtccgctcgtgcacaatgtctttgagttcacgggtaatttttgttgcctccccaaatgcctgtgcaaccaccactacagctgggagaagctgaggcgtgccgtggacctggagtgcatgcaggctgttaggtgccatgccgagggggctgagggatggggtaggatcctggactccctctcgcatattcaggtcccacagttgcacaagctggaacagctgtttgagcaggagcagaaggtgcgcacgtctatgatgaaccgggtggggctgctggctctgatgctgcacgggacgatccagcacgacccgttcaccagtgacctgtgctccagggtggac

SEQ ID NO: 44914 - DNA, 726 bp, Homo Sapiens
atgccttattttcttctgcaacaccgcaacgcttggccccaatacaaacttgacaatgtctctaaatggccggaaaatggcactttcgatttctccatcctacaagacctaaataatttttgtcgaaaaatgggcaaatggtctgaggtgccttacgtccaggcatttttcacacttcgttccctccctagtctctgttcccaatgcgattcctcccagatcctcctcctttccctcccgcctgtcccctcggtcccaaccccaagcgtcgctgagtcttcccagtcttccttttctacagacccatctgacctttcccctcctccccaagctgcttgtcgccagaccgagctaagtcccaatacttcctcagcctccactcctccaccctataatccttctatcacctcccctcctcacacctggtccggcttacagtttagttccgcgactagcgcttccccacctgcccaacaatttcctcttagagaagtggctggagctgaaggcatagtcaaggtacatgtacttttttctctatcagacctctctcagatcagtcaatgtttaggctctttctcatcagaccccactaaatatatacaggaattccaatatctaactctgtcctacaacttaacctggagtgacttaaatgtcatcctgacttctactctctccccagatgaacgggaaagttttttctctagcccaatctcgtgctga

SEQ ID NO: 44915 - DNA, 361 bp, Homo Sapiens
atgagcaaagctcaccctcccgagttgaaaaaatttatggacaagaagttatcattgaaattaaatggtggcagacatgtccaaggaatattgcggggatttgatccctttatgaaccttgtgatagatgaatgtgtggagatggcgactagtggacaacagaacaatattggaatggtggtaatacgaggaaatagtatcatcatgttagaagccttggaacgagtataaataatggctgttcagcagagaaacccatgtcctctctccatagggcctgttttactatgatgtaaaaattaggtcatgtacattttcatattagactttttgttaaataaacttttgtaatagtcaaaaa

SEQ ID NO: 44916 - DNA, 939 bp, Homo Sapiens
atggcttcctcagggagagctgagctctgggcgctgaacccgctgcgcttgctgtggctcacgccggccgccgccttcctgctgaccctgctgttgcagcttctgccgctcggcctgctcctgggccgcgcattcttccaggacctgatccgctttgggaaaacaagtgttggggggcctccgcgccccgccgcctgtcgcacctttgatgtccccaagagatacttctcccacttctatatcatctcagtgctgtggaatggcttcctgctttggtgccttactccatctctgttcctggcagcatcttttccaagctggctttatggtttgctcagaattctcagggcagcacagttccagggagggaagctggcgctgtctgcgttcttagtgctggtatttccgtggctgcgcagcttacgaagagtgcttctagtcagtgtcttctccaatggcacgactcacatcgtgcaatactgttttggacttgcctactatgtccttgtcggcctatctgtgctgagccaagtgccaatggatagcaggaatgcctatgtaacagggaaaaagctactgatgcaagtgcggtggttccatattctcgggatgatgatattcatctggccatctgcccatcagtataagtgccatgtcattctcggcaatctcagggtaaataaagcaggagtggtcattcactgtaaccacagaatcccatttggagactggtttgaattttcttcccctgactacttagcagatctgatgatctacatttccatggctgtcacctttgggttccacaacttggtgatagtggtgacatatgtcttcttcaatccggccctgcctgcctttctcagccacaaattctacaaaagtaaatttgtctcctacccgaagcataggaaagctttcctatcatttttgttttaa

SEQ ID NO: 44917 - DNA, 648 bp, Homo Sapiens
tgcttccttctctttcaggcaaaaatagacatcttattagttggagatgtcactgtgggctacctggctgatactgtacagaaactatttgcaaacatagcagaagtcaccatcaccatcagtgacacgaaggaggcagcagcgcttttggatgattgcatattcaacatggttctcttgaaggtgccttcttcactaagtgccgaggagctggaagccatcaagttaattagatttggcaaaaagaaaaatacacattcactgtttgtttttataatccctgaaaattttaaaggttgtatttcagggcatggaatggatattgctttaactgaaccactgacaatggaaaaaatgagtaatgtggtaaaatactggacaacatgtccctcaaacactgttaagactgaaaacgcaactgggcctgaagaacttggattgcccctgcagaggtcctacagcgaacacctgggatattttcctactgatctatttgcctgctctgaatctttaaggaatggcaatgggcttgaattaaatgcttcgttgtcagagttcgagaaaaacaaaaagatctctcttcttcattcaagcaaggaaaaactaagaaggctgtacaggaagcatagcagcttctgtttctggtga

SEQ ID NO: 44918 - DNA, 1019 bp, Homo Sapiens
ctgggcccagctcccccgagaggtggtcggatcctctgggctgctcggtcgatgcctgtgccactgacgtccaggcatgaggtggttcctgccctggacgctggcagcagtgacagcagcagccgccagcaccgtcctggccacggccctctctccagcccctacgaccatggactttaccccagctccactggaggacacctcctcacgcccccaattctgcaagtggccatgtgagtgcccgccatccccaccccgctgcccgctgggggtcagcctcatcacagatggctgtgagtgctgtaagatgtgcgctcagcagcttggggacaactgcacggaggctgccatctgtgacccccaccggggcctctactgtgactacagcggggaccgcccgaggtacgcaataggagtgtgtgcacatgctgtgggtgaggtggaggcatggcacaggaactgcatagcctacacaagcccctggagcccttgctccaccagctgcggcctgggggtctccactcggatctccaatgttaacgcccagtgctggcctgagcaagagagccgcctctgcaacttgcggccatgcgatgtggacatccatacactcattaaggcagggaagaagtgtctggctgtgtaccagccagaggcatccatgaacttcacacttgcgggctgcatcagcacacgctcctatcaacccaagtactgtggagtttgcatggacaataggtgctgcatcccctacaagtctaagactatcgacgtgtccttccagtgtcctgatgggcttggcttctcccgccaggtcctatggattaatgcctgcttctgtaacctgagctgtaggaatcccaatgacatctttgctgacttggaatcctaccctgacttctcagaaattgccaactaggcaggcacaaatcttgggtcttggggactaacccaatgcctgtgaagcagtcagcccttatggccaataacttttcaccaatgagccttagttaccctga

SEQ ID NO: 44919 - DNA, 348 bp, Homo Sapiens
ttcaccagctccatgcagggacatcacagggctgccctccatgagcagaggaggagggctgcctggcagagcgtttcacactccaggttagccagaaagagcatcttcatttttgtttccacacaacacttctctgtgagcctgttggccaactggcggccgattgttggaggagccagccaaccatcttgtctaacttcagattcttcagggctagaatatgttcaccccagaggcttagatgaagcacatttgcggctactcgggcagatggtctctgcaacaggaagggaagctgtagctagaacatctgttaacacagtctcaacccaaagcctgctttgttag

SEQ ID NO: 44920 - DNA, 1679 bp, Homo Sapiens
atctgatgagcttctttcttctggcatcattaacggaccttttaccatgaatagttctactccttctacagctaatgggaatgacagcaagaaatttaaacgagatagacctccctgttcgccttcccgtgttctccatcttcgaaaaattccatgtgatgtcaccgaagcagagatcatatcattaggtctaccatttggcaaagtaactaatcttttgatgttgaaaggaaaaagccaggctttcttagaaatggcttctgaggaagctgccgttactatggtgaattattacactcctattactcctcaccttcgaagccagcctgtttatattcagtattccaatcacagagaacttaagactgacaatctacctaatcaagctcgagcccaagctgcactgcaggctgtcagtgccgtccaatcaggaagcctggccctttctggaggtccttccaatgaaggcacagtcctacctgggcagagccctgtgcttcgaataattattgaaaacctcttttaccctgttaccctggaagttcttcatcagatattttctaaatttggcacagtcttgaagattatcacctttacaaagaataatcagtttcaagccttgcttcagtatgctgacccagtaaatgcacattatgccaaaatggctctggatggccagaatatctataatgcatgctgcactctgcgcattgacttctccaagctcaccagccttaatgtgaaatataataatgacaaaagcagagacttcactcgcttagaccttcctactggtgatggccagccatcccttgaaccccctatggctgctgcttttggtgcaccgggtataatttcttcaccatatgcaggggctgctggatttgccccagccattggatttcctcaagctacaggtctatcagttccagctgttcctggagctcttggtcctctcacaatcacctcttctgctgtcactggaaggatggccattcctggggctagtggtataccaggaaattctgttctactcgtcacaaatctcaatcctgatcttatcacaccacatgggctttttatcctatttggagtctatggtgatgtacatcgagtgaagattatgtttaataagaaagaaaatgccttggttcagatggcggatgcaaatcaagctcagctagcaatgaaccatctaagtggtcagagactttatgggaaagtgcttcgtgctacactgtccaaacatcaagcagtacagcttcctcgagagggacaagaagaccaaggtctgactaaggatttcagcaatagtcctttgcatcgctttaaaaagccgggctctaaaaacttccagaatatctttccaccatcagccactctgcatctttccaacattcccccttctgttacagtggatgatctgaagaaccttttcatagaagctggatgttcagtgaaggcttttaaattctttcagaaagatcgcaaaatggcgctcattcaattgggatctgtggaagaagcaattcaggccctcattgagcttcataaccatgaccttggagaaaatcaccacctcagagtttccttctcaaaatctacaatctgacttttctgtgaatttttctcctaaaactggaccataatttcagtaaaaccttcagacatagactgaa

SEQ ID NO: 44921 - DNA, 1824 bp, Homo Sapiens
cacacacacaaaaaaacctgcgcgtgaggggggaggaaaagcagggccttttaaaaaggcaatcacaacaacttttgctgccaggatgcccttgctttggctgagaggatttctgttggcaagttgctggattatagtgaggagttcccccaccccaggatccgaggggcacagcgcggcccccgactgtccgtcctgtgcgctggccgccctcccaaaggatgtacccaactctcagccagagatggtggaggccgtcaagaagcacattttaaacatgctgcacttgaagaagagacccgatgtcacccagccggtacccaaggcggcgcttctgaacgcgatcagaaagcttcatgtgggcaaagtcggggagaacgggtatgtggagatagaggatgacattggaaggagggcagaaatgaatgaacttatggagcagacctcggagatcatcacgtttgccgagtcaggaacagccaggaagacgctgcacttcgagatttccaaggaaggcagtgacctgtcagtggtggagcgtgcagaagtctggctcttcctaaaagtccccaaggccaacaggaccaggaccaaagtcaccatccgcctcttccagcagcagaagcacccgcagggcagcttggacacaggggaagaggccgaggaagtgggcttaaagggggagaggagtgaactgttgctctctgaaaaagtagtagacgctcggaagagcacctggcatgtcttccctgtctccagcagcatccagcggttgctggaccagggcaagagctccctggacgttcggattgcctgtgagcagtgccaggagagtggcgccagcttggttctcctgggcaagaagaagaagaaagaagaggagggggaagggaaaaagaagggcggaggtgaaggtggggcaggagcagatgaggaaaaggagcagtcgcacagacctttcctcatgctgcaggcccggcagtctgaagaccaccctcatcgccggcgtcggcggggcttggagtgtgatggcaaggtcaacatctgctgtaagaaacagttctttgtcagtttcaaggacatcggctggaatgactggatcattgctccctctggctatcatgccaactactgcgagggtgagtgcccgagccatatagcaggcacgtccgggtcctcactgtccttccactcaacagtcatcaaccactaccgcatgcggggccatagcccctttgccaacctcaaatcgtgctgtgtgcccaccaagctgagacccatgtccatgttgtactatgatgatggtcaaaacatcatcaaaaaggacattcagaacatgatcgtggaggagtgtgggtgctcatagagttgcccagcccagggggaaagggagcaagagttgtccagagaagacagtggcaaaatgaagaaatttttaaggtttctgagttaaccagaaaaatagaaattaaaaacaaaacaaaaaaaaaaacaaaaaaaaacaaaagtaaattaaaaacaaaacctgatgaaacagatgaaggaagatgtggaaaaaatccttagccagggctcagagatgaagcagtgaaagagacaggaattgggagggaaagggagaatggtgtaccctttatttcttctgaaatcacactgatgacatcagttgtttaaacggggtattgtcctttccccccttgaggttcccttgtgagccttgaatcaaccaatctagtctgcagtagtgtggactagaacaacccaaatagcatctagaaagccatgagtttgaaagggcccatcacaggcactttcctacccaat

SEQ ID NO: 44922 - DNA, 237 bp, Homo Sapiens
ctctacgccccttgtgcagccttcagggtagaccgaggagagcacctccccttcctggtgaagggagcccgatacacgctggtgccggctggccaagaaggaggtggacaaacctggcgaccgctccctggcaccacctcaccagaggacagctcacacctccacaggggtcagaagaaaggagctgccctggggatggctgtgtatccctacaactgccaggcacatgccccttga

SEQ ID NO: 44923 - DNA, 1094 bp, Homo Sapiens
agacaccatcaagggtaccaacatatgcaacataggagtctccaaagtagaagagaaaaggaaagaggcagaaaaaatacagtgttcccccattatcagcagttgtgttttctgcactttcagttacctctgggcaaccacagtccaataatattaaatggaaaattccagaaataattcacaagttttaaattgtgtgtagttctgagtagcatgatgaaatgtcattctgccctgctctgcccacccaggacatgaatgatccctttgtccagcatatccatgcagtatacactatctgcccattaatgtacaggaaaaaacatagtgtatacagggtttggtactatctacagtttcagatacttactgagagtcttggaacgtattccccacagataatgggggagcaggagactactctatttaaagaaataatggctgaaaactttccaaatctaattaaaggaatgaatctacacatccaaggagctcaacgaattccaagcaggctatatgccaaaagatctacgctaagacacattacagttagattgtcaaggcatagacaacgagagaattttgaaggcaggcagagagaagtgactaatcagaatcaagagatccttaataaaattatcaggtgatttctcattagaaactaaggaggctcaaaggcagtggggtgacatatttaaatgccctggaaggtggaaaatacctggcaaccaagagttctatatgggacaaatctatccttccagaataaagcaataactaagacattctcagatagacaaaaattgagagaattctttatcagtagaactaccctaaaagaaatgttaaagaaattatttagtcctaaatgaagagacattagacagtaactcaaaaccatacaaagaaataaagaacattggtaaagaaataaagaacacaggtaaatatacaagtcaataatattgtactttgggtttgtaactctttttttctatataatttaaaagtctaatgcataatacaataattataaatattgttaatgggtgcacactgtataaaaatgtaatcaatgacaatggcaatataaa

SEQ ID NO: 44924 - DNA, 879 bp, Homo Sapiens
gaggaccattattttttaatgacagaacttccactgaatacactagaaaatacagagtttgcagaaattatgtttgaactatttaatgtaccaggattctacattgcagttcaggatgtactagccttggaagtatcttggacatctcaacaagtgggtgaatatatgttaatgagtacagtcattgacaaaggagatggagtcacccttgttctcccagttgtagaaggttatgtaattgagagctgcatcaatcacatcctgattgtaggtgatactgtgtatttcattcaacaactgctaagggagagggaggtaggaatccctcttgagcagtcactggagaccacaaaagccattaaggagaaatactgttacttttgccctgatatagtcaaggaatttgctaagtatgatgtggatccctggaagtggatcaaacagtacacaggtatcaatgtgatcaaccaggagaagttcataatagacgttggttacaaaaggctcctgcaacctgaaatatttttttacccagagtttgccaacccagactttatggaatccatcttgaatattgttgatatacaaaactgtcccattgatgtgcattgtccactgtataagaatgttgttctttcaaggggtttggccatattcggatatgaatctcaactacagagagatttgaagagtggtacatgccagattaaaactcagataatcaaacctaagcttacagaggtccgggtggtaatccgtcacatgcagcactatgccttatggtttggaagcttaatgctagcctcaactctggagttatttcaggtctgtcacaccaagaaggactataaagaatatggccccagcatctgccaccag

SEQ ID NO: 44925 - DNA, 1002 bp, Homo Sapiens
agaactcataccggagaaaaaccctacaagtgtaaagaatgtggtgaagccttcagccagagctcaactcttacaaaacatacaaaagtctacactggagagaaaccctacacctgtaaagactgtgggaaagccttcagccagagttcatctcttatccagcatcagagggttcatactggaaagaaaccatttgattatcaggagtgtgggaaagccttcatgcatattcaacaccagagagtccatactggagagaaaccctatacctgcaatgaatgtgggaaatcttttagccacagagctaatttaactaaacaccagagaactcatactagaattctctttgaatgccgtgaatgtaagaaaaccttcacagaaagctcatcccttgcaacacatcagagaattcacgttggagagagaccttatgaatgcaatgaatgtgggaaaggttttaatcgaagtacacatcttgtgcagcatcagttgattcatactggagtgaggccttatgaatgtaatgaatgtgataaagcttttattcattcatcagcactcattaaacatcaaagaactcatactggagagaaaccttataaatgtcaagaatgtgggaaagcctttagccattgctcatccctaactaagcatcagagagttcatactggagaaaagccatatgaatgcagtgaatgtggaaaaacttttagtcagagcacacatcttgttcaacatcagagaattcacactggagagaaaccctatgagtgtagtgaatgtgggaaaaccttcagccagagctccaattttgctaaacatcaaagaattcatattggaaagaaaccgtacaaatgtagtgagtgtggaaaagccttcattcattcatcagctcttattcaacatcagagaactcataccggagagaaaccctttagatgtaatgagtgtgggaaaagctttaagtgcagttcatctctcatcagacatcaaagagttcac

SEQ ID NO: 44926 - DNA, 2221 bp, Homo Sapiens
atgggtccgcgcggcgcggcgagcttgccccgaggccccggacctcggcggctgctcctccccgtcgtcctcccgctgctgctgctgctgttgttggcgccgccgggctcgggcgccggggccagccggccgccccacctggtcttcttgctggcagacgacctaggctggaacgacgtcggcttccacggctcccgcatccgcacgccgcacctggacgcgctggcggccggcggggtgctcctggacaactactacacgcagccgctgtgcacgccgtcgcggagccagctgctcactggccgctaccagatccgtacaggtttacagcaccaaataatctggccctgtcagcccagctgtgttcctctggatgaaaaactcctgccccagctcctaaaagaagcaggttatactacccatatggtcggaaaatggcacctgggaatgtaccggaaagaatgccttccaacccgccgaggatttgatacctactttggatatctcctgggtagtgaagattattattcccatgaacgctgtacattaattgacgctctgaatgtcacacgatgtgctcttgattttcgagatggcgaagaagttgcaacaggatataaaaatatgtattcaacaaacatattcaccaaaagggctatagccctcataactaaccatccaccagagaagcctctgtttctctaccttgctctccagtctgtgcatgagccccttcaggtccctgaggaatacttgaagccatatgactttatccaagacaagaacaggcatcactatgcaggaatggtgtcccttatggatgaagcagtaggaaatgtcactgcagctttaaaaagcagtgggctctggaacaacacggtgttcatcttttctacagataacggagggcagactttggcagggggtaataactggccccttcgaggaagaaaatggagcctgtgggaaggaggcgtccgaggggtgggctttgtggcaagccccttgctgaagcagaagggcgtgaagaaccgggagctcatccacatctctgactggctgccaacactcgtgaagctggccaggggacacaccaatggcacaaagcctctggatggcttcgacgtgtggaaaaccatcagtgaaggaagcccatcccccagaattgagctgctgcataatattgacccgaacttcgtggactcttcaccgtgtcccaggaacagcatggctccagcaaaggatgactcttctcttccagaatattcagcctttaacacatctgtccatgctgcaattagacatggaaattggaaactcctcacgggctacccaggctgtggttactggttccctccaccgtctcaatacaatgtttctgagataccctcatcagacccaccaaccaagaccctctggctctttgatattgatcgggaccctgaagaaagacatgacctgtccagagaatatcctcacatcgtcacaaagctcctgtcccgcctacagttctaccataaacactcagtccccgtgtacttccctgcacaggacccccgctgtgatcccaaggccactggggtgtggggcccttggatgtaggatttcagggaggctagaaaacctttcaattggaagttggacctcaggccttttctcacgactcttgtctcatttgttatcccaacctgggttcacttggcccttctcttgctcttaaaccacaccgaggtgtctaatttcaacccctaatgcatttaagaagctgataaaatctgcaacactcctgctgttggctggagcatgtgtctagaggtgggggtggctgggtttatccccctttcctaagccttgggacagctgggaacttaacttgaaataggaagttctcactgaatcctggaggctggaacagctggctcttttagactcacaagtcagacgttcgattcccctctgccaatagccagttttattggagtgaatcacatttcttacgcaaatgaagggagcagacagtgattaatggttctgttggccaaggcttctccctgtcggtgaaggatcatgttcaggcactccaagtgaaccacccctcttggttcaccccttactcacttatctcatcacagagcataaggcccattttgttgttcaggtcaacagcaaaatgcctgcaccatgactgtggcttttaaaataaagaaatgtgtttttatcg

SEQ ID NO: 44927 - DNA, 697 bp, Homo Sapiens
ctccttctcctcctctcacccaggatcacttccgaaaccagttggccttcagcccctgcctcggccagaggtttcatttttaactgaatatttacgaaagctgaaagcgtgcgagggggttggggtggaaatagcggctgcttcttttccaaggacttatttaatggggatgtgttcaaggcaagaccgaattcagaaggatatcgacgtcgtgatccagaagtccagagctgaggactgcctgtttgcaggactaaaagctaaaggcgacaagggattcattcgacaagtcctagtcgtgcgcccttgtgagtgccagaccctgctccctgccaggggacccacgagcgaccctcaccaccatccctgccctggtggagccccgcggaacacaggatccgaagatggcagcggaagctccgcagcagcccaacagactgggcagggtggatacaggctccttcactgggtgaaggcggcacaaagaaccggaagaaccatcccgggagcccaccgggcgttcagcttcccttgggaccccaggcgtctcgggctgggtcgccgaccggggcgtttcgggtctctccctctggctccagaatctcctaacgcgcaggtgtccaacgtgaccagcgcgattcaccgctctaatatctctggttttccaagaacttgctcagtcgtcctgccaggcggg

SEQ ID NO: 44928 - DNA, 699 bp, Homo Sapiens
atggatctgcctattcaggacagccatgattcttccaccagtcccaaaggcaaacaacccactactgcagagaagagtgccacaaaaaaggaagacaaggtcccggtcaagaaacagaagaccagaactgtgttctcttccacccagctgtgtgtactcaatgatagatttcagagacagaaatacctcagcctccagcagatgcaagaactttccaacatcctgaacctcagctacaaacaggtgaagacctggttccagaaccagagaatgaaatctaagaggtggcagaaaaacaactggctgaagaatagcaatggtgtgacgcagggatgcctggtgaacccgactgggaaccttccaatgtggagcaaccagacctggaacaattcaacctggagcaaccagacccagaacatccagtcctggagcaaccactcctggaacactcagacctggtgcacccaatcctggaacaatcaggcctggaacagtcccttctataactgtggagaggaatctctgcagtcctgcatgcagttccagccaaattctcctgccagtgacttggaggctgccttggaagctgctggggaaggccttaatgtaatacagcagaccactaggtattttaatactccacaaaccatggatttattcctaaactactccatgaacatgcaacctgaagacgtgtga

SEQ ID NO: 44929 - DNA, 594 bp, Homo Sapiens
gacatgaccggggactgcatgccagtgctggtgctgatggccgcagtgctgaccgtgactggagcagttcctgtcgccaggctccgcggggctctcccggatgcaaggggctgccacatagcccagttcaagtccctgtctccacaggagctgcaggcctttaagagggccaaagatgccttagaagagtcgcttctgctgaaggactgcaagtgccgctcccgcctcttccccaggacctgggacctgaggcagctgcaggtgagggagcgccccgtggctttggaggctgagctggccctgacgctgaaggttctggaggccaccgctgacactgacccagccctgggggatgtcttggaccagccccttcacaccctgcaccatatcctctcccagctccgggcctgtatccagcctcagcccacggcagggcccaggacccggggccgcctccaccattggctgcaccggctccaggaggccccaaaaaaggagtcccctggctgcctcgaggcctctgtcaccttcaacctcttccgcctcctcacgcgagacctgaattgtgttgccagcggggacctgtgtgtctga

SEQ ID NO: 44930 - DNA, 810 bp, Homo Sapiens
agggctgctttttgtcttttatttttccaatcttctttccttctcaaggtgtccaagtcacacagagccacggagtctcacaggtgtctgagaattcctcctcctgggactctcaggggatccagaactgcagtccttgctttgctgtccctgtccctgtccatgtatctggtcacggtgctgaggaacctgctcatcatcctggctgtcaaccctgactcccacctccacacccccatgtacttcttcctctccaacctgtgctgggctaacctcagtttcacctcggccacggttcccaagatgactgtggacatgcagttgcatagcagagtcatctctcatgcgggctgcctgacacagatgtctttcttggtcctttttgcatgtatagaagacatgctcctgaccatgatggcctatgactgctttgtagccatctgtcgccctctgcactacccagtcattgtgaatcctcaccctctgtgtcttcttcatttggtgtcctttttccttagcctgttggattcccagctgcacagttggattgtgttacaattcaccatcttcaagaatgtggaaatctctacttttgtctgtgagccatctcaacttctcaaccttgcctgttctgacagtgtcatcaatagaatattcatgtatttcgatagtactatgtttggttttcttcccatttcagggttccttttgtctttctataaaattgtcccctccattctaaggatgtcatcatcagatgggaagtataaagcccttgccacctgtggctctcacctggcagttgtttgc

SEQ ID NO: 44931 - DNA, 1112 bp, Homo Sapiens
ctccggcgcgtcggtgcagggggatgagggccgcggtggctgccagcgtggggttgagcgaggggcctgctggctcccggagcggtcgcctcttccgcccgccgagtcccgctccggcggcccccggcgcccggctgttgcggctcccggggagcggggccgtgcaggccgcgagcccggagcgcgccggctggaccgaggcgctgcgggccgccgtggccgagctgcgcgccggcgccgtggtggccgtccccaccgatacgctgtacggcctggcctgcgcggcgagctgctcggcggctctgcgcgctgtgtaccgcctcaagggtcgcagcgaggccaagcctctggccgtatgcctcggccgcgtggccgacgtctacagatactgccgtgtgagagtacctgaggggctcctgaaagacctactgccaggaccagtgaccctggtgatggaacgctcggaggagctcaacaaggacctaaacccttttacgcctcttgtaggcattcggattcctgatcatgcttttatgcaagacttggctcagatgtttgagggtccgcttgctctcactagtgccaacctcagctcccaggccagttctctgaatgtcgaggagttccaggatctctggcctcagttgtccttggttattgatgggggacaaattggggatggccagagccccgagtgtcgccttggctcaactgtggttgatttgtctgtgcccggaaagtttggcatcattcgtccaggctgtgccctggaaagtactacagccatcctccaacagaagtacggactgctcccctcacatgcgtcctacctgtgaaactctgggaagcaggaaggcccaagacctggtgctggatactatgtgtctgtccactgacgactgtcaaggcctcatttgcagaggccaccggagctagggcactagcctgacttttaaggcagtgtgtctttctgagcactgtagaccaagcccttggagctgctggtttagccttgcacctggggaaaggatgtatttatttgtattttcatatatcagccaaaagctgaatggaaaagttaagaacattcctaggtggccttattctaataa

SEQ ID NO: 44932 - DNA, 669 bp, Homo Sapiens
atgccgaaagtagtgtctcggtcagtagtctgctctgacactcgggaccgggaggaatatgacgacggcgagaagcccctccatgtgtactactgtttgtgcggccaggtggtcctagtgctggactgtcagttagagaaattgcccatgaggccccgggaccggtcccgtgtgattgatgctgccaaacatgcccataagttttgtaacacagaagacgaagagactatgtatctgcggagacctgaaggcattgaactacagtacagaaagaaatgtgcaaagtgtggactgctgctcttctaccaatcccagccgaagaatgctcccgttaccttcattgtggatggagcagtcgtcaagtttggccagggctttgggaaaacgaacatatatactcagaaacaagagcctcctaagaaggtgatgatgaccaaacggaccaaagacatgggcaagttcagttctgtcactgtgtctaccattgatgaagaggaagaggagattgaggctagggaagttgctgactcgtatgcacagaatgccaaagtgattgaaaaacagctggagcgcaaaggcatgagcaagaggccactgcaagagctggctgaatgggaagccaagaaagtgaaaatgaaggggaccttgattgacaaccagttcaaataa

SEQ ID NO: 44933 - DNA, 1769 bp, Homo Sapiens
cgcagccacccatgcgcgcgcgctcgcaagaccaccagcgcccagagccccagtctgaggcttggcgccgggggtctgcgggcgaggggagctctctacgtgcgaggggctagcgggagccggcacaagagggtcgaggagccaggaaccccaaacgtccggcgccaggcgctagccaagctgctgcgcgccccggcgcccagctggctcggggacagccgctgggtgtcggagaccggagctagcggattgcagcggaaaagcaaagatgtcacactggatccttggcctccagggtccattaaggtgagaataagatctctgggctggctggaactagcctaagactgaaaagcagccatggacatggcggatgagccactcaatggaagccacacatggctatccattccatttgacctcaatggctctgtggtgtcaaccaacacctcaaaccagacagagccgtactatgacctgacaagcaatgcagtcctcacattcatctattttgtggtctgcatcattgggttgtgtggcaacacacttgtcatttatgtcatcctccgctatgccaagatgaagaccatcaccaacatttacatcctcaacctggccatcgcagatgagctcttcatgctgggtctgcctttcttggctatgcaggtggctctggtccactggccctttggcaaggccatttgccgggtggtcatgactgtggatggcatcaatcagttcaccagcatcttctgcctgacagtcatgagcatcgaccgatacctggctgtggtccaccccatcaagtcggccaagtggaggagaccccggacggccaagatgatcaccatggctgtgtggggagtctctctgctggtcatcttgcccatcatgatatatgctgggctccggagcaaccagtgggggagaagcagctgcaccatcaactggccaggtgaatctggggcttggtacacagggttcatcatctacactttcattctggggttcctggtacccctcaccatcatctgtctttgctacctgttcattatcatcaaggtgaagtcctctggaatccgagtgggctcctctaagaggaagaagtctgagaagaaggtcacccgaatggtgtccatcgtggtggctgtcttcatcttctgctggcttcccttctacatattcaacgtttcttccgtctccatggccatcagccccaccccagcccttaaaggcatgtttgactttgtggtggtcctcacctatgctaacagctgtgccaaccctatcctatatgccttcttgtctgacaacttcaagaagagcttccagaatgtcctctgcttggtcaaggtgagcggcacagatgatggggagcggagtgacagtaagcaggacaaatcccggctgaatgagaccacggagacccagaggaccctcctcaatggagacctccaaaccagtatctgaactgcttggggggtgggaaagaaccaagccatgctctgtctactggcaatgggctccctacccacactggcttcctgcctcccacccctcacacctggcttctagaatagaggattgctcagcatgagtccaattcagagaacggtgtttgagtcagcttgtctgattgaatgataatgtgctaaattgattacctcccccttaaagcgaacactgaaatgcaggtagacaattcaaagtctggagaagagggatcatgcctggatatgatctttagaaacaacaaaaatagaaaaaaa

SEQ ID NO: 44934 - DNA, 357 bp, Homo Sapiens
atgtctcacctgctgatgaaactcctacgcaagaagatcaagaagtggaacctcaaactgcggcagtggaacctaaagttgcagggggcctcaaatctgaccctgtccgaaactcaaaatacagatgtgtctgaagaaacaacgggaggtggaaaggttaaaaaatcaaaacattctatgaatgtgggcttatcagatgctcaaaatggagatgtgtctcaagaagcagtggaaaatataaaagttaaaaaatctccccagaaatccaccgtattaaccaatggagaagcagcaatgcagtctcctaattcagaatcaaaaaagaagagaaaaatggtgaatgatgctgagtctgat

SEQ ID NO: 44935 - DNA, 570 bp, Homo Sapiens
ctatgggaagcacaagaggagtggaagcgagcctcttgggaatggaggaatagttctcttcaaagtattgatgtagaatcagtacagagaaatgtttcaaaactgatgcacataatctcggtactagaaaaaggtttacctaaaagcgatatggtaacacatcttaagcaagtggtaacagagtttaaacaagagctgcctatcattatagctctgggaaatccctgtctcaagccaaggcattgggaggctctccaggagattattgggaagtcagttccgcttgataaaaactgtaaagtagagaatcttctagctctcaagatgtttcagtatgaaaatgaaataaatgatatgtcaacctcagcaactaatgaagctgctcttgaaaaaatgctatttaagattattgatttttggaacactactcctttgcctttaattcttcaccacacagagatttactctatcttcataattccatctatagatgacatatcagctcagttagaagagtctcaagtcatacttgcaacaattaaaggatctccccacattgggcccattaag

SEQ ID NO: 44936 - DNA, 228 bp, Homo Sapiens
atgagtcatgctgtggtccagaaacctaatagcagatggccaactgggacactgaaatttctgtactgctactgcctatgtttctatcacaacaaatatcctgatccctcactgttaaggattcagaactgtcctccaagttttattggactggtccggttctaccctctttcttacttgcagttttcaagaataagtgtagaatgtgctgggaatggaatatcctga

SEQ ID NO: 44937 - DNA, 4140 bp, Homo Sapiens
cccaggccggctctggcctcctgacccagacagcgcagggcgcgagggatcgcgcggccgagcccgggtcgcgccgctcccagcatcggggccgctagccaagagttcgaggccttcccgatccggatgtgatgaaaaagagcaacagagggagaagtgtttcaggattgtaggagtggaagaggggaaagagaggcagagagggggaaggccccctcgcaggggagccggctggagtgagctggctggaaagagggggcggagtgcgcggagtcagagccgccaccgctgccgcagttgccgccactgcggcgtctgggctgagccggagggaggcgggaggacgcgcaggggcggccgccgccgtcgtcaggccaccggggcgaaaatgcggccgctgccggaggctcgctaactttccggggcggaagaggaggaggaggaggaggaaggggcttggagcgactacggggggatgcggagaagcagtcagttccctgcacccagcacctcacagcccttcctccgtgcgccctgccgggcggcgagctaggcggcagcggcgcggcgcgggctcggcggagcggcccatgtccggcgcgggcgaagccctcgctcccgggcccgtggggccgcagcgcgtggccgaggcgggcggcggccagctgggctccacagcccagggaaaatgtgataaagacaatactgagaaagatataactcaagctaccaatagccacttcacacatggagagatgcaagaccagtccatttggggaaatccttcggatggtgaactcattagaacccaacctcagcgcttgcctcagcttcagacttcagcccaggtgccaagtggtgaggaaataggcaagataaagaacggccacacaggtctgagcaatggaaatggaattcaccacggggccaaacacggatccgcagataatcgcaaactttcagcacctgtttctcaaaaaatgcatagaaaaattcagtccagcttgtctgtaaacagcgatatcagtaagaagagcaaagtaaatgctgtcttttcccaaaagacaggctcttcacctgaagattgttgtgtccactgtatcctggcttgcttgttctgcgaattcctgaccctttgcaacattgtcctgggacaagcgtcatgtggcatctgcacctcagaagcctgctgctgttgctgtggtgacgagatgggggatgattgtaactgcccttgtgatatggactgtggcatcatggatgcctgttgtgaatcatcagactgcttggaaatctgtatggaatgctgtggaatttgttttccttcataaatatttatcttttgtttgtgttaaaactggagagtgtttaaaaatttccttttggggggaagaaaagcacattgtaagattctcatgaaacaacatggaatttgcactgttaactcattattgtaagtaatctctgaaagcctttttactttaaccaaatctacatggtttaatatgtgaaattttaactactttaactagttttataaatttcttaatatgttacaataacttagggacattttgacaccccccttcccaaatgttaaatgccttctcctttttaccgatatttctgtttcttttaaccgttctcaggagcactttgctccaaatatattatttttcagtgtgtatttaaacgaggcagtttattttgatatgtatctattcatgattgaaaggaagcagtcttggccaggcacggtggcttacacctgtaaccctggcattttgggaggccaaggtgggcagattgcctgagctcaggagttcgagaccagccagggcaacatggtgaaaccccatctctactaaaatacaaaaagttagctgggcttggcggtgtgcgcctgtagtcccagctactcaggaggctgaggcaggagaattgcttgaacccgagaggcggaagttgcagtgagccgagattgtgccactgaactccaacctgcactccagcctgggcaacagagcgagactccatctctaaataaataaataaataaataaataaataaataaataaataaacaaaccagtctttattttaaaagaaactttaggaaacaaacccacataatagttgggaaccagtgttgatctctctcccttaccttctccacttgttcaacagactctgaatgccgactgtgtggactctcttcctcagactgtggggacagatacaattccactcctgtccacaggaacatgagatttagcagactaaggagatctgtaaagaatgaaccataccacaaggcatactgaagtgaggattataagagaaataaactcaaaatgctgttggaatatgcagagaattgctaccagaatattcagtaaggtttcagggagaatgtggcatttgaggactctcttagaatgagtgattcacctgctatttaaatgaattatttagatttttgacaaagatttaggtggacaccctaaactgtgtgtgcctttaaccagttaaaagaacagtgccttcagcatacttttttattagttgtaggaatacagctttttgaaaaagctataaagtttaaattaactaaaaatatgcattttcttacacataatttaaatgttatcatacttttttgatgaaaacataatgccttagtaaaatagctctatttaataaagaagattgagtactctgacacatttcatttaaattaggaaatttttaatattaaaatcccagtgttctgagttattgaaaggctttcttttattttgagagctttaggtctttttgggatgagaacattttagttgtttagtttgtttcttaagcagtgctattttttgtaaacacagataaatggaaaccattcttttcaatgcagaagaaatctagatatcccctactgtgaccaaatttctgtattacgattttatgttaaattaaactaatatggcaggttataatgatccttaagtgtaaagaaatcagtcaattacaagagtaattgtatagttattgagacctatagtgtgtggcttagatgaaagggagagtaaattttcataccatgctctctcctactcagtttgatctctctaaaattgtagtttggtttgatttaatataattcttagtagaaattttgaaagtatgctttgggattaataattatttttaatttttctggctgaatatcaaattgatagtaacaacagaagcataattttaggaaggctttcgcaaacctagccttttaagagaggtttttaacctgaagcatgagaatatatcacctgtggtttttcctttgagatgaaacgtagtttctagttatatcattacttaaagggcttaaaaagaaaaaacttagcaaacttttgaatctttcttttattgctatttacacatacatacacacatacaaaacctttaaattttgggatctgaatataattctggtaaacagctgtcttcatttttctcctctaaagaacttaattcatttgttacataaaatataaggaaatctttatactattttacagtaaccacaatctaaatatttacatatacccaaaattaacttatgctcatatattaggatgtgagaatatcatctgtttatggacacatgaaacctcctaatgacctggaattgttagaatatttgactttttatatgcaaagtttttcaaccaagtggtttgtctaatatttaaacatgtactggcacaatttgtgatgaaaatattagcacatttgcaataatgtttctccataacagagaatgttaatggataccagaattttatttttgtatttatgttcatagtacttttcctcttgtctactccagacagttattccataaagcatttgtataattaaaaggaaaacagaaaaaggaaaagtaggcaaatgtgaaaatagtttcaatatatcttatgatttcttaatgtaaaatgttttgttgaagtatatggctatcatgactaagtgctagaatttatagttacaggcggtgtccttttaaatgtggaaaggcttttaaaatattttaaaactggacctgtattatcctgaatacactattttgaaaatttttaaaaa

SEQ ID NO: 44938 - DNA, 1798 bp, Homo Sapiens
gcaaagagccgaggccgggcgcgcgaccctcgtccttctgcccctggccgcacactttgcgcacatctctttttctgcatggtggatattatttttcattatccttttctgggtgctatgggtgatcattccaagaagaagcccgggacggccatgtgcgtgggctgcgggagtcagatccacgaccagtttatcctgcgggtgtcgcccgacctcgagtggcacgcggcctgcctcaagtgtgccgagtgcagccagtacctggacgagacgtgcacgtgcttcgtgagagacgggaagacctactgcaagcgggactatgtcaggctgttcggcatcaagtgcgccaagtgccaggtgggcttcagcagcagcgacctggtgatgagggcgcgggacagcgtgtaccacatcgagtgcttccgctgctccgtgtgcagccgccagctgctgcctggggacgagttctcgctgcgggagcacgagctgctctgccgcgccgaccacggcctcctgctcgagcgcgccgcggccggcagcccgcgcagccccggcccgcttcccggcgcccgcggcctgcatctgcccgacgctgggtcgggccggcagcccgcgttgcgcccgcacgtgcacaagcagacggagaagacgacccgcgtgcggactgtgctgaacgagaagcagctgcacactctgcggacctgctacgccgccaacccgcggcccgacgctctcatgaaggagcagctggtggagatgaccggcctgagcccgcgggtcatccgcgtctggttccagaacaagcgctgcaaggacaagaagaaatccattctcatgaagcagctgcagcagcagcagcacagcgacaagacgagccttcagggactgactgggacgcccctggtggcgggcagtcccatccgccatgagaacgccgtgcagggcagcgcagtggaggtgcagacgtaccagccgccgtggaaggcgctcagcgagtttgccctccagagcgacctggaccaacccgccttccaacagctggtctccttctccgagtccggctccctaggcaactcctccggcagcgacgtgacctccctgtcctcgcagctcccggacacccccaacagtatggtgccgagtcccgtggagacgtgagggggacccctccctgccagcccgcggacctcgcatgctccctgcatgagactcacccatgctcaggccattccagttccgaaagctctctcgccttcgtaattattctattgttatttatgagagagtaccgagagacacggtctggacagcccaaggcgccaggatgcaacctgctttcaccagactgcagacccctgctccgaggactcttagtttttcaaaaccagaatctgggacttaccagggttagctctgccctctcctctcctctctacgtggccgccgctctgtctctccacgccccacctgtgtccccatctcggccggcccggagctcgcccacgcggacccccgccctgccccagctcagcgctccctggcggcttcgcccgggctcctagcggggaaaaggaaggggataactcagaggaacagacactcaaactcccaaagcgcatgattgctgggaaacagtagaaaccagacttgccttgaaagtgtttaagttattcgacggaggacagagtatgtgagcctttgccgaacaaacaaacgtaagttattgttatttattgtgagaacagccagttcatagtgggacttgtattttgatcttaataaaaaataataacccggg

SEQ ID NO: 44939 - DNA, 675 bp, Homo Sapiens
atgactgacagctccaaaacggacacgctgaatagtagctcaagtggcacaacagcctccagcctagagaagatcaaagtgcaggctaatgcaccgcttattaaacccccagcacacccgtctgctatcctcacggtcctgagaaagccaaaccctccaccacctcctccaaggttgacacctgtgaagtgtgaagaccccaaaagggtggttccaactgccaatcctgtaaaaaccaatggcacccttctacgaaatggaggcttaccaggtggacctaacaaaattccaaatggagatatctgctgcatacccaacagtaacttggacaaggctccagtccagcttctgatgcatagacctgaaaaagacagatgtccccaggcagggcctcgagaacgagttcggtttaatgaaaaagtacagtaccatggctattgtcctgactgtgatacccggtataacataaaaaacagggaggtccacttacacagtgaacctgtccacccaccgggaaagattcctcaccaaggccctcccctccctcctacaccccatctccctcctttcccactagaaaatgggggaatgggaataagccacagtaacagcttcccctcagacctgcaactgtgcctcctcccactgcaccaaaaccacagaagacgatcttga

SEQ ID NO: 44940 - DNA, 1534 bp, Homo Sapiens
ctgatgtggagtttcttgcactgataaggaaaaactgctgaagttgtgaggctgctccaggcagagccatcatctaacagacctaaaagaagcatcatgttccatgacttcatttcaccccaggggacttcaagctgcccgtgcccagaagttcaagagtaaaaggccacggagtaacagtgattgttttcaggaagaggatctgaggcagggttttcagtggaggaagagcctcccttttggggcagcctcatcttacttgaacttggagaagctgggtgaaggctcttatgcgacagtttacaaggggattagcagaataaatggacaactagtggctttaaaagtcatcagcatgaatgcagaggaaggagtcccatttacagctatccgagaagcttctctcctgaagggtttgaaacatgccaatattgtgctcctgcatgacataatccacaccaaagagacactgacattcgtttttgaatacatgcacacagacctggcccagtatatgtctcagcatccaggagggcttcatcctcataatgtcagacttttcatgtttcaacttttgcggggcctggcgtacatccaccaccaacacgttcttcacagggacctgaaacctcagaacttactcatcagtcacctgggagagctcaaactggctgattttggtcttgcccgggccaagtccattcccagccagacatactcttcagaagtcgtgaccctctggtaccggccccctgatgctttgctgggagccactgaatattcctctgagctggacatatggggtgcaggctgcatctttattgaaatgttccagggtcaacctttgtttcctggggtttccaacatccttgaacagctggagaaaatctgggaggtgctgggagtccctacagaggatacttggccgggagtctccaagctacctaactacaatccagaatggttcccactgcctacgcctcgaagccttcatgttgtctggaacaggctgggcagggttcctgaagctgaagacctggcctcccagatgctaaaaggctttcccagagaccgcgtctccgcccaggaagcacttgttcatgattatttcagcgccctgccatctcagctgtaccagcttcctgatgaggagtctttgtttacagtttcaggagtgaggctaaagccagaaatgtgtgaccttttggcctcctaccagaaaggtcaccacccagcccagtttagcaaatgctggtgaaaagaaagggcgagatcaccaaggttcttccagggctgtatttctgcagtttcggttttcatttgcttcagcttactaagaagcttcaaatctaactccatactgaacaaggggctttatgtcctcacctatgacctggaatagtttaaatatggtgttcaaggcaatagtacataatagtggaagaaaattcagtggaaggttattgctattgtcatttgcatagaatttaagtgattgatttaaaaaaactggacataaactaagtctaagaag

SEQ ID NO: 44941 - DNA, 223 bp, Homo Sapiens
aatgccagagtcccctggtgaagttccggaatatcctttgtttgtcacagttggtgactggctagattctataaagatggggcaatacaagaataacttcgtggcagcagggtttacaacatttgacctgatttcaagaatgagcattgatgacattagaagaattggagtcatacttattggacaccagagacgaatagtcagcagcatacagactttacgt

SEQ ID NO: 44942 - DNA, 230 bp, Homo Sapiens
agtgtgattggagctgcagtgcatgcagtgggcccctgaaaacagactgcctgcagtgcatggatggctatgttctccaggatggggcctgcgtggagcagtgcttgtcatcattttaccaggactcgggcctctgcaagaactgtgacagctactgtctccagtgccaaggtccccatgagtgtacccgctgcaaagggccatttctcctcttggaagcccagtgtgtc

SEQ ID NO: 44943 - DNA, 324 bp, Homo Sapiens
cctccactgtgagagctacctaaagctcggtgtctgtgatggtctacagggcttccgaggcaattgggcagcatcagtcttcagccgctaagccgagaagatctgggaaggagtcagagagccttgggccagagttccaggggctctgggagtggctgccaggtgagttgaacaatccaatttccagtggggtcccacacaatttgaaattggtgagatgtttcttgggctggtcgttctgaggacctgaggtcgtaggtgaatctttctcacggagcaaagagcaggaggacagtggattgatctcccaaggggggtcccccg

SEQ ID NO: 44944 - DNA, 1143 bp, Homo Sapiens
atggaggaaatttatgcgaagtttgtgtcccagaaaatcagcaaaacccgctggcgaccgctgcctccgggaagtttacagaccgcggagacgttcgctacaggatcttgggacaatgaggaaaattatatttcactgtggtctattggagattttggaaacttggactctgatggagggtttgaaggagaccatcagttattgtgtgatatcagacaccatggtgatgtaatggatttacagttttttgaccaggaaagaattgtcgctgcttcatcaacaggatgtgtaacagttttccttcaccatccaaataaccagactctgtcagtcaaccagcagtggactacagctcactaccacacaggccctggcagtccttcctatagcagtgcaccatgtacaggtgttgtgtgcaacaacccagaaatcgttacagttggagaggatggtcgaataaatctcttcagagctgatcacaaggaagctgtaagaaccatagacaatgcagatagtagtacactccatgctgtaacctttcttcgaactcctgagattcttactgtaaattcaattggacagttgaaaatatgggatttcagacaacaaggaaatgagccttctcagatattgtcactgactggtgaccgagtgccactccactgtgttgatagacatcccaaccaacagcatgttgtagctactggtggccaagatggaatgttgagtatttgggatgttagacaaggtactatgcctgtatctctgctgaaggctcatgaagctgaaatgtgggaagttcactttcacccatccaacccagaacatctttttacctgctctgaagatggatccctctggcactgggatgcttccacagatgtacctgaaaagtcgtcactctttcaccaaggaggaagaagcagtacttttttgtctcatagcattagtaaccaagctaatgttcaccagtctgtcattagctcctggctcagcactgatcctgcaaaagaccgaattgaaatcacaagcttacttcccagtaggtctctgtctgtgaacactttggatgttttaggtccttgtcttgtttgtggaaccgatgcagaagcaatttatgttactagacatcttttttcgtag

SEQ ID NO: 44945 - DNA, 988 bp, Homo Sapiens
agtgtacacagtcctggaggaactgagtccaggaaccatcgtggccaatatcacagcggaggatcctgatgatgaaggttttcccagccacctcctctacagcattaccactgttagcaaatatttcatgataaatcagttgactggtacaatccaagtggcccaaaggatagaccgagatgcaggtgaattgagacaaaatcccaccatttccctggaagttctagtgaaggacagaccatatgggggtcaggagaatcgcatccagataaccttcattgtggaagacgtcaacgacaatcctgccacatgccaaaagttcaccttcagcattatggtgccggaaagaacagccaaggggacgttgcttcttgacctaaacaagttctgctttgatgatgacagtgaggcaccaaacaacagattcaacttcaccatgccatctggagtggggagcggcagcagatttttacaggatccagctggctctgggaagattgtgctgattggtgatctagactacgaaaatccaagtaacctagcagccggcaataaatatacggtgataatccaggtgcaggatgtggcccccccttactataaaagcaagtatcattttgttttatttcatgattataacgtctacgtttatatcctaacaagcccagaaaatgagtttcctctcatttttgataggccatcctatgtatttgatgtgtcagaaagaaggcccgcccagggtcacctatcaggtcctgaggaaaaacgtttactctccatctgcatggtacgtgccgtttgtcatcactttgggctccatattgcttctgggtctcctcgtgtacctggtcgtcctattggccaaagccatccacagacactgcccctgcaagactgggaagaacaaggaacctctgtaagttgccaaaacgaagactgcagagagagacgtcgtggtggaaactatccagatgaacactatctttga

SEQ ID NO: 44946 - DNA, 777 bp, Homo Sapiens
tcagagtcttcgaaagagcctgaagagctgcagaaacttttcattggatggctgggctttgaaacaactgatgagagcctgagggaccatgagccatggggaatactgaaggactatgtggtaaggagagatccaaagaccaagtgctccaggggctttgggtttgtcacttatgccactgtggaggaggtggatgcagccatgaatacaaggccacacaaggtggatggaagagttgtggaaccaaagagagctgtctcaagagaagattctcaaagaccaggtgcccgcttaactgtgaaaaagatatttgttggtggcattaaagaagacactgaagaacatcacctaagaaattattctgaacaatatagaaaaattgaagtgattgaaattacgactgacagaggcagtgtcaagaaaaggggctttgcctttgtaacctttgatgaccatgactctgtggataagattgtcattcagaaataccattctgtgaatggccacaactatgaagttaggaaagccctgaaacaagagatggctagtgtttcatccagacaaagaggtcgaaatggttctggaaacttctacaatgattttggcaattatcacaatcagttttcaaattttggaccgatgaagggaagaaactttggagccagtatctctggcccctgtgtgggtggaggccaatacttcgccaaaccacgaaaccacggtggctatggcagttccagtagcagcaataactatggaagtggcagaagattttaa

SEQ ID NO: 44947 - DNA, 2169 bp, Homo Sapiens
taattttagaaggaaaaaatttattcagatgatgtgatagccatgtcactgttaagcctgaacttttctttcctgggtggtgtgaaaggtgcaagaaaacacaagctgcttttaataacactcttgcactgctttctccccaaagctagatatatcaaaacattaaaaaataaaaaagctttttaaggtgtaaggagcaaatggaatagtggataaagccttttcatctgtttagtcattttacacccaagtttctctggagtatttgcctggaagtttctaatcaaaaccattagactttgagtttcacaaactcctcttgaagctcttccagtgaggcctgcacatcggtatgaaacacattctttccaaaagctaccactggtagattttaagaacaagctcaggagcacatcactcaaaataattccaagtatttcactttttcccttcaaataacacttcatgaatctggtccttgaaagactagccaagaaaattagacatttttagcattagtttgctcatacatacatttgctatatttttatggttgtatttttggcaagttttgtttgatgtatttcataatgaacggcgaaattggtgtttgcccattgacatttcagtgtcaatgtattttaagcttcagtgtgttaaaactctgttgaaaattttaacttttgaaatgttcaagtatagattatttttcattgttcttccaaccttggggttgttctgtccacaagttcagcagaatccgtttttctttggcaaccaagaaacttcaatatgtaacagaaaacatggaatggcatttagatcttcaaaaagcagggcaaactggaatggaatgtactgtttctcacagtggtctatgctgacagcaaggctgaagatttccagtaggttatgggtaatcagtgaaagttcatgcttggtggtgacagctgcagtacatcttgaataccagttttcttcaatctttgccaaaaacccaaatttaacacagtttgctgtagtgccattaagatatactcctatacaatttcctccaactcggttcatttgatacagctgcaaaaatactgtctttggtggtcaagtagaaggctcacgaaaacagcacacccacagttttgaaagccttattctgaatgtaagcaaagtacagttttcttcatcagtagattcatctcaaccaacagcaataaaagatgagccgatttttttttttttttgagatggagtcttgctctattgcccaggctggagtgcagtggctcagtctcggcttactgcaagctccgcctcccaggttcatgtcattctcctgcctcagcctcttgcgagctgatgttttttaagatctgaagtttgatatatacagtcattaattcagagttaagactgcagaagtagatgaagaaattctggaattccttaatttatttgtggcagcactcagaatgcaaggtttcacaagtgtctccatttttttctcctttgcaattaaaagggctgtttaatattaagctttcacggcttggaagattcctgtgaatatttcaatactgtccagtcttaaagctgcagagaatcgggctttgcagaacactccactgtttttaatggcatgaatttaacagtgtttggcatggtgtcactgcccaacactttcagataactcaactgaagaagttgaccctatcttctgcaaaataacatgagtatatacttgagaaaagcctcaacatttttttttggctgccatttttagctacctcaaaggagataacagaaaaacaaggagtactgatgatggaagcatctggtccctcttgcagagtgatgaatgattttattggtggcagctgggtggcaggacaatccaggcatccagttatgcctgatccccaataagtgaaatctttgttcattttctttttatacacccgtctgcttcctaaaacctgacaccatttaatggtgcccttggtcaaatctaaatgatcttactttcataattctttgattctagcttgcagagtcaagacgaactctaactcatgggatggacaaactggaagatgtaaaataagtaaggctttctgggccaaaaagcctcttcttacagaaaatcaaattttaaaagaacattgacctcaa

SEQ ID NO: 44948 - DNA, 2325 bp, Homo Sapiens
atgaggacttccctgcaggcagtggcactctggggacagaaggcccctccccacagcatcactgccatcatgatcactgatgaccagcgaacgattgtgactggaagtcaagagggtcagctctgtctctggaatctctcacatgaactaaagatttcagcgaaagaactcctatttggtcattcagcttcggtaacatgtttggcaagagcaagggacttctctaaacagccctacattgttagtgctgctgaaaatggggagatgtgtgtttggaatgtcaccaatggacagtgcatggagaaggctacacttccttacaggcacactgcaatctgttattaccactgctcattccggatgacaggagaaggctggcttctttgttgtggagaatatcaagatgtccttataattgatgccaaaactttggctgttgttcacagttttagatcatctcagtttcctgactggatcaactgcatgtgcattgttcactccatgagaattcaagaagattctctcttggtggtatcagtagctggtgagctcaaagtatgggatctttcctcatctatcaacagcattcaggaaaagcaagatgtctatgaaaaagaatccaagtttcttgagtccttgaactgccagacaattcgattttgcacatatactgagagacttctattggtggtattttctaaatgttggaaggtttatgattattgtgatttttcccttctgctgactgaagttagtagaaatgggcagttctttgctggtggagaagtgattgctgctcacagaatcctcatctggacagaagatggtcacagttacatctatcagctgctgaacagtgggctttcaaaaagcatataccctgctgatggaagagtgcttaaagagaccatttatcctcatttactgtgctctacttctgtgcaggaaaataaggaacagagccgtccctttgttatgggctacatgaatgaaaggaaagagcctttttacaaggtacttttctctggagaagtctcaggaagaattactttgtggcacatccctgatgttcctgtatccaagtttgatggttctcctagagagataccagtaactgccacctggactcttcaagataattttgataagcatgatactatgtcacaaagtattattgactatttctctgggcttaaagatggggcaggaactgctgtagtcacttcatcagagtatattccaagtcttgataaactaatatgtggctgtgaagatgggacaattatcattacccaggctttgaatgctgccaaagcaagacttctggaaggtggttctttagtaaaagattctccccctcataaagttcttaaaggccaccaccaaagtgtcacttcattactctatccacatggtctctcttcgaaattagaccaaagttggatgttgtctggggacctggactcatgtgtgatcttgtgggatatctttactgaagaaattttgcataaattctttttggaagctggtccagtaacaagtcttttgatgtcaccagagaagtttaaactaaggggtgagcagataatttgctgtgtgtgcggtgaccattccgtggctctccttcaccttgagggaaagagttgcctcctgcatgcccggaagcacctttttcctgtgaggatgataaaatggcacccggttgagaattttttaattgttggatgtgcagatgactcagtttatatctgggaaattgaaacaggcactttggaaagacatgagacaggagaaagagcacgaattattcttaattgttgtgatgattcacagcttgtgaagtctgtacttcccattgcctcagagacacttaagcacaaaagtatagaacagagatcctccagcccctaccagcttgggccattaccttgccctggtctgcaggtggagtcttcatgtaaggttactgatgccaaattttgcccaagaccttttaatgtcttgcctgtgaagacaaaatggagtaacgttggctttcatattcttctatttgatctggaaaaccttgttgaacttttgctaccaactccactcagtgatgttgactcttccagttcattctatggtggtgaggtcctgagaagagccaagagcacagtggagaagaagacactgacactgagaaaaagtaaaactgcctgtggtcctctttcagcagaggcactagccaagcctattactgaaagcctggcccaaggagataataccatcaaattctcagaagaaaatgatggcattaaaaggcagaagaaaatgaagatctcc

SEQ ID NO: 44949 - DNA, 1799 bp, Homo Sapiens
tgctgtgtggactgaagaagaaagaaaacaattcaaagattatgagaaaaaagtaaaggagttaaatgaagaaagagataagtatagaaagtcattagaagcagaactgaagaaacttcaaaactctattcaagaaagcacacaggcctttgatgaacatttgaaaagactttttgaaaggagagtgaaggcagagatggttaccaaccaggaggaactgaaaataagtaaccttgcattttctttattgttggatgaagaattaagctctagagaaaaattcctgaacaactaccttacaaggaaacagcacgagaaaagccagacttcagaagctgttcggaaatctagagaagacctggatgtgtgcaaggagcactatgacaacttactggcagaagacaaagttatggatcgcagctttaaaaaggaattttctgaaattcctggtcatcaagtggatatactctacaaactttttaaacgccgaccaaggatttccaaacagaaaacgcactcagaaacaaccagcgttgtccctttcggagaactaccaggatctggcaagttgaataaggatgcctttgcccagttaatgaaagctatggatgagttggacaatattagtaacatgccagaaggcttggaccctttggtctggaatcatttctgcatgacaagacgagcaaaagtggaaaatgaacagaaagtaaagcagaaagcagctgacttattggaaatggcaactttcctccagaagagagttgaggaggaagagaaggtgcaacaggagattgagagagtgttccatgaactcatcctattacaggaagagaaagtgagattccagttgaatttgacaatccaaattcttcttaaacaaggacaagtagaactggaaaatttccagctagtactggagtattctgatgcaattctcatcaacaagaacataattgaagacttgaattctgtgattcggactcaaggacaaaagaaagttgctagcatgatggaaagtaaagatgtacacaaaagaatacttcagattgagtgggaacataagaaaatggagatggaaagggaagatctaaatcagaaggcttgggatattcagatgctatttttttcaagagatcgtcaaaagtacctaaatgaaccaaactatgaggctctgattagtattcagattggaataatggaacaaaccattgctgttttagataagatgcacaaaaagaatgtggaaaactgcaagaaactactcaaaaaacttggaaagttcagcaatcaaaaagatatagcaaattatgccctaagctgcaatctacgagaagagttggtagctgtctcagagagaaaagacatctgtaatgcaatggggtctaaactgacttgtgaaaagattgtcaaagaacggtatgaaaacatgatgcaacagcagaagttaacaaatatttcaaaacaacaagctgaacagatttcaatactacagactgaagttgaaagattaagaatgaaaacatttcctgctcttgttcaaatgtaaaaacgctggcaggaaaacacaaggccaaatcaatcatttaaaaaatcatttcatttgggtaaaatgatttccttttctttcttactgggaaattgaagtagcatgtcctctgagttgcatgttttagataaaaaattgtttaattttagccttaattgtatacaaatttttgtcctgcatgaataaatgtgtaaaataccatgaattgctgtttttattcaagaataaacaagacttgaagtcagaaagt

SEQ ID NO: 44950 - DNA, 342 bp, Homo Sapiens
atcccaaccaaggagatgaaaaattcactggagtcaattaattatcggctccaactcatgaaaagtggaaagtacatgctggggtacaagcagactttaaagatgatcagacaaggcacagcaaaattggtcatccttgcttacaactgcccagctttgcggaaatcagaagtagagtactatgcaatgttggccaaaattggtgtccatcactacagtggcaataatattgaactgggaacagcatgcggaaaatactacagagtatgcacactggcgctcactgatccaggtgattctgctatcattagaagcatgccagaacagactggtggaaagtaa

SEQ ID NO: 44951 - DNA, 2317 bp, Homo Sapiens
gcggcggcggcggcggcgatggcagcggaccctgagcgagcttgagggctcggacccagctccctcccgcgaaaccttgggcggatccggcgctgcggccccagctcgctccgctcctgctccctccccggccgctgcctgggcggaggcagaggcagaggcccgggctggccgccctgctcgtgccccagctcggccccggacggcccggctgctgtgcagagaggaggccgagtcgtgaaaagagaatactgaagaataggatctcaagatgagtaaaaagcccccaaatcgccctggaatcacttttgagattggtgctcgtttggaggcactggactacttacaaaaatggtatccatcacgaattgaaaaaattgactatgaggagggcaagatgttggtccattttgagcgctggagtcatcgttatgatgagtggatttactgggatagcaatagattgcgaccccttgagagaccagcactaagaaaagaagggctaaaagatgaggaagatttctttgattttaaagctggagaagaagttctggctcgttggacagactgtcgctattaccctgccaagattgaagcaattaacaaagaaggaacatttacagttcagttttatgatggagtaattcgttgtttaaaaagaatgcacattaaagccatgcccgaggatgctaaggggcaggattggatagctttagtcaaagcagctgctgcagctgcagccaagaacaaaacagggagtaaacctcgaaccagcgctaacagcaataaagataaggataaagatgagagaaagtggtttaaagtaccttcaaagaaggaggaaacttcaacttgtatagccacaccagacgtagagaagaaggaagatctgcctacatctagtgaaacatttggacttcatgtagagaacgttccaaagatggtctttccacagccagagagcacattatcaaacaagaggaaaaataatcaaggcaactcgtttcaggcaaagagagctcgacttaacaagattactggtttgttggcatccaaagctgttggggttgatggtgctgaaaaaaaggaagactacaatgaaacagctccaatgctggagcaggtatgaaatggtagcatttgatttttttcaaggttcccactggaatgatcacggagctctagtatctacgtaattgaaattccccttttgatcagatatgggaataggaagctaattaattgatgatatatttttaactctgccttctccaaggtatacagataactacagacttcattagtgtttgatttcatagactggcattaaagcctttgtctccaaaatttgaaggcctggagacaggcatcccagggtataagcttccagctggatcacctttaactagcttacaaaaagacccttacacaaatactttccatttgtgagttaaaacagggttttttgacatcgaataaagcttcttttgtaagaagtttcttttatattgtaacaattggtgttgttagactgactatgtgttttatgaattgatcaatgagccatacatttttgctaggatgtatattttaataactacaaaaaaagagagtttaaaaaactattaagggtctgtctttaaaccacctaatagaggaatttaaaagtgaaggttgcagttgctagattttgccttggctaccttcagattcccacaatacttgtacataatgaactgtgcatgcttttacattctctaagggcttaacttcttaggcactgtaagactataagaacgcagtaatagccataactggatttccttggttctcctgttttaaaatctgagccttaatgtagttttaatatatcctttttgtattacttttctttattagtagcctaataaagaagactttgagtatcttttgctctcctctagatgcgttttaaaaactattccaaatttaattgatattgtattgagtttttcagggttattttaggcctgatttgataacaatgcgttgttttggtgcctccattaatgttgtattaaatcaatgggtcttttaaattgattaatatgtcattgaatcataccttctgattttctgtgatcatccaacggttaagtctttgccgttattgtcaatatatcaaccaaattttaaataactttttttactgtgtattactatattcaacgtcccagatataacaatattttgtattttcaccactgtttatggtattctcagaatgcgataaatcagggacttgggtaataaaatgtttctggaaaattcattacaa

SEQ ID NO: 44952 - DNA, 234 bp, Homo Sapiens
gaaaccagcttgatttcaaaagcgtccagccattgcgccgtgaaatgccagggaggcctacgtgtttgttgagagatgcctttgcttggtttcaggaccagtggttttggcgagtgagaaacaacagggtgatggatggatacccaatgcaaattacttacttctggcggggcttgcctcctagtatcgatgcagtttatgaaaatagcgacgggaattttgtgttctttaaag

SEQ ID NO: 44953 - DNA, 1263 bp, Homo Sapiens
gtgggaaacaaaaagactcatatcaatatcgttgtcattggacatgtagatttgggcaagtacaccgctactggccatctgacctacaaatgtggtggaatcaacgaaagaaccattgaaaatattgagaatgaggccactgagatgagaaagaactccttcaagtatgcctgggtcagtcttaataaactgtcgagtgagtgtgaatgtagtatcatcattggtatcgctctgtggaaatttgaaatcagcaggtattatgtgactatcattgatgacccaagacacagctactttattaaaaatctgattgcaggcatatctcatactggcttgtccggattgttgctcctggccttggtcattttcaagctatgttttccaagagtggatacccatgagcatgcttctctggctcacacaccgggtatgaaacaactaattgtcggtgttaacaaaagtagaatccacagattccaccctacaaccagaagagatatgaataaattgttaaggaagtcagccctcacattaagaaaattgacttactaccgtcataaagtagcatttgtgccaatttttggttgggatggtgagccaagtgcttgcatgctttggttcaaggcatggaaagtcattgataaagacagcaatgccggtggaaccatgctgcctgaaggtctggtttgcaaactaccaccaactcacccagctgacaagccattgcatctgcctttccaggatgtctacaaaatgattggtactatccctgtgggccaagtggagtctggtgttctgaaactggcatggtggtcacctttctttgagtcagttacaactgaagtaaagtctgttggaaggtaccatgaagctttgagtgaagctcttcctaagaacaacgtgggcttcagttttaataatgtgcctgtcaagcatgttcgttgtggcaatgttgctggtgacagcaaatatgacccaccaatggaagcatctggcttcactgctcagatgattattcggaaaaggatcagtgttagctacacccctgtactgaattgtcacactgctcacattgctggaaagtttgctgcactgaaggaaaagattgagcactgttctggtaagaagctggaaaatgaccctgaattcttgaaatttggtgatgcttccatcattgataagattcctagcaagtgcatgtgtgttgagaccttctctaactattctcttctgggtcattttgctgttcgtcatatgaaacag

SEQ ID NO: 44954 - DNA, 5196 bp, Homo Sapiens
atggagaaagcgcggccgctgtgggccaactcgctacagttcgtgttcgcctgcatctcgtacgccgtgggcctgggcaacgtgtggcgattcccgtacctgtgccagatgtacggcggaggtagtttcctggtcccctacatcatcatgcttatcgtggagggaatgccgctcttgtacctggaactggctgtggggcagcgcatgcggcagggcagcatcggcgcctggaggaccatcagcccgtacctcagtggtgtcggggtcgccagcgtggtggtctctttcttcctctccatgtactacaacgtcatcaacgcctgggccttctggtacctcttccactccttccaggatcccctgccgtggtctgtctgcccactgaatggtaaccacacgggctacgatgaggagtgtgagaaggcgtcctccacacagtacttctggtacaggaaaaccctcaatatctcgccgtccctccaggagaacgggggtgtgcagtgggagccggcgctgtgcctcctcctggcctggctggtggtgtacctgtgcatcctgcgtggcaccgagtccactggcaagatagagcagctggccaaccccaaggcctggatcaatgcagccacccagatcttcttctcacttggcctgggcttcggcagcctgatcgccttcgccagctacaatgagccatccaacaactgccagaagcacgccatcatcgtgtccctcatcaacagcttcacctccatatttgccagcattgtcaccttctccatctatggcttcaaggccaccttcaattatgaaaactgcttgaagaaggtgagtctgctgctgaccaacacttttgaccttgaagatggctttttgacagccagcaacctggagcaggtgaagggctacctcgcatctgcctacccaagcaaatacagcgagatgttcccgcaaatcaaaaactgcagcttggaatcggagctagacacggccgtccagggcactggcctggcattcatcgtctacacagaggccattaaaaacatggaggtgtcccagctgtggtcggtgctctacttcttcatgctgctgatgctgggcattgggagcatgctggggaacacagcggccatcctcacccctctgacagacagcaagatcatctccagccacctgcccaaggaggccatctcaggtctggtgtgccttgtcaactgtgccattggcatggtgttcacgatggaggctgggaactactggtttgacatattcaacgactacgcggccacactgtccctgctgctcatcgtgctggtggagacgattgccgtgtgctacgtgtacgggctgaggagatttgaaagtgaccttaaggccatgaccggccgagctgtgagctggtactggaaggtgatgtgggctggcgtaagcccactgctgattgtcagcctctttgtcttctacctgagcgactacatcctcacggggaccctgaagtatcaagcctgggacgcctcccagggccagctcgtgaccaaagattacccggcctatgcactggctgtcatcgggctgcttgtggcctcctccaccatgtgcatccccctggcggccctggggacttttgttcagcgtcgcctcaagaggggagacgcagaccccgtggcctgagatgtgggcttcccagccgctcacggttttacagatactatttacaggcggaaactcctcggctgctttttcaaatgcttaagccaggagtgctcagcccatcaacttcctgagtgtctaaagaagatgaggaaggtgtgcaggaagaaaactcccttgggagaacgcacaccctcccgtggtggctgttcctccctgtcacctgcctcctcatcatggaagggggtgggctatgaaagccggtctcaaagataactgcatccttcattccaggaaagccctagaattagggcacattgcaaactgaaatatgactataattcttatgggaccaaatttaagcaatttttgtttttggctgaagagacaccaaaatattagaggacaaatatttttagatccatttaaggagttttgaagtgcctaagatgacctatttgtcagtggtgcaaaattaattctcttcttttttgagttgtagtgaatatgcaatttctgtgttccccttccaccctttaaatcttaggatgacaagttataaagaaagaagatctttgtctgggacccccaaagggatcctttctctaaggtctctgacggtgggtccaggaccagacctctctacaaaaaattgccccaactacagtttgcaaccccaaaccacattagaagtctgtgcagacatccctccgtggtgtgtgtcttggtgcattggaaaaggagtcaggagccactgtgaggtgagaatgaaagtggatctcagctgggcacggtggctcacgcctgtaatcctagcaccttgggggtcaaggtgggtggatcacttgaggtcaggagtttgaggccagcctggccaacatggcgaaaccccatttctactaaaaatacaaaaaaattagctgggagtggtggcataggcctgtaattccagctactctggctgctgaggcacaagaatcatttgaacctaggaggtggcggttgctgtgagccaagatcatgccactccactccagtctgggcgacagagcaagactctgactcaaaaaaaaaaaaaaaaaaaagtggctctgactttcccataggcttaatattacatttggacatcgtggccaactctatcaagaccacaaataccacttacaattaattttaaattattcatctgtacatagttttctaaaatgtatataattcaaacagagcatcttgtaactgaagacacaccatatctatgatatcgcattagtccatgtggggaaaagaaagatcagattgttactgtgtctgtgtagaaaaggaagacataagaaactccattttgatctgtactaagaaaaattgtttctgctttgagatgttgttagcctataactttagccccaactctgtgctcacagaaacatgcgctgtaatgaatcaaagtttaatggatttagggctgtgcaggatgtgccttgttaacaatatgtttgcaggctgtatgcttggtagaagtcatcgccattctccattctcgattaaccagggacacaatgcacagcagaaagctgcagggacctctgcccaagaaagcctgggtattgtccaaggtttcccccccactgagacagcctgagatatggcctcatgggaagggaaagacctgactgtcccccagcccgacacctgtaaagggtcggtgctgaggaggaatagtgaaggagggaggcctctttgcagttgagataagaggaaggcttctgtctcctgcttgtccctggtaatggaatgtctcggtgtaaaaagctgaccattcccattcgttctattctgagataggagaaaaccgccctgtggctggaggtgagatatgctggcagcaatactgctctgttactccttgctacactgagatgtttgggtaaagagaaacataaatctagcctacgtgcacatctgggcacagtacctttccttgaacttattcgtgatacagattcctttgctcacatgtttccctgctgaccttcttcccacctgttgccctgctacactcccctcgctaagacagtaaaaataatgatcaataaatactgagggaactcagaggccagcgccggtgcgggtcctccacatgctgagcgccggtcctgggcccactgttctttctctatactttgtctctgtgtcttatttcttttctcaaaaaaatttttctttttttaactgcaataaagtaggtcgttacccctaaagtgagcgagtcccttcctgctctaacgtccagtgcttccttgagatcatggaattctggagagtttctgtggatatatttgcacagatatctttgaagacacaaacactcacctgggacgttggccggagatgtctttttatttttgtgctgtaaaattctcttacagcaaaaataggctttagaaaggtcttctactgtcttcagcaaccatctcatcttccagcttcacctgattgtccagttatcatacatttgactttcaaatgtatgaaccagcatgtaccccatggatttaatcttatctaccccgtggattcaatcttcttatcagaaggttcttttatgtcaaaaaacctgctgtcaaggcttgaagagccggcacactcaatggcaaacacagcaccgagtctgctctgaatcctggaggatctggccctcctctcaatccccactcacagtcaccgtcttacaactcagggccacctgggatcagtcatcagtcagggtgcgtaagccttgaataccaggtagcctcaggagtgaaaagataaatgtcctagatcattaccttattcagtgtccccaccttgcagcgcattccaaccacctgggagcatttaaaactccagatgcccacaccacaccctggggccacccatcagaccttctggaagcaagacctgggcctccatggccccaaaaactccctaggtgatccgatgtgcagccaaatctgagaggccccatttaaaaaagaaagaacatgggtggtacattgaggagtatttacattttataaaatgacttaaaaatttgaaggcatttttgagcatttccaattatatggaagagttacttctacggaatagtttttgctcatggaactcaaacagatgaagcaccactgttacagaataatgtgctccagatgaaaatgtctcgtttctgtgaatttcatgaagagcagaacatttctcaagaatcctcttgagccagtaatcaatcctgtctcaaaaaatgttctttgccatttcctagatactgcacaaaagtggccatgtcgacatttgtccacccaccctccaataagctggagcgacaaagggacattccatccctgtacccttagtggtagccatgacacgatggccagatcatggactccggaaagctttctgtttttactggaaacatagcaaaccttgatttagctccaagaaattgagtagggaaatatttgttttttagcaattgtcatagtaaataaaactctaagcaagtgtatctac

SEQ ID NO: 44955 - DNA, 1983 bp, Homo Sapiens
cgagtaaagtttgcaaagaggcgcgggaggcggcagccgcagcgaggaggcggcggggaagaagcgcagtctccgggttgggggcgggggcggggggggcgccaaggagccgggtggggggcggcggccagcatgcggccccgcagcgccctgccccgcctgctgctgccgctgctgctgctgcccgccgccgggccggcccagttccacggggagaagggcatctccatcccggaccacggcttctgccagcccatctccatcccgctgtgcacggacatcgcctacaaccagaccatcatgcccaaccttctgggccacacgaaccaggaggacgcaggcctagaggtgcaccagttctatccgctggtgaaggtgcagtgctcgcccgaactgcgcttcttcctgtgctccatgtacgcacccgtgtgcaccgtgctggaacaggccatcccgccgtgccgctctatctgtgagcgcgcgcgccagggctgcgaagccctcatgaacaagttcggttttcagtggcccgagcgcctgcgctgcgagcacttcccgcgccacggcgccgagcagatctgcgtcggccagaaccactccgaggacggagctcccgcgctactcaccaccgcgccgccgccgggactgcagccgggtgccgggggcaccccgggtggcccgggcggcggcggcgctcccccgcgctacgccacgctggagcaccccttccactgcccgcgcgtcctcaaggtgccatcctatctcagctacaagtttctgggcgagcgtgattgtgctgcgccctgcgaacctgcgcggcccgatggttccatgttcttctcacaggaggagacgcgtttcgcgcgcctctggatcctcacctggtcggtgctgtgctgcgcttccaccttcttcactgtcaccacgtacttggtagacatgcagcgcttccgctacccagagcggcctatcatttttctgtcgggctgctacaccatggtgtcggtggcctacatcgcgggcttcgtgctccaggagcgcgtggtgtgcaacgagcgcttctccgaggacggttaccgcacggtggtgcagggcaccaagaaggagggctgcaccatcctcttcatgatgctctacttcttcagcatggccagctccatctggtgggtcatcctgtcgctcacctggttcctggcagccggcatgaagtggggccacgaggccatcgaggccaactctcagtacttccacctggccgcctgggccgtgccggccgtcaagaccatcaccatcctggccatgggccagatcgacggcgacctgctgagcggcgtgtgcttcgtaggcctcaacagcctggacccgctgcggggcttcgtgctagcgccgctcttcgtgtacctgttcatcggcacgtccttcctcctggccggcttcgtgtcgctcttccgcatccgcaccatcatgaagcacgacggcaccaagaccgaaaagctggagcggctcatggtgcgcatcggcgtcttctccgtgctctacacagtgcccgccaccatcgtcatcgcttgctacttctacgagcaggccttccgcgagcactgggagcgctcgtgggtgagccagcactgcaagagcctggccatcccgtgcccggcgcactacacgccgcgcatgtcgcccgacttcacggtctacatgatcaaatacctcatgacgctcatcgtgggcatcacgtcgggcttctggatctggtcgggcaagacgctgcactcgtggaggaagttctacactcgcctcaccaacagccgacacggtgagaccaccgtgtgagggacgcccccaggccggaaccgcgcggcgctttcctccgcccggggtggggcccctacagactccgtattttatttttttaaataaaaaacgatcgaaaccatttcacttttaggttgctttttaaaagagaactctctgcccaacaccccc

SEQ ID NO: 44956 - DNA, 264 bp, Homo Sapiens
caccagcgggtgcacacgggggagcggccctacgagtgtgacgcgtgtgggaaagccttcagccagagcacgcacctgactcaacaccagcgcatccacaccggggagaagccctacaagtgtgacgcgtgtggccgagccttcagcgactgctcagccctgatccgacatctgagaatccactctggagagaagccatatcagtgtaaggtttgtccgaaggcctttgcacagagctcctccctcattgagcaccagaggatc

SEQ ID NO: 44957 - DNA, 360 bp, Homo Sapiens
atggcaggcctgatgaccatagtaaccagccttctgttccttggtgtctgtgcccaccacatcatccctacgggctctgtggtcatcccctctccctgctgcatgttctttgtttccaagagaattcctgagaaccgagtggtcagctaccagctgtccagcaggagcacatgcctcaaggcaggagtgatcttcaccaccaagaagggccagcagttctgtggcgaccccaagcaggagtgggtccagaggtacatgaagaacctggacgccaagcagaagaaggcttcccctagggccagggcagtggctgtcaagggccctgtccagagatatcctggcaaccaaaccacctgctaa

SEQ ID NO: 44958 - DNA, 3895 bp, Homo Sapiens
agagcagctggcagcgcggcgggcagcgtttgccgagcgggcgctccgggtcgcacgcaagtccgcgcggggtccgggccacgcacgcggtttcatcgccatccccagccgggccacgcgcgcaggcagacaagctgttcgcggcgaccggagagcgccgacaccatgtggatccaggttcggaccatggacgggaggcagacccacacggtggactcgctgtccaggctgaccaaggtggaggagctgaggcggaagatccaggagctgttccacgtggagccaggcctgcagaggctgttctacaggggcaaacagatggaggacggccataccctcttcgactacgaggtccgcctgaatgacaccatccagctcctggtccgccagagcctcgtgctcccccacagcaccaaggagcgggactccgagctctccgacaccgactccggctgctgcctgggccagagtgagtcagacaagtcctccacccacggtgaggcggccgccgagactgacagcaggccagccgatgaggacatgtgggatgagacggaattggggctgtacaaggtcaatgagtacgtcgatgctcgggacacgaacatgggggcgtggtttgaggcgcaggtggtcagggtgacgcggaaggccccctcccgggacgagccctgcagctccacgtccaggccggcgctggaggaggacgtcatttaccacgtgaaatacgacgactacccggagaacggcgtggtccagatgaactccagggacgtccgagcgcgcgcccgcaccatcatcaagtggcaggacctggaggtgggccaggtggtcatgctcaactacaaccccgacaaccccaaggagcggggcttctggtacgacgcggagatctccaggaagcgcgagaccaggacggcgcgggaactctacgccaacgtggtgctgggggatgattctctgaacgactgtcggatcatcttcgtggacgaagtcttcaagattgagcggccgggtgaagggagccccatggttgacaaccccatgagacggaagagcgggccgtcctgcaagcactgcaaggacgacgtgaacagactctgccgggtctgcgcctgccacctgtgcgggggccggcaggaccccgacaagcagctcatgtgcgatgagtgcgacatggccttccacatctactgcctggacccgcccctcagcagtgttcccagcgaggacgagtggtactgccctgagtgccggaatgatgccagcgaggtggtactggcgggagagcggctgagagagagcaagaagaaggcgaagatggcctcggccacatcgtcctcacagcgggactggggcaagggcatggcctgtgtgggccgcaccaaggaatgtaccatcgtcccgtccaaccactacggacccatcccggggatccccgtgggcaccatgtggcggttccgagtccaggtcagcgagtcgggtgtccatcggccccacgtggctggcatacacggccggagcaacgacggagcgtactccctagtcctggcggggggctatgaggatgatgtggaccatgggaattttttcacatacacgggtagtggtggtcgagatctttccggcaacaagaggaccgcggaacagtcttgtgatcagaaactcaccaacaccaacagggcgctggctctcaactgctttgctcccatcaatgaccaagaaggggccgaggccaaggactggcggtcggggaagccggtcagggtggtgcgcaatgtcaagggtggcaagaatagcaagtacgcccccgctgagggcaaccgctacgatggcatctacaaggttgtgaaatactggcccgagaaggggaagtccgggtttctcgtgtggcgctaccttctgcggagggacgatgatgagcctggcccttggacgaaggaggggaaggaccggatcaagaagctggggctgaccatgcagtatccagaaggctacctggaagccctggccaaccgagagcgagagaaggagaacagcaagagggaggaggaggagcagcaggaggggggcttcgcgtcccccaggacgggcaagggcaagtggaagcggaagtcggcaggaggtggcccgagcagggcgggtccgcgccggacatccaagaaaaccaaggtggagccctacagtctcacggcccagcagagcagcctcatcagagaggacaagagcaacgccaagctgtggaatgaggtcctggcgtcactcaaggaccggccggcgagcggcagcccgttccagttgttcctgagtaaagtggaggagacgttccagtgtatctgctgtcaggagctggtgttccggcccatcacgaccgtgtgccagcacaacgtgtgcaaggactgcctggacagatcctttcgggcacaggtgttcagctgccctgcctgccgctacgacctgggccgcagctatgccatgcaggtgaaccagcctctgcagaccgtcctcaaccagctcttccccggctacggcaatggccggtgatctccaagcacttctcgacaggcgttttgctgaaaacgtgtcggagggctcgttcatcggcactgattttgttcttagtgggcttaacttaaacaggtagtgtttcctccgttccctaaaaaggtttgtcttcctttttttttttatttttatttttcaaatctatacattttcaggaatttatgtattctggctaaaagttggacttctcagtattgtgtttagttctttgaaaacataaaagcctgcaatttctcgacaaaacaacacaagattttttaaagatggaatcagaaactacgtggtgtggaggctgttgatgtttctggtgtcaagttctcagaagttgctgccaccaactctttaagaaggcgacaggatcagtccttctctcgggttctggcccccaaggtcagagcaagcatcttcctgacagcattttgtcatctaaagtccagtgacatggttccccgtggtggcccgtggcagcccgtggcatggcgtggctcagctgtctgttgaagttgttgcaaggaaaagaggaaacatctcgggcctagttcaaacctttgcctcaaagccatcccccaccagactgcttagcgtctgagatccgcgtgaaaagtcctctgcccacgagagcagggagttggggccacgcagaaatggcctcaaggggactctgctccacgtggggccaggcgtgtgactgacgctgtccgacgaaggcggccacggacggacgccagcacacgaagtcacgtgcaagtgcctttgattcgttccttctttctaaagacgacagtctttgttgttagcactgaattattgaaaatgtcaaccagattctagaaactgcggtcatccagttcttcctgacaccggatgggtgcttgggaaccgtttgagccttatagatcatttacattcaatttttttaactcagcaagtgagaacttacaagagggtttttttaaaatttttttttctcttaatgaacacattttctaaatgaattttttttgtagttactgtatatgtaccaagaaagatataacgttagggtttggttgtttttgtttttgtattttttttcttttgaaagggtttgttaatttttctaattttaccaaagtttgcagcctatacctcaataaaacagggatattttaaatcacatacctgcagacaaactggagcaatgttatttttaaagggtttttttcacctccttattcttagattattaatgtattagggaagaatgagacaattttgtgtaggctttttctaaagtccagtactttgtccagattttagattctcagaataaatgtttttcacagataga

SEQ ID NO: 44959 - DNA, 637 bp, Homo Sapiens
tggtgcgcgctgttttctaatcacgtggctgccacccaggcctctctgctcctgtcttttgtttggatgccggcgctgctgcctgtggcctcccgccttttgttgctaccccgagtcttgctgaccatggcctctggaagccctccgacccagccctcgccggcctcggattccggctctggctacgttccgggctcggtctctgcagcctttgttacttgccccaacgagaaggtcgccaaggagatcgccagggccgtggtggagaagcgcctagcagcctgcgtcaacctcatccctcagattacatccatctatgagtggaaagggaagatcgaggaagacagtgaggtgctgatgatgattaaaacccaaagttccttggtcccagctttgacagattttgttcgttctgtgcacccttacgaagtggccgaggtaattgcattgcctgtggaacaggggaactttccgtacctgcagtgggtgcgccaggtcacagagtcagtttctgactctatcacagtcctgccatgatgagccctgttcctgctcatcatgaagatccccgcgatacttcaacgccttctgacttccaggtgatgactgggcccccaataaatcccgtctttgggtc

SEQ ID NO: 44960 - DNA, 361 bp, Homo Sapiens
gggggaattggaggcttctaggagggtggcacggtgcacgccaagatggctgtgtccacagaggagctggaggccacggttcaggaagtcctggggagactgaagagccaccagtttttccagtccacatgggacactgttgccttcattgttttcctcaccttcatgggcaccgtgctgctcctgctgctgctggtcgtcgcccactgctgctgctgcagctcccccgggccccgcagggaaagccccaggaaggtgagcccctggaaggaaagacccaagggagtggataacttggccctggaaccctgaccctgtgtctcctgcccggtggcagtaacaaagccttctgtctgcccag

SEQ ID NO: 44961 - DNA, 1546 bp, Homo Sapiens
cacggccggagagacgcggaggaggagacatgagccggcgggcgcccagacggagcggccgtgacgctttcgcgctgcagccgcgcgccccgaccccggagcgctgacccctggccccacgcagctccgcgcccgggccggagagcgcaactcggcttccagacccgccgcgcatgctgtccccggactgagccgggcagccagcctcccacggacgcccggacggccggccggccagcagtgagcgagcttccccgcaccggccaggcgcctcctgcacagcggctgccgccccgcagcccctgcgccagcccggagggcgcagcgctcgggaggagccgcgcggggcgctgatgccgcagggcgcgccgcggagcgccccggagcagcagagtctgcagcagcagcagccggcgaggagggagcagcagcagcggcggcggcggcggcggcggcggcggaggcgcccggtcccggccgcgcggagcggacatgtgcaggctgggctaggagccgccgcctccctcccgcccagcgatgtattcagcgccctccgcctgcacttgcctgtgtttacacttcctgctgctgtgcttccaggtacaggtgctggttgccgaggagaacgtggacttccgcatccacgtggagaaccagacgcgggctcgggacgatgtgagccgtaagcagctgcggctgtaccagctctacagccggaccagtgggaaacacatccaggtcctgggccgcaggatcagtgcccgcggcgaggatggggacaagtatgcccagctcctagtggagacagacaccttcggtagtcaagtccggatcaagggcaaggagacggaattctacctgtgcatgaaccgcaaaggcaagctcgtggggaagcccgatggcaccagcaaggagtgtgtgttcatcgagaaggttctggagaacaactacacggccctgatgtcggctaagtactccggctggtacgtgggcttcaccaagaaggggcggccgcggaagggccccaagacccgggagaaccagcaggacgtgcatttcatgaagcgctaccccaaggggcagccggagcttcagaagcccttcaagtacacgacggtgaccaagaggtcccgtcggatccggcccacacaccctgcctaggccaccccgccgcggcccctcaggtcgccctggccacactcacactcccagaaaactgcatcagaggaatatttttacatgaaaaataaggaagaagctctatttttgtacattgtgtttaaaagaagacaaaaactgaaccaaaactcttggggggaggggtgataaggattttattgttgacttgaaacccccgatgacaaaagactcacgcaaagggactgtagtcaacccacaggtgcttgtctctctctaggaacagacaactctaaactcgtccccagaggaggacttgaatgaggaaaccaacactttgagaaaccaaagtcctttttcccaaaggttctgaaaggaaaaaaaaaaaaaacaaaaaaaaagaaaaaca

SEQ ID NO: 44962 - DNA, 1803 bp, Homo Sapiens
cagggcgcgggcgcccgccctgctctgtgacgcgcggcccgaggcgcacgcagggctcacaccacttgtcctggcctccgacccgggccgactatggcggcgctgcggctcctggcgtcagtgctcgggcgcggggtccccgccggcggctcagggctcgcgctgtcccagggctgcgcccgctgctttgccaccagtccccggccccgtgccaagttctacgcggacccggtggagatggtgaaggacatctctgacggggcgaccgtcatgatcgggggcttcgggctctgcgggatccccgagaacctgatcgccgcgctgctcaggacccgcgtgaaagacctgcaggtggtcagcagcaacgtgggcgtggaggacttcggcctgggcctcctgctggccgccaggcaggtccgtcgcatcgtctgttcctacgtgggcgagaacaccctgtgcgagagccagtacctggcaggagagctggagctggagctcacgccccagggcaccctggccgagcgcatccgcgcggggggcgccggggtgcccgccttctacacccccacgggctacgggaccctggtccaggaagggggcgcccccatccgctacaccccggacggccacctggcgctcatgagccagccccgagaggtgagggagttcaacggcgaccacttccttttggagcgcgccatccgggcagacttcgccctggtgaaagggtggaaggccgaccgggcaggaaacgtggtcttcaggagaagcgcccgcaatttcaacgtgcccatgtgcaaagctgcagacgtcacggcggtggaggtggggttccccccagaagacatccacgttcctaacatttatgtaggtcgcgtgataaaggggcagaaatacgagaaacgaattgagcgcttaacgatccggaaagaggaagatggagacgctggaaaggaagaggacgccaggacgcgcatcatcagacgcgcagctctggaatttgaggacggcatgtacgccaatctgggcataggcatccccctgctggccagcaacttcatcagtcccagcatgactgtccatcttcacagtgagaacgggatcctgggcctgggcccgtttcccacggaagatgaggtggatgccgacctcatcaatgcaggcaagcagacggtcacggtgcttcccgggggctgcttcttcgccagcgacgactccttcgccatgatccgagggggacacatccaactaaccatgcttggagccatgcaggtttccaaatacggcgacctggcgaactggatgatccctggcaagaaggtgaaaggcatgggcggtgccatggacttggtgtccagtcagaagaccagagtggtggtcaccatgcagcactgcacaaaggacaacacccccaagatcatggagaaatgcaccatgccgctgaccgggaagcggtgcgtggaccgcatcatcaccgagaaggccgtgtttgacgtgcacaggaagaaaaggctgacgctgagggagctctgggagggcctgacggtggacgacatcaaaaagagcacggggtgtgcctttgctgtgtccccgaacctcaggcccatgcagcaggtggtaccctgacgggacctggatctgggcggggtggtgcgctcctcagggcggatgccaccgggttccccaggggaatacatgtccccagctctgggaggggtttgctactggcctcctactttcctccctaggtggacagtgctcctctagagagctgcgactttaattaaaaacaacaggaaaaca

SEQ ID NO: 44963 - DNA, 3128 bp, Homo Sapiens
gagtctttttctcctgccttctcctggagatgaagagaactgcaaacactgtgtactgctgcacgcgggcctcccccaggccaacagaactgctgggtatatccgcaccatgtacctggggattcagagccagcggcggaaggaacaccagcgacgcttctactgggctatgatgtatgaatatgcagacgtcaacatgctgcgcctcctggagaccttcctggagagcgcgccccaactggtgctacagctctacatcatgctccagaagaacagcgccgagaccctgccctgtgtctcctctgtgacttccctgatgtccctggcttgggtgctagcctcctatcacaagctgctgcgggactccagggacgacaagaagagcatgagctacagaggggccatcatccaggtcttctggcgcctcttcaccatctcatcccgagtgatctcttttgccctctttgcttccatcttccagctctattttgggatcttcgtggtggttcactggtgcgccatggccttctggatcatccatggcggaacagacttctgcatgtccaagtgggaggagatcctcttcaacatggtggtagggatcgtgtacattttctgctggtttaacgtcaaggaagggcggactcgatatcgaatgtttgcatattatacgatagtcttgaccgagaatgctgccttgacgttcctttggtatttttacagagacccggagaccactgactcctatgcggtgccagcactgtgttgtgtctttattagctttgtggctgggatcgcaatgatgctcttatactatggcgtgctgcatcccacaggaccacgagctaagatccttgccagctcctgttgtgccgagctgctctggggcatccctttgccccccgatgttgagcccatggcgcctgagatccctgggtaccgggggacccaggttacgcccaccagagccgtaacggaacaacaggaggatctcacggctgacacttgcttgcctgttttccaagtgagacccatggggccccctaccccgttggggcgtccttacctcccagaagggcccctcattaagattgacatgccaagaaagcgatacccagcttgggatgctcattttgtagacaggaggctgagaaggactattaacattctacaatatgtcacccccaccgcagtaggcattcgatatcgagacggaccactcctctatgagttgctacagtatgagtcttcactctaagagcatcttgaccaagttgagaaggggaccttaagtttggtttgcggcaaacagcacttgcaagaaatataaccctcccttcccccaatacacagaaccaccgccaccaccaccaacaccgccacaccaacaccaccactacaaaaaaaaaagaattaataagtcacaaccccttcaaataagctttctttccagtcgctgtatgtatacaaagatattctctatgttttgtaagtaaaaacaaaaagaaaacctttcttttgttttttacacataagaaacagtattgaaaaatcccacgctatggttcatagggtggagaaggaggagttatctccactccaaaagaaaaaaaaaaagttttttaccttacaccaagtgtagatcatttatgggattggtgctgattgaaagaacaaaacaaaacaaaacaaacacaaacaaacaaaaaaccttcaactgccttatgcccttaggtgctgagtttcattaagtactgtcacgttttctcatgcaaaactctctggtgatttttgcaccagaagagggaaaattaaacaattaaatgaaacaaatctaaaagtgaaacaaaaaccaaccaacaaatacaacacaaagcaattattcttcctatctgattatttgtattgaagaaaacaaatttaccaaaagcaaaagcataaacccctccctcttttcagtttctccccctcctctcctgaccttctccccactttgcagagccttctaggagctcaagggctgtttgaaactcaaatggctggagaagctacttgaaggctgattatgtgccattttagcatttgcctagcaagaatcacattcgtttcccagtgaaaagcaaaccagaacaaaacaaaaagccaccgcaataattcggtaaggacaggatattctaaagcaaattaaaggagatttctgtacacatagtcagtaataataaaactcagcatagtagcaaaaagaacgacatcagtttaaaggcacaatacttaatcagtgactggcaacaacgattagttccatcattttaaggctgtgaatggtagacatttatcacatgtgatattgtgtaaagcctcttctgtttccatttggtgggaagccttaaattgatctggaaagaattcttcatttttcatttgtgcttttttaaaaaaaaaaataacacaaagaggaaaactagaatatatatatatatatacatatatataaaaagtcaaaattgtaataactgacccatttcaaagactgtttggtgcttctgtctttcaccattgtggttggctgaaaatcattcagctcacctggtgcatctgggttgaatgggaaattttgtgtgtgtagtatgtgtgtgtttgtgtgtgtatgtgtgtgtgtgcccatagcacacgtatatatgtgtgtgtccctgctgcaaagtcttgccagagatatacaaaactgatgtaagacgaacttggatcacggcttggttcagcagagcatgggggcgggggctctggagtggtggggaagtgatgctgcctgcccacgagccctggtttgggtggcaagactcacaccagcagcggactgcaggccttagaggccatgccatttgggtgaggatttgattccactgtttattttctcattgtatcaagttgaatttctgcaggtgttgcaagtatgttcaacgatttaaatttttttttatttttcaaagtattgttcctttaaagaatatttctgttctagggcatcgtttcaatcgcatcgtatctctacttgggcacaaaaaaaaaggaaaagaaaaaaaatcacaaaaaagatatataataagtatatatatatatatatatataaa

SEQ ID NO: 44964 - DNA, 1338 bp, Homo Sapiens
tctctcctgttcttccagaagccagtcacctttgaggatgtggcagtgaatttcacccaggaagagtgggactgtctagatgccagccagagggtcctttaccaggatgttatgtcggaaacctttaagaatctaacatctgtggccagaatctttctgcataagccagagctaatcaccaagcttgagcaagaagaggaacagtggagagagacccgggtgcttcaagcatcccaggctgggccaccctttttttgctacacctgtggcaaatgtttcagcaggcgctcctacctctatagccaccagtttgttcacaatcccaagctgactaacagctgcagtcagtgtgggaagttgtttcggagccccaagtccctcagctatcacagacgcatgcatcttggggagaggcccttctgttgcacgctctgtgacaagacctactgtgatgcttctggactaagtcgtcaccgccgcgtccatctgggttaccggccccattcatgctctgtgtgtgggaagagcttccgggaccagtctgagctcaaacgccaccagaagatacaccaaaaccaggagccagtggatggaaaccaggagtgtactttgaggattccaggcacccaggctgaattccagacacccatcgccagaagccagaggtccatccaggggcttttggatgtgaaccatgcaccagtggccaggtcccaggaacccatatttagaactgagggtcctatggcccagaaccaggcatctgtacttaagaaccaagcacctgtgaccaggacccaggcacccatcactggaaccctctgtcaggttgccagatccaactctcatccagtgaagccctcaagactcaatgtcttctgttgcccccattgttctttgacttttagcaagaaatcctatctctccagacaccagaaggcccacctcacagagccgcccaactactgcttccattgcagcaagtctttcagctcattttccaggctggtcagacaccagcagacccactggaagcagaagagctacctttgccctatctgtgacctctcctttggggagaaagagggccttatggatcactggaggggctataaaggcaaggacctgtgccagagcagccaccataaatgccgggtgatcctgggccagtggcttggcttctctcatgatgtccccactatggctggggaggaatggaagcatggaggtgatcaatctccccccaggatccatacccccaggagaagaggcctaagagagaaggcctgcaaaggagacaaaacaaaggaggcagtgagcatcttgaaacataaataa

SEQ ID NO: 44965 - DNA, 2073 bp, Homo Sapiens
gtttccacaataaaactttttctaccagatggtatggaagcccggctccgctcagatgtcatccatgcaccattaccaagtcctgttgacaaagttgctgctaacactccaagtatgtactctcaggaactattccagctttctcagtatctacaggaggccttacatcgggaacaaatgttggaacagaagttagccacgcttcagcggctactagccatcacccaagaggcttcagataccagttggcaggctttaatagatgaagatagactcttatcacggttagaagttatgggaaaccaattacaggcatgctccaaaaatcaaacagaagatagtttacgaaaggaacttatagcattacaagaggataaacataactatgagacaacagccaaagagtccctgaggcgggttcttcaggagaaaattgaagtggttagaaaactttcagaagttgagcgaagtctgagtaatactgaagatgaatgtacccatctgaaagaaatgaatgaaaggactcaggaagaattaagagaattagccaacaaatataatggagcagttaatgagattaaagatttatctgataaattaaaggtagcagagggaaaacaagaggaaatccaacagaagggacaggctgagaaaaaagaattacaacataaaatagatgaaatggaagaaaaagaacaggagctccaggcaaaaatagaagctttgcaagctgataatgatttcaccaatgaaaggctaacagctttacaagagcacttgctttcaaagagtggcggggactgcacttttattcatcaattcatagaatgccagaagaagctgatcgtcgaagggcatctaaccaaagcggtagaagaaacaaagctttcaaaagaaaatcagacaagagcaaaagaatctgatttttcagatactctgagtccaagcaaggaaaaaagcagtgacgacactacagacgcccaaatggatgagcaagacctaaatgagcctcttgccaaagtgtcccttttaaaagatgacttgcagggtgcacagtcagaaattgaggcaaagcaagaaatacagcatcttcgaaaggaattgatcgaagcccaggagctagctagaacaagtaaacaaaaatgctttgaacttcaagctcttttggaagaagaaagaaaagcctatcgaaatcaagttgaggaatccactaaacaaatacaggttcttcaagcccaattgcagaggttacacatcgatactgagaatctccgggaggagaaggacagtgaaatcacaagtactagagatgaattgcttagtgcccgagatgaaattttgctccttcatcaagcagcagcaaaggttgcctctgagcgggacactgacattgcttctttacaagaagagcttaagaaggtgagagctgagcttgagcggtggcggaaagcagcgtctgaatatgagaaagaaatcacaagtctgcaaaacagttttcagcttagatgtcaacagtgtgaggaccagcagagagaagaagcaacaaggttgcaaggtgaactagagaagttgagaaaggaatggaatgcattggaaaccgaatgccattctctaaaaagggaaaatgttttgctatcatcagaactgcaacggcaagaaaaagaattgcacaattctcagaagcagagtttagagcttaccagtgatctcagcatccttcaaatgtctaggaaagaacttgagaatcaagtgggatccttgaaagaacagcatcttcgggattcagctgatttaaaaactcttctcagtaaggcagaaaaccaagcaaaggatgtgcagaaagagtatgaaaagacacagactgtactctcagaactgaagttgaagtttgaaatgactgagcaggaaaagcagtcaatcacagatgagctcaaacagtgtaaaaacaacctgaagctgctccgagagaaaggaaataataaaccctggccctggatgcccatgttggctgccctggttgcagtaacagccatcgtgctgtacgtgccaggtctggccagagcttctccatga

SEQ ID NO: 44966 - DNA, 2196 bp, Homo Sapiens
atggtgcagatgatgaggcagtttctgtaccgggtcctgcccgaggactcctacaaggtcaccacggggaagctccatgtgagcctcacccgcttaacggacggggagaatgtggtggtttcagagttcacgtccaaggaggagctcattgaggcagccctatactgcagctgcttcgtcccggtgtactgtggcctcatccccccgacttaccgcggtgtgaggtacatcgatgggggcttcacgggcatgcagccctgtgccttctggaccgacgccatcaccatctccaccttcagtgggcagcaggacatctgtccccgggactgcccggccatcttccacgacttccgcatgttcaactgctccttccagttctccctggagaacatcgccaggatgacccacgcattgttccccccggacctggtgatcctgcacgattactactaccgagggtacgaggatgcagttttgtacttgaggcggctgaatgctgtttatcttaattcttcctccaagagagtgattttcccccgggtggaagtgtactgccagatagaactcgcccttggcaatgagtgccctgaacgcagtcaaccaagccttcgagcacggcaggccagtctggaaggagccacacaacctcacaaggagtgggttcccaaaggggatggaaggggcagccatggtccgcctgtgtcccaacctgtgcagacacttgaattcacatgcgagtcacctgtttcagcaccagtctctccacttgagcagccacctgcacagccactggcctcttcaactccactttctctaagtggcatgccacctgtatcattcccagctgtgcacaagccacccagctccacacctggttcatcactgcccaccccaccacctggactgtcacctctgtcacctcagcagcaggtacaaccgtctggatcaccagccagatccctacactctcaggcacccacttcacccaggccatccctggggccttcaactgtgggggcacctcaaacactgccccgaagttctctttcagccttccctgctcagccacctgtggaggaactaggccaagaacagccccaagctgtagctcttcttgtctcttcaaaaccaaaaagcgccgtgcctctggttcatgtgaaggaaaccgtcagcaagccttatgtaacggagagccctgctgaagactcaaactgggtgaataaggtcttcaagaagaacaagcaaaagacaagtggcaccagaaaaggcttcccaagacattcgggatccaaaaaaccaagcagcaaagtgcagtgagcatgtctaatgttccttaaatcccacggagaggagcagctttgggaactgtgttcagagagattccgaggaatagaggagagtgtaagggagtagggggtgcagtgggagattgggctttggaacagacacatccgacataaaattcctgctctgccacagctccactcagggatcatggttgggacacttgctctccctgagcctccatttcctgtaaaatggggatgataccacttcataaagttgtgagagttaaatgtgatcgatgatgtaaattgcttcatagaatgcagaatgtgtaatagctcacaataagtaggtattatgtttacatattatgtttgtatttatgctacttaaatacaaaactggacaggccaggcatggtggctcatgcctgtaatcccagcactttgggaggctgaggtaggtggaaaacctgaggtcaggagttcaagaacagcctgaccaacatggtgaaactccatctctactaaaaatacaaaaattaaccaggcttgatggtgtgcacctgtaatctcagctactcgggaggctgaggcaagagaatcgcttgaacccaggaggcagaggttgcagtgcaccaagactgcgccattgcactccagcccgggcaacaagagcgaaaccccatctcgaaaaaaaacaaaacaaaactagacaagtgagtgcctacgtgacactcaaatgttgccagcatacagttaagggccctagtcaatgtaggcctgcttcttatagctttttgactatattatgctgtctttgacttagtcagtcaacacttattgagcacctactaagtgccaaacactctcctggactctggcaaaataaaaaatgaattaaaactct

SEQ ID NO: 44967 - DNA, 948 bp, Homo Sapiens
atgggagactggaataacagtgatgctgtggagcccatatttatcctgaggggttttcctggactggagtatgttcattcttggctctccatcctcttctgtcttgcatatttggtagcatttatgggtaatgttaccatcctgtctgtcatttggatagaatcctctctccatcagcccatgtattactttatttccatcttagcagtgaatgacctggggatgtccctgtctacacttcccaccatgcttgctgtgttatggttggatgctccagagatccaggcaagtgcttgctatgctcagctgttcttcatccacacattcacattcctggagtcctcagtgttgctggccatggcctttgaccgttttgttgctatctgccatccactgcactaccccaccatcctcaccaacagtgtaattggcaaaattggtttggcctgtttgctacgaagcttgggagttgtacttcccacacctttgctactgagacactatcactactgccatggcaatgccctctctcacgccttctgtttgcaccaggatgttctaagattatcctgtacagatgccaggaccaacagtatttatgggctttgtgtagtcattgccacactaggtgtggattcaatcttcatacttctttcttatgttctgattcttaatactgtgctggatattgcatctcgtgaagagcagctaaaggcactcaacacatgtgtatcccatatctgtgtggtgcttatcttctttgtgccagttattggggtgtcaatggtccatcgctttgggaagcatctgtctcccatagtccacatcctcatggcagacatctaccttcttcttcccccagtccttaaccctattgtctatagtgtcagaacaaagcagattcgtctaggaattctccacaagtttgtcctaaggaggaggttttaa

SEQ ID NO: 44968 - DNA, 537 bp, Homo Sapiens
aggtgcgtcagtcgttacatccgtagatatttggaggtatataaccccaccccacccccaggcgtccggcaccccaacatcatctgtgactgctgcaagaagcacgggctgcgggggatgcgctggaagtgccgtgtgtgcctggactacgacctctgcacgcagtgctacatgcacaacaagcatgagctcgcccacgccttcgaccgctacgagaccgctcactcgcgccctgtcacactgagtccccgccagggcctcccgaggatcccactaaggggcatcttccagggagcgaaggtggtgcgaggccccgactgggagtggggctcacaggatggaggggaagggaaaccgggccgtgtggtggacatccgtggctgggatgtggagacaggccggagtgtggccagcgtgacgtgggctgatggtaccaccaatgtgtaccgtgtgggccacaagggcaaggtggacctcaagtgtgtgggcgaggcagcgggcggcttctactacaaggaccacctcccaaggctcggt

SEQ ID NO: 44969 - DNA, 690 bp, Homo Sapiens
cggcgggccccgctctggctcggactctgggtgggtctgggtctccggccgactttccgtgtctgctccccgagtctctgcgggccgctctggccctctgccagtctgtgtgtgtgggggtctgtctctgagactctttgcctgtctctgggtctctgtccctctttctccgccgctgaccggctgtctcgccccagttgtgcctgtgtgtgtggtgggggtgtctctgcctctgccccttcctatctctgcctgtctccctttatctctctgcctctcatttctcttgctgcctgtgcgtctctgagtcttctttgcctgtctctccctgcgtgtctctctctctgtctctgtggagtctctcgacctctgtcgctcacttctgtctctttatcctttttcttaggggctccattgcgtccctgctcggcccttgggacagccctggggcccggtttgttttgtgctttggcacccaggagggtgagagagttagtgggggcgaggcagctgtggggggtgcggctgggaaatcccttcaaggagcctctccttccttcccccactgctccaggctctgccttgccctgctctgccctgcccggggctccgagtccaggggacatgcctggctgtgtactacactgcacttcgcatcgtggggcctcagtttccctagctgtgaaatga

SEQ ID NO: 44970 - DNA, 468 bp, Homo Sapiens
atgcccaagttttattgtgactactgcaatacatacctcacccatgactctcctcctgtgagaaagacacactgcagtggtaggaaacacaaagagaatgtgaaagactactatcagaaatggatgaaagagcaggctcagagcctgattgacaaaacaacggctgcatttcaacaaggaaagatacctcctgctccattctctgctcctcctcctgtaggagcaatgataccacctccccctagtcttccaggtcctcctcaccctggtatgatgccagcaccccatatgaggggtcctgccatgatgccaatgatgggccctcctcctcctgggatgatgccagggggacctgctcctggaatgaggccgcttatgggaggccacaggccaatgatgcctgggtccccagtgataagacctcctgcctgtcccatgatggtgcccactcggcccagaaagacttga

SEQ ID NO: 44971 - DNA, 708 bp, Homo Sapiens
tacgatgaaatggtggagtcaatgaagaaagtagcagggatggatgtggagctgacagatgaagaaagaaacctcctatctgttgcatatgagaatgtgattggagctagaagaacctcctggagaataatcagcagcattgaacagaaagaagaaaacaagggaggagaaaacaagctagaaatgattcgggaatatcagcaaatggttgagactgagctaaagttaatctgttgtgacattctggatgtactggacaaacatctgattgcagcagctaacactggcgagtccaaggttttctattataaaacgaaatggtactaccacaggtatctggcagaatttgccacaggaaatgacaggaaggaggctgcgaagaacagcatagtggcttataaagctgctagtgatattgcaatgacagaacttccaccagcgcatcctattcgcttaggtcttgctctcaatttttccatattctactacgaaattcttaattcccctgaccgtgcttgcaggttggcaaaagcagctttcaatgatgcagttgtagaactggatacgctgagtgaagaaagctataaggactgtaaacttatcatgcagttgttacgtgataatctgacactatggacttcagatatgcagggtgatggtgaagagcagaataaagaagtgctgcaggacgtggaagacaaaaatcag

SEQ ID NO: 44972 - DNA, 1688 bp, Homo Sapiens
gccccgggcaccatggcccaggccctgggggaggacctggtgcagcctcccgagctgcaggatgactccagctccttggggtccgactcagagctcagcgggcctggcccatatcgccaggccgaccgctatggattcattgggggcagctcagcagagccagggccgggccacccacctgcagacctcatccgccaacgggagatgaagtgggtggagatgacctcgcactgggagaaaaccatgtcccggcggtacaagaaggtaaagatgcagtgccggaaaggcatcccgtctgccctgcgcgcccgatgctggcccctgttgtgtggggcccatgtgtgccagaagaacagccctggcacctatcaggagctggcagaggcccctggagacccacagtggatggagaccattggcagggacctgcaccgtcaattccctctgcacgagatgtttgtgtcgcctcagggccacgggcagcaggggctcctgcaggtgctcaaggcctacaccctgtatcgaccggagcagggctactgccaggcccaggggcccgtggctgctgtgctgctcatgcacctgcccccagaggaggccttctggtgcctggtgcagatctgtgaggtctacctccctgggtactacgggccccacatggaggctgtgcggctggacgccgaggtgttcatggccctgctgcggcggctgcttccgcacgtgcacaagcacctgcagcaggtgggcgtcggacccctgctgtacctgcccgagtggttcctgtgcctcttcgcccgctccctgcccttccccacagtgctgcgtgtctgggatgccttcctcagtgagggtgccagagtactgttccgtgtggggctgacactggtgcgcctggcgctgggcactgcagagcagcgaggggcctgccctggcctcctggagacactgggagcccttcgagccatcccccccgcgcagctgcaggaggaggccttcatgtcacaggtgcacagcgtggtgctgtcagagcgggacctgcagcgggagatcaaggcccagctggcccagctgcccgattccgcgccgggacccccgccccggccacaggtccgcctcgccggggcccaagccatctttgaggcccagcagctggcaggagtgcgacgaggcgccaagcctgaggtgcctcggattgtggtgcagcccccggaggagcccagaccaccgcggcggaaaccccagacccgcggcaagactttccatgggctcctgactcgggcccggggcccccccatcgaggggccccccaggccccaacgaggctccacctccttcctggacacccgcttctgagaggaccatggacttagtgtcccccagtctcaattgcctgatggctgatgccggcccggcaaataggcaccgcactttactcttgggactcggggacttggcttccttcctggcaaggaccaggcagtggggaaggaggaggtcctccgtggtacatactgggtcaggcactagcatggaggagggtcacagagtggggcacgtgaggacccatggaaccgtcctggtgcccaggccctcacaagtaccaaagccagcaccaaaggagtcagggaaggggttggctgagtcaagggaccccagagggcaccaggaataaaatcttcttgaacaga

SEQ ID NO: 44973 - DNA, 2855 bp, Homo Sapiens
cctggcaatcccatgtggacttctggtagaatgagcaatgcaaagaactggcttggacttggcatgtccttgtacttctgggggctgatggaccttacgaccaccgttctctcggacaccccaacaccacaaggtgaattagaagcactcctgtcagacaagccacagtcacatcagcggaccaagaggagctgggtttggaaccagtttttcgttctggaagagtacactgggaccgaccctttgtatgtcggcaagcttcattcagatatggacaggggagacggatccatcaaatacatcctctcgggagaaggtgctggcatcgtgtttaccatcgacgacaccactggagacatccacgccattcagaggctcgaccgagaggaaagagcccagtatactctaagggctcaagccctagacaggcggacgggcaggccaatggagcccgagtcagagttcatcatcaaaattcaagacatcaatgacaatgagcccaagttcctggacggaccttatgtggccactgtgccagaaatgtcccctgtgggtacctccgtcatccaagtgacagccacagatgcagatgacccgacctacggcaacagtgccagggtggtgtacagcattcttcagggccagccatatttttctgtggactctaaaacaggtgtaattaggacagcgctcatgaacatggacagagaagccaaagaatactacgaagtgattatccaagccaaggacatgggagggcagcttggaggattagctgggaccacaacagtcaacatcaccctctcagatgtcaatgataacccaccccgctttccccagaaacattaccagatgagtgtgttggaatcagctccaattagctccactgtcgggagagtgtttgccaaggacttggatgaaggcatcaatgcagagatgaaatatactattgtggatggagatggtgcagatgcctttgacattagcacagatcccaatttccaagttggtatcataactgtgaagaagcccctgagttttgaaagcaagaaaagctacaccttaaaggtggagggagccaatcctcacctagagatgcgttttctgaacttgggcccatttcaggacacaacaacagtgcacatcagtgtggaagacgtggacgagccccctgtgtttgaacctggcttttactttgtggaggtgcctgaggatgtggcgattggaacaaccatacagatcatttctgccaaggacccagatgtgaccaacaactcaatcagatactccattgatagaagcagtgaccctggaagatttttctatgttgacattacaacaggtgccctaatgacagcaagacccctagaccgggaagaattttcttggcataatatcactgtccttgctatggaaatgaacaatccctcccaggttggaagtgttcctgtcacaatcaaagtcttagatgtgaatgacaatgctccagagttccccagattctatgaagcttttgtctgtgagaacgccaaggcaggacagctgatccagacagtgagtgcggtggaccaagatgacccacgcaatggtcagcatttctactacagcttggctcctgaggctgctaacaaccccaactttaccataagggacaaccaagataacacagcacggattctaaccaggaggtctggtttccggcagcaggagcagagtgtctttcacctgcctatcctgatagcagatagcgggcagcccgtgctgagcagcacaggcacactgaccatccaagtgtgcagctgtgatgacgacggccacgtcatgtcctgcagcccagaggcctacatgctcccagtcagtttgagccggggcgccctcattgccatcctcgcctgcatctttgtcctcttagtgctggtgttgctcattttgtccatgaggcggcaccggaaacaaccatacatcatcgacgacgaggaaaacatccacgagaacatcgtccgctacgacgacgagggcggcggcgaggaggacaccgaggccttcgacatcgcggccatgtggaacccccgggaggcgcaggcgggggccgcccccaagacgcggcaggacatgctgcccgagatcgagagcctctcccgctacgtgcctcagacgtgcgcagtgaacagcactgtccacagctacgtgctggccaagctctacgaggccgacatggacctgtgggcaccgcccttcgactccctccagacgtatatgttcgagggggacggctctgtggcggggtcgctgagctccctgcagtcggccacgtcggactcggaacagagcttcgacttcctgacggactgggggccccgcttccggaagctggccgagctctacggggcgtcggagggacccgcgccgctgtggtgacggaagccaggaggcaggcgcgcgtccaaatccagacgttctccgcgggtgcttcgcggacaaggtgcagccaaccacacgagcaatactgtgctggagagtgagaatgggggtgagcaggcgaacagagctctctctggatcagctttacttgggtagattaagttaaataagcaaaaggaaacccagaaggaagagggcagaatctttaattacctttttttcttttctttttgatttttctgacactgtgtgcgaaggcttggagtccaaggtgttctgacaagggtggcttttctctgccattcgctaaggcctttgtcacttttccaccacagaaaggctctggccttggatacagagatgccaattgaaagcagaaagttctactctcgtatctgttttttatcttatcttattctccatttaagagtttt

SEQ ID NO: 44974 - DNA, 2527 bp, Homo Sapiens
cagcggcggcccaggaggcagccggtgagcgcctgcgagcagagtggcgggggccgctgacaggtcccgcgcagcccagcccagcccagccacgcggctcacaggtggggtccaagagcagtttggagcaacccggcgctacggagaggggtggacggctctgcacgggcctcctgtctcccgctcgggcagagggactcggggggacctcgctccttggctgagagaacctgaactcgggcggagagaacgcgcccaggcgggcaaggggaccagagaaagccggggctggaagtcactgtcgctcgccactgtctggagcgcacggagcgcagaggcccggcagccgcgcgtgccctcacggggaccgagccagtgatgcaggatcgctgagcggagatccgcgccgagaagtctctcggggccggggctgagacgcacgccttcgacaccgctgccaagaccccgattccggcgactcttgcggggaaccgaggggccaaggctgccccaagctcaggacttgggcgagtctaagacgatggtttcttaagcacggacccgcgttccccttcccgctccctcgactggaggcagggatcctgcgcggggcccccgggattccgtttccccgcggagccccggccgctgcctcccgggacagttcgcacggccacaggggcgcacggcgatgtggcctccgtccagcgcgctggcccgccggggggatgctctggcacctgtcggggtccaggcctagcatggccggcgcgttgcccgacgtcgcctccggctaggatggcccctccgggcccggccagtgccctctccacctcggccgagccgctgtcccgcagcatcttccggaagttcttgctgatgctctgctccctgctcacgtccctttacgtcttctactgcctggccgagcgctgccagaccctgtccggccccgtcgtggggctgtccggcggcggcgaggaggcgggggcccctggtggcggcgtcctggccggaggcccgagggagctggcggtgtggccggcggcggcacagagaaagcgcctcctgcaactgccgcagtggcggaggcgccggccgcccgcgccccgcgacgacggcgaggaggcggcctgggaagaagagtcccctggcctgtcagggggtccgggcggctccggggccggaagcaccgtggccgaggccccgccggggaccctggcgctgctcctggacgaaggcagcaagcagctgccgcaggccatcatcatcggagtgaagaagggcggcacgcgggcgctgctggagttcctgcgcgtgcaccccgacgtgcgcgccgtgggcgccgagccccacttcttcgaccgcagctacgacaagggcctcgcctggtaccgggacctgatgcccagaaccctggacgggcagatcaccatggagaagacgcccagttacttcgtcacgcgggaggcccccgcgcgcatctcggccatgtccaaggacaccaagctcatcgtggtggtgcgggacccggtgaccagggccatctcggactacacgcagacgctgtccaagcggcccgacatccccaccttcgagagcttgacgttcaaaaacaggacagcgggcctcatcgacacgtcgtggagcgccatccagatcggcatctacgccaagcacctggagcactggctgcgccacttccccatccgccagatgctcttcgtgagcggcgagcggctcatcagcgacccggccggggagctgggccgcgtgcaagacttcctgggcctcaagaggatcatcacggacaagcacttctacttcaacaagaccaagggcttcccctgcctgaagaaggcggagggcagcagccggccccattgcctgggcaagaccaagggcaggacccatcctgagatcgaccgcgaggtggtgcgcaggctgcgcgagttctaccggcctttcaacctcaagttctaccagatgaccgggcacgactttggctgggatggataaccatataatttaaaaagaaaaaaaaaatcaaaatataatatatttttttaccaatcggtagagaagagacagtttaatatttgtgctgaaaatatgtttcagtatttttttcaatgaatgttaagagattgttctcactcccgccccatcttaatgtataaccaacaccaaacacgtggatcaacagaaaaggaaaatttcactcgtctaaacactttcaattttcagtttttattttatgttctatatacccagtcataaagtataagcatcagttgtcattaaaagttttcagaaaatcttgaggttaaacatctctctctctttttttaaaatacaaggccctgataaaattgatatctatccttatatttttctccctttttcccgtgccactttttcttaaattatttcccagttagtattatcatatgtttgtacccgtcacagttttcatagtgctttcaaatacacctttttgatcattaaaataaaaaaataaatcttg

SEQ ID NO: 44975 - DNA, 1813 bp, Homo Sapiens
agtatcagaggttctggtgatagcagtcattcacaatctcaaggggaaagatatcaacatttcactgaaaagactgaatttgctcttaaagaaatcatgtcctctggaggtgctgaagatgatatcccacagggagagaggaaaacagttacagatttttgttatcttctggataaatctaagcaactgttcaatgggttaagagatttgccacaatatggacagaagcagtggcagtcctattttggaagaacttttgatgtttacaccaaactctggaagttccagcagcagcatcgacaagtcttggataatcggtatggcttgaagcgctggcaaataggagaaattgcttccaagattgggcagctatactatcattattacttacgcacatcggaaaccagctatctgaatgaggctttttccttctattctgcaatcagacagagatcatattattctcaagtcaataaagaggacagacctgaattggtagttaagaagttacgatattatgcaagatttatagtagtttgtcttcttctcaacaaaatggatgttgtaaaggatctggtaaaggaattgtcagatgaaattgaagattatactcaccgatttaatactgaagatcaagtggaatggaacttggtgcttcaagaagtagcagctttcattgaggcggatcctgtaatggtattaaatgatgataataccattgttatcacatcgaatcgccttgctgaaacaggagccccattgctggaacagggcatgattgtgggacagttgtctctggctgacgcactcattattggtaattgtaataatcaggttaagttcagtgaactaactgttgacatgttccggatgttacaagctctggaaagggagccaatgaatttagcttcccagatgaataaaccaggaatgcaggaatcagctgacaagcctactagacgagaaaacccccacaagtatctgctctacaaaccaaccttcagccagctatataccttcttagcagcgtcttttaaggagctgcctgccaatagcgtgcttctgatttacctgtcggccactggcgttttccccacaggtcgttctgatagtgaaggtccttatgattttggaggtgtacttactaatagtaaccgggatattattaatggagatgccatccacaaacgaaatcagtcccacaaggaaatgcactgccttcatcccggggatctctatcctttcaccaggaagccactgttcatcattgtggattcgtctaatagtgttgcgtataagaatttcacaaacttgtttggacagccactagtctgcttgctttctcctacagcatatccaaaagctttacaagatcaatctcagcgaggtagcctcttcactctctttttgaacaatcctctaatggccttcctatttgtctctggattgtcaagcatgcgcagaggcctatgggaaaagtgtcaagaatatcttcgaaaaatcaaccgtgatattgcccagctactgactcattcacgttcaatagatcaggcatttctccagttttttggagatgaatttcttcgcttgctcctcacaagatttatcttttgttcagccaccatgaggatgcacaagatttttcgggaaacacgaaattatccagaatcatatccacaactgccaagggatgaaacagtggagaatcctcatctccagaagcacattttggaattagcatccattctggatgttcgaaacgtgttctttgagaataccattgatgactattaaaacaaaaaccctgttgtcg

SEQ ID NO: 44976 - DNA, 2330 bp, Homo Sapiens
tttcagatgacagtcatgtccctttccagggacctcaaggacgactttcacagtgacacggtactctccatcttaaatgagcagcgcattcggggcattttatgcgatgtcactatcattgtggaagataccaaatttaaagcccatagcaatgttctggcagcttcaagcctgtattttaaaaatatcttttggagccatacaatctgtatttccagccacgtcctggagctggacgatctcaaagctgaagtgtttactgaaatacttaattatatctacagttccacagtcgttgtcaagagacaggaaacagtcactgatctcgcagctgcaggaaaaaagctgggaatatcgttcttggaagaccttactgatcgcaacttctcaaattccccgggtccctatgtattctgtattactgaaaagggagtggttaaagaagaaaaatgaaaaaaggcatgaagaaccagccatcactaatgggccaaggatcacaaatgcattttccatcatcgaaacagaaaatagtaataacatgttttccccgctggacttgagggcaagtttcaaaaaggtctccgactccatgagaacagctagcctttgcctggagaggacggacgtctgccacgaggcagagcctgtccgcacacttgccgagcactcatacgctgtttcttccgtagctgaagcttacagaagtcagcctgtacgtgaacatgatggcagttcacctggtaacacagggaaagaaaattgtgaagcccttgcagcgaaaccgaaaacatgccggaagccaaagacattctccataccacaggattcggattcagccacagaaaatataccaccccctccagtatccaacttagaggttaatcaagaaagaagtccacaaccagctgctgttctcactcgttcaaaatctccaaacaatgaaggagatgtccatttttccagggaagatgaaaatcaatcttctgatgttcccgggccgccagccgcagaggttccacctctggtgtacaattgtagctgctgttccaaagcctttgacagcagcactctgctcagtgcccacatgcagcttcacaagccaacccaggagcctttagtgtgcaagtattgcaacaaacaattcaccaccctgaacaggttggatcggcatgaacagatctgcatgaggtcaagccacatgcccattcctggaggaaaccaacgctttttagaaaactatcctaccattggacaaaatggaggttcattcacaggtccagaacctttattatctgaaaataggattggtgaattttccagtaccggaagtactttgccagacacggaccacatggttaaatttgttaatgggcaaatgctctacagttgcgttgtgtgcaaacgtagttatgtgaccttatctagcctccgaagacatgcaaatgttcactcctggagaagaacatatccttgccattactgcaacaaagtatttgcattggctgagtacaggacaaggcatgaaatttggcatacgggagaaagacgatatcagtgcattttctgtcttgaaactttcatgacctactatatactcaaaaatcatcagaagtctttccatgccatcgatcatagactttccatcagtaaaaaaacagcaaatggaggcttgaagcctagtgtctatccgtataaactttataggctactgcctatgaaatgcaagagagccccttataagagctaccgaaattcttcctatgaaaatgcacgagaaaacagtcaaatgaatgagtctgcacctggtacctatgttgttcagaatccacacagctctgaattaccaacgctgaatttccaagatactgtaaacaccctgaccaacagtccagccatcccattggaaacatctgcatgtcaggacatacccacttctgccaatgtacaaaatgcagagggtaccaaatggggagaggaggcattgaaaatggatcttgacaataacttttattcaactgaggtgtcagtttcttccactgaaaatgctgtcagttctgacctccgggcaggggatgtacctgttttatctttgagtaatagcagtgagaatgccgcctctgtgatcagctacagtggctctgcaccctcggtcattgtacacagcagccagttttcatcggtgatcatgcacagcaatgccattgctgccatgaccagcagcaaccacagagccttttcagacccagctgtcagtcagtccctgaaagatgacagtaagcccgagccagataaagtgggtaggtttgcaagcagacccaaaagcattaagg

SEQ ID NO: 44977 - DNA, 1488 bp, Homo Sapiens
atgttttctcctgatcaagaaaatcatccatctaaagcaccagtaaaatatggtgaactcattgtcttagggtataatgggtctctcccaaatggcgatagaggaaggaggaaaagtaggtttgctttgtttaaaagacctaaggcaaatggggtgaagcccagcactgtgcatattgcttgtactcctcaggctgcaaaggcaataagcaacaaagaccagcatagcatatcatatactttatctcgggcccagactgtggtggttgaatatactcatgacagcaacaccgatatgtttcagattggccggtcgactgaaagccccattgattttgtagtaactgacacggttcctggaagtcaaagtaattctgatacacagtcagtacaaagcactatatcaagatttgcctgcagaatcatatgtgaacggaatcctccctttacagcacggatttatgctgcaggatttgactcatcaaaaaacatctttcttggggagaaggctgccaaatggaagacatcagatggacagatggatggcttgaccactaatggtgttcttgtgatgcatccacgcaatgggttcacagaagactccaagcctggaatatggagagaaatatcggtgtgtggaaatgtatttagcctacgtgaaaccagatcggctcagcagagaggaaaaatggtggaaattgaaaccaatcagttacaagatggctcgttaattgacctctgtggtgcaacattgttatggcgtactgcagaaggcctttcccacactcctaccgtgaagcatttagaagctttaagacaggaaatcaatgcagcacgacctcagtgccctgtagggttcaacacactagcatttcctagtatgaagaggaaagacgttgtagatgaaaaacaaccatgggtatatctaaactgcggccatgtacatggctatcataactggggaaacaaagaagaacgtgatggaaaagatcgtgaatgtcctatgtgtaggtctgttggtccctatgttcctctgtggcttggatgtgaagctggattttatgtggacgccggccctccaacccatgcgtttagcccgtgtgggcatgtgtgttcagaaaagacaactgcctattggtcccagatcccacttcctcatggtactcatacttttcatgcagcctgtcccttttgtgcacatcagttggctggtgaacaaggctacatcagacttatttttcaaggacctctagactaacagaccattgtcttgcaggactacattataaatttataagctaagtgagttgggttttcgaacctgttgtccacgtcacagtttttctgctctggtcatttgcattaagatgaagaattttttaaaacatttataataaatagtagcaatttctgagcaaaaatctgggaaactcaagcaaaggaatttctgaaagtatcagtcttctgaattctgagttttgaaaatata

SEQ ID NO: 44978 - DNA, 2213 bp, Homo Sapiens
gttttgcaacttcttgtttatgagcctggaagccacgaagtggtgggaaatacgagattcaaatatctggtggccgtgtgacgtgagtaaattactcgatttttctcagtttccatttcctatcaaatgggttgttctgggaattcggggaagtaacagtgccgggaaccgcgggaggaaccgccagctgcgtcctcggacgtccccaaagcccagggcggcgactggcacgactgtcaggggcgcgtctgttaagaggacagggggtcccgccccggcacagccgtctcctccaggacccctcccgccgacgccccacggaccccacgcccgagcggagaccggcgcgagtccggggtctccggtccggcagcccctccctggcccggcgccccaaagggaagcggcctgggggaggagacgtgtggaaagagcggcagaagataaagaggaagtagcggtagagaataaaaaggaactgtccgcagtgtgcccggacgcggggaggcgctggggtcaagcgagacccgacctgcacgcaattcccgccggggtcccggcctgcctgcgggagggaaaggacccagggcggcttctgccaaaagtgcggcttctgccgaaagtgcgtcttctgccgaggggcccacataaggcgcgacagacactccagcccgaccccgacgccccgccctcacgcatgcacatgcgcggaacactcccagaaacacatctcccagagcgccccgggagcacgcgagccaattggagggcggattagcgggggcccacgtctcccagaggtctccgagtcgcggctctgttggtctgattggcagccgcaacagcctatagctgcttttcgccggaggggccacgcgccgtttgccgggactgagccgctgttgtcgctggtatcccgggagcagcgccggcaagtggagtcgtcgtattccgggcggcccgcggcccacggggatgggacgtcccggggctgtgctgaccccaaaacccttccacactttattagcctgtcgcccttctttcatgtttacagcaaatattttccgagtgcctaatgtgtcccacttactgtgccacgtgcgagggtgcacgtgtcaggcaagatcgctgttccaaggaggctgagaacaagtaaatggtaattaccagttatgaccaaagctgtgaaaggaacagatacatcagcctaacagcagcactgccgttttctcccttataatcagcagaggcgggctagagcaaggattctcaaactctgccccctcagaaccctagagtacggttgctgaaacttctgttttttccttttgaacaaatctagtaacatgctgtgagccagagaggtaatggtttggctcaaagaaggcacatgcatctggtttctttcttcttttttgagacggagtctcgctctgtcgtccaggctggagtgcagtggcgccatctccgctcactgcaagctccgcctcgcgagttcacgccagtctcctgcctcagccttccgagtagctgggattacaggcgcccgccaccacgcccggctaattttcacgcccggctaattttttgtatttttagtagagacggggtttcaccatgttagccaggatggtctcgctctcctgacctcgtgatccgcccgcttcggcctcccaaagtgctgggattacaggcgtgagccaccgcgcccggcccaggtttcttatttcaggagcttcataggcatagacctccctccttccctcctaccccctcccccctctcccaactaatgccagaccggccactactttttaactgttttacatatttaaccttcaagaaagatttcctttgatccaagtgtattgcagcccacaaaaaagcttggaaacccagctagatggtctgtttttctagttcctacattggatttaagtcctacccatcgagactactgtcttcagagggcatcttcatgtgtgggcaccagggctgcggctggaaccacagtggacaccccacgctccaaggacaatcctctgcagaaaccagcagctggaaacaattcttaatgctgcaggaagtagttaggagaaaacgactgtgtaagtcagagctaaaactggagttcaaaaaccacagaaaatatttccaaggctgtctgtgaagtggggatgtcaaaataccaaaaattacagctttggaactgc

SEQ ID NO: 44979 - DNA, 1518 bp, Homo Sapiens
ctgcgcctcccgccgcgcccgggatgtattcgtccccgctctgcctcacccaggatgagttccacccgttcatcgaggccctgctgcctcacgtccgcgccttcgcctacacctggttcaacctgcaggcgcggaagcgcaagtacttcaagaagcacgagaagcggatgtcgaaggacgaggagcgtgcggtcaaggacgagctgctgggcgagaagcccgaggtcaagcagaagtgggcgtcgcggctgctggccaagctgcgcaaggacatccggcccgagtgccgcgaggacttcgtgctgagcatcaccggcaagaaggcgccgggctgcgtgctctccaaccccgaccagaagggcaagatgcggcgcatcgactgtctccggcaggcggacaaggtgtggcggctggacctggtcatggtcatcctgttcaagggcatcccgctggagagcaccgacggcgagcgcctggtcaaggctgcgcagtgcggtcacccggtcctgtgcgtgcagccgcaccacattggcgtggccgtcaaggagctggacctctacctggcctacttcgtgcgtgagcgagatgcagagcaaagcggcagtccccggacagggatgggctctgaccaggaggacagcaagcccatcacgctggacacgaccgacttccaggagagctttgtcacctccggcgtgttcagcgtcactgagctcatccaagtgtcccggacacccgtggtgactggaacaggacccaacttctccctgggggagctgcaggggcacctggcatacgacctgaacccagccagcactggcctcagaagaacgctgcccagcacctcctccagtgggagcaagcggcacaaatcgggctcgatggaggaagacgtggacacgagccctggcggcgattactacacttcgcccagctcgcccacgagtagcagccgcaactggacggaggacatggaaggaggcatctcgtccccggtgaagaagacagagatggacaagtcaccattcaacagcccgtccccccaggactctccccgcctctccagcttcacccagcaccaccggcccgtcatcgccgtgcacagcgggatcgcccggagcccacacccgtcctccgctctgcatttccctacgacgtccatcctaccccagacggcctccacctacttcccccacacggccatccgctacccacctcatctcaacccccaggacccgctcaaagatcttgtctcgctggcctgcgacccagccagccagcaacctggaccgtcctggtatctgggatagcaaaggtcttcttccctcgccccttctccatcgtcccaggaatcccagggggcagcacagccggcccccggcccacgttttcggtggaaaattagagtgaacaagaacacccctgccgactcccagcccggccaaaaagacaaaacacatagacgcacacactcaggaggaaaagaaaaaacaaaggcagaagaagaagaagaagaaa

SEQ ID NO: 44980 - DNA, 738 bp, Homo Sapiens
ttcagtcgcattcttggaggaagccaagtggagaagggttcctatccctggcaggtatctctgaaacaaaggcagaagcatatttgtggaggaagcatcgtctcaccacagtgggtgatcacggcggctcactgcattgcaaacagaaacattgtgtctactttgaatgttactgctggagagtatgacttaagccagacagacccaggagagcaaactctcactattgaaactgtcatcatacatccacatttctccaccaagaaaccaatggactatgatattgcccttttgaagatggctggagccttccaatttggccactttgtggggcccatatgtcttccagagctgcgggagcaatttgaggctggttttatttgtacaactgcaggctggggccgcttaactgaaggtggcgtcctctcacaagtcttgcaggaagtgaatctgcctattttgacctgggaagagtgtgtggcagctctgttaacactaaagaggcccatcagtgggaagacctttctttgcacaggttttcctgatggagggagagacgcatgtcagggagattcaggaggttcactcatgtgccggaataagaaaggggcctggactctggctggtgtgacttcctggggtttgggctgtggtcgaggctggagaaacaatgtgaggaaaagtgatcaaggatcccctgggatcttcacagacattagtaaagtgcttccctggatc

SEQ ID NO: 44981 - DNA, 602 bp, Homo Sapiens
gttttatgttatgtggcgtgtaccctaaaaaaaaaaatagaggtgcagtgctccagcacgggatgaggcagcgtggacaggagcatctcccaacctcagtgaagtctgagccgcgtgcctgcaacaatcccactgtggcagagaaccgcagagttccttccggtttggcagcagtcattcgcaacctcacagccctctggaaccccagcctgggggtctcagaacgccgaggcggggactgggagccgagtcggattccgagactatgggccagggttggctggattcagttacctggctgaggcctggtgagcaaaatatcccaaacctcgcgtgatctggaaggggaagccggataaatacggatctccagatgtgccagtctcgagtctatcgatatgaggtccccctagagtttctattcatcattttaaccgcatttcatcgatcttgagacacggcttttgatattttatcacctcaagataaatagtgttagatgtctaatagcagcgtttttctaagagatacatgaaacaacagtgtcagaaacgatgctgtcttccatgcgatgaaattgttgtaataggtgctcaataaat

SEQ ID NO: 44982 - DNA, 414 bp, Homo Sapiens
tcatcccggtgggtctgggatttgttcctctgtggctactggcagcagccaagcaaacttgcagctgtcctgccaaactcccattcaggggacctgggcccacctctttcctgtcttctagtgacactcatcgaggagcttcactgtgcgggacaggccaaggtggtccggaagctgcaggggaagcggctgggccagctccagcctctgccccagaccttaagagcctgggcgctgctccagctggacggcactccgagggtgtgcagggcggccagcgctcgcctggctggtgcagtcaggaacagaagcttccgggaaaaggtacgttgtccagggcaggtggcagaccctggccacagatgtgtgggcataggtaagctggtgttctcatggaaaagtacaaagaagtga

SEQ ID NO: 44983 - DNA, 603 bp, Homo Sapiens
tcacccatggagacaggcaggcaagcaggtgtgtctgctgagatgttcgccatgccccgaggtctgaaaggcagcaacaaggatgggatccctgaggacctagatgggaacttggaagaacccagggatcaggaaggtgagctcaggagtcaggatgtcatggacctcacagaaggtgacaaagaaacctcagcctcagctcctcctgcagccaaaaggctgaaaacagataccaaaggaaagaaggagaggaagcccactgtggatgcagaggaggctcagaggatgacaaccctgctgtctgccatgtctgaggagcagctggcccgctacgaagtgtgtcgccagtcagctttcccaaaagcacgcattgcagctctgatgcagtctatcactggcagttcggtgtctgagaacgtggccattgccatggctggaatagccaaggtcttggttggagaggtggtggaagaggccctggacgtgtgtgagatgtggggagaaatgcccccgctgcagcccaagcatttaagggaggctgttcgcaggttaaagcccaagggcctcttccccaacagcaactacaaaaaattcatgttctag

SEQ ID NO: 44984 - DNA, 657 bp, Homo Sapiens
aaagagaagaagtttcctgctgttccagaaacccttaagaaaaagtggaggaatttcgcagagcccgagagagaagtttgcccaaaagatgctttgaaaggcaaggaggaagcttttaaaaaaatgaagcactatcacaaggaatatagacaaatgtacagagctgagagtaaaatagctaggatggcaagaaaagctggcaactttctatgtacccacaaacccaaattggcatttgtcatcaggatcagaggtagcaatgctctgagcccaaaggtccgaaaggtgttgcagcttcttcgccttcgtcaaatcttcaatggaacctttgcaaagctcaacaaggattcaattaacatgctgatgattgtaaaaccatatattgcatgggggtacccaaagctgaagtcagtaaatgagctaatctacaagcgtggttatggcaaaatcaatgagaatatcatctgcagggaggatcttgttaatgagatctatactgttggaaaacacttcaaagaaacaaataacttcatgtggcccttcaaattatcctctccaagaggtgggatgaagaaaaagaccacccattttgtagaaggtggagatgctggcaacagggaggaccagatcaacagccttcttagaagaatgaactaa

SEQ ID NO: 44985 - DNA, 477 bp, Homo Sapiens
atggtgccgcatgccatcttggcacgggggagggacgtgtgcaggcggaatggactcctcatcctgtctgtgctgtctgtcatcgtgggctgcctcctcggcttcttcttgaggacccggcgcctctcaccacaggaaattagttacttccagttccctggagagctcctgatgaggatgctgaagatgatgatcctgccactggtggtctccagcttgatgtccggacttgcctccctggatgccaagacctctagccgcctgggcgtcctcaccgtggcgtactacctgtggaccaccttcatggctgtcatcgtgggcatcttcatggtctccatcatccacccaggcagcgcggcccagaaggagaccacggagcagagtgggaagcccatcatgagctcagccgatgccctgttggacctcatccggcagaaagaagaaagttggaggaacggaccaaagggtcctggctga

SEQ ID NO: 44986 - DNA, 3471 bp, Homo Sapiens
atggccctcaagatggtgaagggcagcatcgaccgcatgttcgacaagaatctgcaggacttggtccgcggcatccgtaaccacaaggaggacgaggcaaaatacatatctcagtgcattgatgagatcaagcaggagctgaagcaggacaacatagcggtgaaggcgaacgcggtctgcaagctgacgtatttacagatgttgggatacgacatcagctgggccgccttcaacatcatagaagtgatgagtgcctccaagttcaccttcaagcgaattggctacctcgctgcttcccagagctttcacgaaggcaccgacgtcatcatgctgaccaccaatcagatccgtaaggacttgagcagccccagccagtacgacacaggtgttgcactgacgggtctgtcctgcttcgtcaccccagaccttgccagagacctggcaaatgacatcatgacactgatgtcacacaccaagccctacatcaggaagaaggctgtgctgatcatgtacaaggtgttcctgaagtaccccgagtcgctgcgccctgcctttccccggctgaaggagaagctggaggaccccgaccccggggttcagtcggctgccgtcaatgtcatctgcgagctggccagacgcaaccctaagaactacctgtccctggccccgctctttttcaagctgatgacgtcctccaccaacaactgggtcctcatcaagatcatcaagctggcaattggtgctcttactcctttggaaccgcggctgggcaagaagctgatcgagcccctcaccaatctcatccacagcacgtctgccatgtctctcctctatgaatgtgtgaacaccgtgattgcagtgctcatctcgctgtcctccggcatgcccaaccacagcgccagcatccagctttgtgttcagaaattaaggatattgatcgaggactccgatcagaacttgaagtacctggggctgctggcaatgtccaagatcctgaagacccaccccaagtccgtgcagtcccacaaggacctcatcctgcagtgcctggacgacaaggacgagtccatccggctgcgggccctggacctgctctatgggatggtgtccaagaagaacctgatggagatcgtgaagaagctgatgacccacgtagacaaggcagagggtaccacctaccgtgacgagctgctcaccaagatcattgacatctgcagccagtccaactaccagtacatcaccaacttcgagtggtacatcagcatcctggtggagctgacccggctggagggcacacggcacggccacctcatcgccgcccaaatgctggacgtggccatccgcgtgaaggccatccgcaagttcgccgtgtcccagatgtctgcgctgcttgacagtgcacacctgctggccagcagcacccagcggaacgggatctgtgaggtgctgtacgctgccgcctggatctgcggggagttctcagagcatctgcaggaaccacaccacactttggaggccatgctgcggcccagagtcaccacgctgccaggccacatccaggccgtgtatgtgcagaacgtggtcaagctctacgcctccatcctgcagcagaaggagcaggccggggaggcagagggcgctcaggccgtcacccagctcatggtggaccggctgccccagtttgtgcagagcgcagacctggaggtgcaggagcgggcgtcctgcatcctgcagctggtcaagcacatccagaagcttcaggccaaggacgtgcctgtggcagaggaggtcagcgctctctttgctggggagctgaacccagtggcccccaaggcccagaagaaggttccagtccccgaaggcctggacctggacgcctggatcaatgagccactctcggacagcgagtcagaggacgagaggcccagggccgtcttccacgaggaggagcagcggcgtcccaagcaccggccgtcggaggcggacgaggaagagctggctcggcgccgagaggcccggaagcaggagcaggccaacaaccccttctacatcaagagctcgccatcgccacagaagcggtaccaggacaccccgggcgtggagcacattcccgtggtgcagattgacctctccgtccccttgaaggttccaggcaagtggctgcctatgtcagatcagtatgtgaagctggaggaggagcggcggcaccggcagaagctggagaaggacaagaggaggaaaaagaggaaggagaaggagaagaagggcaagcgccgccacagctcgctgcccacggagagcgacgaggacatcgcccctgcccagcaggtggacatcgtcacagaggagatgcctgagaatgctctgcccagcgacgaggatgacaaagaccccaacgacccctacagggctctggatattgacctggataagcccttagccgacagcgagaaactgcctattcagaaacacagaaacaccgagacctcaaaatcccctgagaaggacgttcccatggtagaaaagaagagcaagaaacccaagaagaaagagaaaaaacacaaagagaaagagagagacaaggagaagaagaaggagaaggagaagaagaaatctcccaagcctaagaagaagaagcacaggaaggagaaggaggagcggaccaaaggcaagaagaagtccaagaagcagcctccaggcagcgaggaggcagcgggggagccggtgcagaatggcgcgccagaggaggagcagctcccgcctgagtccagctactccctcctcgctgaaaattcctatgttaaaatgacctgtgacatccggggcagtctgcaggaggacagccaggtcactgtggccatcgtgctggagaacaggagcagcagcatcctcaagggcatggagctcagcgtgctggactcactcaatgccaggatggcccggccgcagggctcctccgtccacgatggcgtccccgtgcctttccagctgcccccaggcgtctccaacgaagcccagtatgtgttcaccatccagagcatcgtcatggcgcagaagctcaaggggaccctgtccttcattgccaagaatgacgagggtgcgacccacgagaagctggacttcaggctgcacttcagctgcagctcctacttgatcaccactccctgctacagtgacgcctttgctaagttgctggagtctggggacttgagcatgagctcaatcaaagtcgatggcattcggatgtccttccagaatcttctggcgaagatctgttttcaccaccatttttccgttgtggagcgagtggactcctgcgcctccatgtacagccgctccatccagggccaccatgtctgcctcctggtgaaaaagggtgagaactctgtctcagtcgacgggaagtgcagtgactccacgctactgagcaacttgttagaagagatgaaggcgacgctggccaagtgttga

SEQ ID NO: 44987 - DNA, 498 bp, Homo Sapiens
atggtcaaccccactgtgtccttcgacattgctatcaacaccgagtccttgggctgtgtctcctttgagctgtttgcaaacaagattccaaagacggcagaaaattttcatgctctgagcactggagagaaaggatttggttataagggttcctgctttcacagaattattccagggtttatgtgccagggtggtgacttcacacgccaaattggcactggtggcaagcccatctgcagggagaaatttgatgataagaacttcatcctaaagcatacaggtcctggcatcttgtccatgacaaatgctggacccaacacaaacgattcccagtttttcatctgcactgccaagactgagtggttggatggcaagcatgtggtcttcggcaaggtgaaagaaggcatgaagattgtggaggccatggagtactctgggtccaggaatggcaagaccagcaagaagataatcattgctgactgcagacaacttcgataa

SEQ ID NO: 44988 - DNA, 1137 bp, Homo Sapiens
gggaccactggagactggtcttctgagggctgctccacggaggtcagacctgaggggaccgtgtgctgctgtgaccacctgacctttttcgccctgctcctgagacccaccttggaccagtccacggtgcatatcctcacacgcatctcccaggcgggctgtggggtctccatgatcttcctggccttcaccattattctttatgcctttctgaggctttcccgggagaggttcaagtcagaagatgccccaaagatccacgtggccctgggtggcagcctgttcctcctgaatctggccttcttggtcaatgtggggagtggctcaaaggggtctgatgctgcctgctgggcccggggggctgtcttccactacttcctgctctgtgccttcacctggatgggccttgaagccttccacctctacctgctcgctgtcagggtcttcaacacctacttcgggcactacttcctgaagctgagcctggtgggctggggcctgcccgccctgatggtcatcggcactgggagtgccaacagctacggcctctacaccatccgtgatagggagaaccgcacctctctggagctatgctggttccgtgaagggacaaccatgtacgccctctatatcaccgtccacggctacttcctcatcaccttcctctttggcatggtggtcctggccctggtggtctggaagatcttcaccctgtcccgtgctacagcggtcaaggagcgggggaagaaccggaagaaggtgctcaccctgctgggcctctcgagcctggtgggtgtgacatgggggttggccatcttcaccccgttgggcctctccaccgtctacatctttgcacttttcaactccttgcaagggagctctgtggactgtcaagccctgtctgcaggtgagaagttactgtcactgttaggcctcccccaacagccctggaagctgcgggctgcagcccacctccccgtccggatgctgggtgctgacgttgactgcaaatggatgcgcttcgcttcccctcccagcccacaagcagttgaaagacaggaaggtgggccctcactttatgcaaggcgctgtgttcctggaagggaaattctggggcgtggacattgcatcatttga

SEQ ID NO: 44989 - DNA, 1681 bp, Homo Sapiens
tcttttacagtggtctcaaatagtcaagaccccctgctgggaggagcttctatcctgctctgtggaagaaatgggcatgccagatgcctggaagatcagaggctcacattccagttcaaagttagagaaacctgagaggggtgtactggtatgaccacccgagatcccatcgctgagaaagataatggccctggagacaaagactgatgaagaaagacagtatccagctgtgatgcagatgaaacatgcggcatggttgcactcactatgcagccaaggctggaagccactctggatccagccactctggcacagcgttcttgctctaggaagaacaactgaacatggccacacaggcctcacagctggcatatggaggctgttaataagctgagcttgaggcttcaaaggactcttgtagcctgtgctggatctagcagtgaccagtatgccagtggccatggatgcccaggcccatgttcagtagtgaagcaggtgctagcagcagaagcaatagaaatggaaactgggagatctgctgtggatgaatctcattatcttctttctctgaccctctttggactaaataaactcccagtattcttgaccaacagaggtagggttggaacagaacctcaaaagtcatcattagacttcctactaatagggcattggaagttcaagcgactaactaggaaacaggttagtatttgtacccctacactgtgcaacagattacataccatttgctctatttggcatcctttccttaggctagattcccagaagaaagattactgattcgaagggcatgaacatttttatgactcttggcctaaattactaggccaaggttttttcaaagggatgcactaattttcactatttccccacaccctttcaggtgataaataattgacttgatttgtttacactgacgccaagaattcttgggaagaaggatcaaagtgaaaagtggtagcccatggtggggaggccacactcagtgcagttgtgaagtcagcagcatttttaagcccattcattgccagtagccctgagatgagcattcccaagctgcttcccaggtccctcctccactctctcagggacatccattctgtaccagccccctcagatactcatgcccttgccctcccttctccatgctcattaaaaccagcttaagagcagatatgacatcagtcacttaccttttcgtgtggctctaaatcaaagtgtcacctctcccaagcacatgcttgcatcttagctctgattgaggaatgaaaagctttgttctctgttaaaagaactttgagcttagatgccccagactgagaaatccaccaaaagctggacctttgacttgagcggcaaaggacccccatagtcaggctgtgatttgaggagcatcaagaggccagagtttccaagttgggacccagaaggtggggttggcagggggagggtaggagcagctggagactctgctctaccaggggaatacggaggtggggaccaatcccagggtaaggaatgaaagtaggagccccagaagctgaaaacatacttcaccgatgtcagcattttacccagagccattccaaggtgaccataactcacttaaaagcctgaaagctgttttatgccaactaataaagtgcagtttaataaaaaa

SEQ ID NO: 44990 - DNA, 2745 bp, Homo Sapiens
cggcgaggagctgtgccttccacctctccagccccggcaggacgggggcggccgccgcgaacccggggcggggacagcacgcagcctcgaggcgcgcacccccgcccggcagcggccccgacacccggggcgagcgggaaagcggcagcggcggcggcggcggcggcggcgggggaaggatgcaggggaagaagccgggcggttcgtcgggcggcggccggagcggcgagctgcagggggacgaggcgcagaggaacaagaaaaagaaaaagaaggtgtcctgcttttccaacatcaagatcttcctggtgtccgagtgcgccctgatgctggcgcagggcacggtgggcgcctacctggtgagcgtcctgaccaccctggagcgtaggttcaacctgcagagcgctgacgtgggtgtgatcgctagcagcttcgagatcgggaacctggcgctcatcctcttcgtgagctacttcggggcacgcgggcaccggccgcgcctgatcggctgcggcggcatcgtcatggcgctgggcgcgctgctgtcggcgctgcccgagttcctgacccaccagtacaagtacgaggcgggcgagatccgctggggcgccgagggccgcgacgtctgcgcagccaacggctcgggcggcgacgaggggcccgaccccgacctcatctgccgcaaccggacggctaccaacatgatgtacttgctgctcattggggcccaggtgctcctgggcatcggtgctacccctgtgcagcccctgggcgtctcctacatcgacgaccacgtgcggaggaaggactcctcgctctatataggaatcctgttcacgatgctggtatttggaccagcctgcgggtttatcctgggctctttctgtaccaaaatctacgtggatgcggtcttcattgacacaagtaacctggacatcactccggacgacccccgctggatcggagcctggtggggtggctttctgctctgcggtgccttactcttcttctcttccctcttgatgtttgggtttccacagtccctgcccccgcactcagagcccgccatggaaagcgagcaggccatgctctccgaaagagaatacgagagacccaagcccagcaacggggtcctgaggcaccccctggagccagacagcagtgcctcctgtttccagcagctgagagtgatcccgaaggtcaccaagcacctgctctcaaaccctgtgttcacctgcatcatcctggccgcctgcatggagattgcagtggtggctggcttcgctgcctttttggggaagtacctggagcagcagtttaacctcaccacctcttctgccaaccagctgcttgggatgactgcgatcccgtgtgcttgtctgggtatcttcctgggaggtcttttggtgaagaagctcagcctgtctgccctgggggccattcggatggccatgctcgtcaacctggtgtccactgcttgctacgtctccttcctcttcctgggctgcgacactggccctgtggctggggttactgttccctatggaaacagcacagcacctggctcagccctggacccctactcgccctgcaataataactgtgaatgccaaaccgattccttcactccagtgtgtggggcagatggcatcacctacctgtctgcctgctttgctggctgcaacagcacgaatctcacgggctgtgcgtgcctcaccaccgtccctgctgagaacgcaaccgtggttcctggaaaatgccccagtcctgggtgccaagaggccttcctcactttcctctgtgtgatgtgtatctgcagcctgatcggtgccatggcacagacaccctcagtcatcatcctcatcaggacagtcagccctgaactcaagtcttacgctttgggagttctttttctcctccttcgtttgttgggcttcatccctccacccctcatcttcggggctggcatcgactccacctgcctgttctggagcacgttctgtggggagcaaggcgcctgcgtcctctacgacaatgtggtctaccgatacctgtatgtcagcatcgccatcgcgctcaaatccttcgccttcatcctgtacaccaccacgtggcagtgcctgaggaaaaactataaacgctacatcaaaaaccacgagggcgggctgagcaccagtgagttctttgcctctactctgaccctagacaacctggggagggaccctgtgcccgcaaaccagacacataggacaaagtttatctataacctggaagaccatgagtggtgtgaaaacatggagtccgttttatagtgactaaaggagggctgaactctgtattagtaatccaagggtcatttttttcttaaaaaaagaaaaaaaggttccaaaaaaaaccaaaactcagtacacacacacaggcacagatgcacacacacgcagacagacacaccgactttgtcctttttctcagcatcagagccagacaggattcagaataaggagagaatgacatcgtgcggcagggtcctggaggccacttgcgcggctgggccacagagtctactttgaaggcacctcatggttttcaggatgctgacagctgcaagcaacaggcactgccaaattcagggaacagtggtggccagcttggaggatggacatttctggatacacatacacatacaaaacagaaaacattttttaaaagaagtttcctaaaataaaaaaaattaaaaaaaaaaaa

SEQ ID NO: 44991 - DNA, 1231 bp, Homo Sapiens
ccctagggcccagcccgaggaggcactcagggttaggaggtctgggcgagaagcaactagggccctcatcacttcgccgccgaatccccggcgccgcccagcggggcagagccaggccagggccgcccgcccaacctggtccgctgcctcttcggccatggaagctgccggcagccctgcggctacggagacaggcaagtatatcgcgtcaacacagcgacctgacgggacctggcgcaagcagcggagggtgaaagaaggatatgtgccccaggaggaggtcccagtatatgaaaacaagtatgtgaagtttttcaagagtaaaccagagttgcccccagggctaagccctgaggccactgctcctgtcaccccatccaggcctgaaggtggtgaaccaggcctctccaagacagccaaacgtaacctgaagcgaaaggagaagaggcggcagcagcaagagaaaggagaggcagaggccttgagcaggactcttgataaggtgtccctggaagagacagcccaactccccagtgctccacagggctctcgggcagcccccacagctgcatctgaccagcctgactcagctgccaccactgagaaagccaagaagataaagaacctaaagaagaaactccggcaggtggaagagctgcagcagcggatccaggctggggaagtcagccagcctagcaaagagcagctagaaaagctagcaaggaggagggcgctagaagaggagttagaggacttggagttaggcctctgaggcctttggggaatagggaatggactgcagaacaaaccgtggggctctctggggtctgggggaatacgggcaacagcagtcaggaggggtaccccccatactggcttacttccacctcctgcggcccagctctgtcctccagagcctagcgtctccctcaatccttcccttttcttcccaacttctactttttggactttccccctcccattcccagtgttcaaaatctcagtgactaccccaggtacctttgctgctgatttgggtgtcttgtttaaaagaaaatcaggtgggtgggaatctcttggagaactgaggctgagggtagagggagtatgcccaagtcttggagtcttggttcctgttcgcggtgtttatgggttatttccctctccatccctcattttttttttttttttaaaaaaagcaaaaatgagaataaacacaagtagacatgtc

SEQ ID NO: 44992 - DNA, 1879 bp, Homo Sapiens
gcggcgagtggagcgggagccgactggaagaagggctctagggagggggctgtggctgctggggtccgaggtggggccgggtacaccagccccatcactgtttgcagagagtcagggaggcggaaaagacacgcgctctaggctcccatcagggcacatggcccgggcccatcccccgcgcgtctccccggctgcggggcgcggggggctgccgggtgcgcttggctgtggcgcggcgcgttggagactttattgcgatgggacgataagaggggcgggggcggggtcctgggggccgaggcggcagcgctttaattaaaacggaaattgcggccccgggccgcgcgggggccggagggttccaagcggccccttagctggaagcgtttctccaggacccccccgcaacccccgccacgcccgggctgccccctcccgccaggccctgccggacccggcgccgtcttctcctccttgtcacccgcggtcgcttcgggcggggatcggtgccaccgagcgcaaagcctgcctcgccccccttccccgtcccccccatctcccaccgcccagtccccggcggcgatgagacagagcggcgcctcccagcccctgctgatcaacatgtacctgccagatcccgtcggagacggtctcttcaaggacgggaagaacccgagctgggggccgctgagccccgcggttcagaaaggcagcggacagatccagctgtggcagtttctgctggagctgctggctgaccgcgcgaacgccggctgcatcgcgtgggagggcggtcacggcgagttcaagctcacggacccggacgaggtggcgcggcggtggggcgagcgcaagagcaagcccaacatgaactacgacaagctgagccgcgccctgcgctactactacgacaagaacatcatgagcaaggtgcatggcaagcgctacgcctaccgcttcgacttccagggcctggcgcaggcctgccagccgccgcccgcgcacgctcatgccgccgccgcagctgctgccgccgccgcggccgcccaggacggcgcgctctacaagctgcccgccggcctcgccccgctgcccttccccggcctctccaaactcaacctcatggccgcctcggccggggtcgcgcccgccggcttctcctactggccgggcccgggccccgccgccaccgctgccgccgccaccgccgcgctctaccccagtcccagcttgcagcccccgcccgggcccttcggggccgtggccgcagcctcgcacttggggggccattaccactagacggggcggtcgggtgcctgcggcctcgcccgcacgcctagagtctcgcccgatcccatcggcatcccggggagggcccgggagcctccgtcaaccgtcctctaatccagagtttactccacctgccgcacttagcagggggacgggaccgaagctccctcaatccttgtctggtactagatttgctcctgtcccaccccgcagtcccctgaggagggcgatgtgcgccctctttcactttttttcttctaggtctccaggtcccggaggggatttgtggacctctcttgtctccccaccactccagtgcatttccgcctggctcctagaagccccattcaatatcactactctttaacgagtgccaaatcttttcccacttttgctcttccccaaggaactgctcccacctcagcacgtggaggcctctcacggtcctccttcctgggacctgagcaggtttggtgaaagccaccgtcctccgtgacacacggcccccttcctcctgtccccacactcccaggagaaactcccggtgtgtttctgaccctttcagccccattaaagctcctgagctctc

SEQ ID NO: 44993 - DNA, 5613 bp, Homo Sapiens
ggacgcgggacccgtacagcggcctccgccgcaccgggacagcagccgccgccgctgccgccgtcctcccctgtctacccggagctgtctcgagctgagccccctaccgggccggatcccgagataaagcctagccatggctgctgtttattctggcatttcccttaagcttaaaagcaagacaacttcctgggaagataaactaaaactagctcactttgcttggatttctcaccagtgctttcttccaaataaagaacaagtgttacttgattgggcaagacaatcattggttgcattttataagaaaaagcttgaactgaaggaagatattgttgaaaggctttggatctatatagataacattttacatagcagaaaattgcagaatctcctcaagaatggaaagaccattaatcttcagatttccctagtcaagatcatcaatgagagagtagctgagttctctctttcgggatcccaaagaaacatctgtgctgtccttcgatgttgccagggcatcctgtcgacacctgccctggctgtcatctacacggccaaacaggagctgatggtggccttgctgagccagctttgctggtcggcctgcaggcagcccgaaggagctgtggtagcccagttgtttgaggtcattcacctggcccttggccattatctcttgatcctgcagcagcaggtcaacccaagacgtgcctttggggatgtgactgctcacctgctccagccgtgcctggtcctgaggcacttactctctgggggcacatggacgcaggctggccagggccagctgaggcaggtgctgagccgggacatcaggagtcagattgaggccatgttccgaggagggatttttcagcctgagctactgtcatcctacaaggaggggctcttggaccagcagcaaggggatgtgaagacgggagccatgaagaaccttctggctcccatggacaccgtgcttaacaggctggttgatgctggctactgtgcagcatcccttcatacctctgttgtggccaactcagtggccttgctgtataagctctttctagattcttactttaaggagggaaaccagcttctctgcttccaggttctccccaggttgtttggctgcttgaagatttcacacctgcaggaggagcagagcaaagccctgtccacatcagattggaccacagagcttttggttgtggaacagctactaaactcagtggccaacaacaatatctacaacatcgctgccgacagaattcggcacgaagaggctcagttccgcttttaccgccacgtggctgagctgctgataaaccatgcacaagcacccataccggcctggttccgctgtctgaagactttgatatctctgaatcatttgattttggagccagacctggatgacctgctggcttcagcgtggatcgatgccgaggtaacagagtttcgaaccaaaaaagcccaggaggcgcttattcgtactgtcttccagacttatgccaaactccgacaagtgccacggttgtttgaagaggttttgggggtgatctgtcgtccagctgctgaggcactgaggcagcctgtgctggcctcgggcccctccacggtactctctgcatgcctcctggagctgcctccaagtcagatcctggacacgtggtcccttgtgctggagaagttccagtctttagtcttgccctatttgcagagtgatgccgacatggccctgaaatcactgtcactgagcttgctgctgcactgcatcatgttcaacatgaggagcctggacagcagcacgcctctgcccattgtcagacggacacagtgcatgatggagaggatgatgagggagctcgtgcagcccctgctggcccttctcccggacaccccaggcccagagccagagctgtggctgcagaaggtcagtgactctgtgctcctgctctcttacacttgggcccaggtggacgctatgttcagtttgaactgtagccagtatcactctatgtctgggccccttataggtgttgctctggagatctcgaacctcccttcgttgctcccaggtgtaaaaacacagcattggaagaagatagagaagtttacagctcagttcagctctcttggtacatattgcttagaacagctgtacctgcagaaaatgaaaaggactttaatgcaaactagtttccggtctgaaggagccatccaaagtttgaggtgcgatgctgcctttattattggttccggcagaaaaagcttgaatcagagaacgacggcttcctgggatggccaagttgggatggtgagtggactcacataccctgtagcacactggcacttgattgtgtcaaatctcacaattttaatatcctatctgtgtccagatgatgtgggatacctggccagtgtcctgctgagaactttacccatgggcaaagcccaggaagtctcaatagatgaagaggcatacatcacactggaaaaaatatccaaagccttccttcatagccctctctttccagagatgcagtcccttcattctgctttcttaacgtgcgtaaccacaagttgctccagcattctgtgttctggtgcccagcgtgactcaggtcttgtcagtcagcagcttccctggctttttgaaaaggaccacatggttgtgggtcattgggaaaacagatttgcaaaagctggacccgaaggtatagaacctagaggagaaattgcccagaacttactgtccctggtcaagagtgacttccctatccagctggagggagagcagttggaaagcatcctggggcttttggaagtgatttctgccttacagctggacagcctcttgccaccctatcatgtgcattattttcttgtgttactgtccatggccgtcaccaaactaggatgctcttgctcctcctcactggctctcaagttcttgacgacttgctaccaacttcttggttacttgcaaaaggggaaaagtgctcgctctgtgttcaagatcatgtatggtagtgatatttttgaggttgtactgacctcattgttcagagctagtagtaggttccttattgagatggatgatcccgcttggctggaattcctccaagtgatagggacgttcttagaggagctaatgcagatgctcatccaaatgaagctgagcttggtgctcaattttagaaaaatcaccgcattcctctctagttccaaaccatacacggaggcagcttcaagcaaacaattagaaaatcagaacccccagggcaggcagctccttctggtgtctttaaccaggttgtgccatgtcctgggacctttcctcaaagagcagaagctgggccaagaggccccagcagcactgtctgagctgctgcagcaggttgtgctgcagacaggagctgtgctgcagctctgctcagtgccgggggcccggggctggcgccttccctcggtcctcatctcatccgtcagcacgctcttggaagccgacctgggtcagcactgcagggatggaggggccgacatttcccaaggaagcgacaggacgctgctctcccatgttgccctctaccagggtgtttactctcagatactgttggagttgccagctctcgcgggacatgatcagtcttttcaggcagccttgcagtttttgactctgttctttttggccccagaactgcatcccaaaaaggactccgtgtttacctccatgtttcattctgtgagaagagttcttgcagatcctgaaattcctgttcaggtcactcaggatattgagcctcatttgggagccttgttcacccaaatgttagaggttgggacgacagaggacttgaggctggtgatgcagtgtattctccagggactggatgtcagtaacatgtggaaagcagatgtgcaggctgttgtgtcagctgttacactgctgaggctgctactgaactgcccactcagtggagagaaagcaagtctgttgtggcgtgcgtgtccccagatagtcacagctttaacactcttaaaccgagaagcttctcaggagcagcctgtgtccctcacagtggtcgggcctgtcttagatgtcctggctgcactgctgcggcagggggaggaggccatcggcaacccccaccacgtcagcctggccttcagcatccttctcactgtccctttggaccatctgaagccgctggagtatggaagcgtcttcccgaggctgcacaacgtgctcttctcaatcctgcagtgtcaccctaaggtaatgctgaaagccatcccttctttcttgaactctttcaatagattggtgttttcagttatgcgggaagggcggcagaaggacaaaggaagcatagatgacctgcctacggtcctaaagtgtgcacgcctggttgaaagaatgtacagccacatcgccgcacgagctgaggagtttgctgtgttttccccatttatggtggcccagtacgtgttggaggtacagaaggtgaccttatatccagctgtgaaaagtctgctgcaggagggcatttacctcatcctggacctctgcatcgagcctgacgtccagttcctgcgggcctcgctgcagccgggaatgagagacatctttaaggagctctataatgactatctcaagtaccacaaggccaaacatgaaggagagaaaagatatacggcctaaggctatgggacagaagtgccgccagtgacactgtccagaggctttggctgcatggtctgaaagagctggagaatgaaagacttaagatgttctaattcgtagtattggtatacatagaaaatcctttggggtttatgtagtatattttgatgtattttacatcgtgtttttcttactattttttaatacatagttttatgcagtaagtattgcaatagaatcctgaaaattgaccctgggatgagattaattcaatagaaaaattgctgactcttgggacctttctgtgtttggttctcgtcttggctcagtggtttggtgttccctcgtctgcactggaaactacataaaacttggctttttactttgggtacatgggcgtataattcagccctgtttaaatatacttgcctttcaaattcttcaagtaacatgggaagtattcttgaaatgtcacattttctgccttccctctaagtatgctttctgaagaagtcagggaaagttagagtctgtggcctgaggtgtctgctctgggtggcgatagtgggcacctcaggcaggtcggtgacgtttagcacaggtgccagggctcctgcctgctcctcctgtgttagctctgtgaagttcatttaggaatttttttttcctatgcagtttaagaaataatcctaattgttttttcttattacctaagcaatatatttttattatagcaacctcagaaaagaaaaataaaaggataatttaaaaaactcattcatagtctcagttacccagataacctcggttgtcaccttggagtatcttgttgtagtccctttactatgtgtatgtatatagatgtgcatataaatatatatagtagctaaattggatcataaatgcatttttttaaagtt

SEQ ID NO: 44994 - DNA, 1642 bp, Homo Sapiens
cctgaagctactggttggttccctgagaggtcccagaactctgcgaagtgagtccagcgctgagattttccttgcagatctatcaggatgagcatccaggccccacccagactactggagctggcagggcagagcctgctgagagaccaggccttgtccatctctgccatggaggagctgcccagggtgctctatctcccactcttcatggaggccttcagcaggagacacttccagactctgacggtgatggttcaggcctggcccttcacctgcctccctctgggatcactgatgaagacgcttcatttggagaccttaaaagcattgctggaagggcttcatatgctgcttacacagaaggatcgccccaggaggtggaaacttcaagtgctggatttgcgggatgttgacgagaatttctgggccagatggcctggagcctgggccctgtcctgcttcccagagaccacgagtaagaggcagacagcagaggactgtccaaggatgggagagcaccagcccttaaaggtgttcatagacatctgcctcaaggaaataccccaggatgaatgcctgagatacctcttccagtgggtttaccaaaggagaggtttagtacacctgtgctgtagtaagctggtcaattatctaacgccgattaaatatctcagaaagtcattgaaaataatatacctgaatagtattcaagagctggaaattcgcaacatgtcctggccacgtctgataagaaagcttcgttgttacctgaaggagatgaagaatcttcgcaaactcgttttctccaggtgccatcattacacgtcagataatgaactccaaggacggttagttgccaaattcagctctgtgttcctcaggctggaacaccttcagttgcttaaaataaaattgatcaccttcttcagtgggcacctggaacagctgatcaggtgcctccagaaccccttggagaacttggaattaacttatggctacctattggaagaagacatgaagtgtctctcccagtacccaagcctcggttacctaaagcatctgaatctcagctacgtgctgctgttccgcatcagtcttgaacccctcggagctctgctggagaaaattgctgcctctctcaaaaccctcatcttggagggctgtcagatccactactcccaactcagtgccatcctgcctgccctgagccggtgctcccagctcaccaccttctactttggcagaaattgcatgtctattgacgccctgaaggacctgctgcgccacaccagtgggctgagcaagttaagcctggagacgtatcctgcccctgaggagagtttgaattccttggttcgtgtcaattgggagatcttcaccccacttcgggctgagctgatgtgtacactgagggaagtcaggcagcccaagaggatcttcattggccccaccccctgcccttcctgtggctcatcaccgtctgaggaactggagctccatctttgctgctagggaaggcgtgcccagtggggtagagaaatccaaagttctcttccaggcacttggacactaaaatctactatgtgggtgcaaactatttttctcttttcttatttatttcattttttaataattccaaaat

SEQ ID NO: 44995 - DNA, 501 bp, Homo Sapiens
ggacagaccctcttcctgcaatgccagtactcacccaagagagggtcctatcagcccaaatcctggtgtcagcagacatcgccaagtcggtgtaccttacttgtcaccagctccaagccccagacagcagttcagaagtctcattacacaatctgggacaagccaaatgctagcatcttcaaaatcaccatgattcagctgaaggaggactcgggatcctactggtgtgaaatctacaacacttccaaaaacatcatcactgttctcagagatgtcagcctggtggtgtttgcagccccaaccacgtctcctacgtggaccctcacctggctcccaacaaacacagatggggccatccagttgcaggaaaacaagctcagggattccacagattctgcattatggaaatcaagtgcccccatctgccttggctcagctggccccaaactcctggtctctgtgttgtgtggactcctcctggccaagggcctgatgctgtga

SEQ ID NO: 44996 - DNA, 762 bp, Homo Sapiens
ctggtcatcgacagtcactccttcctggagtacaacagctggcatgtgctcagctccgtcaacatctgctgctccaagctggtgaagtggcggttgcagaagggcaaggtgaccattgtggagttcatccagccggccgcacgcagccaggtggaggccactgagccacaggacgtggtggtctatgaccagagcacgcgggcagacagcttcctctccatcctgctgagcaagctggatggctgcttccacagcgaagacgtcctgaacaaggatctgatgacgcagaatggaataagctacgtcctctatgccagcaactcctgccccaagcctgacttcatctaccagagccacttcttgcgggtccccatcaacgacaactactgtgaaaagctgctgccctggctggacaagtccatcgagttcgtcgataaagccaagctgtccagctgccaagtcatcgtccaccgtctggccggcatctcctgctgtgccactatcgccatcgcctacatcatgaagaccatgggcatgtcctccgaagacgcctacagggctgagcccgggacgcgcggaccagctggtcagacgagctggccccggattcgcacttcaagtgctgcagctgccagatggagttcgaggagggcatggtggaggggcgcgcgcgcggcgaggagctggccgccctgggcaagcaggggagcttctcgggcagcgtggaggtcatcgagatgtcctgacccctccgctgccctc

SEQ ID NO: 44997 - DNA, 1233 bp, Homo Sapiens
atatttggaagttttaaaactggactttatttacctactagtgacatcgacctagtggtgtttgggaagtgggagaacctacccctctggactctggaagaagctcttcggaaacacaaagtcgcagatgaggattcggtgaaagttttagacaaagcaactgtacctattattaaattaacagattcttttactgaagtgaaagttgatatcagctttaatgtacagaatggcgtgagagcagctgacctcatcaaagattttaccaagaaatatcctgtattgccatacttggttttagtattgaaacaattcctattgcagagggaccttaatgaagtatttacaggtggaattggttcttatagtctctttttaatggcagtcagtttccttcagttacatcccagggaagatgcttgcatccccaatacaaactatggtgttctcttaatagaattttttgaattatatggacgacacttcaattatttaaagactggcatccggataaaggatggtggttcatatgtggccaaagatgaagtacagaaaaatatgctagatggctacaggccatcaatgctttatatcgaagatcctttacaaccaggtaacgatgttggaaggagttcatatggggccatgcaagtgaagcaggcctttgattatgcctacgttgttttgagtcatgctgtatcaccaatagcaaagtactatcccaacaatgaaacagaaagcatactaggtagaataattagagtaacagatgaagttgccacatatagagattggatatcaaagcagtggggcttgaagaatagacctgagccttcatgcaatggtccagtgtcgtcctcttctgccacacagtccagctctagtgatgtagattccgatgcaacaccatgcaaaaccccgaaacagctgctttgccgtccgtccactgggaaccgagtagggtcgcaagatgtatccttggagtcctctcaggcagttgggaaaatgcaaagcacccaaaccactaacacatccaacagcaccaacaaatctcagcatggatcagcaaggctctttcgttcttccagcaaaggcttccaaggtacaactcaaacaagccatggttccttgatgacaaacaaacaacatcaaggcaaatccaataatcagtattaccatggcaaaaagaggaaacacaagagggacgcgcccctctcagacctctgtagatag

SEQ ID NO: 44998 - DNA, 312 bp, Homo Sapiens
gaggtggagacctgctatgccctgcaggtagagcagctcaacagaatcctgctgcacctggagtcagagctggcacagacccaggcagaggggcagcaccaggcccaggagtacgagaccatgctgaacatcaaggtcaagctggaggctgagagcgccacctgccaccgcctgcttgaagatggcaagaacttcagtcttgatgatgccctggacagcagcaactccatgcaaactatccaaaagaccaccacccgctggatagtggatggcagagtggtgtctgagaccagtgacaccaaagttctgaga

SEQ ID NO: 44999 - DNA, 639 bp, Homo Sapiens
ctggtcatggcgctggggaacctgctcatcatcctggccatcagccctgactcccacctccacacccccatgtacttcttcctctccaacctgtccttgcctgacatcagtttcacctccaccacagtccccaagatgactgtggacatccaatctcacagcagagtcatctcctatgcaggctgcctgactcagatgtctctctttgccatttttggaggcatggaagacatactcctgagtgtgatggcctatgaccagtttgtagccaaatgtcaccctctatatcattcagccatcatgaacccgtgtttctgtggctttctacttttgttgtctttttttctcagtcttttagatgcccagctgtacaatttgattgccttacaaatgacctgcttcaaggatgtggaaattcctaatttcttctgtgacccttctcaactcccccatcttgcatgttgtgacaccttcaacaataacataatcctgtatttccctgatgccatatttggttttcttcccatctcggggacacttttctcttacgataaaattgtttcctccattctgagggtttcatcatcaggtgggaagtataaagccttctccacctatgggtctcacctgtcagatgtt

SEQ ID NO: 45000 - DNA, 540 bp, Homo Sapiens
aggactgctctacatctggcctctgccaatgggaattcagaagtagtaaaactcctgctggacagacgatgtcaacttaatgtccttgacaacaaaaagaggacagctctgataaaggccgtacaatgccaggaagatgaatgtgcgttaatgttgctggaacatggcactgatccaaatattccagatgagtatggaaataccactctgcactacgctatctataatgaagataaattaatggccaaagcactgctcttatatggtgctgatatcgaatcaaaaaacaagcatggcctcacaccactgttacttggtgtacatgagcaaaaacagcaagtcgtgaaatttttaatcaagaaaaaagcgaatttaaatgcactggatagatatggaaggactgctctcatacttgctgtatgttgtggatcagcaagtatagtcagccttctacttgagcaaaatattgatgtatcttctcaagatctatctggacagacggccagagagtatgctgtttctagtcatcatcatgtgtaa

SEQ ID NO: 45001 - DNA, 1565 bp, Homo Sapiens
atgggagaggccgaggtgggcggcgggggcgccgcaggcgacaagggcccgggggaggcggccaccagcccggcggaggagacagtggtgtggagccccgaggtggaggtgtgcctcttccacgccatgctgggccacaagcccgtcggtgtgaaccgacacttccacatgatttgtattcgggacaagttcagccagaacatcgggcggcaggtcccatccaaggtcatctgggaccatctgagcaccatgtacgacatgcaggcgctgcatgagtctgagattcttccattcccgaatccagagaggaacttcgtccttccagaagagatcattcaggaggtccgagaaggaaaagtgatgatagaagaggagatgaaagaggagatgaaggaagacgtggacccccacaatggggctgacgatgttttttcatcttcagggagtttggggaaagcatcagaaaaatccagcaaagacaaagagaagaactcctcagacttggggtgcaaagaaggcgcagacaagcggaagcgcagccgggtcaccgacaaagtcctgaccgcaaacagcaacccttccagtcccagtgctgccaagcggcgccgcacgtagaccctcagccctggtggcggcagagaagcgggcgaggcactgtggtcgctgagggggttggctgggtctgagtgccaccccccaggccacagtgataccatcccagtgccatgagcccacactgcccgccctcaggctctcaggtgaacgtggccgtcagcggggaaacgtgtgtgtcagttggaccatgtgggaccctgatggacctgaaagaccaggatcggtccagctcagatattgagggctctgaagcctagttctgtcttctctggagcagctgtggcttccccgtggctgcttggtgacatggattagcgctacgtgggctgcagcatttgggatccaggctacctagaggggcatcgggccagggaaaacctcggattagcaagcaataaaaacatgacctcactcttcctcaaaggagcccctggtcttccctgtgtgactcagttctttccatctgtttgtcccgctgcaagcctctttctgcgctgactgtgacattggaacgtggccttcctgtcaccccctccgtgccacgcactgaaggccacccccacccacctgggaaactaagaactggatattttgcctcattcacttgtactgtaacaatgtatataatttggttggtatttcactatttaatttttaagaagcctattttactagtgttttatatgaacaaagtactgcagaagttaaacctgtgttgtattttttctgagatgttttgctttaagagatactttttgctcagtttttatatgccagatacagagaatttgtagcggttatttttgtatgatctagtaacttgcaaacagaccaaatggatgagaggcggggaccgtgcagctgtcggctgatgaggaggcggccgccccagtgctgatggagatgccactttcgtgtgactgcgaacattaaagcacaaaaaaatccaa

SEQ ID NO: 45002 - DNA, 1737 bp, Homo Sapiens
agcccttggcgggggcatgcgtgcgacatggcctcggcggtgtttgagggcacgtcgctcgtgaacatgttcgtgcgcggctgctgggtgaacggcatccgcaggctcatcgtcagccggcgcggcgacgaagaggagttcttcgagatccgcacggagtggtcggaccgcagcgtgctctacctgcaccgcagcctggcggacctgggccgcctgtggcagcgcctgcgcgacgcctttcccgaggaccggtccgaactggcgcaggggccgctgcggcaaggactggttgccataaaggaagcccacgacatagagaccaggcttaatgaggtggagaagctgctgaagacgatcataagcatgccctgtaaatattctagatcggaagttgtgctcaccttcttcgaaagatctcctctggatcaggtgttaaaaaatgataatgtgcataaaattcaacccagctttcaaagtccagtcaaaatatcagaaatcatgaggtccaatggattttgtttagcaaataccgaaacaatagttattgaccacagtataccaaatggaagagaccagcagctgggcgtggacccaacagagcatttatttgagaatggcagtgagtttccctcagagctggaggacggggacgacccagcagcctacgtcaccaacctgtcatattaccacctggtccccttcgagacagacatttgggactgaacctctctatcaggcctcccccgcctcagctgttcactgccagctctgatgctgtccactgtgctggcccccatggtcacagctgctgccccagctctggaactcccagacgtcccaggccccactgacgccaggaggcctgggtgtcctgcaagtggagcagcaggggctcctagtgggccaggctgaccgcagagtctccagcaagctgaggtcacagccggaggccacagggcctgtgttctgagggtcttcactccctgcttggtgcccacagggctgcgcactgccagggcagggacagttcctgtggggctcgctctcactgctactgcttcctgggaggtgcatccctcttggtgaagtggcctagtgccccccagccaccctgactccccaccattccctcccacggcaaacgcacaaaacgtcttgagggagattttgacaagtcacccattccaggtgccacaggcaggggatgtttagtaatccaggatttctctgagaactgggatatgtggcctttttttttttctttttatcttttatctggaaactgggtttgggtcaaccccaggagtatttgcagaaggcccagcacagtggggggtattggctgcagggcagggaaggcattgccgactagataaccgtgtgagcttggactgagcgttggtggttcttcccaaaggaaaggaatttcttcccggcctgccaggtctctgggccttcagcgcgggtcctggtgctgcggccacaccaccctggggtgctcattgacagagctgccataatgaacttgaaaggacgggaatcacgagggaagctggggctcccctgcccacaggagaggatccccgttcttcaagcttctctgctcagtgtctactaacgaccgacatttgctaatgtaaataatagtaaattattgagaattctaattcttttacacagtctgtttttaatctattttaattaaataaaatctatgactctactttgatctgtcca

SEQ ID NO: 45003 - DNA, 2942 bp, Homo Sapiens
attttgggcttcgcttccaccgcaccagccggcctacccagtccttccggtatcgcgttgctcaggggcttttcaaccctctgtcagtcggaaaaccatcgccgaggccgtggggggactcctatccatggtgttgaagcgtcgagccgactagggaacctccttccccgccaggatggaagtcgcatcagtcgccgcctattgcgcgggctgttcttccctgtgttctgccgcccgctgccgcattcgctgccctctgtggcttttctgctggctcgaagatcggcctggagcagcgacgccaccgctgggcaaggccgagactctgtaggcttcctccgaatcccgtcgacctccagccgctgagcgccgcggccctacctgagagactgtcaagaaaaaggagatggagccggggacaggcggatcgcggaaacggcttggccctcgggcgggcttccggttctggccaccctttttccctcggcgatcgcaagcaggctcttctaagttcccgacgcctcttggcccggaaaactccgggaaccccacactgctttcctctgcccagcccgagactcgggtcagttactggacgaaactgctctcccagctccttgcgccgctccccggattgcttcagaaggtgctaatttggagccaacttttcggtggaatgtttccgaccagatggctagattttgctggagtctacagcgccctgagagccctgaagggacgggagaaaccagccgcccccacagcgcagaaatctttgagttcgctgcagctcgactcctcagacccctcggtcaccagtccccttgattggctagaggaggggatccactggcaatactcgcccccagacctaaaattggagcttaaggccaagggaagtgctttggaccctgcagcacaggcttttctcttagagcagcagctgtggggagtggagctgttgcccagtagccttcaatcccgtctgtactctaaccgggaacttggctcttcgccctctgggcctctaaacattcaacgcatagacaatttcagtgtggtatcctatttgctgaacccttcctacctggactgctttcctaggctagaagtcagctatcagaacagtgatggaaatagcgaggtagtcggcttccagacactaaccccagagagcagctgcctgagagaggaccattgtcatccccagccgctgagtgcagaactcattccggcctcgtggcagggatgtccacctctttctacggaaggcctaccagaaattcaccatcttcgcatgaaacggctggaattccttcaacaggctaacaaggggcaagatttacccacccctgaccaggataatggctaccacagcctggaggaggaacacagccttctccggatggatccaaaacactgcagagataacccaacacagtttgttcctgctgctggagacattcctggaaacacccaggaatccactgaagaaaaaatagaattattaactacagaggttccacttgctttggaagaagagagcccttctgagggctgtccatctagtgagatacctatggaaaaggagcctggagagggccgaataagtgtagttgattactcatacctagaaggtgaccttcccatttctgccagaccagcttgtagtaacaaactgatagattatattttgggaggtgcatccagtgacctggaaacaagttctgatccagaaggtgaggattgggatgaggaagctgaggatgatggttttgatagtgatagctcactgtcagactcagaccttgaacaagaccctgaagggcttcacctttggaactctttctgcagtgtagatccttataatccccagaactttacagcaacaattcagactgctgccagaattgttcctgaagagccttctgattcagagaaggatttgtctggcaagtctgatctagagaattcctcccagtctggaagccttcctgagacccctgagcatagttctggggaggaagatgactgggaatctagtgcagatgaagcagagagtctcaaactgtggaactcattctgtaattctgatgacccctacaaccctttaaattttaaggctccttttcaaacatcaggggaaaatgagaaaggctgtcgtgactcaaagaccccatctgagtccattgtggccatttctgagtgtcacaccttactttcttgtaaggtgcagctgttggggagccaagaaagtgaatgtccagactcggtacagcgtgacgttctttctggaggaagacacacacatgtcaaaagaaaaaaggtaaccttccttgaagaagttactgagtattatataagtggtgatgaggatcgcaaaggaccatgggaagaatttgcaagggatggatgcaggttccagaaacgaattcaagaaacagaagatgctattggatattgcttgacatttgaacacagagaaagaatgtttaatagactccagggaacatgcttcaaaggacttaatgttctcaagcaatgttgagttggcagcctgtagtcctagctagcatacactacctcttacctgagaggtgtcttttaaaaacaaatcttggcagctgtcctttgacatttttttttttagaggaaatgtaacttggatctagtttaatttttttttttgcaacatatcccactcagaaacattcaggtttgaagccagccctgataatgaaggatgaactagtgtgatttctaatcctcccttttttgatttagttggatgtgcttttaaatgtcctttgcctgcatgaggtggaaaggggacctttttgagttgtcattttgcactttcaaaacttattttcttggaaaacaatatttatagggcttaaagcccattttcatttctaatctaaattatgtgtgcctatctg

SEQ ID NO: 45004 - DNA, 948 bp, Homo Sapiens
atgcagccagaatctggggccaatggaacagtcattgctgagttcatcctgctgggcttgctggaggcgccagggctgcagccagttgtctttgtgctcttcctctttgcctacctggtcacggtcaggggcaacctcagcatcctggcagctgtcttggtggagcccaaactccacacccccatgtacttcttcctggggaacctatcagtgctggatgttgggtgcatcagcgtcactgttccatcaatgttgagtcgtctcctgtcccgcaagcgtgcagttccctgtggggcctgccttacccagctcttcttcttccatctgttcgttggagtggactgcttcctgctgaccgccatggcctatgaccgattcctggccatctgccggcccctcacctacagcacccgcatgagtcagacagtccagaggatgttggtggctgcgtcctgggcttgtgctttcaccaacgcactgacccacactgtggccatgtccacgctcaacttctgtggccccaatgtgatcaatcacttctactgtgacctcccacagctcttccagctctcctgctccagcacccaactcaatgagctgctgctttttgctgtgggttttataatggcaggtacccccatggctctcattgtcatctcctatatccacgtggcagctgcagtcctgcgaattcgctctgtagagggcaggaagaaagccttctccacatgtggctcccacctcactgtggttgccatattctatggttcaggtatctttaactatatgcgactgggttcaaccaagctttcagacaaggataaagctgttggaattttcaacactgtcatcaatcccatgctgaacccaatcatctacagcttcagaaaccctgatgtgcagagtgccatctggaggatgctcacagggaggcggtcactggcttga

SEQ ID NO: 45005 - DNA, 375 bp, Homo Sapiens
gaggggtggaagaccgtgtctgctaaagagaaaggaaaagaagacatggccatggcatatgaggcccattacaaaagaggaatgaaaacctatatccctcctaaaagggaaacaaaaaagttcaaggattgctcaaaaatcaaaggagaacatcctggtctatccattggtgatgtagcaacaaaattgggagagatgtgcaatagcactgctgcagatgacaagcagccttatgaaaagaaggctgcaaagctgatgggaaaatatgaaaagcgtgctactgcccctgatgcagtaaaaaagggaattgtcaaggctgaaaaaagcaagaaaaagaaggaagatgagaagcatgaagatgatgatgatgaaaaa

SEQ ID NO: 45006 - DNA, 1785 bp, Homo Sapiens
ccaccccggtgcgcgggtatggcggccagcctgtggatgggcgacctggaaccctacatggatgagaacttcatctccagagcctttgccaccatgggggagaccgtaatgagcgtcaaaattatccgaaaccgcctcactgggatcccagctggctactgctttgtagaatttgcagatttggccacagctgagaagtgtttgcataaaattaatgggaaaccccttccaggagccacacctgcgaaacgttttaaactgaactatgccacttacgggaaacaaccagataacagccctgagtattccctctttgtgggggacctgaccccggacgtggatgatggcatgctgtatgaattcttcgtcaaagtctacccctcctgtcggggaggcaaggtggttttggaccagacaggcgtgtctaagggttatggttttgtgaaattcacagatgaactggaacagaagcgagccctgacggagtgccagggagcagtgggactggggtctaagcctgtgcggctgagcgtggcaatccctaaagcgagccgtgtaaagccagtggaatatagtcagatgtacagttatagctacaaccagtattatcagcagtaccagaactactatgctcagtggggctatgaccagaacacaggcagctacagctacagttacccccagtatggctatacccagagcaccatgcagacatatgaagaagttggagatgatgcattggaagaccccatgccacagctggatgtgactgaggccaacaaggagttcatggaacagagtgaggagctgtatgacgctctgatggactgtcactggcagcccctggacacagtgtcttcagagatccctgccatgatgtagccaggccaaaggacaagccaggttgcatgatgtgagggagatgagagactcctttttaaaaattgtgaaacctttttggaaatatgatttgtaagattttaataatgactgtttttggagatcatgaatgtttctacaacactgctgcattcatttgaccatttgagtttgaagaccaagggaacaacttttaaacaaggttcaaattggtttccttcacaggaatcctttgtccaggtagttatccacataggacagtttgggattatccaaaactgggatgagcagcttgggataattcacacactaaagcctgagttcaaggtttctcagttgacaggtaggtatgtaaatcagggttctctggagtatttgtaggacctgccatatttgagtcctaacttggtgcaagtctggcagctaggtagaaaaggcactctagcaggtgtggtaggagcacgccccagaaggtagaatgtggtggggtgtgatggaacaggccagttggcctaagaattagtacttgctctaataatgggtttcatctattttcatgagttgcagcatctgcatatacaaggcctggatcactttaggatcaatattttgacacgggagaaggcagctcagaaaggattaaggaagatagctcaaagccaaagcagaccctccgtgtgaactttatactgctcacttccgtgtttcccaagtaaatggggaaactgtccaaccttgtcatgtgttgggacttactgcttgaggcaaagcattcatcctacatcataaaaaatctccaaagatctctttaagggctgggcatggtggctcactttgggagatggattgcttgagctcgggaagagaccagttcggtctctacaaaaaaatacaaacacaaatata

SEQ ID NO: 45007 - DNA, 1676 bp, Homo Sapiens
cggctccggtcggagacaatcgcgctgagcgggcgccgcagcgggagcgggagccggagctgcgaggcgcggcgcagagctggggctgcgcggggccgggcgagcgggaccaggcgggagccatggaccgctagggcccggcctagccccgcgatgccgccggcgagtggccccagcgtcctcgcgcggctgttgccgctgctggggctgctgctcggcagcgcctcccgggctcccggcaagtcgccgccggagccccccagcccgcaggagatcctgatcaaggtgcaggtgtatgtgagcggggagctggtgcccctggcccgggcctcagtggatgtgtttgggaaccggactctgctggcagctggcaccacagactcagagggtgtggccaccctgcccctcagttatcgcttgggcacctgggtgctggtcactgctgcccgccctggcttcctcaccaactctgtgccctggcgtgttgacaagctgcccttgtatgcgtctgtcagcctctacctgctccctgagcggccggccacgctcatcctctatgaggacctggtgcacattctcctaggctctcccggtgcccgctcccagcccttggtgcagttccagcgccgggctgcccgcctgcctgtcagctccacctacagccagctctgggcgtcacttacgcctgccagcacccagcaggaaatgcgggctttccctgccttcctgggcactgaggcctccagctcaggcaatggctcctggctggagctgatgcccctgactgctgtgagcgtgcacctgctgacaggtaatgggacagaggtgccgctctcaggccccattcacctgtccctgcccgtgccctccgagactcgtgccctcaccgtgggcaccagcattccagcctggagatttgaccccaagagtgggctgtgggtgcgcaatggcactggtgtaatccggaaggaaggccggcagctctactggaccttcgtctccccccagctggggtactgggtggccgccatggcctcccccacggctgggctggtcaccatcacgtcgggcatccaggacatcggcacctaccacaccatcttcttgctcaccatcctggcagccctggccctgctggtgcttatcctgctgtgtctgctcatctactactgccggaggcgctgcctgaagccgaggcaacagcaccgcaagctgcagctctcggggccctctgacggtaacaaacgagaccaggccacctcgatgtcccagctccacctcatctgtgggggacccctggaacccgccccgtcgggggaccccgaggctccgcctccaggccccctccactcggccttctccagctcccgggacttggcctcctcccgggatgacttcttccgcaccaagccgcgctctgccagccgcccggccgccgagccttcgggtgcccgcgggggcgagagcgccgggctcaagggcgctcgctcggccgagggccccggcgggctggagcccggcctagaggagcaccggcgggggccctcgggggctgcggccttcctgcacgagccgccctcgccgccgccgcccttcgaccactacctgggccacaagggggcggccgagggcaagacccccgacttcctgctgtcgcagtcggtggaccagctggc

SEQ ID NO: 45008 - DNA, 936 bp, Homo Sapiens
atggaaaaccaatccagcatttctgaatttttcctccgaggaatatcagcgcctccagagcaacagcagtccctcttcggaattttcctgtgtatgtatcttgtcaccttgactgggaacctgctcatcatcctggccattggctctgacctgcacctccacacccccatgtactttttcttggccaacctgtcttttgttgacatgggtttaacgtcctccacagttaccaagatgctggtgaatatacagactcggcatcacaccatctcctatacgggttgcctcacgcaaatgtatttctttctgatgtttggtgatctagacagcttcttcctggctgccatggcgtatgaccgctatgtggccatttgccaccccctctgctactccacagtcatgaggccccaagtctgtgccctaatgcttgcattgtgctgggtcctcaccaatatcgttgccctgactcacacgttcctcatggctcggttgtccttctgtgtgactggggaaattgctcactttttctgtgacatcactcctgtcctgaagctgtcatgttctgacacccacatcaacgagatgatggtttttgtcttgggaggcaccgtactcatcgtcccctttttatgcattgtcacctcctacatccacattgtgccagctatcctgagggtccgaacccgtggtggggtgggcaaggccttttccacctgcagttcccacctctgcgttgtttgtgtgttctatgggaccctcttcagtgcctacctgtgtcctccctccattgcctctgaagagaaggacattgcagcagctgcaatgtacaccatagtgactcccatgttgaacccctttatctatagcctaaggaacaaggacatgaagggggccctaaagaggctcttcagtcacaggagtattgtttcctcttag

SEQ ID NO: 45009 - DNA, 1269 bp, Homo Sapiens
ctgggaatggccatgtggaacaggccatgccagaggctgcctcagcagcctctggtagctgagcccactgcagagggggagccacacctgcccacgggccgggagctgactgaggccaaccgcttcgcctatgctgccctctgtggcatctccctgtcccagttatttcctgaacccgaacacagctccttctgcacagagttcatggcaggcctggtgcagtggctggagttgtctgaagctgtcttgccaaccatgactgcttttgcgagcggcctgggaggtgaaggagcagatgtgtttgttcaaattttactgaaggaccccatcttgaaggacgacccgacggtgatcactcaggaccttctgagcttctcactcaaggatgggcactatgacgcccgggccagagtcctcgtttgccacatgacctccctgctccaagtgcccttggaggagctggatgtccttgaagagatgttcctggagagcctgaaggaaatcaaagaagaggaatctgaaatggccgaggcatcccgaaagaagaaagaaaaccggaggaaatggaagcgttatctcctgataggcctggcgactgtcggaggcggaacggtgatcggtgtgactggaggtctagctgcaccccttgttgccgctggagcagcgacgattattggcagcgccggggcagcggctctgggctcagcagccggcatagccatcatgacctcgctgtttggtgcagctggagctggcctgacaggatacaagatgaagaagcgagtgggagccattgaagagttcacgtttctgcctctgacggagggcaggcagctgcacatcaccatcgccgtcacggggtggctcgcttctggcaaataccgcaccttcagtgccccgtgggctgccctggcccacagccgtgagcagtactgcctggcctgggaagccaagtacctgatggagctcggcaatgccctggagaccatcctcagtggtctcgccaacatggtggcccaggaggccctaaagtacacagtgttgtctggcattgtggctgccctgacctggccagcctcactcctcagtgtcgccaatgtcatcgacaacccctggggggtgtgtctccatcgatcagcagaggttggcaagcacctggcccacatcctgctctcccggcagcaggggcgacgacctgtcaccttgattggcttcagcctgggagccagagtcatctacttctgtctgcaggagatggctcaagagaaa

SEQ ID NO: 45010 - DNA, 1783 bp, Homo Sapiens
gagaggtgttaactgagttgagcgttaaagaatgggtggcagttttgcaggagtgaaagcagaagctcagagaacctggtgtgtttgagaggaaggtaagaaggatttttaatgcacctgtgagccaatttttggtttctgaagaggaggaaggatgcagagtaaaaggaaatgtaaaagtgttgtacaccagctctcagtaaccttagaagatttatatgatgctgcaacaagaaaacaggctctgcaaaataatgtgctttgtgacaggtgtgaagacagaggtggggaaaaaaaaaaggaacagtacagtgctgtcataattgccaaggtattggaatgcaaataagaattcatcagatagaacccggaatagctcagcaaattcaagctgtgtgcatggagacccagggccatggggaacagatcagtcctcaagatagatgtaaaagctgcaacagaaagaagatagttttgggagaagacgattctagaaattcatattgacaaaagcatgaaagatggccagaaaataacatctcatgatgaaagagaccaaaaaccaggactggagccaggagatattatcattgcattagatcagaaggaccatgctgtttttacttgacaaagaaaagaccttttcatatgtatggatatacagctggttgtagtattgcatggcttctgaaaaccaatatccactcttgacaactgaaccatagtcatcatctctcatccaggtcaaactgtcaagcatggagccatcaagcatgtgttaaatgaaggcaggccaatttattgtagaccacatgaagagtcacttaatcattgaatttaaggtaaactttcttgataatggctttcccttttttgacaaactccttgctggaaaaactcctacaaaagagtaaagaagtagaagagactgatgagatgaatcaagtagaatttgtggactttgattcaaatcaggaaagatgatgctgatgccactacagtgcagaagcaaatgtgggaccattacaatggaaaagcatgaggatgataaacatcatttcagaggtgttcagtgtcaaacatcttaatgggaccagtgataatactcgctgctggcattttatgggcagtagtgaatgagcaaaggactgtaatcctaatatgctcactacttgctattgttttggttttactattcaactagagtagtgttttaaaaattaaaggaagaataaatacaatttttttaaaagttgacaaggatgagcatggccaacaaacctctctccactttggcaacaaatagttttaaatttggtttccagagtaagttaatagaaggtataacacagagaaccagaaatacaaagtgctctattagtgagatatcagaagtgattattgctgattattatctgatattttataaaacaatctcttttgagatattaaatatatactgagattcataaaacggtagatacctaaattatctcatttagtaaatcagtggggctatttaatccagataatttaaaccctaagaataattttattttccagtagattgacttttacttattttatttattttcttttacataaactcagagggaattacactttttaagaccatgtcatttaatatttccagttttaaagagaaatagagtatttggcataatgaatgcctattttactatttgtctttatgtcatatgtaatttttcctcttaaattttattttaaatgtgtttcaaagtccaataaagggaacactaat

SEQ ID NO: 45011 - DNA, 303 bp, Homo Sapiens
ttgaagctaaacccatacacacagatcatgcgccggaacaccattcttcgcccaggaatcacaaactctgggtggataaggcagcagccggcagcagcagcactagaagccagatcagatgagaagggggttgtaggcaagaagcctgtggtatgtaagaaaggaaagaaggccattgttgatgttaagaagcagaagaagcctctggtgggagaaaaggcagcagctaccaagaaaccagcagctgaaaagaagccggcaaaaaagaaatctactacggaggaaaaggagcctgctgcataa

SEQ ID NO: 45012 - DNA, 963 bp, Homo Sapiens
atgcgctcagcggcagcgcggcgggcgggacccggcgggggcgcggcccggggcggcccccatctcggcggctgcggctcggcggcccggggacgcggggcaggccgcgggggcgccgcaggggcccagccgccagctcccacccgcccgctccgcgtggacgcggctccgggccgactccggccggctctggcggcggcagcggccacgatcgcctcccgagccagagcccgagccagagcgccgaagcccaggcccgagcgcccccgccggcggcgtccggaagtgcgggggcggggccggggcgcggggacgaggccacagagcatgaggtcacagccccaggcaccccacggcagagaggcacgggcccccagcagcagccccagcaccagctctggccagcccaaccctgtcagaaccaaccctctgctctccacccaggcctcagccaaccatcaggccctccccaaggaggaggatgtcagtgtgactgtcaccatggccatggatgacctgacggcctctgcccccgggacccaccattggctgggcacctgtggtcaggaggacccacccacagagagcggccccgatacctgcacaccccagtgcccagcggttccccctcgagctggcaaggggacattaaatgggagcaaggacgcaagcagtgtggaggtggccgcgtcggcgacgtatgggccccgtggtgctgcggtgcacgacctctgtgctgtcaccccacagtgtccgctcctgcacgtacacgcgtgcacgcgcacacacggcgcaccagcattggcccctggcaaagctttcccgtatgtctggagacgaggcttctcaaccgtcacccgtggacatcctgggcactgcagggcactgagcatccccggaaccaccccctgcccccagccccgtgacagccagaaacagtgttggcttgtccacgcgctctga

SEQ ID NO: 45013 - DNA, 612 bp, Homo Sapiens
atgcccaccctttcagtgttcatggatgtgcccctcgcccacaagctagagggcagcttgttaaagacctacaaacaagatgattacccgaacaagatattcttagcctatagagtctgcatgacaaatgaaggccatccctgggtttctctcgtggtgcagaagactcgactacagatttcacaggatccctccctgaattatgagtacttgcccaccatgggcctgaaatcattcatccaggcctctctagcactcctctttggaaagcacagccaagccattgtggagaacagggtagggggtgtacacactgttggtgacagtggtgccttccagcttggcgtccagtttctcagagcttggcataaggatgctcgtatagtttacatcatctcttctcaaaaagaactgcatggactcgtcttccaggacatgggctttacagtttatgaatactctgtctgggaccccaagaagctatgcatggaccccgacatactcctcaatgtggtggagcagatcccacatggctgtgtccttgtgatggggaacattatcgactgcaagttgacaccaagtgggtgggcaaagttgatgtccatgataaag

SEQ ID NO: 45014 - DNA, 1008 bp, Homo Sapiens
ccagagcaagaagagggcgaggaagaagatgcctcggcccggccgcaacacgtacagcgaccagaagccgccctactcgtacatctcgctgaccgctatggccatccagagctctcccgagaagatgctgccgctgagcgagatctacaagttcatcatggaccgcttcccctactacagggagaacacgcagcgctggcagaacagtctgcgccacaacctctccttcaacgactgcttcatcaagatcccgcggcggccggaccagccaggcaagggcagcttctgggcgctgcacccaagctgcggggacatgttcgagaacggcagcttcctgcggcgccgcaagcgcttcaaggtgcttaagtccgaccacctggcgcccagcaagccagccgacgcggcgcagtacctgcagcagcaggccaagctgcggctcagcgcgctggcggcctcgggcacgcacctgccacagatgcccgccgccgcctacaacttgggcggcgtggcgcagccctcgggcttcaagcaccccttcgccatcgagaacatcatcgcgcgggaatacaagatgcctggggggctggccttctccgccatgcagccggtgcccgctgcctacccgctccccaaccagttgactaccatgggcagctcgctgggcaccggctggccacacgtgtatggctccgccggcatgatcgactcggccacccccatctccatggcgagtggcgactacagcgcctacggcgtgccgttgaagccgctgtgccacgcggcgggccaaacgctgcccgccatccccgtgcccattaagcccacgccggccgccgtgcccgcgctgcctgcgctgccagcgcccatccccaccttgctctcgaactcgccgccctcgctcagccccacgtcctcgcaaacagccaccagccaaagcagccccgccacccccagcgaaacgctcaccagcccggcctccgccttgcactcggtggcggtgcactgacc

SEQ ID NO: 45015 - DNA, 1659 bp, Homo Sapiens
atgcattgtgagaggtttctatgtatcctgagaataattggaaccacactctttggagtctctctcctccttggaatcacagctgcttatattgttggctaccagtttatccaaacggataattactatttctcttttggactgtatggtgcctttttggcatcacacctcatcatccaaagcctgtttgcctttttggagcaccgaaaaatgaaaaaatccctagaaacccccataaagttgaacaaaacagttgccctttgcatcgctgcctatcaagaagatccagactacttaaggaaatgtttgcaatctgtgaaaaggctaacctaccctgggattaaagttgtcatggtcatagatgggaactcagaagatgacctttacatgatggacatcttcagtgaagtcatgggcagagacaaatcagccacttatatctggaagaacaacttccacgaaaagggtcccggtgagacagatgagtcacataaagaaagctcgcaacacgtaacgcaattggtcttgtccaacaaaagtatctgcatcatgcaaaaatggggtggaaaaagagaagtcatgtacacagccttcagagcactgggacgaagtgtggattatgtacaggtttgtgattcagacactatgcttgacccagcctcatctgtggagatggtaaaagttttagaagaagatcccatggttggaggtgttgggggagatgtccagattttaaacaagtacgattcctggatctcattcctcagcagtgtaagatattggatggcttttaatatagaaagggcctgtcagtcttattttgggtgtgttcagtgcattagtggacctctgggaatgtacagaaactccttgttgcatgagtttgtggaagattggtacaatcaagaatttatgggcaaccaatgtagctttggtgatgacaggcatctcacgaaccgggtgctgagcctgggctatgcaacaaaatacacagctcgatctaagtgccttactgaaacacctatagaatatctcagatggctaaaccagcagacccgttggagcaagtcctacttccgagaatggctgtacaatgcaatgtggtttcacaaacatcacttgtggatgacctacgaagcgattatcactggattctttcctttctttctcattgccacagtaatccagctcttctaccggggtaaaatttggaacattctcctcttcttgttaactgtccagctagtaggtctcataaaatcatcttttgccagctgccttagaggaaatatcgtcatggtcttcatgtctctctactcagtgttatacatgtcgagtttacttcccgccaagatgtttgcaattgcaacaataaacaaagctgggtggggcacatcaggaaggaaaaccattgttgttaatttcataggactcattccagtatcagtttggtttacaatcctcctgggtggtgtgattttcaccatttataaggagtctaaaaggccattttcagaatccaaacagacagttctaattgttggaacgttgctctatgcatgctattgggtcatgcttttgacgctgtatgtagttctcatcaataagtgtggcaggcggaagaagggacaacaatatgacatggtgcttgatgtatga

SEQ ID NO: 45016 - DNA, 2397 bp, Homo Sapiens
tgcttttgctgtgagcagccccaagcagctgggcgctccatcagaggcaactatgacttttgcaaagcaaacgtgcaaccccaagcagcggtctcccgggccggggctgcgcggccgccgctgtgctggcttttaacggtgggagggcaccatcctcttgctctgctctcgttctccagaaggctgtcccggggcccccactctccgtcccgctccggggacagtggctcgcctgctatgcgcggcagcccgcgccggggccggcaccagcagcgcccgggcggatgcagcgagcccacggaggggcatgcttccacgcaccaagtataaccgcttcaggaatgactcggtgacatcggtcgatgaccttctccacagcctgtcggtgagcggcggcggaggcaaggtttcggcggcgcgcgcgaccccggcggcggctccctacttggtgtccggcgaggcgctgcgcaaggcgcccgacgatgggcccggcagcctgggccacctgctccacaaggtgtcccacctgaaactctccagctcgggcctccgcggcctgtcgtcggccgcccgggagcgggcgggcgcgcggctctcgggcagctgcagcgcgcccagcctggccgccccggacggcagtgcgccctcggcgccccgcgccccggccatgagcgccgccaggaagggccggcccggcgacgagccgctgcccaggccccctcggggggcgccgcacgccagcgaccaggtgctggggcccggagtcacctacgtggtcaagtacttggggtgcattgaagttctgcgctcaatgaggtctcttgacttcagtacaagaacacaaattaccagggaagccatcagccgcgtctgtgaagctgtgcctggtgcgaagggagccttcaagaagagaaagcctccaagcaaaatgctgtccagcatcttgggaaagagcaacctccagtttgcgggaatgagcatctctctgaccatctccacggccagtctgaacctgcgaactccggactccaaacagatcatagcgaatcaccacatgcggtccatctccttcgcctctgggggagacccggacacaactgactatgttgcatatgtggctaaggaccctgttaatcgcagagcttgtcacattttggaatgctgtgatgggctggcccaggatgtcatcggctccatcggacaagcctttgagctccggtttaagcaatatttacagtgtcctaccaagattcccgctctccatgatcgaatgcagagtctggatgagccatggacggaagaggagggagatggctcagaccacccatactacaacagcatcccaagcaagatgcctcctccagggggctttcttgatactagactgaaacccagaccccatgctcctgacacagcccagtttgcaggaaaagagcagacttattaccagggaagacacttaggagacacttttggcgaagactggcagcaaacacctttaaggcaagggtcctcggacatctacagcacgccagaagggaaactgcacgtggcccccacgggagaagcacccacctacgtcaacactcagcagatcccaccacaggcctggccggctgcggtcagcagtgctgagagcagcccaaggaaagacctctttgacatgaaaccttttgaagatgctctcaagaaccagcccttggggcccgtgttaagcaaggcagcctccgtggagtgcatcagccctgtgtcacctagagccccagatgccaagatgctggaggaactgcaagccgagacttggtaccaaggagagatgagcaggaaggaggcagaggggctgctggagaaagacggagacttcctggtcaggaagagcaccaccaacccgggctcctttgtcctcacgggcatgcacaatggccaggccaagcacctgctgctcgtggacccagaaggcacgatccggacaaaggacagagtctttgacagtatcagccacctcatcaaccaccacctagaaagcagcctgcccattgtctctgcagggagtgagctgtgtctccagcagccagtggagaggaagcagtgacctggccagcactgctcccagcactgcgcaccaggtcaggaggacctggagtggactagaatcggggctgctggaactgggacagctgcctgtggctcagagccttcttcaaaagcttcaaaaggaaggcttcctttaaggtcaagtttcataaacttggttctgaatttctcatatgcatattaaaggtgtacatacctatacatcctgtacaaattatccctctatatttatattttttaagactaagaaagatgtaagactaatgttctgtgctgtatgtttttaatgaaaaaaaaaaataa

SEQ ID NO: 45017 - DNA, 1203 bp, Homo Sapiens
gtgacagatgccacccctgactccctcagcctgtcctggatggtccccgagggccagtttgaccacttcctggtccagtacaggaatggggatgggcagcccaaggtggtgcgggtgccggggcacgaggacggggtcaccatctcaggcctggagccagaccacaagtacaagatgaacctgtacggcttccacggtggccagcgcgtgggccccatctctgtcattggggtgacagctgcagaggaagaaactcccgcccccacagaacccagcacggaggccccggagccccctgaggagccgctcctgggggagctgacagtgacaggatcctcccctgactcgctgagcctctcctggaccatcccccagggccgcttcgactccttcactgtgcagtacaaggacagggacgggcggccccaggtggtgcgtgtcaggggcgaggagagcgaggtcaccgtggggggcctggagcccgggtgcaaatacaagatgcacctgtacggcctccacgaggggcagcgcgtgggcccagtgtccgctgtgggtgtgacagctccaaaggatgaagccgagaccacccaagcagtgcctaccatgacccctgagccccccatcaagcctcgcctgggggagctgaccgtgacagatgccacccccgactccctcagcctgtcctggatggttcccgagggccagtttgaccacttcctggtccagtacaggaatggggatgggcagcccaaggcggtgcgggtgccggggcacgaggacggggtcaccatctcaggcctggagccagaccataaatacaagatgaacctgtacggcttccacggtggccagcgcgtaggccctgtgtctgccattggggtgacggaggaagagacccccagccccacagaacccagcactgaggccccggaggcccctgaggagccgctcctgggggagttgacagtgacaggatcctcccctgactcgctgagcctctcctggaccgtcccccagggccgcttcgactccttcaccgtgcagtacaaggacagggacgggcagccccaggtggtgcgtgtcaggggcgaggagagcgaggtcaccgtggggggcctggagcccgggcgcaaatacaagatgcatctgtacggcctccacgaggggcagcgcgtgggcccagtgtccaccgtgggcatcacg

SEQ ID NO: 45018 - DNA, 267 bp, Homo Sapiens
aagagggcaagacatcctacacaagcacatttcaagattttgctcacatcatctctgctaaaattcctttatccaaagcaaggaacacaactggttcaaataagcacaggcctccaaatatccagatctaaaaatggagtgttcaccgctccttatttatcactgcaagagattctggggctggcagctagtgacatgagctggaatcctcttcctgaaattgctgtcttcttggatgggctctccacatcttccaccacgaagtaa

SEQ ID NO: 45019 - DNA, 1047 bp, Homo Sapiens
atgggccattgctgctgcaagccttataactgccttcagtgcctggacaagacgaatgaaagtgcccttgtgaaagaaaaagagctgtcaatcgaacttgcaaacatcagggatgaagttgccttccatacagcaaagtgcgagaaactacaaaaggagaaggaggagctggagaggcggttcgaggacgaggtgaagaggctgggctggcagcagcaggccgagctccaggagctggaggagcggctgcagctgcaattcgaggcggaaatggcgcgcctgcaggaggagcacggtgaccagctgctgagcatccggtgtcaacaccaggagcaggtggaagatctcaccgccagccatgatgctgctctcctagagatggaaaataaccacacagttgccatcacaatcctgcaggatgaccacgaccacaaagtccaagaattgatgtccactcatgagcttgaaaagaaagaattggaagaaaattttgaaaaactgcggctgtcattgcaggaccaggtggacacgctgaccttccagagccagtctctgcgggacagagcccgccgcttcgaagaggccttgaggaagaacacagaggagcagctggagattgcattggctccttatcagcacttggaagaagacatgaagagtctgaagcaggtattagaaatgaagaatcagcaaatacacgagcaagaaaagaagattcttgagctggaaaagctggcagaaaagaacattatcctagaagaaaagatccaggttctccaacagcagaacgaagacctcaaagcaaggattgaccaaaacacagttgtcaccagacagctgtcggaggaaaatgctaacctccaggaatatgttgagaaggaaacccaggagaagaagagattgagccgaaccaatgaagagctgctttggaagctccaaactggggacccgaccagtccgattaaactctcgcccacatctcccgtttaccgcggctcctcctcggggccctcctctccggccagagtcagcacaacacccagatga

SEQ ID NO: 45020 - DNA, 540 bp, Homo Sapiens
cccagcattcagaatgggagagaatatcactgggtcacaatcactctggacttaagacaggtagtgtctttgtttcaggtctttcaagttgcatatgtcatcattaaagctgccaatgcccctcgacctggaaactggattttggagcgttctctggatggcaccacgttcagcccctggcagtattatgcagtcagcgactcagagtgtttgtctcgttacaatataactccaagacgagggccacccacctacagggctgatgatgaagtgatctgcacctcctattattccagattggtgccacttgagcatggagagattcatacatcactcatcaatggcagaccaagcgctgacgatctttcacccaagttgttggaattcacttctgcacgatatattcgccttcgcttgcaacgcattagaacgctcaatgcagatctcatgacccttagccaccgggaacctaaagaactggatcctattgttaccagacgctattattattcaataaaggacatttctgttggaggcatg

SEQ ID NO: 45021 - DNA, 1536 bp, Homo Sapiens
atggtgcccagcttcctctccctgagcttctcctccttgggcctgtgggcttctgggctgatcttggtcttaggctttctcaagctcatccacctgctgctgcggaggcagacgttggctaaggctatggacaaattcccagggcctcccacccactggctttttggacatgccctcgagatccaggagacggggagcctggacaaagtggtgtcctgggcccaccagttcccgtatgcccacccactctggttcggacagttcattggcttcctgaacatctatgagcctgactatgccaaagctgtgtacagccgtggggaccctaaggcccctgatgtgtatgacttcttcctccagtggattgggagaggcctgctggttcttgaggggcccaagtggttgcagcaccgcaagctgctcacacctggctttcattatgatgtgctgaagccctatgtggccgtgttcactgagtctacacgtatcatgctggacaagtgggaagagaaagctcgggagggtaagtcctttgacatcttctgcgatgtgggtcacatggcgctgaacacactcatgaagtgcacctttggaagaggagacaccggcctgggccacagggacagcagctactaccttgcagtcagcgatctcactctgttgatgcagcagcgccttgtgtccttccagtaccataatgacttcatctactggctcaccccacatggccgccgcttcctgcgggcctgccaggtggcccatgaccatacagaccaggtcatcagggagcggaaggcagccctgcaggatgagaaggtgcggaagaagatccagaaccggaggcacctggacttcctggacattctcctgggtgcccgggatgaagatgacatcaaactgtcagatgcagacctccgggctgaagtggacacattcatgtttgaaggccatgacaccaccaccagtggtatctcctggtttctctactgcatggccctgtaccctgagcaccagcatcgttgtagagaggaggtccgcgagatcctaggggaccaggacttcttccagtgggatgatctgggcaaaatgacttatctgaccatgtgcatcaaggagagcttccgcctctacccacctgtgccccaggtgtaccgccagctcagcaagcctgtcacctttgtggatggccggtctctacctgcaggaagcctgatctctatgcatatctatgccctccataggaacagtgctgtatggcccgaccctgaggtctttgactctctgcgcttttccactgagaatgcatccaaacgccatccctttgcctttatgcccttctctgctgggcccaggaactgcattgggcagcagtttgccatgagtgagatgaaggtggtcacagccatgtgcttgctccgctttgagttctctctggacccctcacggctgcccatcaagatgccccagcttgtcctgcgctccaagaatggctttcacctccacctgaagccactgggccctgggtctgggaagtag

SEQ ID NO: 45022 - DNA, 725 bp, Homo Sapiens
aaagaaggcagctgggcagctgataggaacaacattcagctccgaggctgaaagggaaacatcagccgcccggggggagttaaaatgagtgacaacactactctgcctgctccagcttcaaaccagggtcctaccaccccacgcaaaggccctcccaagttcaagcagaggcagactcgccaattcaagagtaaacctccaaagaaaggtgtgaaaggatttggagatgacattccaggaatggaggggctaggaacagatatcacagtgatttgtccatgggaggcattcagccacctggaattgcatgagctcgctcagtttgggattatctgaagtgccagaggttctgccactctcaatgacatctgctgtaattttggttgcttttgccctgttgatctgccggagtcttgaaattcagctgattggaagtggtttctttgactttcaaggtcattccctatcagttactactaagagttctcttactgtcagaatctctcttgcagtacagctcaaaatagtggatgcatttcaaacttgaccaccttttcctaccagctagttagaagtcatcaatatttctctacattttgtttatctgtaagtcctttaaatctatttttgctaggcattcattatgattaatagtagacttttaagacaacatttatgtcactccccacctcctcatatttaataaaggagatatttaccttgaa

SEQ ID NO: 45023 - DNA, 3660 bp, Homo Sapiens
ggagcgggcctcgcggggcgccgcccgcctcaccttacctggcgcctcctcccgcccaggcgcccggccccgcaacgcgaaataaatgggcccagacccccactccacccgtccccacccccgcgccccagccctggcagcccgggacgcgaggggtactgggcggtaggcccgctctcaccttccgcgctcgctcagctcctctcggctcctcctcctcctcccggcggtgggtgccgcctagccgggagtgagggcgcgagtgtgcgcgagctaccgcttcactttctccctcctgccgccgccgccgcgctgcccgtggcggggctcccctcaggacaggggaactgcgagggaagggatgatgggggggcgggagggagcgaggcgacgcgggcggggggggaaggggggactgaggggcgaggtgcgaagggctcagatggcctctgaggcaggaggtggtaactggatgcggagaccaggttcctcgagggggctcacgaaagcgcggggctccgtggaaaagggaatgagagtccaagggggaaggcgtctgtgggggaggactgcagagcctgtgagggaagcgcgatgggcgagcgagggggcgggagcgtgtgggggaagccgtgagggggcgtctactgtgcagccaccaccttcggctccggctgcagccgcgggagggcagcctcccccgcccacagccgcgctattgtacgccgcccggcaggcctgaccgcctagttcactggctcccctactcctcctcctcccgcctcctcctcccctctgccctttccccttctccccctccccctcccccactccccctccccggcgcggcggcggcggctgcggctccggtggagccgtgcccgccccgcctcccgcaggtgagagggggcggggagggcctgaccgacccgtgggagcgaggccaaaccctggcccgcatgagggcgaacgcctgggattacgtcatcggcgcgtgacgccagaggctggggaatcacccgcttgctgcgtgacgtcatcgcgtcgcgtcactgttctcggtccgctgtccgtggcgggttgtttccgtgcagcctttctatcagacaattttgggacgatttctgggagggctactgtagtagtcaggatggagaaagacggctaacttccggcgctgagggtccttttcaggttaacaaagcaccaccgcatctatgagctcgttgtcaagggctgaatttgaaaactatccgatgtcgtgtgatctcacagccagacatgtattatgttttctttctgtgggagagggggcaggggtgggaggaagacaaagaaattataacggagatgtttgaactaatgtgaactgacatacgaaaagaatgggcttcctttcacgttttttcccctaccgtggagggtactttcgacccaaagctttctttctcctgagctcagattgtgtatttcccaatacctcccgagcagcattacctgcatactcttcgtacctcagattcaacatgtgcgaaactgagacagcattagaaaggctaagagtccggaatcaggttgccttgcttgaaatcctagctattcaaatattagtgataggaccttgacatttctaagccgtaatttttctgtaataataagtagtaccttaactaggtcttcctaagcctcagttttaccatggtaatagtaacaagccctttagaatgttggctattattattatttcccccccaaaattgcttcttacgttcctttccgttctcaatgaatgggccacccattcaacaatcccctaagccaggaacctagacatactaatagctccccgttcttcctctctcaacatccatatcaagttggacaccaagtcttgtagcttctcctaaatatttttcaagtccttgcctgtgtcgtcttctactaccaccacctgaacaactggagcaacctttagtctcttcaaactcaatctatttttctcactagttacctgagtagccttataaaagcacaaatctgatgatgtcctcccgtttaaacaccgaaaggattttattgctttcaggataaagttcaaactcctgaacttggcactttattacctgactgcttacactagcctttctagctttgtctcacatcatttattttttgctccaagcacactgaaatattaacgttatttgaatacacatttcttcatgtcttcaagctcttccctacttagctgactggccaacacctattcattgtacaaagctgagctcaaatgtcattcatattcatattcatattcatttgactaatatttctaaagtttccctaagccttaacaaaactgtaattctatagtatttctatgccttttatggaagtaactgcatttgtgtatctaatttcttgagttccaagtcatattcctttccatatcctcagcacctaaaacagtgcttgacatatacctaagtatcaatatgttgttaaaatatatttaataaggccaggcgcggtggctcacgcctgtaatcccagcacttgggaggccaaggcagccagatcacctgaggtcagaagtttgagaccagcctggccaatatggcgaaaccccatctctactaaaatacaaaaattagccgggcgtagtggcaggcacctgtaatcccagctactcaggaggctgaggcaggagaattgcttaaacccaggaggcggtggttgtaggaagctgtgattgcaccaccacactccagcctgggtgacaagagcaaaactctgtctcaaaaaaaatgtatttaataaatgttcctattgttctttctatgtgccaggtactgttctgagcactttacaaacactgtctttaaacctctaccctctacggtagatactgttgttatcctcacccatcttattgatgcgggaactgaggcacagaggggttaagtaacttaacccaggatcctaacccagtaaattgactctaatctggattgtcttttcgtgatctctgcactaggcagaataatggctcatccaatggaatgttcacattccaatccctgggaactatgaatatgttaccttccatgacaaaaggactctgcagatgtgagtaaattgaggatttggggaaagggactctccagcttttgggagcagactggaaaatggaaaaggcaagaaaatggatcctcccttggagcctctggaaaggaagagatggtatcctgatgataccttaattttagcccactgacatccatttaggacttctgaactacagaactgtgaaataataaatgtgtattgttggccaggcacagtggctcacatctgtaatcccagcactttgggaggccgaggcgggtgtatcacctgaggtcaggagttcaagagcagcctggccaacatggtgaaaccccatctctactaaaaatacaaaattagctgggcgtggtggcacatgcttgtaatcccagctactcgggagctgaggcaggagaatcggttgaatccaggaggtaaagatgctgtgagccgagattgcgccattgcacttaagcctagagacaagagtgaaactccatctcaaaaaataaaataaaaaaataaaaataaatgtgtattgttttaagccca

SEQ ID NO: 45024 - DNA, 2979 bp, Homo Sapiens
tctagattcattcagcttttccagaccaggcatcaccgagcggagagaggggaaacaccctggcttctctttggcacatcagcccctagttcttgagagagaagggcagggtggtctactcaccatgtctgtatcctgccgttcttcatttgactcatcctggatttctaactcttcttcctcgtcctcttccataaggctgagtctgatgtaggggcaaagagactggcttttcaaactgttctttgaggacccctgagagtttctcagacacccggggtgggggaagtggggagcagtaagtacagcatagtagtttcccgattgtgctgacaggaaatctgaagtgaagacaggagatgatgagaaaagctcaccgcatcagctggttgcccaggccaggacctgaagggttgtgtggagtctggaaatattgtggacccaagaaccttgacctctcggtgcctgcgacgggctgactgctgggaatgaagcaggatcaatgatgggataaaaatcaagggtaagaagaggatgtaaggcagctggtgttaatggggagaaaagctcagagagatgcattttaaagctaaacaatggagaagggtttgagaagaacccaacaatgtgggagtgctacagcagggaaccatgaaacagaaacagcaagatggaggcagccagacaccaaactgggaactcagacacccagattccctccatggcctcacccctgggcaaaatccaactctgagccatcttcttcctccatctctttcaacccccacaggggctgcctgctcttcacagctgtggaggtgagggtgggcgtgggcgggatgctgttcagctgcagactttcttcctgggacgaggagacgtcctctctgttaggcttggcaggccctgccaagcagatgcatacattaaccacagcccagggcctgcgacaggtgtgctctctttccaagacctgcccaggatttagtaagggaaagtcaatcaggaagagaatggaaaacttatacagcttcattctgttgccctcaaatgggcatagccctatgtactaaatacatagccctatgtaccaaaaagtaaggcttagagaattgtagctaggccttgtccaagaagaacttgctacacagcctagaaaacaagatggaaagatatataaatatacatttcacagataaactgtaacaggtgaacaggtgaacacaaacatgagggagggttggagtctctaagattgagaggtctgagttagccaatgaagacatctgagatcctatccaagatttctgtggtcagaaaaagctgtaaatggcaatagagttttggtaccagaggctagagtggacaaatgagggccagggaggaaccggaaaatgggagacaggattttctaaaagctagaaaaaaatgaagtgattgcaatgccagtataactgatatgatatgaagggggacttatctcctgcagagattggagaaggtagaggaggagaaagaatccaaagattctcactgcctgagaaaacccaggcaatactattttaaagcatcagtcaaattgacattaacatctgttaactgtaaacagtcacactcccattaccccccttctccactaaaaacaataatcccaaagtgagcgctcagcctatgggtttaagcagagggctacagaaaacagggaagagacatacccctgggcttggattcccagagaggaaaccttggggccccagatgtgtcctcctgatctccctgagctattaatggtgtgatgcccgagggctgggcccttgagtctctcctcttctccatcttcactggcttccccagccactcacgttcatgtccttaaatatcacctatactctgccacatcccaaagggatctcaagccttcagctctcccctgaactccatcttaacagcccccatggtttgttcaacatctccacctgtaatcctgtggccaacaccaatgccccaaccttcccccacagctatcttcactctctgccttccccatctcagatactgtcaactccatccttctgtcaggccaaaatccttggagccatcctcaactgctctttttgtcttacatcccacatccagtttgtcagaaaagcctattagagataccttgaaaatgcacccagaatctggccgtttctcggcacctccaccattgcccccggcctaagaagctctcttatcttgcatcttgggctggactcctacaacagccacaacctccctgctggtctcccagcttctagccttcccccatctcctgtcgttttcgacacagcagccagaaggatcctttaaaaacagaggttgatcctgtcgttcctcaaaatcctccaatggttttcctactgcactcagagtaaaagccagtctctgccttagatgctctgggatcctgtaccctctttggtctcatgtcctacaatctgcattctggccataatggtcttctctgctgttccttgaacattccaggaacattccccccatcccctcgtggcctcaggactggctgcttcctttggtatgctattctgatacacactaagcaccctccctcacctgttataaaaaattcgctgggaggccaataggctgaaatggctcctgcactttgggttcctaagtcagcaaactgaaactcaactcagagtgaaagtgttgtgtgtaacctaggagcaggaaacttcagcttaaccagtcagaaactaccgactaacctctaacaagagatttatggtcagttaacctctaaatatgaactttccactctaaccaatcaaatagtttctttgtcttgctcccagagacaccttgtaagtgtcccctctggtttcctcggtggtggcgccctgaactgctggcggtctgccactgcctgattgataaaattgctgaatgctcaaataaacctgttaaaattgt

SEQ ID NO: 45025 - DNA, 816 bp, Homo Sapiens
atggccaatttggagaaagagctccaggagatggaggcacggtacgagaaggagtttggagatggatcggatgaaaatgaaatggaagaacatgaactcaaagatgaggaggatggtaaagacagtgatgaggccgaggacgctgagctctatgatgacctttactgcccagcatgtgacaaatcgttcaagacagaaaaggccatgaagaatcacgagaagtcaaagaagcatcgggaaatggtggccttgctaaaacaacagctggaggaggaagaagaaaatttttcaagacctcaaattgatgaaaatccattagatgacaattctgaggaagaaatggaagatgcaccaaaacaaaagctttctaaaaaacagaagaaaaagaaacagaaaccagcacagaattatgatgacaatttcaatgtaaatggacctggagaaggagtaaaggttgatccagaagatactaacttaaatcaagacagtgccaaagaattggaagatagtccccaggaaaatgtcagtgtcacagagatcattaaaccatgtgatgatccaaaaagtgaagctaaaagtgttcctaaacccaaaggaaagaaaaccaaagatatgaaaaaacctgtcagagtacctgctgaaccacaaacaatgagtgttcttatcagctgtacaacctgccatagtgaatttccatctcggaataaactttttgaccatctaaaggccacaggtcatgcaagagcaccttcatcatcgtctttaaacagcgcaacaagtagtcaaagcaagaaagagaaacgtaaaaacagatag

SEQ ID NO: 45026 - DNA, 1341 bp, Homo Sapiens
catgggctcctgctccggccgctgcgcgctcgtcgtcctctgcgcttttcagctggtcgccgccctggagaggcaggtgtttgacttcctgggctaccagtgggcgcccatcctggccaactttgtccacatcatcatcgtcatcctgggactcttcggcaccatccagtaccggctgcgctatgtcatggtgtacacgctgtgggcagccgtctgggtcacctggaacgtcttcatcatctgcttctacctggaagtcggtggcctcttaaaggacagcgagctactgaccttcagcctctcccggcatcgctcctggtggcgtgagcgctggccaggctgtctgcatgaggaggtgccagcagtgggcctcggggccccccatggccaggccctggtgtcaggtgctggctgtgccctggagcccagctatgtggaggccctacacagttgcctgcagatcctgatcgcgcttctgggctttgtctgtggctgccaggtggtcagcgtgtttacggaggaagaggacagctttgatttcattggtggatttgatccatttcctctctaccatgtcaatgaaaagccatccagtctcttgtccaagcaggtgtacttgcctgcgtaagtgaggaaacagctgatcctgctcctgtggcctccagcctcagcgaccgaccagtgacaatgacaggagctcccaggccttgggacgcgcccccacccagcaccccccaggcggccggcagcacctgccctgggttctaagtactggacaccagccagggcggcagggcagtgccacggctggctgcagcgtcaagagagtttgtaatttcctttctcttaaaaaaaaaaaagaaaagaaaacatacaaaagaaaaggcaaaaccccacatgcccacctcctctggcaacatgggggtcacagctctgcccccaggctgtcgtctcgtcgaggagcccctccctcaggtgcccacctggggctgctggaccctcgggctgcaagcactgctgctgggatgcagcctccccaggaagtcaatgtgaggcccgagacccctcaagcggtgagggcccctgttgaacatggagggttcctaaccccaaactcgtgccagaagaacccccaccccacccaggagctgaggctgatggagccctagggtgggggctgggcttgaccaggaacagcagagccaggccccaaggcatagggcagggcacatggtggtgacgagcaggcagtactcttgtaaagggggctcttgggcaaacagtcccaaaggctcccccaggtatcatcaagttggtaaataaacaggaacatggccctca

SEQ ID NO: 45027 - DNA, 987 bp, Homo Sapiens
ccgtagcgacgccgcggtccgccggatctccagcgctcagtccgcgccgcaggtggtgcttgtctgcagagtcatgacctctttccgcttggccctcatccagcttcagatttcttccatcaaatcagataacgtcactcgcgcttgtagcttcatccgggaggcagcaacgcaaggagccaaaatagtttctttgccggaatgctttaattctccatatggagcgaaatattttcctgaatatgcagagaaaattcctggtgaatccacacagaagctttctgaagtagcaaaggaatgcagcatatatctcattggaggctctatccctgaagaggatgctgggaaattatataacacctgtgctgtgtttgggcctgatggaactttactagcaaagtatagaaagatccatctgtttgacattgatgttcctggaaaaattacatttcaagaatctaaaacattgagtccgggtgatagtttctccacatttgatactccttactgcagagtgggtctgggcatctgctacgacatgcggtttgcagagcttgcacaaatctacgcacagagaggctgccagctgttggtatatccaggagcttttaatctgaccactggaccagcccattgggagttacttcagcgaagccgggctgttgataatcaggtgtatgtggccacagcctctcctgcccgggatgacaaagcctcctatgttgcctggggacacagcaccgtggtgaacccttggggggaggttctagccaaagctggcacagaagaagcaatcgtgtattcagacatagacctgaagaagctggctgaaatacgccagcaaatccccgtttttagacagaagcgatcagacctctatgctgtggagatgaaaaagccctaaagtttatgtttctaatgtgtcacagaataggacgatatgattctacaacataatcaactccctattaaattctttaatgaaga

SEQ ID NO: 45028 - DNA, 657 bp, Homo Sapiens
atgcataccacagaatcaaaaaatgaacatttggaggatgaaaacttccaaacatctacaactcctcagagtctcattgatcctaataatactgcacaggaagaaactaaaactgtcttatcagatacagaagaaataaaaccacagacaaaaaaggagacatacatttcttgtcctctaagaggagtattgaatgtaattattacaaatggagttatactgtttgtgatatggtgtatgacctggtcaatcttaggctctgaagctctccctggtggaaatttatttgggttgttcattattttttatagtgccattattgggggaaaaattttacaactcattagaatacctttagtgcctccacttccacctcttcttgggatgttactggctggttttacgattaggaatgttccattcatcaatgaacatgtccatgttcctaacacatggtcttcaattttaagaagcattgcccttaccattattctaataagagctgggcttggactcgatccacaggctttgaggcatttgaaggtcgtttgtttcagattggctgtaggtccatgccttatggaggcaagtgcagctgctgttttttcacacttcattatgaaatttccctggcaatgggcatttctattagggtaa

SEQ ID NO: 45029 - DNA, 721 bp, Homo Sapiens
cttagcgacagacagacgctgggacccacgacgacagaaggcgccgatggccgcgcctgctgagccctgcgcggggcagggggtctggaaccagacagagcctgaacctgccgccaccagcctgctgagcctgtgcttcctgagaacagcaggggtctgggtgccccccatgtacctctgggtccttggtcccatctacctcctcttcatccaccaccatggccggggctacctccagatgtccccactcttcaaagccaagatggtagctgccatccctgggagcctggaaccaggcaatggtggggggaggcaggggacaggctggaacctggtgaagtcttaaagtagactcctcctatcggggtgtagaagggaatctgttaatcaaacagagcaatattagaaaggctacagaggtcaactcagtggaacacggttctcccaaacagattttgtaattccgaaaatccacgcatgcgcaaacatacgcatacactcccatgttcctggacagtttatagctaccataacctggcattttccaaaacataccatgtagactcttggatacacaaggtaattttagggccacattaggatgaaccttttaaaaagttatgcatttatttttatgtttccccactagctgtattataggacaatttttatatgtgatatgtatttaccttagtgtgttaaataaacactggcattccaa

SEQ ID NO: 45030 - DNA, 1026 bp, Homo Sapiens
ggtgcctcagacacaacaataaaacccaatcctgaaaacactgggcccacattagaatgggataactatgatttaagggaagatgctttggatgataatgttagtagtagctcagtacatgattctccgttggcaagtagccctgtgagaaaaaatattttccgctttgatgagtcaacaacaggatttaacttcagttttaaatctgctttgagtctatctaagtctcctgccaagttgaatcagagtgggacttcagttggcactgatgaagaatctgatgttactcaagaagaagagagagatggacagtactttgaacctgttgttcctttacctgatctagttgaagtatccagtggtgaggaaaatgaacaagttgtttttagtcacatggcagaactctacagatatgataaagatgttggtcaatggaaagaaaggggcattggtgatataaagattttacagaattatgataataagcaagttcgtatagtgatgagaagggaccaagtattaaaactttgtgccaatcacagaataactccagacatgagtttgcaaaatatgaaagggacagaaagagtatgggtgtggactgcatgtgattttgcagatggagaaagaaaagtagagcatttagctgttcgttttaaactacaggatgttgcagactcatttaagaaaatttttgatgaagcaaaaacagcccaggaaaaagattctttgataacacctcatgtttctcggtcaagcactcccagagagtcaccatgtggcaaaattgctgtagctgtattagaagaaaccacaagagagaggacagatgttattcagggtgatgatgtagcagatgcagcttcagaagttgaagtgtctagcacatctgaaacaacaacaaaagcagtggtttctcctccaaagtttgtatttggttcagagtctgttaaaagaatttttagtagtgaaaaatcaaacccatttgcatttggcaacagttctgccactgggtctttgtttgga

SEQ ID NO: 45031 - DNA, 2251 bp, Homo Sapiens
gtccctgtaagcatcacattgctggaggaaaatctcatgccagagcttggaccatccctagctcaggggttaggggttgtcccttggtgacctaaatgaaaaaacaggtccagaacagagttcctgatgctggacactcattcagtctttgaatcgtgggaggggaggcctggtactaggtagacctaacctctttgaggaaccacagagcccaaggctggaaacctccagaatcctccaccccctgatcctccctggggacccctgtggcctgtctcactgagcactcttccatctgtagatgtctgggctgctgtacaagggagtcccctttcaggtgtggtgctagacatggtcactcctgctggatgtctaggtggtagaaaccaaggacctagggaaataccaggtacagcctttccatgctcatccagagcaggacaaacaggccaggcggtgtcaggagcccaggtctccagctggagggaacgtcaacccttcggtgggagcaggggccctttgcacatcctaggcacagatggtaatgtagacaccgcaggtaagctgggcttggtacctacccctccccggattcagaaagaaaccaaacaaggagctttgtgcggaatgaaacctcctttcctcccagaagcactgctgactgtttggtggttgccatttgtggcagtgagcctttgtttgttctgaggttgggctggtttctcctcttggccctgccctacagatcataaaggagaagagcaagaggtccccagcaaacatccacagatggccttggaaataagtcaccttcctcaccctgcaggaatgccagtgaacttattgctgacatcttggagctcagtaccctcatagtgtaacggcgtcagcagatctgcctgtgctgggacttcctgtactacccattcctgaggggcgatgcttctgcagggcctgtgacttggtgcacaacttcagacaccatcatcttgcagcagcaccgcaccctcactagccagggtgttgatgacttcctcaaggccaaggccacattcaaggcttcggacttcattgatgcgcttgtgctgagcaaggtggcttctccgggatcttaattcaggaggtagaatggagcttgagatcaagtgtctgatcaagcctcagtgtatgggcgctgttcatcctctggtgctgaagcagccaagagacccaagtctgcctggctgcctcttaggatatgacagcagagccagtggcctctactagatcctgtacaacctcacaaaacacccagacatcgggagtgctgccagcctgtgatgcaagagtcctaatcctgaagacattgaatggatcatgaggatcagagaggaaaagtcatttgcccaaagtcacacagctgaacagtggtggagttcaactttgaccgtgggctgtctggccccaaggtgtatgcttgcttctctcccaagagacaactttcttatcaggctcaaatgaatgaaaggaggatgttaaagttcctagaagctttaattgaatgaaagttcctagtagatctgtacctactaaaaaccacacttctgaagctacgtggccaccagaagacacagctagtctgccatgtaaaaaaggaaaggtggcgtgtgccctgaaggtgcaggggtgagaggcagggaaatggagaccccaacagccagcagcagtggccctcatcacagccctccaggagatatcaaaggaggtcagaccttggacagtagtcttgacttcctgctatagaacacattgttaacactgaaaaagatgatctgttctaggggaatggtgaaagctgactctagcacttgtactttttgtttgtttgtttgagattgagtcttgctcttgtttcccaggctacagtgcaatgcgtgatctcagctcactgcaggctctgcctcctgggttccagctattgtcctgcctcagcctcccgagtagctgggattccaggtgcccgcaagtgtgcctggctaatttttatgtttttagtagagatgggatttcgccatgttggccaggctgttctccaactcctgaccttggccaaagtgttgggattacaggcataagccattgtgcccggcctgtgtttttaatttcatagtggcacagcttcaaaatgacatctaagtagctgacataaaaatgaaaattctgtgtactttgatattagcaggcttcaaatacaaaccagaatatgagtaaa

SEQ ID NO: 45032 - DNA, 753 bp, Homo Sapiens
atggtggttggtaagaaccagcatcttactaaagatggcaaaaagggagccaagaagaaggtggttgatccattttctaagaaagattgctatgatgtgaaagcacctgctatgtttaatataagaaatattggaaggacactagtcaccaggacccaaggaaccaaaattgtatctgatggcctcaagggttatgaagtgagtcatgctgattttcagaatgatgaagttgtatttagaaaattcaagatgattactgaagatgttcagggcaaaaactgcctgactaacttccatggcatggatcttacccatgacacaatgtgttccatggtcaaaaaatggcagacaatgattgaagctcatgtcgatgtcaagactaatgatggctacttctttaatctgttctgtgttggttttactgaaaaaaacaatcagatatggaaaaccacttatgttcaacaccaacaggtccgaaatccagaagaagatttggaaatcatgaccggagaggtgcagacaaataacatgaaagaagtggtcaataaattgattcaatacagcattggaagagacatagaaaagtcttgccaatctacttatcctccccatgatgtctttgttaggggagtaaaattgctcaagaagcctgagtttgaattgagaagactcatggagtttcatggggaaggtagtagtttgggaaaagctactggggatgagacagttgataaagttaaacgagctgattga

SEQ ID NO: 45033 - DNA, 918 bp, Homo Sapiens
atcagtggcagaatggcctcccggtatgtggcagtgggaatgatcttatcacagaccgtggtgggagtcctggggagcttctctgttcttctccattatctctccttttactgcactgggtgcaggttaaggtccacagatttgattgttaagcacctgattgtagccaacttcttagctctccgctgtaaaggagtcccccagacaatggcagcttttggggttagatattttctcaatgctcttgggtgcaaacttgttttctatctccatagagtgggcaggggagtgtccattggcaccacctgcctcttgagtgtcttccaggtgatcacggtcagctccaggaaatccaggtgggcaaaacttaaagagaaagcccccaagcatgttggcttttctgttctcctgtgctggatcgtgtgcatgttggtaaacatcatctttcccatgtatgtgactggcaaatggaactacacaaacatcacagtgaacgaggatttgggatactgttctgggggaggcaacaacaaaatcgcacagacactgcgtgcaatgttgttatcattccctgatgtgttgtgtctggggctcatgctctgggtcagcagctccatggtttgcatactgcacaggcacaagcagcgggtccagcacattgataggagcaatctctcccccagagcctccccagagaacagagctacgcagagcatcctcatcctggtgagcacctttgtgtcttcttacactctctcctgccttttccaagtttgtatggctcttttggataatcccaatagtttactggtgaacacttcagccttaatgagtgtatgtttcccaactctcagcccctttgttctcatgagctgtgaccccagtgtatacaggttttgttttgcctggaaaagatga

SEQ ID NO: 45034 - DNA, 623 bp, Homo Sapiens
ctgctctcccagcacgtgccagctgggttcctctctctataggggctgtcagcagacctgctgggagcccaccagctgccagacatcctatgtggagtccagcccctgccagacctcctgctaccgtcccagaacctccttgctctgcagtccctgccagacaacttactctgggtctctaggctttggatccagcagctgccgctccctgggctatggatcgaggagctgctactcagtgggctgtgggtccagtggcttcagatccctgggttatggaggctgtggcttcccttccctgggctatggcgttggattctgccgcccaacctacttggcttctaggagctgccagtcttcttgctacagaccaacttgtggatcaggcttctactattgatcatcttgttaaattgctgattttgttggctaatgccttcaatgcctctactcataacctttattgtcttcatcatgtacagaaagaattagcctcttattctataattatcaagttctcagtttgtctttgtccccaaatactggctggcaggcttcatctgaaaaactgtaattggagaactagctcaaaataaatcttgaaatacacattaaaagtagaa

SEQ ID NO: 45035 - DNA, 775 bp, Homo Sapiens
ggacgcagagaagccagagactttcgcttccggctgccgcaggcgcttcgctggtgcagacgcagtgctgagcacacagctaccggacaaagagtgacgcccggagctggagttatggcggctacggagccgatcttggcggccactgggagtcccgcggcggtgccaccggagaaactggaaggagccggttcgagctcagcccctgagcgtaactgtgtgggctcctcgctgccagaggcctcaccgcctgcccctgagccttccagtcccaacgccgcggtccctgaagccatccctacgccccgagctgcggcctccgcggccctggagctgcctctcgggcccgcacccgtgagcgtagcgcctcaggccgaagctgaagcgcgctccacaccaggccccgccggctctagactcggtcccgagacgttccgccagcgtttccggcagttccgctaccaggatgcggcgggtccccgggaggctttccggcagctgcgggagctgtcccgccagtggctgcggcctgacatccgcaccaaggagcagatcgtggagatgctggtgcaagagcagctgctcgccatcctgcccgaggcggctcgggcccggcggatccgccgccgcacggatgtgcgcatcactggctgagcggtggagctgcgggcggccagggccgggcgctctgtgcggactggggccatgatcgggcccgggggcctgagcctgggaccccaccccgtgttaatgaaaaatgagttttggcagcgcc

SEQ ID NO: 45036 - DNA, 1197 bp, Homo Sapiens
atgaacctgccaagagctgagcgccctcgctccacaccgcagcgcagcctccgggactccgatggggaagacggtaaaatcgatgtcctgggagaacagcagttcctagagcagtcgctccagccggggctgcaggtggcccggtggggcggggttgcgcttccccgagagcacatcgagggcggcggcggcccgagtgacccttcagagtttggcaccaagttcagggcaccgccaaggtctgcggcggcctctgaagatgcccggcagccggcaaagcccccctactcgtacatcgcgctcatcaccatggccatcctgcaaaacccgcacaagcgcctcacgctcagcggcatctgcgccttcattagtggccgcttcccatactaccgccgcaagttccccgcctggcagaacagcatccgccacaacctctcgctgaacgactgcttcgttaagatcccccgcgagccgggccacccaggcaagggcaactactggagcctggaccccgcctcccaggacatgttcgacaatggcagctttctccggcgtaggaagcgtttcaagcgccaccaactgaccccgggagcccacctgccccaccccttccctctacctgctgcacacgccgccctgcacaacccccacccaggccctctgcttggggcccctgccccgccgcagccagtcccgggggcctaccccaacaccgcccccgggagacgcccttacgctctgctgcacccgcatcctcttcgctacctactgctctcggcccgcgtctatgccggggcaccgaagaaagcagaaggcgcggacctggcgcccggcacccttcccgtgctgcagccctcacttggtcctcagccttgggaggagggcaagggtctggcgtcgccaccgggaggcggatgcttctctttcagcattgagagtattatgcaaggggtcaggggagcgggtacaggggctgcgcagagtttgtccccgaccgcgtggagctactgccacctgctccagcgaccatcaagccttgtccgccgccgctgctgctcggacaattttgcagcaatagcagcagcatcaggaggactgcgccaacggctgcgctcccaccaagggcgcggtgctgggcgggcacctgtcggcctcgtcggcgctgctgaggtatcaggcagtggcggagggctctag

SEQ ID NO: 45037 - DNA, 1715 bp, Homo Sapiens
ctttccgcgcggcggaagagcgcgcgccagcttcggcacacctgggagccggatcccagccctacgcctcgtcccctacaagctcctccaagccccgccggctgctgtgggagcggcggccgtccctctcctggaggtcgtctcctggcatcctcggggccgcaggaaggaagaggaggcagcggccggagccctggtgggcggcctgaggtgagagcccgaccggcccctttgggaatatggcgaccggtggctaccggaccagcagcggcctcggcggcagcaccacagacttcctggaggagtggaaggcgaaacgcgagaagatgcgcgccaagcagaaccccccgggcccggcccccccgggagggggcagcagcgacgccgctgggaagccccccgcgggggctctgggcaccccggcggccgccgctgccaacgagctcaacaacaacctcccgggcggcgcgccggccgcacctgccgtccccggtcccgggggcgtgaactgcgcggtcggctccgccatgctgacgcgggcggcccccggcccgcggcggtcggaggacgagcccccagccgcctctgcctcggctgcaccgccgccccagcgtgacgaggaggagccggacggcgtcccagagaagggcaagagctcgggccccagtgccaggaaaggcaaggggcagatcgagaagaggaagctgcgggagaagcggcgctccaccggcgtggtcaacatccctgccgcagagtgcttagatgagtacgaagatgatgaagcagggcagaaagagcggaaacgagaagatgcaattacacaacagaacactattcagaatgaagctgtaaacttactagatccaggcagttcctatctgctacaggagccacctagaacagtttcaggcagatataaaagcacaaccagtgtctctgaagaagatgtctcaagtagatattctcgaacagatagaagtgggttccctagatataacagggatgcaaatgtttcaggtactctggtttcaagtagcacactggaaaagaaaattgaagatcttgaaaaggaagtagtaagagaaagacaagaaaacctaagacttgtgagactgatgcaagataaagaggaaatgattggaaaactcaaagaagaaattgatttattaaatagagacctagatgacatagaagatgaaaatgaacagctaaagcaggaaaataaaactcttttgaaagttgtgggtcagctgaccaggtagaggattcaagactcaatgtggaaaaaatattttaaactactgattgaatgttaatggtcaatgctagcacaatattcctatgctgcaatacattaaaataactaagcaagtatatttatttctagcaaacagatgtttgttttcaaaatacttctttttcattattggttttaaaaaagcattatccttttatctcacaaataagtaatatctttcagttattaaatgatagataatgcctttttggttttgtgtggtattcaactaatacatggtttaaagtcacagccgtttgaatatattttatcttggtagtacattttctcccttaggaatatacatagtctttgtttacatgagttcaaatacttttgggatgttaccttcacatgtcctattactgatgtgtgcaaccttttatgtgttgatgactcactcataaaggtttttgtc

SEQ ID NO: 45038 - DNA, 1790 bp, Homo Sapiens
ctagagtgcagtggcacaatgaaggcacactgcagctttgacctcctgggctcaggtgattctcccatctcagccttcccagtaagtgggactacaggtgcccaccaccaagactggctaattttttgtatagacagggtttcaccatattgcccttacactcctggactcaatctgcccacattggcttcccaaagtgctgggattatagacatgagctaccacacccagcctgtatggctgttgtgaataatatgctgttatgaacatgggcacactaaacaccattcaacttaaaaaaataatcaaagccttaagaactgaaccaaaatggcttaggtgaaaataaaataccaaactctgctctaagaaaaggaaagaacattcactgaattataccttcagcaataagcacttaatggaacttgtttcatttaaaatgcaccacaatcctgtaaattgataatcataccgcaattttatagatgagcaaggtattaggcggacctttttcaaaaggtcatacagctagtgacaaatatttccaaatttttcataacatttctttttttgagacggagtcttgctctgtggcccaggctggagtgcagtggtgcaatctcggctcactgcaagccttgcctcccaggttcacgccattctcctgtctcagcctccctagtagctgggactacaggcacccaccaccatgcccagataatgtttttgtattttcagtagagacggggtttcactgtgttagccaggatggtctcaatctcctgacattgtgatcctcccgccttggcctcccaaagtgctgggattacagacgtgagccactgtgccaggcctaacatttctgttttaaatagcttaattaactacacatgttctatattcttgcctctgaaaggcagctttttttgttgggttggtttcttatgcatcagacacttgatttgctgaggaattctgtttttcagtaattcatccaccacaaatatcacgtagcattttgactccacagacctaagagtcttaagtcttaaaaggattgtaaaatctaagtttttctgagatatctgagagtaagaggcttttttctattgaaaataggttgcatttcaaactttatctgtaagagctcacaacactttctccaacatgcatgcccatgtgatcacttaaacagaactctgagtgagacagtaaatacctcatatgcccttgaaaattttaccttggcatagaaaaaccttgttaagaacctaaaaataatttcactttgaaagtctttagggttagacaaatgttaaacttcaattggcagtacaagggcagcactcaagccagcaagagttttgttgggccaaattatgttgaaaaagatcaaatattttaaaaacaggagatttcacataaaaatctgggattccagcttcttctgaataaatgaggtacactaattatgcagagtggcaaatggctggagttgagtgggaggtgtttctagcccaacagataggcatggaagctccagctcagccccctccactccattttcttacacaagggaagccactatggtatagcatctaacttaaggcatattatatgtattcttaagacagaggaaaaggctgaatatttgatattgtcaaaagaaatgagagtctaactttctgtggcaaggaccttcttgcagtagtcacataacatagtctggaacacctccaacataaattatgaaaagaaagctcttggctcagaagagaaaaagcaaaaaa

SEQ ID NO: 45039 - DNA, 1737 bp, Homo Sapiens
atggaaaactcagtttctaatgacaaaggaagtggtgatcagtctgcagcacagtgcagaagtcagatggaccgattggatcgggaagaagctttctatccatttgtaaataacctgagtgaagaagattataggcttatggataataatttgctaggcaccccaggtgaaagtactgaggaagagttgctgagaagactacagcaaactaaagaaggcccaccactgcaaaactcaggtgaaaatagaggaggagactcttcagatgatgtgtctaatggtgactctataatagactggcttaactctgtcagacaaactggaaatacaacaagaagtgggcaaagaggaaaccaatcttggagagcagtgagccggactaatccaaacagcggtaatttcagattcagtttagagataaatgttaacagtaataatgggagccaaaattcagagaatgaaaatgagccatctgcaagacgttctagtggagaaaatgtggaaaacaacagccaaaggcaagtggaaaacccacgatctgaatcaacatctgcaaggccatctagatcagaacgaaattcaactgaagcattaacagaagtcccacctaccagaggtcggggagggcaagaagcaggagcccagaccgtgggagagccagcaagagctgagagaagtaggtcacctctgcatccaatgagtgaaattccacgaagatctcatcatagtatctcatctcagacttttgaacatcctttggtaaatgagatggagggaagttctagaacccggccctgtgtgacattgagacagcaaatatctgggcctgagttgctaagtagaggtctttttgcagcttctggaaaaagaaatgcctctcaagcagcaggttcttcagacacagcggccaatggtgaatctacaggatcagcacagagacctctaaccatagtccttgatcttcaagtaaaaagagttagtcctggagaatatcggcagagagatagcatagccagcagaactcggtctaggtctcagaggccaaacaacactatcacctatgaaagtgagcgaggaggtttcaggcgtacgttttcacgttctgagtgggcaggtgtgagaacctatgtcagtagcaccagaatccccatttgtagaatcttaaatactggtttatgtgagactacatctgttgcaattcagacgatgttaaggcagataatgacaggttttggtgagttaagctattttatgtacagtgatagcgactcagagcctactggctcagtcccaaatcaaaatatggaaagggcagagtcacggagtggaagagggggttctggtggtgaaactagctcagatttatttgaaggcagtaatgaaggaagcttatcatcaggctcatcaggtgccaggcgagagggtcgacatacggccccagtcatatttcattggctctttgcccttcctagcctggctcagtttctcttaaatgaggatgatgatgaccaacctagaggactcactaaagaacagattgacaacttggcaatgagaagttttggtgaaaatggtgcattaaaaacctgtagtgtttgcattacagaatatacagaaagcaacaaacttcgtaaactaccttgttcccatgagtaccatgtcgactgcatcgatcgctggttatctgagaattctacctgtcctatttgtcgcagagcagtcttagcttctggtaac

SEQ ID NO: 45040 - DNA, 3342 bp, Homo Sapiens
cggtgtgaagctcggtgccggctcgcgcgatcggtgggacagaatttcgttgttttcaccgacgagactggaggaaacaacaccaaatagggataccatgggacaaacagtgaatgaagattccatggatgtcaagaaggagaatcaagagaaaactcctcagtcaagtacatcttctgtacaaagggatgatttccactgggaggagtatttgaaagagactgggtctataagtgctccttcagagtgcttccgtcagtctcagattccacctgtgaatgatttcaaagttggtatgaaattggaagcccgtgaccctcgcaatgccacttcagtatgtattgctacggttattggaattactggggccaggttacggttacgactggatggtagtgacaacagaaatgatttttggaggcttgtcgattccccagacatacaacctgttgggacatgtgaaaaggaaggagacttacttcaacctccactagggtaccagatgaatacatcctcctggccgatgttcctcttaaagacactaaatgggtctgaaatggcatctgccacattatttaagaaggaaccaccaaagcccccactaaataattttaaagtggggatgaaactggaagctattgacaaaaagaacccgtatctcatctgtcctgcgaccattggagatgttaaaggggatgaagttcatatcacatttgatggctggagtggagcttttgattactggtgcaagtatgattctcgagatattttcccagctgggtggtgtcgcctgacaggagatgtattacaacccccaggaactagtgttcctattgtaaagaatatagcaaaaacagagtcttctccttccgaagcaagccagcattcaatgcagtctccacagaaaactactctaatattaccaacacagcaggtcaggagatcaagtcgaattaaaccacctggacctactgcagtccccaaaaggagcagttctgttaaaaatatcacaccaaggaaaaaaggtccaaactcaggaaaaaaggaaaaacctttgcccgtgatatgttctacatctgcagcttctctaaaatcgctgaccagagaccgtggcatgttatataaagatgtcgcttctgggccatgtaaaatagtgatgtctacagtctgtgtctatgtaaacaaacatggaaactttggccctcatctggatcccaagagaatccagcagctgcctgaccacttcggcccgggcccggtgaatgtggtgcttcgccggattgtgcaggcctgtgtggattgtgcccttgaaactaaaactgtttttggatacctgaagccagataatcgtggaggagaagtgataactgcctcctttgatggggaaactcattccatccagctccctccagtgaacagtgcatcatttgctcttcgctttcttgagaacttctgccacagtctgcagtgtgataaccttttgagtagccagccttttagttcttccaggggtcatactcacagctctgcagagcatgataaaaatcagtcagcaaaagaagatgtaacagaaaggcaaagcaccaaacgatctcctcagcaaactgtaccatatgttgttcctctctctcctaagctccccaaaacaaaggagtatgcgtctgaaggagaaccattgtttgctgggggaagtgccattcccaaagaggagaatctttcagaagattctaagagctcatcactaaattcaggaaattatttgaatcctgcctgtagaaatcctatgtatattcatacttcagtctcccaggatttttctcgaagtgtgccaggcaccacaagttcaccactagttggggacatatcccccaagagcagtccccatgaagttaaattccaaatgcagaggaaaagtgaagctccaagttatatagctgtacctgatcccagtgtcctgaaacaaggcttctctaaggacccttcaacctggtctgtggatgaagtgatacagtttatgaaacatacagatcctcagatatcaggccccctcgccgacctcttcaggcaacatgaaattgatgggaaggctctgttcctactcaagagtgatgtgatgatgaagtatatggggctgaagctggggccagcattaaagctgtgttactacattgaaaagcttaaagaaggaaaatacagttaaaaaaatgtgtaagtttagattggacataattctcaggtgtactgttaacattttaatttaaaagtatttctcttagcagtttttgttttgtagacagttcccataaaaatattttatcagaattgcagaactgtagtaacagttcagtcaactttgtttttttcctggagtcaccaaccagctttgggagacacagccgccactcccccagtctacttctttaaaaagcatttaacaggttagtattggcatattcaaattggcagttctttatgtctttttaaattttcattgtacagtttacaaatatacttaatgtagttaacagagaaaaacctttgattttggttaacctttatatctagaaccaaaacagctaaatcccaaaggggaaaatatcagggattgacaacttctataattaaatccatgagaatttttcctcactagagaatttaaaggtgcacctgtagatatcatcttttctcagatattttgtgtgatactctgtggtgttctgttcatgttctatcagtatatctagaaagggaatagccatataaattattttccttttattatttctctgtatgttgtatttgatcatatttaaaggaaaaaagcaagcttataagctttcatgaagtgttcttaccagtttttgataaattttttaaattataggatagaattgtcattttatgcaggagatatttatactacgagggttgtttggatggagtcagattaaattttttcagtgaaattcctattattttaaaactttccatattttcactacgcttggacatttaactaggcattcttttcttacatctctatatgaagatacctgtgtccaaaatttttgaagatatatattgtatgtgtttattcttcatatggtactttaccatatttatatattgttttatacctgtaggtttacacacaagtaaatcttttttttcttgaatttaatctggcactttgcactgccacagaggtgacgatgaactatgtatatagttagatgttttgatttcgtaaaaaatatatgtccatcgtttgctatcaccagtacctctcagcttactcttcaggggatatgaaacaatctgtagattggtttccatacaggg

SEQ ID NO: 45041 - DNA, 960 bp, Homo Sapiens
ggctgcgccaccgtgcgcgacgctctcttcgcggctaacggccgcgcggccgactgcgagagcccgcgcgagtttcgggagcgggccctgcgcgccatgggtcgaggcggacgcgcggctgcgtcaggacaccgaaaagccaacaccatggtagcattaatgaaagtttaccaagaggaagatgaagcctaccaggaattagttaccgtggcaaccacgttcttccagtacttactgcagccatttagggctatgcgagaagttgcaactttatgtaagcttgatattttgaagtccttggatgaggatgacctaggtcctagaagggtagttgccctggagaaagaagctgaagaatggaccagacgggctggagaagctgtcgtctctattcaagatatcacagtgaattattttaaggagacagtaaaagcattagcaggaatgcagaaagaaatggaacaggatgtgaagagatttggccaggctgcctgggccacagcaattcccaggttggaaaaacttaagctaatgctagctcaagagactctgcaactcatgagagcgaaagagttatgtttaaatcacaaaagagctgaaattcagggaaagatggaagatcttccagaacaagaaaaaaatataaatgttgtagatgaattagcaatacaattttatgaaattcagttagaactatatgaagttaaatttgagatattaaaaaacaaagaaatactgcttactacacagttggactctcttgaaagacttataaaagaaaaacaggatgaagttgtctattacgatccatgtgaaagtccagaggaactttcattgactgtggtggggctgcaggacgataagaattcggaagtgaaagaactcagaaggcagtgccagcagctggagtctattaaacggggcaggatctgtgtcaaaagagcttctctccagagtaga

SEQ ID NO: 45042 - DNA, 2836 bp, Homo Sapiens
gttggactggtgggaactgggaacactggagacctgatttctaactgacgctaccgtcgcggccgccggcaagttcctttactgtgttttcttggttcagccttgaagtgagtcgtggacgatcctctctcagcgtccagcctagacggcggtgttgctccggcagcgttcctgggagccgagggccagagactaagttcctgggttctgagcctgccatccaaggaactcaggaggaggagttgacagtctcttcgttcctaaccagtgtgggacgacttcagcatgtctcaggccaccaagaggaagcatgtggtgaaggaggtgctaggggagcacatagtgccctccgaccagcagcagattgtcagggtactcaggaccccagggaacaatctgcatgaggtggagacagcccaagggcagcgcttcctggtgagcatgccctccaaataccgcaagaacatctggatcaagagaggggactttctcattgttgaccccattgaagagggagaaaaggtgaaggctgaaatctcgtttgtgctctgcaaggaccacgtgcgctctctgcagaaggaggggttttggcctgaggccttctctgaagtggctgagaaacacaacaacaggaacagacaaactcaaccagaactcccagctgagccacagttatcaggagaggagtccagctcagaagatgattctgacctgtttgttaacacaaaccgcagacagtatcatgagagtgaggaggagagtgaagaggaggaggcagcctgagactccaggacccaattctccacttgctcagggactggcccctggctcttctgggcttggacattcccagggtgctctgcacatcttcacccctgcatgaggacaaagcagggctcctctctgaactgatcttttgattcagagaattaaacccctggtgggttggtgacttgttctggtgtctgagtggctctctcgggggagggagattgtgatgaagtgaaaaactgctccctatttattagagaccttgtgggtgggtgggctgaatggggaggaaatgggaaatggctggagtctttcccaggtggtttgttctttcttattgggcacttagaaagtgccaggccgtgctctgggccttcttgcatgtgtttaacagctgggagcactcctgcttccttgcctgcttgcagttcataccaatttaagcattcaggatgacagccctaggacctaacacccacctgcctctaagagacgctcaggagcccatggtgcctcgtgctgttctccccgcctttctagtcaccctgtgtacgggagtgctcacctccagctactgtgtccatccccacatacgacctcatctctcccactctgcaccatctatcacttccagaaggtggctggcaaatctctctatccttaactttgttttgaatggtccatccatctcctgactttatttgaaacctgattattccctgaggacattgattgtcttataaccttttaaatagaggctgcttttccaccctcacccttcattcttctaaccagccctgacattctcatgagtaaccttctgccttcacttccctcttgtgtagcatcaattccgtagtccaccctacacccctctgtctccctccattctgttccgctagtaaaaccctaaccctgggtaaacccaatcattcacctctgtgcccaaacccaagtcaccatcattaggtgagaaaacagccagcctggccaccagttgtaccttacgtttatcattacaaacctcagatggacactaagcactgcccagcagatctactctgggatgtctgtttcaaaacttctgtcttatctatcaattcccccttgtggtagttaccacaacacatgcctcattaagaaacagcaaccatcagagggaatgcctgcctccctgttaccagctctgcagatgtgcacatatcttcctgtcgtaagccaatgggacttaaaccttacctcttgtgttttggagactatctttttttttttttttttttttttgagagagtgtctccctgtgttgctcaggctggagtgcagtggtgtgatctcggctcactgtaaccttcacctactgggttcaagtaactctcctgcctcagcctcccgagtagcttggactacaggcgtgcaccaccacacctggctaactttttgtatttttagtagagacggggttttgccatgttgcccgggctggtctcgaactcctgaccttaaatgagcctcctgcctcagcctcccaaactgctgggattacaggcgtgtgccaccatgcctggctaatttttatattttcagtagagacgaggttttgccatgttggccaggctggtctcgaactcctgacctcaagtggtccacccaccttggcctcctagagtgctgggattacaggtgtgagccactgtgcccggcctcttttgctttcttaaagactttggtcgggtatttgtgttgttgagtattgtgtctgggtgtgggtatttgattctttttttgttttgtgtttttggctgtcctgtctattggatgtgatatgttatggatgtgatgtgttagtgtcgagcgtgctgtagaatctcccatttctgaaacaggcgtgaaaacctgtactgattcccacgtcctccagctaccacttcatttgtctgtttctcatttactttctcttatagcgtggctttaaacatatatacatttgtatatatgtatatatgaatataatgtataaaatgtatgtagatgtatatacaaaaaataaacgagatgggttaaagat

SEQ ID NO: 45043 - DNA, 963 bp, Homo Sapiens
atggaccaaagcaattatagttctttacatggttttattctgcttggcttctctaaccatccaaaaatggagatgatcctgtcaggagttgtcgccatcttctacttaattacattggtgggtaacacagccatcattcttgcatctctcctggattcccagcttcatacaccaatgtactttttcctcagaaatttatctttcctagatctatgtttcacaaccagcatcatccctcagatgctggtcaacttgtggggacctgataagaccatcagctatgtgggttgtatcatccaactctatgtttacatgtggttgggctcagttgagtgccttctcctggctgttatgtcctatgatcgttttacagctatatgtaagcccttgcattattttgtagtcatgaacccacatctatgtctaaagatgattatcatgatctggagtattagtttggccaattctgtagtattatgtacactcactctgaatttgcccacatgtggaaacaacattctggatcatttcttgtgtgagttgccagctctggtcaagatagcttgtgtagacaccacaacagttgaaatgtctgttttcgctttaggcattataattgtcctcacacctctcatccttattcttatatcctatggctacattgccaaagctgtgctgagaacgaagtcaaaagcaagccagcgaaaagcaatgaatacctgtggatctcatcttactgtagtgtctatgttctatggaactattatctacatgtacctgcaaccaggtaacagggcttccaaagaccagggcaagttcctcaccctcttttacaccgtcatcactccaagtctcaacccgctcatttacaccttaagaaataaggacatgaaggatgccctgaagaaactgatgagatttcaccacaaatctacaaaaataaagaggaattgcaagtcatag

SEQ ID NO: 45044 - DNA, 171 bp, Homo Sapiens
atggaagcgggatcttgctgtgctgcccaggctggtctcgaacccctgggctcaagcaatccttcttccaggacttcccaaagtgctgggattacaggcgtgagccaccgtgcccagtcagaactaactactttaaaatatcagggtgggtgccatggctcatgcctgtaa

SEQ ID NO: 45045 - DNA, 942 bp, Homo Sapiens
atggaggggaaaaatctgaccagcatctcagaatgtttcctcctggggttctctgagcagctggaggagcagaagcccctctttgggtccttcctgttcatgtacttggtcacggtggcaggcaacctcctcatcattctagtcatcattactgacactcaactccatacccccatgtacttctttctagccaacctctcccttgcagatgcctgctttgtgtccaccacagtccctaagatgctggcaaacatacagatccagagtcaggccatctcctactcagggtgtctactacagttgtattttttcatgttatttgtgatgctggaggcattcctcttggcggtcatggcctatgactgctacgtggccatatgccacccacttcattacattctgatcatgagccctgggctctgcatcttcctcgtgtctgcatcctggatcatgaatgccctccactcccttctacacacacttctgatgaacagcctgtccttctgcgcaaaccatgagatcccacacttcttctgtgacatcaatcccctcctgagtctgtcctgcacagaccccttcaccaatgagctggtgatcttcatcactgggggtctcacaggactcatttgtgtgctttgcctgattatctcttacacgaacgttttctcgaccatcctgaagatcccatcagctcaggggaagcggaaagccttttccacctgcagctctcatctctccgtggtctctctcttctttgggacttctttttgtgttgatttcagttctccctcaacccactcggcccagaaggacacagttgcatcagtgatgtacacagtggtaactccaatgttgaatccctttatctacagtttgaggaaccaagaaataaagtcttccctgagaaagttaatctgggttcggaaaattcattccccttag

SEQ ID NO: 45046 - DNA, 686 bp, Homo Sapiens
cagcaagctgtcctgtgagccgccagcatggatgacatctacaaggctgcggtagagcagctgacagaagagcagaaaaatgagttcaaggcagccttcgacatcttcgtgctgggcgctgaggatggctgcatcagcaccaaggagctgggcaaggtgatgaggatgctgggccagaaccccacccctgaggagctgcaggagatgatcgatgaggtggacgaggacggcagcggcacggtggactttgatgagttcctggtcatgatggttcggtgcatgaaggacgacagcaaagggaaatctgaggaggagctgtctgacctcttccgcatgtttgacaaaaatgctgatggctacatcgacctggatgagctgaagataatgctgcaggctacaggcgagaccatcacggaggacgacatcgaggagctcatgaaggacggagacaagaacaacgacggccgcatcgactatgatgagttcctggagttcatgaagggtgtggagtagatgctgaccttcacccagagctgcctatgcccagcctccaactccagctgagtcctggggttggggagggggtcggggtcccaggacctgagcctggccatgtcctcaaccccaaatcccccgactccctccccagatctgtcctgggggatgcaaataaagcctgctctccc

SEQ ID NO: 45047 - DNA, 582 bp, Homo Sapiens
tcttctctgatagagaatacaagaagatatgctgtgcacaccaaccagtgtcggagacctcatggctccccggtaaagaagaagatgtacccacaagaagcctctgaggagtctctagttcacaaggacagaggagatggagagaggccagtcaacgtgagggtaagggcatcgctaacgaggaggccgtccacggcatccctggtcgccgtccagagcatcgctaacgaggacgccgtccagggcatcgctaacgaagatggagtccacggcatcgataacgaggacaccatccagggcctcgccgacgtggacgccgtccacggcctcgccgacggggtcgccgtccacggccttggcgatggggtcgccgtccagggcagcgctaacgaggacgccgtccagggcatcgctaacgaggacgccgtccagggcatcgctaacgacgccgtccagggcatcgctaacgaggacgccatccacggtattgctaacgaggatgccgcccagtgcatcgccaactgggatgccgtccaggacatcgccaactgggatgccgtccagtgcattgctaacgaagat

SEQ ID NO: 45048 - DNA, 2488 bp, Homo Sapiens
ccgggcctggctgaggcggaggttgttgcggatgcttctctctccaggcgcaccgcagattcctgcccgggggttggacccgaggaaccgccgtctctactggttccgacggccagaggctgggccctaggctgagcggagagtgggactggagcctgaaacgggcgcctaaaagaagcccgtgcatcccataggcctgcgcctcaggcttggagacgggcgggcggagaccgcgctgagtcttttttttttttttcctagcagctggcgttcttatctcacccgggaggctgtaaaaatctccgtccttaacagtaacaccatcaggtcctatcagttaagagctgcttgttatttgcatgcattcttataattaaatctcctaacaaccctgtaagccacattctctggcacagaactttggaaactttggggatcacttacttatcttggagatagaatgttttctaagcaaaattctgtggcatctctggaatactacctgagaatttttgtgtgccatgtcgaagaaacgcaaatgggatgatgactatgttcgctactggttcacctgtacaacggaagtagatggaactcagcgtccacagtgtgtgttgtgtaactcagtattttcaaatgctgacctcagaccatcaaaactgtcagaccattttaacagacagcatggtggtgtagctgggcatgatctcaatagcctgaagcatatgccagcaccatctgatcagagtgaaaccttgaaagcatttggagttgcatctcatgaggatactttattacaagcatcgtatcaatttgcgtatttatgtgccaaggagaagaatcctcatacagtagctgaaaagttagtgaaaccttgtgcactggaaatagcacaaatagttttgggaccagatgcacaaaaaaagcttcagcaggtacccttatcagatgatgtgatccattctagaattgatgaaatgagccaggatatcttacagcaagttctagaagatatcaaagccagtcctcttaaagtgggtattcagcttgctgagacaactgacatggatgactgcagtcagctaatggcatttgtgcgctatataaaagaaagagagatcgtagaagaatttctcttctgtgaaccattgcagctatccatgaaaggaatagatgtgttcaatctcttcagagacttctttctgaagcataagatagcacttgatgtatgtggctctgtttgtactgatggtgcctcctctatgctaggagaaaattccgagtttgttgcctacgtgaaaaaagagatacctcatatcgtagttacacattgtttattgaatcctcatgcacttgtcataaagacattgcctacaaaactgagggatgctctgtttactgtggtgagggtaataaatttcatcaaagggagagctccaaatcatcgcctatttcaggctttctttgaagaaattggcatagaatatagtgtcctccttttccatactgaaatgaggtggctttcccgaggccaaatacttactcacatttttgaaatgtatgaagaaataaatcagtttcttcaccacaagagcagtaatttagttgatggctttgaaaataaagagtttaaaattcacctagcataccttgcagatttattcaaacacttaaatgaactcagtgcatctatgcagaggactgggatgaacacagtatcagctagagagaagttatctgcttttgttaggaagtttccattttggcaaaaacgaattgagaaaagaaattttaccaattttccttttcttgaagaaataattgtttcagataatgaaggcatattcattgcagctgaaataacactgcatctgcaacaattgagcaacttcttccatggatatttttccattggagatcttaatgaggcaagtaaatggatattggatccatttctttttaatatcgattttgttgatgatagttatttaatgaaaaatgatcttgctgaattacgagctagtggccaaatcctaatggaatttgagacaatgaagcttgaggatttctggtgtgcccaattcacagcatttccaaacctggcaaagacagctctagaaatccttatgccatttgcaactacatacctttgtgagttgggattttcatcacttttacatttcaaaacaaagtccagaagctgctttaatctgagtgatgatatccgtgtggctatttcaaaaaaagttcctcgtttctcggacatcattgaacaaaagctacagctacagcagaagtcactgtaagctgatatacttttttaatgaataatttcaatcttaatatcattgtaaaattaagctgtaattctgtctctttcatatttatgatatactgaattctatgtctaaaaaacttaagaactttaattttgaatgaggcatgtgaaaatatgttttgagaataaaaacacagcagaaaagattaa

SEQ ID NO: 45049 - DNA, 852 bp, Homo Sapiens
cgtctgcttctgcgctttgcctgggagaggccctggtggcctcgttcctggcgcccggagtccctgctgcggccccacccccgggcggtcacggtgacccatgctgcccagcctggaggtaaaatcgttcgtggctgtggcttcagcatgtcgtcctcggtgaaaaccccagcactggaagagctggttcctggctccgaagagaagccgaaaggcaggtcgcctctcagctggggctctctgtttggtcaccgaagtgagaagattgtttttgccaagagcgacggcggcacagatgagaacgtactgaccgtcaccatcacggagaccacggtcatcgagtcagacttgggtgtgtggagctcgcgggcgctgctctacctcacgctgtggttcttcttcagcttctgcacgctcttcctcaacaagtacatcctgtccctgctgggaggcgagcccagcatgctaggtgcggtgcagatgctgtccaccacggttatcgggtgtgtgaaaaccctcgttccttgctgtttgtatcagcacaaggcccggctttcctacccacccaacttccttatgacgatgctgtttgtgggtctgatgaggtttgcaactgtggttttgggtttggtcagcctgaaaaatgtggcggtttcgtttgctgagacggtgaagagctccgcccccatcttcacggtgatcatgtctcggatgattctgggggagtacacagggctgctggtcaacctctccctcatcccagtcatgggcgggctggcgctgtgcacggccactgagatcagcttcaatgtcctggggttctcggccgcactgtccaccaacatcatggac

SEQ ID NO: 45050 - DNA, 1772 bp, Homo Sapiens
gttgagtcaatgtgtccccctcttgttcctagggtgcgggcttcatggccttctcctccaggaagctccacctgatcatgtcctgggtggatatccagcccccatagttcagggcctactagcagctgctagatcttgaactccaggagcgccccacgccttgggagcttggcatgggctaaatactcccccatttgttaaatggggtcctgaaacctgaccagggaagacgggataaagtagccatgggtcatcgcagcccctttgaagccgggcctggccacccaaaggcaactcaggggtggagactgaggcctcaggagaagcccccactagaatgctctctgcccctcccttccagattaaccaaaacctgctaattgtggaagccctcggcatgctcccctcccccacagcctcttcctcccttccctcccctcccccttccatccgaatgataaaggccccagcccgcctgccccagcccggcctcaggtcccggccctgccttctacactgccccaccgccctgcaccctccacccggccaggcccctgcccacgctgtctaccgtcccgcatggggccctgcagcggctcccgcctggggcccccagaggcagagtcgccctcccagccccctaagaggaggaagaagaggtacctgcgacatgacaagcccccctacacctacttggccatgatcgccttggtgattcaggccgctccctcccgcagactgaagctggcccagatcatccgtcaggtccaggccgtgttccccttcttcagggaagactacgagggctggaaagactccattcgccacaacctttcctccaaccgatgcttccgcaaggtgcccaaggaccctgcaaagccccaggccaagggcaacttctgggcggtcgacgtgagcctgatcccagctgaggcgctccggctgcagaacaccgccctgtgccggcgctggcagaacggaggtgcgcgtggagccttcgccaaggacctgggcccctacgtgctgcacggccggccataccggccgcccagtcccccgccaccacccagtgagggcttcagcatcaagtccctgctaggagggtccggggagggggcaccctggccggggctagctccacagagcagcccagttcctgcaggcacagggaacagtggggaggaggcggtgcccaccccaccccttccctcttctgagaggcctctgtggcccctctgcccccttcctggccccacgagagtggagggggagactgtgcaggggggagccatcgggccctcaaccctctccccagagcctagggcctggcctctccacttactgcagggcaccgcagttcctgggggacggtccagcgggggacacagggcctccctctgggggcagctgcccacctcctacttgcctatctacactcccaatgtggtaatgcccttggcaccaccacccacctcctgtccccagtgtccgtcaaccagccctgcctactggggggtggcccctgaaacccgagggcccccagggctgctctgcgatctagacgccctcttccaaggggtgccacccaacaaaagcatctacgacgtttgggtcagccaccctcgggacctggcggcccctggcccaggctggctgctctcctggtgcagcctgtgaggctcttaagacaggggccactcctccctcccgctcccacccccaccttgttgacagggagccaaggcgaggcggctgtctgcgaccacagcagc

SEQ ID NO: 45051 - DNA, 667 bp, Homo Sapiens
gcggtttgctaagtggtcggttcctggagctgcggtcttctgctagcctgatccgcagcttcagcctccgccgcctcctcagccctcggcgccgccgcctgacccgcaggccgccgcgggccgcagagcccatgagggcgcgggcaccgccgccgcctccgcggcgtcgccgtcgtcccggagcgccccgagctggcgcgggcatggccgcggcatgagcgtggagccgccgccggagctggaggagaaggcggcgtcggagcccgaggcgggagccatgccggagaagcgcgcgggcgcgcaggccgcggggagcacctggctacaaggctttggcccaccaagtgtgtaccatgctgctattgtcatcttccttgaattctttgcgtggggccttttgacaactccaatgttgactgttctacatgaaacattttctcaacacacattcctcatgaatggtctcattcaaggtgtaaagggcctgctctcttttttgagtgccccactcattggtgccctgtctgatgtgtgggggaggaagccctttctcctcggcactgtattctttacctgcttcccaatcccactgatgaggatcagcccatgccgggtgtggtggcgtgcacctgtagtcccagctacctgtggcaggagaatggcttga

SEQ ID NO: 45052 - DNA, 681 bp, Homo Sapiens
atggggagcatctttgtcaacctcttcgaaagcatttttggcaaaaaagaaatgcacatcctcatcgtggtcctcagtgctgcagggaaaacaacaatcctatataagctgaagctgagtgacatcatgaccaccatccctaccataggcttcaatgtggaaaccatggagtacaggaacatcagcttaaccatgtggaacatgggcagccaagaaaacatctggcctctgtggcaccactacttccagaatacacaaggactgatcttcgtagtggacagcaatgatagaaagtgtggaaaggaggcctgggaggagctctttaggatgctggctgaggatgagctctgggtgcagtcctcctggtgtttgccaacaagcagggcctccccaatgccaggaatgcagccaagatcacagacaagctggggctgcattacctgtgccacaggaactggtgcatttaggccacctatgccattagtggagacaggctctgtgaaggactggactggctgtccaatcaactctggaaccagaagtgaatgcaacaccctctcgctctcattgctcctcttccccttcactttatcctcatgtggcaaatgtgcagctctgtggtgtgagtgccagaacctgcttccctggtttggtcaccatgtgcatcatactgtgctgtaa

SEQ ID NO: 45053 - DNA, 731 bp, Homo Sapiens
ccactcattggatttggaagatgatactcgacttaatgtgtttgatgatggcacactcatgatccgaaacaccagagagtcagaccaaggtgtctatcagtgcatggccagaaattccgctggggaagccaagacacagagtgccatgctcagatactccagtcttccagccaaaccaagctttgtaatccagcctcaggacacagaggttttaattggcaccagcacaactttggaatgtatggccacaggccacccacaccctcttatcacttggaccagggacaatggattggagctggatggatccaggcacgtggcaacgtccagtggactttacttacagaacatcacacaacgggatcatggtcgatttacctgtcatgccaacaatagccacggcactgttcaagctgcagcaaacataattgtacaagctcctccacaatttacagtaacccccaaggatcaagtggtgctggaagaacatgctgtagagtggctctgtgaagctgacggcaacccacctcctgttattgtctggacaaaaacaggtattagaacatctgcaggagggcagctccctgtggaaggccagcatacagttctctcctctggcactttgagaattgaccgtgcagcacagcacgatcaaggccaatatgaatgtcaagcagtcagttcgttgggggtgaaaaaggtgtctgtgcagctgactgtaaaacccaaag

SEQ ID NO: 45054 - DNA, 477 bp, Homo Sapiens
tggaagtgctcaagtgtggtatacactcaggtgcatttttccaatcacaatattctgactgaaatatgagttggcgaggaagaagatatagaccaagacgatgtttacgacttgctcagctggttgggcctatgcttgagcccagtgtgccagagcctcaacaagaagaaccaccaactgaaagtcaggatcatacacctggtcagaagagagaagatgatcagggtgcagctgagattcaagtgcctaacctggaagctgatctccaggagctgtctcagtcaaagactggggatgaatgcggagatagtcctgatgtccaggggaagattctgccaaaatcagagcaatttaaaatgccagaaggaggggaagggaaaccacagctttaaacgaagacaaccaaaagaatgcaaactggatttatccgagatatttgacttttaaaaatctcaataaagttttccagttttctcc

SEQ ID NO: 45055 - DNA, 756 bp, Homo Sapiens
atgacctctgagttcttcgctgcccagctccgggcccagatctctgacgacaccactcacccgatctcctactacaagcccgagttctacacgccagttgatgggggcactgctcacctgtctgtcgtcgcagaagacggcagtgctgtgtccaccaccagcaccatcaacctctactttggctccaaggtccgctccccggtcagcgggatcctgttcaatgatgaaatggacgacttcagctctcccaacatcaccaacgagtttggggtgccccctcctgccaatttcatccagccagggaagcagccgctctcgtccatgtgcccgacgatcatggtgggccaggacggccaggtccggatggttgtgggagctgctgggggcacacagatcaccacagccactgcactgatatgtgtcacagcttttctccctggccgtgcccaccctgcacagcccccaagccacgctgatcacactcccatgccccaggccatcatctacaacctctggttcggctatgacgtgaagcgggccgtggaggagccccggctgcacaaccagcttctgcccaacgtcacgacagtggagagaaacattgaccaggcagtgactgcagccctggagacccggcaccatcacacccagatcgcatccactttcatcgctgtggtgcaagccatcgtccacacggctggtggctgggcagctgcctcggactccaggaaaggcggggagcctgctggctactga

SEQ ID NO: 45056 - DNA, 792 bp, Homo Sapiens
attcatactgcagagagatggtacagatgtgaagaatatggtaaagtctttgaaaagatctcaaatattgctgaacataagatagctcatactggagagatacctgacaaatgtgaagaatgtggcaaaacctgtaactgctcctcaacccttactaaaaagagagaaatcagactggagacaaaccttaggcatgtgaattgtggcaaagcctttaagtgcttctcagaccttactaatcataagagagttcatactgtggggaaatgttacaaatgtgaagaatgtaacaaagtctataggtggttctcagaacttgctaagcctaagataattcatactggagagaaaccctacaaatatgaagaatgtaacaaagactatggtagttcagacattactaaagataagataattcatagtgagaaaccctacaaatatattgaatataaaaaagcttttatgtggctctcagccattagtaaacacaagagaattaataccggaaagaaactgtattgtgaagaatgtgggacagcttttacctgcttctcaacccttattaaccacaagagaatttataagaaaaagagaccttatgaatgtgaagaatgtgacaaaacctttaaagcattgagcttgttctcacacctctttagaaaaaagaattcatactatagagaagtttgcaaatgttataagtgtggaaaagtctttaacaagttctcatatggtgttcaacatcagaggatgaatactgaacaaatgcatcataaaggtaatgactgttaa

SEQ ID NO: 45057 - DNA, 451 bp, Homo Sapiens
acttccctgttcactttggttccagcatcctgtccagcaaagaagcaatcagccaaaatgatacctggaggcttatctgaggccaaacccgccactccagaaatccaggagattgttgataaggttaaaccacagcttgaagaaaaaacaaatgagacttacggaaaattggaagctgtgcagtataaaactcaagttgttgctggaacaaattactacattaaggtacgagcaggtgataataaatatatgcacttgaaagtattcaaaagtcttcccggacaaaatgaggacttggtacttactggataccaggttgacaaaaacaaggatgacgagctgacgggcttttagcagcatgtacccaaagtgttctgattccttcaactggctactgagtcatgatccttgctgataaatataaccatcaataaagaagcattcttttcca

SEQ ID NO: 45058 - DNA, 939 bp, Homo Sapiens
atggttaaccaaagctccacaccgggcttcctccttctgggcttctctgaacacccagggctggaaaggactctcttcgtggttgtcttcacttcctacctcctaaccctagtgggcaacacactcatcatcctgctgtctgcgctggaccccaagctccactctccaatgtactttttcctctccaacctctccttcttggacctctgtttcaccacgagttgtgttccccaaatgctggtcaacctctggggcccaaagaagaccatcagcttcctggactgctctgtccagatcttcatcttcctgtccctggggacaactgagtgcatcctcttgacagtgatggcttttgatcgctacgtggctgtctgccagcccctccactatgccaccatcatccacccccgcctgtgctggcagctggcatctgtggcctgggtcattgggctagtggagtcagtggtccagacaccatccaccctgcacctgcccttctgccccgatcggcaggtggatgattttgtctgtgaggtcccagctctaattcgactctcctgtgaagacacctcctacaatgagatccaggtggctgttgccagtgtcttcatcttggttgtgcctctcagcctcatccttgtctcttacggagccattacctgggcagtgctgaggattaactctgcaaaagggcggaggaaagcttttgggacctgctcctcccatctcactgtggtcaccctcttctacagctcagtcattgctgtctacctccagcccaaaaatccctatgcccaagagaggggcaagttctttggtctcttctatgcagtgggcactccttcacttaaccctctcatatacaccctgaggaacaaggaggtaaccagggcattcaggagattgctggggaaggaaatggggctcacacaaagctga

SEQ ID NO: 45059 - DNA, 771 bp, Homo Sapiens
agcaagggcttccccataatcctggcaggcaggcctcccctggggtttccaacttctgaccccactgaagtgtttatcctcttctctaatcccagcctccttttccctgtctccatgtgctctgagagatgctctgagagatgctcccactcccccaggctccctccgcatccccctcattttcctcctccccagtgtgtcaatggagtcctaaccccatcctcgacattgtcgccttttcctcctccagagtgggaccttcttttcccccgagtggtcctgtctaggggtgccgctgccgggccccctctggtcttcctgctggagactggagcctttcgggagtcagcaggcgcccgggccaaccgcagccagcgaggggtgagcgatacttcaccggcgagtcatcagggtgagctggccgtgtgcgatgcagtcagtgtctgggtgacagacccctggactgctgtggacttgggtgtgctcgaggtggaggtgttgggcgaggtgcctgcagctgtcggcagttccctccgccagcacttctttgttgcccacttcgaggccgataaatctgaggaaggtggcccgggggtaggtggaggggccgccggggtgtggaccggggggcactgggtgtctgagtgcaaggccaagcagtcctatgtgcgggcattgaccgctgatgcccagggccgtgtggactggcgatggattcaaactggcacagcctgtgtctgcacactcctcagccggactggccgggcctga

SEQ ID NO: 45060 - DNA, 1035 bp, Homo Sapiens
attcgatatgtgaagttgattcccatggaaacctcgtcatcctctcatgacaattatgacagctttgcttctgataattttgcaaacacgaggcttcagtcagtccaggaaggctgctggaccagcagccagtgcagacactctggacttctcaggcaggcgatgaagtttccagggcgaaacaccaggggagcagccaataaaaaagcagagtaccccaaaccctcaaggaattctatgactggttccaattccgattcagaagatgaaagaaagggcttgaaatataaagcaaaacaaagcaatgcttgtaaaacgcatgtcagtattagaagcttctctggtttgttccccggaagacattccccgccaggccccaactcacaatcaaggagaccccaaggtacattcctggatgtttcttcaaggagacattctgaatggagagagctcggcctcttagaggtcaaggtcaggatcctcgggtcccttggcgctctacctacggaagagaaggaagaaaagacagaggctaagtacatgttggtgagaaagaggaagattgtggacggctacatgaacgaagttgagatgctcagaaatcgtcccgccagatcacccatgatccttccacatataattcggccaccggaagaaattacagaggaaggtttggagaacatctgcagcaactctcaagagaagatatataaccgttcgctgggttctatttgtcatcaatgccgccagaaaactatttatcaaacaaactgcagaaacccagactgttggggctttcaaggcctgttctgcggccccgaccttagaaacccttgtggtgaagaggtcaggaatactctgctggatgcgaactggcattgtccgccttgtcgaggctgcaactgcagtttccgctcgcagcgagatagactgtgggaaactggggtccttgaatatttagccaaatacaatggctttgggaatgtgcatgcttacttgaaaagtctgaaacaggaatttgaaatgcaagcataa

SEQ ID NO: 45061 - DNA, 534 bp, Homo Sapiens
atccgcagacgcaaggcccagcaagcaaaagcacaccgcactgccccataccccgagtcaggacccatccagcccatcatggtgccacactatacactatcacaccaaggtgtgcatcagccgcacttcagcttagaggagctcaaggtggcaggcattcacaagaatgtggcccaaaccactggcatctctattgattggaggaggcggaacaagtccactgagtccctgcagggcaatgtgcagcggctgaaggagtacaattccaagctcatcctcttccccaggaagcccttggcccctaagaagggagacagttctgttgaagaactgatattggccatccagctgacaggaccagtcatgcccatccagaaggtctataaaaaggagaaagccctagtcatcactgaggaggagaagaatttcaaagccttcgcgcatctcctcatggcctgtgccattgcccagctctttggcataaaagcaaaaagagccaaggaagctgtagaacaggatgttgaaaagaaaaaa

SEQ ID NO: 45062 - DNA, 717 bp, Homo Sapiens
atgaagaatgtggcaaacactgtaaccatttctcacatcttaccacacattaagataattcatactgaagagaaacccgacaaatgtgaagaatgtaacaaagtctttaactggtcttcaactcatactaaatataagagaattcatacagaagataaattttataaatatgaagaatgtgacaaaagctttaaaaacatttcaacccttattacacataagataatttatgttgtagagaaattctacaaatgtgaagaatgtggcaaagttttttttttttttttgaaatggagtctcactctgtcgcccaaattggagtgcaatggtgcaatctcagttcattgcaacctccgcctcctgggttcaagcgattctctggcctcaacctcccaagcagctgggattgcaggcgcctgccaccacgcccagctaatttttgtatttttagtagagacggggtttcaccattttgaccaggctggttttgaactcctgacctcaagtgatccacccgccttggcctcccaaagtgccccaaagtgctgggattacaagcatgagccattgagcccggtcgaatgtggcaaagtttttaataagttatcaaatcatactggagagaagctctacaaacctaaaagacatgacagtgctcttgagaacaccttaaacttttctaaacataaaagaaatcatagtgtcaagaagccctag

SEQ ID NO: 45063 - DNA, 2767 bp, Homo Sapiens
tcatttgtaggctgaactaatgactgccgccataagaagacagagagaactgagtatcctcccaaaggtgacactggaagcaatgaacaccacagtgatgcaaggcttcaacagatctgagcggtgccccagagacactcggatagtacagctggtattcccagccctctacacagtggttttcttgaccggcatcctgctgaatactttggctctgtgggtgtttgttcacatccccagctcctccaccttcatcatctacctcaaaaacactttggtggccgacttgataatgacactcatgcttcctttcaaaatcctctctgactcacacctggcaccctggcagctcagagcttttgtgtgtcgtttttcttcggtgatattttatgagaccatgtatgtgggcatcgtgctgttagggctcatagcctttgacagattcctcaagatcatcagacctttgagaaatatttttctaaaaaaacctgtttttgcaaaaacggtctcaatcttcatctggttctttttgttcttcatctccctgccaaatacgatcttgagcaacaaggaagcaacaccatcgtctgtgaaaaagtgtgcttccttaaaggggcctctggggctgaaatggcatcaaatggtaaataacatatgccagtttattttctggactgtttttatcctaatgcttgtgttttatgtggttattgcaaaaaaagtatatgattcttatagaaagtccaaaagtaaggacagaaaaaacaacaaaaagctggaaggcaaagtatttgttgtcgtggctgtcttctttgtgtgttttgctccatttcattttgccagagttccatatactcacagtcaaaccaacaataagactgactgtagactgcaaaatcaactgtttattgctaaagaaacaactctctttttggcagcaactaacatttgtatggatcccttaatatacatattcttatgtaaaaaattcacagaaaagctaccatgtatgcaagggagaaagaccacagcatcaagccaagaaaatcatagcagtcagacagacaacataaccttaggctgacaactgtacatagggttaacttctatttattgatgagacttccgtagataatgtggaaatcaaatttaaccaagaaaaaaagattggaacaaatgctctcttacattttattatcctcgtgtacagaaaagattatataaaatttaaatccacatagatctattcataagctgaatgaaccattactaagagaatgcaacaggatacaaatggccactagaggtcattatttctttctttctttttttttttttttaatttcaagagcatttcactttaacattttggaaaagactaaggagaaacgtatatccctacaaacctcccctccaaacaccttctcacattcttttccacaattcacataacactactgcttttgtgccccttaaatgtagatatgtgctgaaagaaaaaaaaaacgcccaactcttgaagtccattgctgaaaactgcagccaggggttgaaagggatgcagacttgaagagtctgaggaactgaagtgggtcagcaagacctctgaaatcctgggtaaaggattttctccttacaattacaaacagcctctttcacattacaataatataccataggaggcacaagcaccattattaagccactttgcttacaccttaagtgtgtacaattcaagtgtgagaatgctgtgttaactattctttggaattctccttctgtccagcaaatactctaatgatggttaaacatggcacctactcagcaatgccttcctggaccacaacccctatccccctgccccaccctcctcattaaaaacaaatacttctactgtttgggtgtgtgatagggttctcaatgcagatctcccttttctagttagctatattcttgactgcatccgctaaaaatgttaaagcttcttgagagacagacatgccagattttcttggtatctcccataatacgacctacagtccatggtctacagatgttttaaatagaattgctattctcgatacatacaaagacgtaattgctgacccacaatcagtaacatccatattgagagatttttcaaaggatggtgaccctgcttgtatttatttaccttggtattttttcttgcatccttctgtgattcaaaaaagtaaaatgtggctttctgaaatgatggataagagtctacatcttctagaaaaaatacataaaggagtagttaagctctgtaaatgtgccacgagctccaacacgaccatcgtagggtgaagcccacgttttcttccatggcctcaaaggccctagaacttgcctacctttctggccttacctcctagctacttatccatctcttgaactttatactcttgtataaatttctaactttcagaaaatgccatactctgttttggcaccacacatgtatatttccccctggtacacttggaagactcttatccatctgtgaaaccctatgttgtcatcacttggtccatgaaatattacctggccaatatcccaccatcacctcaaacccaatcaccccctcctctgtatgctgtcacacctatattattaaacttatcacattgcattgtaattacttcctgacctttgtatctactcttttagtaactgatgtatatatctgaaaggagagattgtttcattgtgcaatcaataaatgtttgataaaataaagccc

SEQ ID NO: 45064 - DNA, 207 bp, Homo Sapiens
atgtctggcttctccagcgtcgccgctacgaagaaagtggttcaacagctccagctggaggccgggctcaacagcgtaaaagtttcccaggcagctgcagacttgaaacaattctgtctgcagaatgctcaacatgaccctctgctgactggagtatcttcaagtacaaatcccttcagaccccagaaagtctgttcctttttgtag

SEQ ID NO: 45065 - DNA, 424 bp, Homo Sapiens
aggaggcgagccggagcgacggcggggctggggccggagccgagccggggtcgggcagcagcagggaccccccagaggcggggcctgtgggaccgctatgggcgtggagatcgagaccatctcccccggagacggaaggacattccccaagaagggccaaacgtgtgtggtgcactacacaggaatgctccaaaatgggaagaagtttgattcatccagagacagaaacaaacctttcaagttcagaattggcaaacaggaagtcatcaaaggttttgaagagggtgcagcccagatgagcttggggcagagggcgaagctgacctgcacccctgatgtggcatatggagccacgggccaccccggtgtcatccctcccaatgccaccctcatctttgacgtggagctgctcaacttagagtga

SEQ ID NO: 45066 - DNA, 873 bp, Homo Sapiens
atgcgcgccctggcggccctgagcgcgcccccgaacgagcggctccttccccgggaccccgcggctacccgggaccccgacgccgcgcggccggcgcgcaggagcgcagtggagaggctggcggcggatcgcgccaagtatgtgcggggtcggccggggactggccggggcgtcgcttccgagggcagcggcccgggggcgatcaaggctattgcgcggaagccgttgagaccggactcgctgatcatctaccggcagaaatgcgaattcgtgcgaggatcgggcgccgacggccccagggcaagcctggtgaagaagctcttccaggggccgggtaaggacaaggcgccggtgccccggacgggagacgagggcaaggccgggaacccggagacggtcccgaccactcctggccccgcggcggaccccgcaatccccgagaccccagccccagccgcgcggtccgcggcgccctccagtgtcccggccgcgccccctgggccagagccgcgggtggtgaggcgtcgggggctgcagcgctcacagtcggacctcagctcccgctattccgctgccttggccgagtctgacaccttcttccagtactgcggcctggaccccgaggtggtggaggccctggggagggagaacttcaccgcggggtcggactgtgtgaccctcaaggtgcgcagcgtgagcgtcgccacctccggcagcggcttctcccggcacagcggcggcgacgacgaggggctgcaggaggaggagctgatagagcaggtgcccagcaccacttcggtcatcgagaggaacgcccgcatcatcaagtggctgtacacctgtaagaaggccaaggagacccccagccaggag

SEQ ID NO: 45067 - DNA, 857 bp, Homo Sapiens
gcagtagcaccagcggctgcggcggcggagctcctccgaggtccgggtcaccagtctctgctcttcccagcctctccggcgcgctccaagggcttcccgtcgggaccatgcgcggccgtgagctcccgctggtcctgctggcgctggtcctctgcctggcgccccgggggcgagcggtcccgctgcctgcgggcggagggaccgtgctgaccaagatgtacccgcgcggcaaccactgggcggtggggcacttaatggggaaaaagagcacaggggagtcttcttctgtttctgagagagggagcctgaagcagcagctgagagagtacatcaggtgggaagaagctgcaaggaatttgctgggtctcatagaagcaaaggagaacagaaaccaccagccacctcaacccaaggccctgggcaatcagcagccttcgtgggattcagaggatagcagcaacttcaaagatgtaggttcaaaaggcaaagttggtagactctctgctccaggttctcaacgtgaaggaaggaacccccagctgaaccagcaatgataatgatggcctctctcaaaagagaaaaacaaaacccctaagagactgcgttctgcaagcatcagttctacggatcatcaacaagatttccttgtgcaaaatatttgactattctgtatctttcatccttgactaaattcgtgattttcaagcagcatcttctggtttaaacttgtttgctgtgaacaattgtcgaaaagagtcttccaattaatgcttttttatatctaggctacctgttggttagattcaaggccccgagctgttaccattcacaataaaagcttaaacacattgtccaaa

SEQ ID NO: 45068 - DNA, 1194 bp, Homo Sapiens
aagtcctccagctctgcatcttccgaggcctcggaaacctgccagtccgttagcgagtgcagctcccccacctcggactggtccaaggtcggctcccatgagcagccctcaggcgccactctgcagcggaggaaggaccgagtggagctcctgcgagacacagagccaggccctgccagtgggggcaccctgggccccagcggggaagaggcaccgcgaccccggatgtcccctgccaccatcgcagccaagcacggtgaggaggtgtcccccgccgccagtgacctggccatggtgctgacgcggggcctgagcctggagcaccagaagagcagccgggactcgctgcagtactccagcggctacagcacgcagaccaccacgccctcctgctctgaggacaccatcccctcccaaggcagctccgactacgactgctactccgtgaatggggatgcggacagcgagggcccgcccgagtttgacaagtcatccaccatcccgcgcaacagcaacatcgcccagaactaccgccgcctgatccagaccaagcgcccagcctccactgctgggctgcccaccgcggggctgcccacggccactggcctgccctcgggcgcaccccccggcgtggccaccatccgccgcacaccctccaccaagcccaccgtgcgccgcgccctgtccagcgctggccccatccccatccggccgcccatcgtccctgtgaagacgcccacggtgcctgactcccccggctacatggggcccacacgggcgggcagtgaggagtgcgtcttctataccgacgagaccgcctcacccctggcaccggacctcgccaaggcctccccaaagaggctcagcctgcccaacacagcctggggcagcccatccccagaggcagccgggtaccccggggcaggggccgaggacgagcagcagcagctggcggccaaccggcacagcctggtggagaagctgggggagctggtggcgggtgcccacgcactgggtgagggccagttccccttccccactgctctgtcggccacccccacggaggagacgcccaccccacccccagccgccaccagcgaccccccggccgaagacatgctggtggccatccggcgtggggtccggctccgcaggaccgtcaccaacgacaggtcggcgccccgcatcttatga

SEQ ID NO: 45069 - DNA, 546 bp, Homo Sapiens
cccccatgtcgcctccgtaggtacaagaagtatgtcttcctggaccccctggctggtgctgtaacaaagacccatgtgatgctgggggcagagacagaggagaagctgtttgatgcccccttgtccatcagcaagagagagcagctggaacagcaggtgggaggggtgggacagaggtggagacaggtgcagtggcccagggccttgccagagctcttctccagtcaaggctgttgggccccttattccacccatgggaggtgcacacaaggtcttgttggctgcccctgcaggtccctgtcacctctcacatgtccctgcctaatcttgcaggtcccagagaactacttctatgtgccagacctgggccaggtgcctgagattgatgttccatcctacctgcctgacctgcccagcattgccaacgacctcatgtacagtgccgacctgggccccggcattgccccctctgcccctggcaccattccggaactgcccaccttccacactgaggtagccgagcctctcaaggcaggtgagctgggt

SEQ ID NO: 45070 - DNA, 2031 bp, Homo Sapiens
atggccgagttcagggtcagggtgtccaccggagaagccttcggggctggcacatgggacaaagtgtctgtcagcatcgtggggacccggggagagagccccccactgcccctggacaatctcggcaaggagttcactgcgggcgctgaggaggacttccaggtgacgctcccggaggacgtaggccgagtgctgctgctgcgcgtgcacaaggcgcccccagtgctgcccctgctggggcccctggccccggatgcctggttctgccgctggttccagctgacaccgccgcggggcggccacctcctcttcccctgctaccagtggctggagggggcggggaccctggtgctgcaggagggtacagccaaggtgtcctgggcagaccaccaccctgtgctccagcaacagcgccaggaggagcttcaggcccggcaggagatgtaccagtggaaggcttacaacccaggttggcctcactgcctggatgaaaagacagtggaagacttggagctcaatatcaaatactccacagccaagaatgccaacttttatctacaggctggctctgcttttgcagagatgaaaatcaaggggttgctggaccgcaaggggctctggaggagtctgaatgagatgaaaaggatcttcaacttccggaggaccccagcagctgagcacgcatttgagcactggcaggaggacgccttcttcgcctcccagttcctgaatggtctcaaccctgtcctgatccgccgctgtcactacctcccaaagaacttccccgtcactgatgccatggtggcctcagtgttgggtcctgggaccagcttgcaggctgagctagagaagggctccctgttcttggtggatcacggcatcctctctggcatccagaccaatgtcattaatgggaagcctcagttctctgcggccccaatgaccctgctataccagagcccaggctgcgggccgctgctgcctctcgccatccagctcagccagacccccggcccaaacagccccatcttcctgcccactgatgacaagtgggactggttgctggccaagacctgggtgcgcaatgccgagttctccttccatgaggccctcacgcacctgctgcactcacatctgctgcctgaggtcttcaccctggctaccctgcgtcagctgccccactgccaccctctcttcaagctgctgatcccgcacacccgatacaccctgcacatcaacacactcgcccgggagctgcttatcgtgccagggcaggtggtggacaggtccacaggcatcggcattgaaggcttctctgagttgatacagaggaacatgaagcagctgaactattctctcctgtgtctgcctgaggatatccggacccgaggagttgaagacatcccaggctactactaccgtgatgatgggatgcagatctggggtgcagtggaacgctttgtctctgaaatcatcggtatctactacccaagtgatgagtctgtccaagatgacagagagctccaggcctgggtcagagagatcttctccaagggcttcctaaaccaggagagctcaggtataccctcctcactggagacccgggaagccctggtgcagtatgtcaccatggtgatattcacctgctccgccaagcatgcggctgtcagtgcagggcagtttgactcctgtgcttggatgcccaacctgccacccagcatgcagctgccaccacccacctccaaaggcctggcaacatgcgagggcttcatagccaccctcccacctgtcaatgccacatgtgatgtcatccttgctctctggttgctgagcaaggagcctggagaccaaaggcccctgggcacctatccggatgagcacttcacagaggaggcccctcggcggagcatcgccaccttccagagccgcctggcccagatctcgaggggcatccaggagcggaaccagggcctggtgctgccctacacctacctagaccctcccctcatcgagaacagcgtctccatctaa

SEQ ID NO: 45071 - DNA, 759 bp, Homo Sapiens
atgaaaataattaatggctggctttactgggtgctgggcgtgcaacgcgaggcctccgatggcgaggtccgacgaggctaccacaaggtgtccctgcaggtacacctggaccgggtgggcgagggcgacaaggaggacgccacccgctgcttccagatcctggaaaaagtctattccattctcggtgacagagaacagagagcagtgtacgatgagcagggaacggtggacgaggactctcctgtgctcatccaagatcaagactgggaggcgtattggcggctactctttaaaaagatatctttagaggacgttcaagcttttgaaaagacatacaaaggtttggaagaagagctggctgatattaagcaggcctatctggacttcaagggtgacatggatcagatcatggagtctgtgctttgcgtgcagtacacagaggaacccaggataaggaatatcattcagcaagctattgacgccggagaggtcccatcctataacgcctttgtcaaagaatcaacacaaaagatgaatgcaaagaaaaggagggctcaggaagaggccaaagaagcagaaatgagcagaaaggagttggggcttgatgaaggcgtggatagcctgaaggcagccattcagagcagacaaaaggattggcaaaaggaaatggacaattttctggctcagatggaagcaaagtactgcaaatcttccaaaggaggagggaaaaaatctgctctcaagaaaaaaaagaaataa

SEQ ID NO: 45072 - DNA, 444 bp, Homo Sapiens
ctggctcgggagaaccaagaggagctggacaagtacgggtctcagcagactgaggagagcaccacaatggtcaccacacagtccgccgaggttggagctgctgagatggcgctcacggaactgagacatacagtccagtccttggagattgacctggactcaatgagaaatctgaaggcaagcttggagagcagcctgaggaaagtggaggcccgctatgccctacagatggagcagatcaacgggatcctgctccacctggagtcggagctggcacagatccgggcagagggacagtgccaggcccaggagtacaaggccctgctgaacatcaaggtcaagctggaggctaagatcgccacctactgccacctgctggaagatggcaaggacttcaatcttggtgatgccctggacaccagcaattccatgcaaaccattcaa

SEQ ID NO: 45073 - DNA, 2759 bp, Homo Sapiens
aagagctcgttgattcctctgcaaggtggtgcagcatcctctgtcccttcattcatttcagatctactcaggtctccctgtaaacagatctctcggatcaataagcatgaatgacgaagactacagcaccatctatgacacaatccaaaatgagaggacgtatgaggttccagaccagccagaagaaaatgaaagtccccattatgatgatgtccatgagtacttaaggccagaaaatgatttatatgccactcagctgaatacccatgagtatgattttgtgtcagtctataccattaagggtgaagagaccagcttggcctctgtccagtcagaagacagaggctacctcctgcctgatgagatatactctgaactccaggaggctcatccaggtgagccccaggaggacaggggcatctcaatggaagggttatattcatcaacccaggaccagcaactctgcgcagcagaactccaggagaatgggagtgtgatgaaggaagatctgccttctccttcaagcttcaccattcagcacagtaaggccttctctaccaccaagtattcctgctattctgatgctgaaggtttggaagaaaaggagggagctcacatgaaccctgagatttacctctttgtgaaggctggaatcgatggagaaagcatcggcaactgtcctttctctcagcgcctcttcatgatcctctggctgaaaggagtcgtgttcaatgtcaccactgtggatctgaaaagaaagccagctgacctgcacaacctagcccccggcacgcacccgcccttcctgaccttcaacggggacgtgaagacagacgtcaataagatcgaggagttcctggaggagaccttgacccctgaaaagtaccccaaactggctgcaaaacaccgggaatccaacacagcgggcatcgacatcttttccaagttttctgcctacatcaaaaataccaagcagcagaacaatgctgctcttgaaagaggcctaaccaaggctctaaagaaattggatgactacctgaacacccctctaccagaggagattgacgccaacacttgtggggaagacaaggggtcccggcgcaagttcctggatggggatgagctgaccctggctgactgcaatctgttgcccaagctccatgtggtcaagattgtggccaagaaataccgcaactatgatatcccggctgagatgacaggcctgtggcggtacctcaagaacgcctatgcccgtgatgagttcaccaacacctgtgcagctgacagtgagatcgagttggcctacgctgatgtcgccaaacgcctcagccgatcctgagcacagccattttgccccatccccgctgcagaaggactcaaccactcccctaagactccagcttcatagactcctctgtatcactgccttgaggcgcactttttataatcaagcctcatcttgctggtatcatgggaactccagcctgctatctttcatgaaggtcagcaccatccctggcctcctcacataggaatctagcagaaatgatagacacagtccacctttcggccggccagcctgatctgggctcagcatgtttggggtcagtcagtgttggagagcccacatatgggattgccactagcttcttctgccaatatcaaaataccttctcagatgctttagaaacatgcaacaccaactccttttctaccctcctctccgtccatacctacaaggccaaggacaaacgccatcttcatccttcttagaaagagatctattaccccattaggggagacagagagagtgaatggaggagtaccgagctggctatggacttgggtgtctggcaaacacagcttcagtctcactacttctgacactctggttattgggcactaagggccagactggaaagtcacttgagacacattctcagtttgttgcagtgccaggaatgctgcgctgctgctgctgcgcacctggcccatgctgtccctggcttccatgccgtccaggccctgccagaaaaggaaattggcatgcaattctaaactgcagtgactgggatgggaggggaggggagcagtgttgatgccaaaatacccacggggtctaccagccatggggtttgcttgcttaggagtagttgtttcagaggtgattacaggcctgggtttgactgtgcttaccaatgagtggtttttgagctatgagaaagtggatgggagtgggaggaggagagatgggtgaagacaaaagagttctttatgagcctcgatgttccctggtaaacttttaaaaaggccttctctcatgatctaagtcttggactggtggcatcatgtaactgctaaccttacagtaaaaacccaagaatgggtcaaaaatgtcttcccagtttctccaagctgcttctggaatgcaggtctgtcggctgggtgctctccagcagctgctcctgcctgattcaactgtagcctgtaatgggtaaaagccacatttaggaggtggtctgatcatagaacaccttaggaagaaagtccatgagactttctgactaggaaaccatgtggtttgaacttgaagaaaaatgtagacccatctgggttaattttcctacaatctgactcaactgccaggtgaaaaaaaaaaggaaaaatttttaagctaatatttcactcttttgtcattctccttaagtttcatctcctaaaaagcttacccagcctgagcttggggacctgtgcagagg

SEQ ID NO: 45074 - DNA, 1026 bp, Homo Sapiens
aaggtgtccaagacacacagagccacggaatctcacaggtgtctgagaattcctcctcctgggactctcagaggatccagaactgcagccagtcctcgctttgctgtccctgtccctgtccatgtatctggtcacggtgctgaggaacttgctgagcatcctggctgtccgctctgagtccccgctccacacaaccatgtacttcttcctctccatcctgtgctgggctgacatcggtttcacctcagccacagttcccaagatgattgtggacatgcagtggtatagcagagtcatctctcatgcgggctgcctgacacagatgtctttcttggtcctttttgcatgtatagaaggcatgctcctgactgtgatggcctatgactgctttgtaggcatctgtcgccctctgcactacccagtcatcgtgaatcctcatctctgtgtcttctttgttttggtgtcctttttccttagcctgttggattcccagctgcacagttggattgtgttacaattcaccatcatcaagaatgtggaaatctctaattttgtctgtgacccctctcaacttctcaaacttgcctgttctgacagcgtcatcaatagcatcttcatatattttggtagtactatgtttggttttcttcccatttcagggatccttttgtcttactataaaatcgtcccctccattctaaggatttcatcgtcagatgggaagtataaagccttctccacctatggctctcacctagcagttttttgctgatttgatggaacaggcattggcgtgtacctgacttcagctgtggcaccacccctcaggaatggtgtggtggtgtcagtgatgtaagctgtggtcacccccatgctgaaccttttcatctacagcctgagaaacagggacatacaaagtgccctgcggaggctgcgcagcagaacagtcgaatctcatgatctgttccatcctttttctggtgtgggtgagaaagggcaaccacattcaatccctacatctgcaaa

SEQ ID NO: 45075 - DNA, 363 bp, Homo Sapiens
tatgagacagactacacaactggtggcgagtcctgtgatgagctggaggaggactggatcagggaatatccacctatcacttcagatcaacaaagacaactgtacaagaggaattttgacactggcctacaggaatacaagagcttacaatcagaacttgatgagatcaataaagaactctcccgtttggataaagaattggatgactatagagaagaaagtgaagagtacatggctgctgctgatgaatacaatagactgaagcaagtgaagggatctgcagattacaaaagtaagaagaatcattgcaagcagttaaacagcaaattgtcacacatcaagaagatggttggagactatgat

SEQ ID NO: 45076 - DNA, 327 bp, Homo Sapiens
atgagtctgacttccagttccagcatacgagttgaatggatcacagcatttactattgctgctgggagagctgcaactggttatctagcttacaaaagattttatgacaaagatcatcagaataaagctatgatgaaccttcacatccagaaagacaaccccaagatagtacatgcttttgacatggaggatttggaagataaagctgtgtactgccattgctggaggtataaaaagttcccattctgtgatgggtctcacacaaaacacaacgaacagactggagacaacgtgggacctctgatcatcgagaaaaaagaaacttaa

SEQ ID NO: 45077 - DNA, 1471 bp, Homo Sapiens
aacacattgttcagtttggctcccacttgccacttgctctccgggtctcaaaatgctgccatccacctgccctgcacagggagcctcactcatccactcactgccaccagtaagcaccaccctacacccagcactggtccctgaatggccagagggaagaccacccagaacactggtgaaggcattaatcagggacccagttcaagccaggcccttctgctgctcccgctcggtgtcactgtgaggcactgggagtgcccaggacacagtgacccaggcctggacctgctggcacgtcctggatagagcaggactcacaccagagagatgagggcttcgggtaaggacagacccgggctggctgggccgcagaatgtcatctcctgctagccgtggcttcctcatcaccagatctataaaaacaacttcccacggccgtgagggctcgagtgagatagcacagaggaaatgcttccccacttgtaaaactctctctgtgggccactatcgtgcctggctgccacacttcctctccgctccaactaaggcctcgctgttcacatgcaggcagctccccgaggaggttgtggggccaggatacagggccttgtagacgagcaagaatgcatggtctcagggggatgggaagccttctgagcgcttcctccagacagtgccggagaaggggcctggctgctccttgccccggctgcgggccagtccagtctgctatgtctctagcatgtgcccctctgagatcagtgagagccccagtcatgcatccccaggggtcctgtaacagaggaccacacaccggggggcttcaaacaacagaaatgcatccttgcacacttccagaggccaggagtcctaaggcatcggcagggctgactccttctggggtctccgagggagaattccactccatccgctcccagctgctgctggccccggctcttctctgcttatggacacttcagtccactctgcctctgctgtcccatggattttctcttctaagaacacttgtcattgaattcacagccctccctacttcagaacaatctcatcgcaacatccttaactgaatcacacctacaaagaccctttttccagatgaggccactctcacagtctctgggccgtgggcttattttttggggctgccattcaacccccctcatcacactctcacactttctgagctgagatccacagtaaggaatacactgtttcatcttcgccctaggcacatactctcatccgcagctgaaatgcagtttcagaatgtgaatccttatttcacgttctgtgtggtgatgttttctgttttctctcttgcctcctcctcagcattggctacacacccactaattgattcccagagctcacagcctggatcaaagttgtttctttgttttgtttgtttgtttgtttgtttgtttagagacagagtcttgctcagttgccc

SEQ ID NO: 45078 - DNA, 306 bp, Homo Sapiens
attggtaacaggagtggggtgttgctgaaaagagacccaaaaatgcagaaacgactttggaactgggtaacaggcagagattggaacagtttgcagggctctgtagaagataggaagatgcgagaaagtttggaactctctagagacttaccgaatggctttgaccaaaatgctgataatgatattaatgatgaaaaccaggctgaggtggtctcagatagagatgaggaacttgttggtaactggagcaaaggtgactcttgttattttagcaaaaagactggcagcattttgcccctgccttag

SEQ ID NO: 45079 - DNA, 1809 bp, Homo Sapiens
aggtgtaccaacattcgaccaggagagactggaatggatgtaacaagccgctgcacccttggagaccccaacaaactgccagaaggggttccccaacctgcccgcatgccctatatctcagacaagcaccctcgacaaaccttggaagtgattaaccttctgagaaagcaccgggagctatgtgatgtggtgctagttgtgggcgccaagaagatatatgcccatcgagtcattttgtcagcctgtagtccctacttccgagctatgtttacaggagaattggcagagagccgtcagacagaagtagtgatccgagacattgacgagagggctatggaattactgattgactttgcgtatacctcccagataacagtagaagagggcaatgttcagactcttctgccagctgcttgcctcctccagctggcagaaatacaggaagcctgctgtgaattcttaaagagacaattagatccttctaactgcctgggcattcgggcttttgctgacacacattcatgtcgtgagttgctaaggatagcagacaagttcacccaacataactttcaagaggtaatggagagtgaagagttcatgttgcttccagccaatcaactcattgatataatatccagtgatgagctaaacgttcgcagtgaagaacaagtgttcaatgcagtgatggcctgggtcaaatacagtattcaggaaagacgtcctcaattaccccaggtgctgcagcatgttcgtttgcctttgcttagtcccaagttcctggtcggcacagtaggctctgatcccctcatcaaaagtgatgaagaatgcagagacttggtagatgaggctaaaaactacctcctattgccgcaagaacgaccactaatgcaaggaccaaggacgagaccacggaaacctatccgatgtggggaagtactctttgcagttggtggttggtgcagtggagatgccatttccagtgttgaacgatatgatccacagaccaatgaatggagaatggtggcttcaatgagcaaaaggagatgcggagttggggtcagtgttcttgatgatctgttatatgcagtaggaggccatgatggatcctcttatctcaatagtgttgaaaggtatgaccccaaaacaaaccagtggagcagtgatgtggcccctacaagcacctgcaggacaagtgttggtgtagcagtacttggaggctttctttatgctgtgggtggccaggatggtgtgtcttgcctcaacattgttgagaggtatgatccgaaggagaacaagtggactcgggtagcttctatgagtaccagaagactaggtgtggctgtggctgtgttaggagggttcttatatgctgtaggtggctctgacgggacatctcctctcaacacagtggaacgttacaatcctcaggaaaacagatggcacactatagcccctatggggacccggaggaaacacctaggctgtgcagtatatcaggacatgatctatgctgtaggaggtagagatgacactacagagctgagcagtgctgagagatacaaccccagaaccaaccagtggtctccagtggtggccatgacatcacgccgtagtggagttggcctggcagtggtcaatggacagctcatggcagtaggaggttttgatggcacaacatacttgaagaccatagaagtttttgatcctgatgccaatacatggaggttatatggcgggatgaattaccgtcggctagggggtggcgtaggagttattaaaatgacacattgtgaatcccatatttggtga

SEQ ID NO: 45080 - DNA, 219 bp, Homo Sapiens
atggacgttatgctaagtgaaataaaccagttccgaaaggacaaatacacccatttccacttatatggggtatctaacgtcaaactcagaagaacaaagtactgcggtatttgccacaagctggtggaggagaaaatgagttgttcaatgggtattgagtgtcagccacgcaagatggaaaagctttttgagatttgttgtataaaaatatgcctatag

SEQ ID NO: 45081 - DNA, 1556 bp, Homo Sapiens
attgattattcttgggtgtttctcgcagagggggatttggcagggtcataggacaatagtggagggaaggtcagcagataaacaagtgaacaaaggtctctggttttcctaggcagaggaccctgcggccttccgcagtgtttgtgtccctgggtacttgagattagggagtggtgatgactcttaacgagcatgctgccttcaagcatctgtttaacaaagcacatcttgcaccgcccttaatccatttaaccctgagtggacacagcacatgattcagagagcacagggttgggggtaaggtcacagatcaacaggataagaatttttcttagtacagaacaaaatgaaaagtctcccatgtctacctctttctacgcagacacagcaaccatccgatttctcaatcttttcctcacctttcccccctttctattccacaaaaccgccattgtcatcatggcccgttctcaatgagctgttgggtacacctcccagacggggtggtggccgggcagaggggctcctcacttcccagtaggggcggctgggcagaggcgcccctcacctcccggacggggcggctggccgggcggggggctgacccccccacctccctcccggacggggcagctggcctggcgggggctgacccccacctccctcccggacggggtggctgctgggcggagacgctcctcacttcccagacggggtgactgccgggcggaggggctcctcacttctcagacgggcggttgccaggcggagggtctcctcacttctcagacggggcggccgggcagagacgctcctcacctcccagacagggtcgcggccgggtagaggcgctcctcacatcccaggcggggcggcggggcagaggctctccccacatctcagacaatgggcggccgggcagagacgctcctcacttcctagatgggatggcgaccgggaagaggcgctcgtcacttcctagatgggatggcggccgggcagagatgctcctcactttccagactgggcagccaggcagaggggctcctcacgtcccaggcgatgggcggccaggcagagacgctcctcacttcccagacggggtggcggccgggcagaggctgcaatctcggcactttgggaggccaaggcaggcggctgggaggtggaggttgtagcgagccgagatcacgccactgcactccagcctgggcaccattgagcactgagtgaaccagactccgtctgcaatcccggcaccccgggaggccgaggctggcggatcactcgtggctaggagctggagaccagcccggccaacacagcgaaaccccgtctaaaaaaatacgaaaaccagtgaggcgtggcgtcgcgcgcctgcaattgcaggcactgggcaggctgaggcaggagaatcaggcagggaggttgcagtgagccgagatggcagcagtacagtccagcttcggctcgggagagggggagggggagggggagggggagggagagggttttctatgtttcttacagggtctttagatgttcccacagatcct

SEQ ID NO: 45082 - DNA, 912 bp, Homo Sapiens
atggacagtcccagcaatgccaccgtgccctgtggctttctccttcaaggcttctccgaattcccgcacctgagacccgtgctcttccttttgctgctgggggtgcacctggccaccctgggcgggaacctgctcatcctggtggccgtggcctcgatgccaagccggcagcccatgctgctcttcctgtgccagctgtcagccatcgagctgtgctacacgctggtggtggtgccccgctccctgatgcagatgtttgtggctctgggcggggccgagtgcttcctgctggccgccatggcctatgaccgctacgtggccatctgccacccgttgcgctacgcggccgtggtgacccccgggctgtgcgcgcgactggctctggcctgctgcctcaggggactggcggtgtccgtggggctcacggtggccatcttccacctgcctttctgcggctcccgcctgctgctgcacttcttctgcgacatcacggcgctgctgcacctggcctgcacgcggagctacgccgacgagctgcctctgctgggcgcctgcctggtgctgctgctgctgccctcggtgctcatcctggcctcctatggcgccatcgccgccgccctgcgccgcctgcgctgccccaaaggccggggcaaggccgcctccacctgcgccttgcacctggcagtcaccttcctgcactacggctgcgccaccttcatgtacgtgcggcccagggccagctactccccgcgcctggaccgcaccctggcgctggtctacaccaacgtcacgccgctgctgtgcccactcatctacagcctgcgcaaccgcgagatcaccgccgccctgagcagggtgctggggcgccggcggccaggccaagctccaggcggggatctgcgcgagctctga

SEQ ID NO: 45083 - DNA, 711 bp, Homo Sapiens
tttagtacagaacctgctaaggccatcaaacctattgatcggaagtcagtccatcagatatgctctgggccagtggtactgagtctaagcactgcagtgaaggagttagtagaaaacagtctggatgctggtgccactaatattgtgctctctgtctcactgtcttttagatgccaaaccttagattttatgatgactcctcaaccgtttagatcttggttatctcagagggatcgtcagctttttaagaaagttttgagagaaaagcaagtgaagaaaagcatagtcaatgctcaacatcacgggtctctcactgaacacaccacggtattctctcacagcgatgtcaccatttctacctgccacgcatcggtgaaggttgggactcgactggtgtttgatcacgatgggaaaatcatccagaaaaccccctacccccaccccagagggaccacagtcagcgtgaagcagttattttctacactacctgtgcgccataaggaatttcaaaggaatgttaagaaggtacacaatataaaaagggtggtggtgccgcaggaaagggtggaactggaaacactcctggtttcttacttttctccaaggactcctagaaggaccccacccccctccccccacccctgctcccaggaggacaacgtgatcactgtattcagctccatcaagaatggtccaggttcttctagatga

SEQ ID NO: 45084 - DNA, 2620 bp, Homo Sapiens
aaccgtctcctggttgtggggtgggggggaaagatggcggagctgatgctgctcagcgagattgctgacccgacgcgtttcttcaccgacaacctgcttagcccggaggactggggtctgcagaacagcaccttgtattctggcctagatgaagtggccgaggagcagacgcagctcttccgttgcccggagcaggatgtcccgtttgacggcagctccctggacgtggggatggatgtcagcccctctgagcccccatgggaactcctgccgatcttcccagatcttcaggtgaagtctgagccatcttccccctgctcttcctcctccctcagctccgagtcatcgcgtctctccacagagccatccagcgaggctcttggggtaggggaggtgctccatgtgaagacagagtccttggcacccccactgtgtctcctgggagatgacccaacatcctcatttgaaaccgtccagatcaacgttatccccacctctgatgattcctcagatgtccagaccaagatagaacctgtctctccatgttcttccgtcaactctgaggcctccctgctctcagccgactcctccagccaggcttttataggagaggaggtcctggaagtgaagacagagtccctgtccccttcaggatgcctcctgtgggatgtcccagccccctcacttggagctgtccagatcagcatgggcccatcccttgatggctcctcaggcaaagccctgcccacccggaagccgccactgcagcccaaacctgtagtgctaaccactgtcccaatgccatccagagctgtgcctcccagcaccacagtccttctgcagtccctcgtccagccacccccagtgtccccagttgtcctcatccagggtgctattcgagtccagcctgaagggccggctccctctctaccacggcctgagaggaagagcatcgttcccgctcctatgcctggaaactcctgcccgcctgaagtggatgcaaagctgctgaagcggcagcagcgaatgatcaagaaccgggagtcagcctgccagtcccggagaaagaagaaagagtatctgcagggactggaggctcggctgcaagcagtactggctgacaaccagcagctccgccgagagaatgctgccctccggcggcggctggaggccctgctggctgaaaacagcgagctcaagttagggtctggaaacaggaaggtggtctgcatcatggtcttccttctcttcattgccttcaactttggacctgtcagcatcagtgagcctccttcagctcccatctctcctcggatgaacaagggggagcctcaaccccggagacacttgctggggttctcagagcaagagccagttcagggagttgaacctctccaggggtcctcccagggccctaaggagccccagcccagccccacagaccagcccagtttcagcaacctgacagccttccctgggggcgccaaggagctactactaagagacctagaccagctcttcctctcctctgattgccggcacttcaaccgcactgagtccctgaggcttgctgacgagttgagtggctgggtccagcgccaccagagaggccggaggaagatccctcagagggcccaggagagacagaagtctcagccacggaagaagtcacctccagttaaggcagtccccatccaaccccctggacccccagaaagggattctgtgggccagctgcaactatatcgccacccagaccgttcgcagccagcattcttggatgcaattgaccgacgggaagacacattttatgttgtctctttccgaagggaccacctgctgctcccagccatcagccacaacaagacctcccggcccaagatgtccctggtgatgcctgccatggcccccaatgagaccctgtcaggccgtggggccccgggggactatgaggagatgatgcagatcgagtgtgaggtcatggacaccagggtgattcacatcaagacctccacagtgcccccctcgctccgaaaacagccatccccaaccccaggcaatgccacaggtggccccttgccagtctctgcagccagccaggcccaccaggcctcccaccagcccctctacctcaatcatccctgacctctgccattcacactgacttagaacggggggagggggtaccaggtggccaggtgggactgtttcaaatttccctgatccccaggcttggggcaattggtaaaggaaagagcaggtgtgggggttaagcacttatttgaggtgggggtgttcacctctcttctcatcccttttcagaatatagggctcctctcattcctgtgaacccccagtcctggcttctttgtttgaggggattgtgtgaggttcagttgtggggtgggtggtgagctgctgcatattttttattttgtttctctagtgttatggcagtggaggtgggaatttagtccccaggtgggacaagggaagttttttcattttggagctagttactgggagtaagggagggtggggtgggggggagttcaggtttatgtgtgtgcatttcttttttattattattaaataaacaacttggagggagttgaaggaa

SEQ ID NO: 45085 - DNA, 1185 bp, Homo Sapiens
gaagtgtataagtctgaggacagattagaaaggcttcaggaaattctaaggaaattcctgtacctggagtttaggcaaataacaatcagcaaagaagccttcaccagtgagaagaacaatgaatgtaataaacctgaaaaaagcttcagtctggactctactattgatgcagatcagaaagttcttagaatacagaacactgatgataatgataagaacgacatgagcttcagccagaattcagcctctggtaaacatgaacacataaatctaacacaggattttcagagtagtatatgtaaggaaagcttaatggatctctccctccttaataaatgggacagcatccctaacactgaggaatcctataaatgtgatgtatgtgagaaagttttccatcagagctcagcccttactagacatcagagaatccatactagagagaagccctacaaatgtaaagaatgtgaaaagcgtttcagtcagagctcgagtcttagtcgacataaaagaatacacactagagaaaaaccttacaaatgtgaagcatctgataaatcctgtagtccaagctcaggcataattcaacacaagaaaattcacaccagagccaaagcttacacatgtagcagttgtgaaagaatcttcagtcatagtgtccaccttactcaacatcagaaaattcacaaagagatgccctgtaagtgtactatatctggcagtgacttctgccatccttcatatctgcttgaacatcagagggtccaccatgaagagaaatcctatgaatatgatgaatatgggttggcctatattaaacaaggaattcatttcagagaaaagccctatacatgtaatgaatgtagaaaagacttcagattgaattcacatcttattcagcatcaaaaaattcacacaggaatgaaactgcatgagtgtaatgaatatggaaaagctttcagtcaaacctcatgccttattcaccatcaaataatgtataggaaagagaaatcatataaatgtaacgagtatgagggcagtttcagtcatagctcagaccttatcctgcaacaagatgtcctcaccagacagaaagtctttgattgtgatgtacggaaaaagaactccagtcagagagcacacctggttcaatatcggagcattcataccaaagagaactcatga

SEQ ID NO: 45086 - DNA, 3135 bp, Homo Sapiens
ggtgtgcagttcaacttccacacttttcatttggaagaccatcatgactacttactgatcacagagaatggcagttttacccaaccactggcacgcctgactggttcagatcttcctccaacaatcaatgctggtctctatggaaatttcagggctcaattgcgtttcatttcagatttttcaatatcatatgaaggatttaacataacattctctgaatataaccttgaaccttgtgaagatcctggcattcctcaatatggtagtcgaatcgggttcaactttgggattggtgacactctgaccttctcatgctcttcgggttatcgactggaaggaacatcagagatcatctgtcttggtggtggccgacgagtgtggagtgcacctctgccaaggtgtgtggctgaatgtggtgcatctgcaacgaataatgaaggaattttgctgtctccaaattatccactcaactatgaaaacaaccatgaatgcatttatagtattcaggttcaagcaggaaagggaatcaatatttcagccagaacatttcatttagcacaaggagatgttcttaagatttatgatggaaaagataaaacgactcatctactaggtgcttttactggtgcatctatgcgcggactgacacttagtagtacttcaaatcaactctggctagaatttaattccgatactgaagggacagatgaaggctttcaacttgtgtataccagttttgaactctcacactgtgaagatcctggcattccacaatttggatacaagatcagtgaccaaggccactttgctggtagcaccatcatttatggatgcaatccaggctacactctccacggaagtagccttctcaagtgcatgacaggggagagaagggcatgggactatcctctgccttcctgtattgctgaatgtggaggtcgttttaaaggagaatcatcaggaagaatcttatctcctggctatccttttccatatgacaataacctgcgttgcatgtggatgattgaggtagatcctggaaatattgtcagcttgcagtttcttgcttttgatacggaagcatcacatgatatactccgagtctgggacggtccaccagaaaatgatatgcttttaaaggaaattagtggatctcttattcctgaaggaattcatagcaccctcaatatagtaaccatccagtttgacacggatttttatattagcaaatctggatttgcaattcagttttcaagttctgttgccactgcgtgtcgtgacccaggggtccccatgaatgggactcgaaatggggatggaagagaacctggggacactgttgtttttcaatgtgacccaggatatgaacttcaaggagaggaaagaataacctgcattcaggtagaaaatcggtacttctggcagcccagcccaccagtctgtatagcaccctgtggaggcaatttaacaggatcttcaggctttattctttcaccaaacttccctcatccatatccgcatagcagagactgtgactggactatcaccgtcaatgcagactatgttatctccttggcgttcatcagttttagcatagaaccaaactatgacttcctctatatctatgatggaccagacagtaatagcccactgattggaagttttcaagacagcaagttaccagagagaatagaaagcagctcaaatacaatgcatttggcttttcggagtgatggatctgttagttacactggatttcatctagaatacaaagcaaaactgcgagagtcctgctttgatccaggcaatataatgaatggcaccagacttggaatggattataaattagggtcaacagtcacctattactgtgatgctggttatgttcttcaaggttattcaacactcacctgtatcatgggagatgatggaagacctggatggaatagagccttgccaagttgtcatgcgccctgtggaagtcgttcaacaggttcagaaggcactgttctatcaccaaactatccaaaaaattacagtgtgggacataattgtgtttattctatagcagttccaaaggagtttgtggtgtttggccagtttgtatttttccagacatcactccacgatgttgttgaggtgtatgatgggccaactcagcaatcttctctgttatcttccctctcaggatcccattcaggagaatcacttccactgagttcaggtaatcagatcacaattcgatttacttcagttggaccaataacagctaagggatttcactttgtttaccaagctgttcctagaacaagttctacacaatgcagttctgtgcctgaaccaagattcggaagaagaattggcaatgaatttgcagtcggttcatcggttctttttgattgtaatccaggatatattctccatggatccatagcaattaggtgtgaaacagtgcccaattctttggcccagtggaatgattccttacctacttgtattgtgccctgtggtggaattttaactaagcgcaaagggactattttgtcacctggataccctgagccttatgacaacaatctgaattgtgtgtggaagatcacagtgccagagggagctggcattcaagtgcaagttgttagctttgctacagaacataattgggattctctggacttttatgatgggggagacaacaatgctccaagacttggaagctattcaggaacaacaataccccatcttttgaatagtacgtctaataatctgtatctaaattttcaatcagacatcagtgtttctgctgcaggatttcatcttgaatacacagcaattggtttggattcctgtcctgaaccacaaactcctagcagtggaattaaaattggagacagatatatggttggagatgtagtatcctttcagtgtgatcaaggatattctcttcagggtcactctcacattacatgtatgccaggacctgtaagaagatggaattatccaatcccaatttgtttagctcagtgtggtggtgctatgtcagacttcagtggtgtgatcctcagtcctgggtttcctggaaactatcccagcagtttagattgcacatggacaataaatctacccataggttttggt

SEQ ID NO: 45087 - DNA, 727 bp, Homo Sapiens
atttcaggttcttgggggtagccaaaatgaggttctttgtccctctgttcctggtgggcatcctgttccctgccatcctggccaagcaattcacaaaatgtgagctgtcccagctgctgaaagacatagatggttatggaggcatcgctttgcctgaattgatctgtaccatgtttcacaccagtggttatgacacacaagccatagttgaaaacaatgaaagcacggaatatggactcttccagatcagtaataagctttggtgcaagagcagccaggtccctcagtcaaggaacatctgtgacatctcctgtgacaagttcctggatgatgacattactgatgacataatgtgtgccaagaagatcctggatattaaaggaattgactactggttggcccataaagccctctgcactgagaagctggaacagtggctttgtgagaagttgtgagtgtctgctgtccttggcacccctgcccactccacactcctggaatacctcttccctaatgccacctcagtttgtttctttctgttcccccaaagcttatctgtctctgagccttgggccctgtagtgacatcaccgaattcttgaagactattttccagggatgcctgagtggtgcactgagctctagacccttactcagtgccttcgatggcactttcactacagcacagatttcacctctgtcttgaataaaggtcccactttgaagtc

SEQ ID NO: 45088 - DNA, 968 bp, Homo Sapiens
tctctctctctctctctttttttttttttttgtttgtttgttttgttttttctttaaatttagattgtaaaagtttattgatatggtcaaaaagcaaacagccagacatttggttatctttgccactacaatgtgtcattctgaactgtatcttaaaaatgcataacaaatgatatttaaaccattaccagaaaagtaaatgaagagtctacttaaggcacttcatatgaaagctaattcaaaattttcacaaaagtcacactattttataagtgtagtaaattaccttctacacattttagccagaatgctgcctttctccttacagaagaatgtgctcttaaagggagaaaaagcaaatacaaaaaattgtcattctgtcaatgttcatgacaaattatctggaactatacagattacatggcagtagtattcccgtggtcaatctgtacaaatcagggcatcttcatacaagtctcataagaaccacagcatagatttggcctgagacaagtacaagaatagcaggtaaggaattcagaatctcacaatttacaagtgagtaattaacaaaaactggctgctccattaaaaagtaaaaggtcaaccatatcccctcatccatgaaatctagtaacgaaaaacaaaaaacccacataaaatatttcttctgaggctactatatccatctctttctgcaaaccacatggcagggttattagaaggtaaatggcaggtggcagtcatagtatctttttaatgtaatacttgtaagatttccttaaaattattttttcacaattacaattatcctatttccacaatagtggcatttcaggttactcttcataactatgggggaggttatagttagatataatgataaccatgaaaacattcttcacagaaatttggttagcacatatggttatttctactgacagaaaccaaaagacaaaataaaaaaa

SEQ ID NO: 45089 - DNA, 339 bp, Homo Sapiens
gtcagctgcgtccttagcgggagcccgagtgcgggcggtggcgggcttggcggcggggcaggattccaggcaggagccttgcctctcaggtggcgggctctgcgaccctgcgagatggacgggacagaaggcagtgccgggcagcccggccccgctgagcgatcccaccgaagcagcgtgtcctccgtgggagcccgaggtgggtcccacccgcatctcctcttccacaccctcctgggaccccagccctggagaagtagctctggcttgtcttctttttcattaaagataatttatgtatcgactaagaaataataaggtacattcagatgtggaaaa

SEQ ID NO: 45090 - DNA, 468 bp, Homo Sapiens
atggcgacccggaacccccctccccaagactatgaaagtgatgacgactcttatgaagtgttggatttaactgagtatgcaagaagacaccagtggtggaatcgagtgtttggccacagttcgggacctatggtagaaaaatactcagtagctacccagattgtaatgggtggcgttactggctggtgtgcaggatttctgttccagaaagttggaaaacttgcagcaactgcagtaggtggtggctttcttcttcttcagattgctagtcatagtggctatgtgcagattgactggaagagagttgaaaaagatgtaaataaagcaaaaagacagattaagaaacgagcgaacaaagcagcacctgaaatcaacaatttaattgaagaagcaacagaatttatcaagcagaacattgtgatatccagtggatttgtgggaggctttttgctcggacttgcatcttaa

SEQ ID NO: 45091 - DNA, 315 bp, Homo Sapiens
gcagagaacaaagattggtggcttcctcctgagcacactgggatgtggcattacatcggggctgctgagtgcccttaccttcagctgcccagatgcagaggcagttccacaaggtactggcacaagaagagtcgtggaagactgacctggccatggcttctcatgtcccagctcaggacctgccacatcaattctccctttcctctggccgtcacgtgtggagtgaaattctcagaagcggctgtccctgtgcacctctctggctgtgtccagaaaatgaacatctgtttacagcttcaattttctaatgattag

SEQ ID NO: 45092 - DNA, 150 bp, Homo Sapiens
atggggagagaggagaacctactttcaaatggaactgtgacacatatgttctgcaggaataccggcccaccagaaccctcaaccccatggcccctctctggctgccccatagaagcttgtacacagtacagcctctgtttgccagtttga

SEQ ID NO: 45093 - DNA, 6127 bp, Homo Sapiens
ccgactctcggcacctggcctccagctttcggaactatggaggccgcgcccgggacccccccgccgccgccatcagagtcgccgccgccgccatcgccgccgccgccatcaacgccttcgcctcctccgtgttcccccgacgcccgcccggccaccccgcacctcctccaccaccgcctcccgctccctgacgacagggaagatggagagttggaagaaggtgaattggaagatgatggggcagaggagacccaggatacctccggagggcctgagagaagccggaaagaaaagggggagaagcatcacagtgattcggatgaggagaagtcccacaggagactgaagcggaaacggaagaaagagcgggagaaagagaaaaggaggtcgaagaagaggaggaaatccaagcacaaacgccatgcttcttctagcgatgacttctctgacttctcagatgactcggatttcagccccagtgagaaaggtcaccgcaagtacagagagtacagccccccatatgcgccgtcccaccagcagtaccccccatcgcatgccacgcccctgcccaagaaggcatactccaagatggacagcaagagttatggcatgtacgaggactacgagaatgagcagtatggggaatatgagggcgacgaggaggaggacatgggcaaggaggactatgacgacttcaccaaagagctgaaccagtaccggcgtgccaaggagggcagcagccgcggccgaggcagccgaggccggggccggggctacaggggccgaggaagccgtggaggatcgcgaggccgcggcatgggcaggggcagccgaggcaggggcagaggctctatgggaggagaccacccggaggatgaagaggatttctacgaggaagagatggactatggagagagtgaggagccaatgggagacgacgactatgacgagtactccaaggagctgaaccagtaccgccgctccaaggacagccgaggccgagggctaagtcgaggccgtggcaggggctcccgaggtcgagggaaaggaatgggtcggggccgaggccgaggtggcagccgaggagggatgaacaagggcggaatgaacgatgacgaagacttctatgacgaggacatgggcgacggtggtggtggaagctaccggagtcgtgaccatgacaagccccaccagcagtcggacaagaaaggcaaagtcatttgcaagtacttcgtggaagggcgctgcacctggggagaccactgtaattttagccatgacatcgaactcccaaagaagcgagaactgtgcaagttttacatcactggattttgcgccagagctgagaactgcccttatatgcacgatatcctttatgatttcccgtgtaagctgtaccacaccactgggaactgcatcaatggtgacgactgcatgttttcccacgaccctctgaccgaagagacgagggagctcttggataagatgttggccgatgatgcagaagcaggtgccgaggatgagaaggaggtggaggaactgaagaagcagggcatcaaccccctgcccaaaccgccccctggtgtgggcctcctgcccacccctcctcggccccctggcccgcaggctccaacctctcccaacggcaggcccatgcagggtggccccccgcccccgccccctccccctcccccaccgcccgggccccctcagatgcccatgccggtgcatgagccactgtccccgcagcagctgcagcagcaggacatgtacaacaagaagatcccctccttgtttgagatcgtggtgcggcccacgggacagctggctgagaagctgggtgtgaggttccctggacccggtggacccccagggccaatgggccctgggcccaacatgggacccccagggccaatgggcggtccaatgcatcctgacatgcaccccgacatgcacccggacatgcaccctgacatgcacgcagacatgcacgcagacatgccgatgggccctggcatgaatcctggcccacccatgggccctggcggccctccaatgatgccctacggccctggagactccccacattctggaatgatgccccctatcccgccagcccagaacttctatgaaaacttctaccagcagcaggagggcatggagatggagcccggactcctgggggatgcagaggactacgggcactacgaagagctgccaggggagcctggggagcacctcttccctgagcaccctctggagcccgacagcttctctgagggagggcccccaggccggccgaagccaggcgccggtgtccctgacttcctgccctcagcccagagggccctgtacctgaggatccagcagaagcagcaggaggaggaggagagagcgaggaggctggctgagagcagcaagcaggaccgggagaatgaggaaggcacgtgtgacaccggaaactggtactcaagtgatgaggatgagggtggaagcagtgtcacctccatcctgaagaccttgaggcagcagacgtccagccgacccccggcttcagttggggagctgagcagcagtgggctgggggacccccgcctccagaagggacaccccacaggaagccggctggctgaccctcgcctcagccgggaccccagactcacccgccatgtggaggcttctggcgggtctggcccaggtgattcgggaccctccgatcctcggctggctcgcgccctgcccacctccaagcccgaaggcagccttcattccagccctgtgggccccagcagttccaaggggtctgggccgcccccaacggaggaggaggaaggggagcgggccctgcgggagaaggccgtgaacattcccctggacccactccccgggcaccctctgcgggacccacggtcacagctgcagcagttcagccacatcaagaaggacgtgaccctgagcaagcccagcttcgcccgcaccgtgctctggaatcccgaggacctgatccccctacccatccccaagcaggacgcagtgccccccgtgcccgcggccctgcaatccatgcccaccctggacccccggctgcaccgcgctgccacggcagggccccccaacgcccggcagcgcccgggcgcctccacggattccagcacacagggcgccaacctccccgactttgaacttctgtctcgcatcctcaagacagtcaatgccaccggctcctcggccgcccccggttccagcgacaaacccagtgacccccgggtgcggaaggcccccaccgaccctcggctgcagaaacccacagactctacggcctcctcccgggctgccaagcccggccctgctgaggcgccctctcccaccgccagcccgagtggggatgcctccccaccagccaccgctccctacgacccccgcgtgctggcggccggtggactgggccagggcggagggggcgggcagagcagtgtgctgagcggtatcagcctctacgacccgaggactcccaacgcggggggcaaagccacagagccggctgctgacacgggtgcccagcccaagggtgctgagggcaatggcaagagctcggcctccaaggctaaggagcccccgttcgtccgcaagtctgccctggaacagccagagacagggaaggccggtgctgatgggggcacccccacggacagatacaacagctacaaccggccccggcccaaggctgctgcagcccccgctgccaccaccgccaccccaccccccgagggtgccccaccccagcccggggtgcacaacctgcccgtgcccaccctcttcgggacggtgaagcagacacccaagacgggctcaggaagcccatttgctgggaacagtccggcccgcgagggtgagcaggatgcggcatccctgaaggatgtttttaaaggcttcgaccccacggcctcccccttttgccagtagtgtccagccagagctgcggctccagccacccttcctagggtggcattcagggcagcacccagggtagggaacttgggggcaaggggaggcaggctgggtgttccttttttcttttctttttcttttgctttccgtctcttttatttttttttaaagtagtactttctttgagatttgtaaattgtatataaccatcttaagttctggtcagtgtggcgggctcaggggctcctgctgagcaaaccgactcatgcccgcaaacctgtgaactttcgccagtgcctggcctcagactctgtgggctctgcgtggccgggccttgctggaggcccagtgggttttctgggcaaagcatggccccttttccccaggacaaagggaacagttggtgtctgggaaggtattgaacgctcctcaccctgtgcccgaagagacccggaaccaagaccatggcagggcctgcgtggaagcaggtccaggcgtttctagaaccctagggtgcaccatcactgtcttttcagtgcaggctgtaacaacccactcaggagacagtgagagtgaaaaggtattaaggaaaaagcccccagcggcactatgggggctccctggcgcatgcctgctcctgtccctggattaccacacgtgccctccctgccaccctccgtctagagcaagcggatgccccccagcctgcagcagaagcctccacagtgagaactggacccaaaggtagtgggggccggtgtggggcagagtcctgaagagccacctctaggaggcagcccctaggagcacgcacgttctgtcagtattaccccacctgtcctatcaggtgggccacaccctgcttgcccacaccagggtctgtcctggtcctcaagccacgcacccgctatgcctgcactgcagcccagccccggacagctccaggatccgtgcagtggctgcgccgccaggccccaacaatggggaccctggggtggctcctggccaagtgttctctgttttcctcgcacctccttacactgtgtgacctgcagggcatgaggtattgatgtgttcgggtttcctttcccaagccagcagatgcaggtgttccaaggtgtgttgctctgtgggatttgtggacacttaagaaacggactgagtgggaaccctgcagccaggggatggggagcctctgctccccccatgctcccaccctggctgagggccagcctcatctgcagagccctggaggaggcccacctatggacacagcccgagagatgggcgcaaggggtgctgggggaggcctgctatcctgcctctgggccacttgaggggcctcaggaagtgtgtgcttgtggctgcatctgcccgtctccctggcccaccatgtggctgcaggccaagctcttcattgctgaccatgaagagacctagttacctgccaagggattccccttccctcctcctcagggtggggtgaacaaggctcctatcccaccccaccccaaaaagagaaaaatgaaaaactcatagtttggagccaggaggcagggtgtcctacagggctgcacagccctgaggggtcagtgctgggatctggttggttggtttgtctttttgtctttttttttttttttttttttacacaatcattaatgagatttgtcttcagccaccagtgttggccttgaagcagagggcacagcccttggtgtttgtaaaataagtatgaatacacagtgtggcagtgttgtggtttttgttgttgtttttcctctccttttgagaattttcttttgtaaaagaaaaatattttttaaaccgaaatctgtggatgaaatagaagctggagccctcctcttggaatattcagcctaagaacctcataggactatgaattcacccgaaattctcatttgccatcaggccgagcttttaaagaaaaattgttctctaaccaggattgtaacaaaagtgtaaatactgtttcagagttgagagttggtggtgcaaatatgtatataatgaactgtatttttacaatgatcgccgcatgactatttcacaccctttttatactccatatctgtcttccagaaacgtcacctgcctttctcctgtggtctcttaatccagtaattgtattactgccattaaaggatgcagttatttt

SEQ ID NO: 45094 - DNA, 378 bp, Homo Sapiens
atgtgtggacagtgtcagagtagcagtggccacatggaggaggaggcccacccggaactctgcccacactggccactgcagttcagcccacagagccactgcaggcaggcctacggacgtgacacgcacgctggtggtcccggagccagggttgattcaggacaccatcttgggcgccgactctttcctggcctgctcagcacctgcccagatggcctctgcgtctttcctgtgcccagccccaccttttccacctctcttcatgttctcatggagtgcaaagtgcaccagccagggcccctacctgggagagggtcagctgacgcagggctgagggggctgccacagggacgtacgctgtgtgttcttactgcttag

SEQ ID NO: 45095 - DNA, 1455 bp, Homo Sapiens
gtggaaacaatggagagggggcgtgttgagctggggtctccatgcctcgttggggagagggagctcacgtacccacagcagcagttgcgtgatgacgacgtgggcgagctcggccgccaggtggagtggggagcgcagctgtgggtcctctacgctggtgtcgagcggcccgtgtcgcgcatgggccaaaagcaggagaacggtagccacgtcctgggcctgcacggcggcccacagctggcggcccagcggctcctccgaggtgctcagcggcgccaggaacagtagctgctcgtacttggcgcgaatccacgactcgcgctcctccctgcaagaccagggatcaacggaaaaggctctagggacccccagccaggacttctgcccctacccacgggaccgtctcaggttcgcacaccctcagcaaccctccccccgctctgttccctcacgcttaccgcgaagagtcccgcgagggcttggcacggcctcgcgtgtcgctttcccacacgcggttggccgtgtcgttgccaatagccgtcagcaccagggtcagctcccgtggccagtcgtccaagtccagcgagcgaacgcgggacaggtgtgtgcccaggttgcggtggatgccagaacactcgatgcagatgagggcgcccaggttcaagctggcccacgtggggtctgcggaaggagcgtagaggtcggctcccagccgggcagcacaggcaccccggcattcactacactccctagcccctccgctgcctcctggcactcactgggggccccgcagtccacgcagattgaattccccttggcgttccggatcgcctggatggccacggcctcgctttggctgtctgtgcgcagctgcagagagggtttgggttggcactgactctgcctccaagccccacctccttctcagacacctctgctctcctctcacacgacttcggccgtgtcgttgccaatggccgtcagcaccagggtcagttcctgcggccagtcctccactccacctcaaactcttaccttgaccttgctgctctcacagcattgcagactggctaggatctgactctcgatggcctggacccaggcatcccgctcctcaaaactggctgcctcaaagtgccacgtctgacccgtgctggacacgatcaggaactcaaagttttcctctgagtgggggatgggatggggtcattaagggacagagttcaagcaggggctgcctttcccaagaccgtcctccctgatgtccatcccgagcccctgggagtggggcagtgggggtagggaaagcagagggtggggggcagcaggaagcccgagcacatgcaggggaaggcgggggcacccccacccttctgcaccccagctgagcgcccctcccggctccccacttgttacctgctttataaatatttcttaaactaccaaaggatttta

SEQ ID NO: 45096 - DNA, 2052 bp, Homo Sapiens
actgattttaaactctacagagatgcctacttgtttctactatgtcttgtggcagttgctggcattgggtttatctacactattattaatagcattttaaatgaggtacaagttggggtcataattatcgagtctcttgatattatcacaattactgtgccccctgcacttcctgctgcaatgactgctggtattgtgtatgctcagagaagactgaaaaaaatcggtattttctgtatcagtcctcaaagaataaatatttgtggacagctcaatcttgtttgctttgacaagactggaactctaactgaagatggtttagatctttgggggattcaacgagtggaaaatgcacgatttctttcaccagaagaaaatgtgtgcaatgagatgttggtaaaatcccagtttgttgcttgtatggctacttgtcattcacttacaaaaattgaaggagtgctctctggtgatccacttgatctgaaaatgtttgaggctattggatggattctggaagaagcaactgaagaagaaacagcacttcataatcgaattatgcccacagtggttcgtcctcccaaacaactgcttcctgaatctacccctgcaggaaaccaagaaatggagctgtttgaacttccagctacttatgagataggaattgttcgccagttcccattttcttctgctttgcaacgtatgagtgtggttgccagggtgctgggggataggaaaatggacgcctacatgaaaggagcgcccgaggccattgccggtctctgtaaacctgaaacagttcctgtcgattttcaaaacgttttggaagacttcactaaacagggcttccgtgtgattgctcttgcacacagaaaattggagtcaaaactgacatggcataaagtacagaatattagcagagatgcaattgagaacaacatggattttatgggattaattataatgcagaacaaattaaagcaagaaacccctgcagtacttgaagatttgcataaagccaacattcgcaccgtcatggtcacaggtgacagtatgttgactgctgtctctgtggccagagattgtggaatgattctacctcaggataaagtgattattgctgaagcattacctccaaaggatgggaaagttgccaaaataaattggcattatgcagactccctcacgcagtgcagtcatccatcagcaattgacccagaggctattccggttaaattggtccatgatagcttagaggatcttcaaatgactcgttatcattttgcaatgaatggaaaatcattctcagtgatactggagcattttcaagaccttgttcctaagttgatgttgcatggcaccgtgtttgcccgtatggcacctgatcagaagacacagttgatagaagcattgcaaaatgttgattattttgttgggatgtgtggtgatggcgcaaatgattgtggtgctttgaagagggcacacggaggcatttccttatcggagctcgaagcttcagtggcatctccctttacctctaagactcctagtatttcctgtgtgccaaaccttatcagggaaggccgtgctgctttaataacttccttctgtgtgtttaaattcatggcattgtacagcattatccagtacttcagtgttactctgctgtattctatcttaagtaacctaggagacttccagtttctcttcattgatctggcaatcattttggtagtggtatttacaatgagtttaaatcctgcctggaaagaacttgtggcacaaagaccaccttcgggtcttatatctggggcccttctcttctccgttttgtctcagattatcatctgcattggatttcaatctttgggttttttttgggtcaaacagcaaccttggtatgaagtgtggcatccaaaatcagatgcttgtaatacaacaggaagcgggttttggaattcttcacacgtagacaatgaaaccgaacttgatgaaatatacaaaattatgaaaataccacagtgttttttatttccagttttcagtacctcatag

SEQ ID NO: 45097 - DNA, 1293 bp, Homo Sapiens
gacggcctcacccacaacgacttcctgattcttccaggattcatagacttcatagctgatgaggtggacctgacctcagccctgacccagaaggtcacgctgaagacgccgctgatctcctcccctatggacactgtgacagaggctgacatggccatcgcgatggctctgatgggacctattggtttcattcaccacaactgtaccgcagagttccaggccaaggaggtacagaagatcaagaagtttgaacagggcttcatcacggaccccgtggtgctgagcccctcgcgcactgtgggtgatgtgctggaggccaagatgcggcatggcttctctggcatccccatcactagacggaccaagctggtgggcatcgtcacctcccgagacactgactttcttgctgagaaggacaacaccaccctcctcagtgaggtgatgacgccaaggattgagctggtggtggctccagcaggtgtgacgttgaaagaggcaaaagagatcctaagtgtagcgagaaagggaagctgcctatcgtcaatgatcgcgattctggtggccatcatcacccactccgacctgaagaagaacagagactaccctctggcctccaaggattcccacaagcagctgctgtgcagggcagctgtgggcacccgtgaggatgacaaatactgcctggacctgctcttccaggcgggtctcaacgtaagtcttggactcgtcccagggaactcggcacatcagatcaccatggtgcattacatcaaacaaaagtacccccacctccaggtgactggggggaacatggtgacagcagcccaggccaaggacgctggtgtggatgggctgctagtgggcacgggctgtggctctatctgcatcacccaggaagtgatggcctgtggtcggccccagggcactgctatgtacaaggtggccgagtatgcctggcactttggtgtgcccatcatattcaatggtggcatccagatcgtggagcacatggtcaaggccctggcccttggagcctccacagtgatgacgggctccctgttggctgccaccatggaggcccccggtgagtacttcttctcagatggggtgtggctcaagaagtaccgtggcatgggctcgctggatgccatggggaagagcagcagcagccagaaacgatacttcggcgagggggataaggtgaagatcgcgcaggatgtctcaaactccatccaggacaaagggtccattcaaaacttcgtgtcctacctcatagtggacatccagcaaggc

SEQ ID NO: 45098 - DNA, 354 bp, Homo Sapiens
atgcggtgggccctagcggtgcttctagctttcctgtctcctgccagtcagaaatcttccaacttggaagggagaacgaagtcagtcaccaggcagactgggtcatctgctgaaatcacttgcgatcttactgtaacaaataccttctacatccactggtacctacaccaggaggggaaggccccacagcgtcttctgtactatgacgtctccaccgcaagggatgtgttggaatcaggactcagtccaggaaagtattatactcatacacccaggaggtggagctggatattgagactgcaaaatctaattgaaaatgattctggggtctattactgtgccacctgggacagg

SEQ ID NO: 45099 - DNA, 2042 bp, Homo Sapiens
atggctttctgggcggggggttcgcccagcgtcgtggactatttccctagcgaggacttctaccgctgcggctactgcaagaacgagtcgggcagccgctccaatggcatgtgggcacattccatgacagtacaggattatcaggatctcatagaccgaggatggcgaagaagtggaaaatatgtgtacaaacctgtcatgaatcaaacatgttgtcctcagtacacaataaggtgccgacctttacaatttcagccttcaaaatctcacaagaaggttttgaaaaaaatgttgaaatttctagctaaaggggaggttcccaaaggaagttgtgaggatgagcccatggattccacaatggatgatgctgttgcgggtgactttgcattgataaataaactggatatacagtgtgatcttaaaacactcagtgatgacatcaaagagagtttagagagtgaaggaaaaaattcaaagaaagaagaacctcaggaattacttcagtcacaagatttcgtaggagagaagttgggctctggtgaaccgtcacattcagttaaagttcacacagttcctaagccaggcaaaggggctgatttgagtaagcctccatgtcgaaaagcaaaggaaatccggaaagaaaggaaaaggttaaaactaatgcagcagaacccagctggagaacttgagggtttccaggctcaaggtcacccaccatctttgtttccaccaaaggctaaatccaaccagccaaaatcactcgaagatttaatttttgagtctttaccagagaatgcatcacacaagttagaggtgagggtggtgagatcatctccaccaagttcgcagttcaaagccacacttctggagtcttaccaggtctataaacgttaccagatggttattcacaagaacccacctgatacgccaaccgaaagccagttcacaagattcctttgcagttcacccttggaggcagagactccccctaatgggccagattgtggctatggctcctttcaccagcagtactggcttgacggaaagatcattgctgtgggggtgattgacatcctcccaaactgtgtatcatctgtgtatttgtactacgatcctgattattcgtttttgtctttgggcgtctactctgcactacgagaaattgcttttactaggcagcttcatgagaaaacttctcaactcagctattattatatgggtttctacattcattcatgtcccaagatgaaatataagggtcagtatagaccttctgatttgctgtgccctgagacatatgtttgggtacccattgagcaatgcctgccttcacttgaaaactccaagtactgccgtttcaaccaggacccagaagcagtggatgaggatcgcagtacggaacctgaccgattgcaggtgtttcacaagagagccatcatgccttacggtgtttataagaaacagcagaaagacccaagtgaggaggctgctgttctgcagtacgccagcctggtggggcagaagtgctccgagcggatgctgctgttcagaaactgacctgttcacctctgccgggaagttcctgtgttgtgctgatgatttgtgccaggatacatattcagtacctgtggggaaataactgtcaccacccacaaattagacattttttattttgactatctatggcttttaaaaaatattttgtggcaatgtatctgtgagaatctcatagttaatataaagattttaaaactgcattatgacctagcccccataattgggatttatcattttggaggattctttctagagcaagatacgctcaaattctcctgtttgtattttgtaaaatgaagaagtgaatctaagtaacttaatcacagttgtgcattttttttggttctgttagagaaattaaaacagactgtttcctcaggcccattttaaactgaacttatgctaggaaaccttaagtatggggaaggtagaaagttcatttcatcacttagaaaatatgtcttctcaagaacaaaactgtgctg

SEQ ID NO: 45100 - DNA, 765 bp, Homo Sapiens
aagcagagtgtactgaatgtggctggtgaggcaggcggcaagcagaaggcggtggaggaggagctggatgcagaggaccggccggcctggaacagtaagctgcagtacatcctggcccagattggcttctctgtgggcctcggcaacatctggaggttcccctacctgtgccagaaaaatggaggaggtgcttacctggtgccctacctggtgctgctgatcatcatcgggatccccctcttcttcctggagctggctgtgggtcagaggatccgccgcggcagcatcggtgtgtggcactatatatgtccccgcctggggggcatcggcttctccagctgcatagtctgtctctttgtggggctgtattataatgtgatcatcgggtggagcatcttctatttcttcaagtccttccagtacccgctgccctggagtgaatgtcctgtcgtcaggaatgggagcgtggcaggcaatgaggcagagtgtgaaaagagctcagccactacctacttctggtaccgagaggccttggacatctctgactccatctcggagagtgggggcctcaactggaagatgaccctgtgcctcctcgtggcctggagcatcgtggggatggctgtcgttaagggcatccagtcctcggggaaggtgatgtatttcagctccctcttcccctacgtggtgctggcctgcttcctggtccgggggctgttgctgcgaggggcagttgatggcatcctacacatgttcactcccaag

SEQ ID NO: 45101 - DNA, 363 bp, Homo Sapiens
gcacttaatattgtaattggttttccagcgctttctctaagtttctgctcgattgagttaaaagcgctgctgtccttaatttgcttaaggcttcaaacacgatctaaaagaagtggtgcacagagctctcgtcatgtgagaacaattcaatgtgatgtcttgccaggaatgataaactctggtgacttgataaatctcagagttcagatttcagatgaagttagctttcagcctggcattcccgtccaagcacatgtaaggctccgcaaaattgatgacaccataaaggagtccagtttccaccaccacgatgctccgtcctcaaagagaacatcccagtcgcctctctctggagggctttga

SEQ ID NO: 45102 - DNA, 300 bp, Homo Sapiens
atggcctccatctcccggcttacctgcatctcctcggacctcattctgcacaacgatgaagtgaccgtcacggaggataagatcgatgccctcattaaagcaggcggtgtaaatgttgaactgttttggcctagcttgttggcaaaggccctggccagcgtcaacattgggagcctcatctgcaatgtaggagctggtggacctgctccagtagctggtgctgctccagctgaggaagaaagtggaagcaaagaaagaagaatccgaggatctgatgatgacatgggctttgggtttttg

SEQ ID NO: 45103 - DNA, 1857 bp, Homo Sapiens
  misc_feature (1)...(1857): n = A,T,C or G
atggcccagcagattagcgatctggttattaagctggatgttgaccgcgccaccttcagcgagcaggtcgcccgaatcaaagggcaactgacaggaatggcggatgagtctgataaagttcaggcgcgaatgcagcgtgcagcggaccgtcagagcgcggcattaaagagcgtgggcgacgctggcgcggcggctgccgcagatatgaaagcccgacatgccgcagcgcggcaggaactggggatactgatcggcgaggtcatgcgcggtaacttcggtgcactgcgcggctccgggatcacgctggcgaaccgggcaggatggatagaccagctgctgtcgctgcgcgggcttgggatcgccggcatggttggtggtattgccgcggcggtttacgggctgggtaaagcctggtatgacggcagcaaagagtccgaggaatttaacaggcagctgatcctgaccgggaattacgccgggaaaacgtccggacagctacaggcactggcgcgctcactggcaggtaatggcatcacacagcatgctgctgcaggtgtgctggcgcaggttgtcggaagtggtgcgtttagcggtaatgatgtcagcatggtgagcaatgttgctgccaggctgcagcaggcaaccgggcaggccgtcgacgaaaccatcaaccagtttaaacgcctgaaggatgatccggttaatgcagtcacaacgctcaacgattcgctgcattttctgacggccacgcagtatgaacagattgcctctgctcaggcgatgttagatacgtctgcatcagagcttgccatgcgcgcatattctgatgcggtcattcagcgggccggggcggttgaggaaaatcttggctccctcgaaaaagcctggaactgggtgaagaatgcggcctcaggcgcgtgggatgcgatgctgggcatagggcgtaatcctgacaccgcgatgaagcgccaggactcttttgctgaatggcaggcagcagagaaagagtaccgtgctctgtccggcaatctcaaggttgatccggactatgccggtaacaacgttctgcaaaaggcagatgcggaaaggctgagaaacgcgcgccagcaggtagagcttaagaagcaggcttacgatcttgccgataagcaatatgcccaggaagggctggcagctgccagggaaaaaatgcggacggaacagcagacacaggcagtccggacccagcagcaatttaatcagatggttgaatccggggcgacggcggcagaaaaacgtgcccttgcggagaaaaaactcaatcagcttatcgctaaaaaccgccaggatgcgaaagacggcatcgccacgttgtggactgaaaaggacatagcggcagcacgcgccggtattaaaaagaagtggaaggatcccaaaacgccgaaaggcaaaagctattcaacgccagccggggataaagctgaagaaaaagcgcaggctgaacttctcacccttcaggcccagcttaaaacgctcgagcagcataccagcgtaaacgacgtcataagcaaacagcgtcaggatctctggcagactgaaaatcagttcaccgttctgcaggaggccgctgggcgtcgtcagcttacggcgcaggaaaaatccctgctggcgcacaaggaagaaacgctcgagtacaagcggcagctggccgacctgggcgataaggttgccaggcagcaaaagctcaaccagctgaccgaccaggccgtgaagtttgagcagcagcaaaaagccgccagggccctgcaggctcagtctgaggggctatccaccccgcgagccgggcgacaaaccaccctgcaacgtntcaagcgggag

SEQ ID NO: 45104 - DNA, 4167 bp, Homo Sapiens
atgagctccacactccactcggttttcttcaccctgaaggtcagcatcctgctggggtccctgctggggctctgcctgggccttgagttcatgggcctccccaaccagtgggcccgctacctccgctgggatgccagcacacgcagtgacctgagtttccagttcaagaccaacgtctctacggggctgctcctctacctggatgatggcggcgtctgcgacttcctatgcctctccctggtggatggccgcgttcagctccgcttcagcatggactgtgccgagactgccgtgctgtccaacaagcaggtgaatgacagcagctggcacttcctcatggtgagccgtgaccgcctgcgcacggtgctgatgcttgatggcgagggccagtctggggagctgcagccccagcggccctacatggatgtggtcagtgacttgttccttggtggagtccctactgacatacgaccttctgccctgacccttgatggagttcaggccatgcccggcttcaaggggttaattctggatctcaagtatggaaactcggagcctcggcttctggggagccggggtgtccagatggatgccgagggaccctgtggtgagcgtccctgtgaaaatggtgggatctgctttctcctggacggccaccccacctgtgactgttctaccactggctatggtggcaagctctgctcagaaggcctctcccacctcatgatgagtgaacaagctcgagaggagaatgtggccactttccgaggctcagagtatctgtgctacgacctgtctcagaacccgatccagagcagcagtgatgaaatcaccctctcctttaagacctggcagcgtaacggcctcatcctgcacacgggcaagtcggctgactatgtcaacctggctctgaaggatggtgcggtctccttggtcattaacctggggtccggggcctttgaggccattgtggagccagtgaatggaaaattcaacgacaacgcctggcatgatgtcaaagtgacacgcaacctccggcaggtgacaatctctgtggatggcattcttaccacgacgggctacactcaagaggactataccatgctgggctcggacgacttcttctatgtaggaggaagcccaagtaccgctgacttgcctggctcccctgtcagcaacaacttcatgggctgccttaaagaggttgtttataagaataatgacatccgtctggagctgtctcgcctggcccggattgcggacaccaagatgaaaatctatggcgaagttgtgtttaagtgtgagaatgtggccacactggaccccatcaactttgagaccccagaggcttacatcagcttgcccaagtggaacactaaacgtatgggctccatctcctttgacttccgcaccacagagcccaatggcctgatcctcttcactcatggaaagccccaagagaggaaggatgctcggagccagaagaatacaaaagtagacttctttgccgtggaactcctcgatggcaacctgtacttgctgcttgacatgggctctggcaccatcaaagtgaaagccactcagaagaaagccaatgatggggaatggtaccatgtggacattcagcgagatggcagatcaggtactatatcagtgaacagcaggcgcacgccattcaccgccagtggggagagcgagatcctggacctggaaggagacatgtacctgggagggctgccggagaaccgtgctggccttattctccccaccgagctgtggactgccatgctcaactatggctacgtgggctgcatccgcgacctattcattgatgggcgcagcaagaacattcgacagctggcagagatgcagaatgctgcgggtgtcaagtcctcctgttcacggatgagtgccaagcagtgtgacagctacccctgcaagaataatgctgtgtgcaaggacggctggaaccgcttcatctgcgactgcaccggcaccggatactggggaagaacctgcgaaagggaggcatccatcctgagctatgatggtagcatgtacatgaagatcatcatgcccatggtcatgcatactgaggcagaggatgtgtccttccgcttcatgtcccagcgagcttatgggctgctggtggctacgacctccagggactctgccgacaccctgcgtctggagctggatggggggcgtgtcaagctcatggttaacttaggcaaaggaccagagaccttgtatgcagggcagaagctcaatgacaacgagtggcacaccgttcgggtggtgcggagaggaaaaagccttaagttaaccgtggatgatgatgtggctgagggtacaatggtgggagaccatacccgtttggagttccacaacattgaaacgggaatcatgactgagaaacgctacatctccgttgtcccctccagctttattggccatctgcagagcctcatgtttaatggccttctctacattgacttgtgcaaaaatggtgacattgattattgtgagctgaaggctcgttttggactgaggaacatcatcgctgaccctgtcacctttaagaccaagagcagctacctgagccttgccactcttcaggcttacacctccatgcacctcttcttccagttcaagaccacctcaccagatggcttcattctcttcaatagtggtgatggcaatgacttcattgcagtcgagcttgtcaaggggtatatacactacgtttttgacctcggaaacggtcccaatgtgatcaaaggcaacagtgaccgccccctgaatgacaaccagtggcacaatgtcgtcatcactcgggacaatagtaacactcatagcctgaaagtggacaccaaagtggtcactcaggttatcaatggtgccaaaaatctggatttgaaaggtgatctctatatggctggtctggcccaaggcatgtacagcaacctcccaaagctcgtggcctctcgagatggctttcagggctgtctagcatcagtggacttgaatggacgcctgccagacctcatcaatgatgctcttcatcggagcggacagatcgagcgtggctgtgaaggacccagtaccacctgccaggaagattcatgtgccaaccagggggtctgcatgcaacaatgggagggcttcacctgtgattgttctatgacctcttattctggaaaccagtgcaatgatcctggcgctacgtacatctttgggaaaagtggtgggcttatcctctacacctggccagccaatgacaggcccagcacgcggtctgaccgccttgccgtgggcttcagcaccactgtgaaggatggcatcttggtccgcatcgacagtgctccaggacttggtgacttcctccagcttcacatagaacaggggaaaattggagttgtcttcaacattggcacagttgacatctccatcaaagaggagagaacccctgtaaatgacggcaaataccatgtggtacgcttcaccaggaacggcggcaacgccaccctgcaggtggacaactggccagtgaatgaacattatcctacaggcaacactgataatgaacgcttccaaatggtaaaacagaaaatccccttcaaatataatcggcctgtagaggagtggctgcaggaaaaaggccggcagttaaccatcttcaacactcaggcgcaaatagccattggtggaaaggacaaaggacgcctcttccaaggccaactctctgggctctattatgatggtttgaaagtactgaacatggcggctgagaacaaccccaatattaaaatcaatggaagtgttcggctggttggagaagtcccatcaattttgggaacaacacagacgacctccatgccaccagaaatgtctactactgtcatggaaaccactactacaatggcgactaccacaacccgtaagaatcgctctacagccagcattcagccaacatcagatgatcttgtttcatctgctgaatgttcaagtgatgatgaagactttgttgaatgtgagccgagtacaggtaggtcagccagaagctctaatgcagctagatcactccgtgccgcccttacatggacatggcgactcacttacacatttactcctatcatcttcatctcctgtgtagttcactcatag

SEQ ID NO: 45105 - DNA, 2000 bp, Homo Sapiens
atcttgtcgtatgatattaacacggctgctcggaaacacctcgagagagacaccagctttccccacgctcttcctttggtttctcttctggggggacattggatcgcacagctttgcaggggaaaaacagcttgtgtttttgaaagcaaggaataaaaacctcacaggcctccgtggctgactcgtaccttggaagattctgcaatgaggccacacggcacagaaatgttcttttacatccagacactaaacagtggcttgcatccttctctgtattagcaatgaacaaaaactaccaagacttaaaaaaaaaaatctctgattagaacccatggatgctgacaattatgtgtggctttcagatgcaaagccatttggctgcaggtgacatgaagaggctgggatacgattttgatcatttgctttcgccagcacttcctattagcacgagtgtggccagggagggtccttctctcatcacacttagagccactcgtgatgctgagtgtgctctttcatctggtgcagggcagggggcagggcgaggagagaagacccctgcttcacccactaaccaacaccctgggctggaagagctccaacaagcagcagacagagagttccatccccagcctgacagcaggaacagtgaagtccaagatagagccagctgtcgctgggagcccgggatggtgggtgcagcctcctccgcagctggtgagagtgtgtgtgtgcaggggtgtagggtggcctgttagcctagtgtctcctgcactcaaatgccctgtttcagttgagtaagctaattcacacagtgtcatgcaggctcctctggcttcggttcaagttaatgtcccattgaaaggcttctgttcaccttaggacacccagtcgggtagcccctgcagcgctctgccctgtgagcctgtgcaggtggtgcttggctgtgatcgaggttggcctgttccaggaagggaagcacggcctgggatatgggacggcactgtcctggcactgcctctaaccagcgtcagccttagcaggcacctgcctccttctgtgttgggtgtgtccagagccagagaggagcattccttttcatcacacctgaattatctccttcaacacccagagggaccaggctcccacccttggcatgatccaggaagaacagtgactcgagtgtggcttggcagcgccttacaggagaggcagggatgccgagaagggcaggtttgggcttcccccggaggcagagtggggtctggaaggcagggccccttggacagcatatacccttcaccctgccctggggaaggcagcaggacccagcggctcagtcttccgggtgggtcctaaccagccccacccccacagtgtgggtgctcccttgccttctctgggaccaggtcagcgtggctacagtaaagggccgcatcccttcacaggggacgctacccacagaggccagcattggtagggtgctgaggatgtgatgtgtgaggttgtaggggacatcagggccttctgtggcacaggcaggacttgacctcaggcggtgggctcctcggcctccctcacagtgccagagcccactctcctgtctccatgtcagtcccttccactaaactagcccaacacctggttcacggctacctgagcacactgggggctgggggcggggggcagggcggtgatgcacacttattaaaaccaagtatcagacatggtggctcacgcctgtcatcccagcacgttgggaggccgaggccggcagatcaccttaaggtcaggagttcgagaccagcctgaccaacatggtgaaaacctgcctctatgaaaaattcaaaattatccaggtgtggtggtgtgcgcctgtaatcccagctactcagggggctgaggcaggagaatcacttgaacccaggatgcagaggttgcagtgaaccaagatcgcaccactgcactccagcttcggtgacagggcgagactccatctc

SEQ ID NO: 45106 - DNA, 678 bp, Homo Sapiens
gtggtagaggtcgcgggtagttggtgggcacaagagcgagaggacatcattatgaaatacgaaaagggacaccgagctgggctgccagaggacaaggggcctaagccttttcgaagctacaacaacaacgtcgatcatttggggattgtacagtcctgcccctcctgggagtcagccccacaggaaggcccttgtcctcccttccctgtgccttctcctgggctgagccctgagctggaaagggacagagccagtcctttctgggggtcggcacccaggctggggccgctccaggccccgtgcagttcctcagctctgcctgggttgccttacagtgagacggagctgcctcctctgactgcgcgggaggcgaagcaaattcggcgggagatcagccgaaagagcaagtgggtggatatgctgggagactgggagaaatacaaaagcagcagaaagctcatagatcgagcgtacaagggaatgcccatgaacatccggggcccgatgtggtcagtcctcctgaacattgaggaaatgaagttgaaaaaccccggaagataccagatcatgaaggagaagggcaagaggtcatctgagcacatccagcgcatcgaccgggacataagcgggacattaaggaagcatatgttcttcagggatcgatacggaaccaagtaa

SEQ ID NO: 45107 - DNA, 2028 bp, Homo Sapiens
gctaattgttgtagatcatcacttcaaggtgcccatatctttctagtggaaaaattattctggcctccgctgcatacaaatcaggcaaccagaattctacatatataaggcaaagtaacatcctagacatggctttagagatccacatgtcagaccccatgtgcctcatcgagaactttaatgagcagctgaaggttaatcaggaagctttggagatcctgtctgccattacgcaacctgtagttgtggtagcgattgtgggcctctatcgcactggcaaatcctacctgatgaacaagctggctgggaagaacaagggcttctctgttgcatctacggtgcagtctcacaccaagggaatttggatatggtgtgtgcctcatcccaactggccaaatcacacattagttctgcttgacaccgagggcctgggagatgtagagaaggctgacaacaagaatgatatccagatctttgcactggcactcttactgagcagcacctttgtgtacaatactgtgaacaaaattgatcagggtgctatcgacctactgcacaatgtgacagaactgacagatctgctcaaggcaagaaactcacccgaccttgacagggttgaagatcctgctgactctgcgagcttcttcccagacttagtgtggactctgagagatttctgcttaggcctggaaatagatgggcaacttgtcacaccagatgaatacctggagaattccctaaggccaaagcaaggtagtgatcaaagagttcaaaatttcaatttgccccgtctgtgtatacagaagttctttccaaaaaagaaatgctttatctttgacttacctgctcaccaaaaaaagcttgcccaacttgaaacactgcctgatgatgagctagagcctgaatttgtgcaacaagtgacagaattctgttcctacatctttagccattctatgaccaagactcttccaggtggcatcatggtcaatggatctcgtctaaagaacctggtgctgacctatgtcaatgccatcagcagtggggatctgccttgcatagagaatgcagtcctggccttggctcagagagagaactcagctgcagtgcaaaaggccattgcccactatgaccagcaaatgggccagaaagtgcagctgcccatggaaaccctccaggagctgctggacctgcacaggaccagtgagagggaggccattgaagtcttcatgaaaaactctttcaaggatgtagaccaaagtttccagaaagaattggagactctactagatgcaaaacagaatgacatttgtaaacggaacctggaagcatcctcggattattgctcggctttacttaaggatatttttggtcctctagaagaagcagtgaagcagggaatttattctaagccaggaggccataatctcttcattcagaaaacagaagaactgaaggcaaagtactatcgggagcctcggaaaggaatacaggctgaagaagttctgcagaaatatttaaagtccaaggagtctgtgagtcatgcaatattacagactgaccaggctctcacagagacggaaaaaaagaagaaagaggcacaagtgaaagcagaagctgaaaaggctgaagcgcaaaggttggcggcgattcaaaggcagaacgagcaaatgatgcaggagagggagagactccatcaggaacaagtgagacaaatggagatagccaaacaaaattggctggcagagcaacagaaaatgcaggaacaacagatgcaggaacaggctgcacagctcagcacaacattccaagctcaaaatagaagccttctcagtgagctccagcacgcccagaggactgttaataacgatgatccatgtgttttactctaaagtgctaaatatgggagtttcctttttttactctttgtcactgatgacacaacagaaaagaaactgtagaccttgggacaatcaacatttaaataaactttataattattttttcaaactttcatatagagttataaga

SEQ ID NO: 45108 - DNA, 1231 bp, Homo Sapiens
gagcgagcgagcgagcgagttgccgagcgcgccccgtccctcgcgcgcgatgctcccctggacggcgctcggcctggccctgagcttgcggctggcgctggcgcggagcggcgcggagcgcggtccaccagcatcagccccccgaggggacctgatgttcctgctggacagctcagccagcgtctctcactacgagttctcccgggttcgggagtttgtggggcagctggtggctccactgcccctgggcaccggggccctgcgtgccagtctggtgcacgtgggcagtcggccatacaccgagttccccttcggccagcacagctcgggtgaggctgcccaggatgcggtgcgtgcttctgcccagcgcatgggtgacacccacactggcctggcgctggtctatgccaaggaacagctgtttgctgaagcatcaggtgcccggccaggggtgcccaaagtgctggtgtgggtgacagatggcggctccagcgaccctgtgggcccccccatgcaggagctcaaggacctgggcgtcaccgtgttcattgtcagcaccggccgaggcaacttcctggagctgtcagccgctgcctcagcccctgccgagaagcacctgcactttgtggacgtggatgacctgcacatcattgtccaagagctgaggggctccattctcgacgcgatgcggccgcagcagctccatgccacggagatcacgtccagcggcttccgcctggcctggccacccctgctgaccgcagactcgggctactatgtgctggagctggtgcccagcgcccagccgggggctgcaagacgccagcagctgccagggaacgccacggactggatctgggccggcctcgacccggacacggactacgacgtggcgctagtgcctgagtccaacgtgcgcctcctgaggccccagatcctgcgggtgcgcacgcggcccgaggaggccgggccagagcgcatcgtcatctcccacgcccggccgcgcagcctccgcgtgagttgggccccagcgctgggctcagccgcggcgctcggctaccacgtgcagttcgggccgctgcggggcggggaggcgcagcgggtggaggtgcccgcgggccgcaactgcaccacgctgcagggcctggcgccgggcaccgcctacctggtgaccgtgaccgccgccttccgctcgggccgcgagagcgcgctgtccgccaaggcctgcacg

SEQ ID NO: 45109 - DNA, 402 bp, Homo Sapiens
atggggaagggcactgtgtctgggcttgtgcaggtggtggatgcagagactggcaaggtggtcatcatctctcaggacctcgttcaggtgaaggtgctgctgcttggagccgtgaggatccgcagccccatcatgcagataaggatgggcacccagctggggaagaattggatacatctcccactgcttgaaggaggcagcacagcttctgggggcattcccagtgctggcaccccgctggtcaccaggcctgacttctccccaccgatgtccatctatatcacctggatcaccaaccaccagaaccctttctcctttggcaatgccatgccaggcctgaccttccactggtctgtcaccaagcgggacatcctggatctccaagggcagcatcacaaggta

SEQ ID NO: 45110 - DNA, 417 bp, Homo Sapiens
gcagcagaagaagaggaggaggaggaggaagaggaggagaaggaaaaaggaagaaaaagaagaggaagaggaagaggaggaggaagaggaagaggaggaggaagaggaagaggaagaagaggaggaagaggaagaagaagaggaagaagaaaagaagaaggaggaggagggaaagtagggagaggaggaggaggagaaaaaagagaaaaagaaagaaaaaaagaaataaaaaagaggaagaaaaataaaagcagaaaagaaatgtctccatttacctgttcacagccacaagaaaaacattcttctatactgcaactgggtgaaacttacctgattagtacagccaagattgtcttatccaggttaggcaaaactgaacaagtagaactcctcctttgcgaaatgttttgctactga

SEQ ID NO: 45111 - DNA, 312 bp, Homo Sapiens
cacacgctgcccagccaggaccaagcccaggctgcccgtctgccccttcaggacttcctggaccgttgttcttctctagacagcctgaaatcctcagccagcctagtgcaattggacttgaaaatgctcagggctgtcggagacagtttgcttgtgtacccggcaggccacaacagaaccaacgagaacagcctgggatcaaccaagggtttactagatgacctgaaaaataatctggatgggttgtttgtagaggttgaaaagatttatgaaaatgtctcaatgaattgtgtgtgcagggcacggatttaa

SEQ ID NO: 45112 - DNA, 399 bp, Homo Sapiens
atggatcagggaggacttcagcaatgggtaggtgttgaccaggtgaacagagccgggggtggccaaggcatgctagatagaggggtctgcccaagcaaaggtcggaggggggccatcaaacaccaggtgaacttcagttctgggggggtagctcccttgggagggtcatggcacaggctggagagtgacagagctcggtggtggagaggcctggtgcacgtgagtgggcggttgctaactgggatctccatttccatatgcccaaagcgtacctacaccctgcatgctcccttgtcatgcttctcttgcttgcttatgcgtcaggcaacactacagatcctctcttgctctaagctaggagccctagggtggacttttattgctggacctgattgctga

SEQ ID NO: 45113 - DNA, 508 bp, Homo Sapiens
gggacgaaaaagaaccaaaacttccaaggccctgctttttttcttaaatgtactttaaaaaggaaatttgtattttttatttacattttatatttttgtacatattgttagggtcagccgtttttaatgatcttggatgaccaaaccagccttcagagcgttctctgtcctacttctgactttacttgttgtgtgactacgttcattataatctcaaaggagaaaaaaaaaacttgtaaaaaaaaagcaaaaacgacaacagaaaaacaatcttattccaagtcattccagtaacttttttgggtacgtacttagctgtaccacaagtagttggtttgtatgagatggttaaaaaggccaaagataaaaggtttcttttttttcccttttttgtctatggagttgctgtttattatttttttggcctgtttgatgtatgtataaaacaatgttgtccaacaagtaacaggaattttattttgcggagttgctctaacaacaacaaaaa

SEQ ID NO: 45114 - DNA, 544 bp, Homo Sapiens
gccatctgcagtggagccgccaccaaaatgcagattttcgtgaaaacccttatggggaagaccatcaccctcgaggttgaactctcggatacaatagataatgtaaaggccaagatccaggataaggaaggaattcctcctgatcagcagagactgatctttgctggcaagcagttggaagatggacgtactttgtctgactacaatattcaaaaggagtctactcttcatcttgtgttgagacttcgtggtggtgctaagaaaaggaagaagaagtcttacaccactcccaggaagaataagcacaagagaaagaaggttaagctggctctcctgaaatattataaggtggatgagaatggcaaaattagttgccttcatcgagagtgcccttctgatgaatgtggtgctggggtgtttatggcaagccactttgacagacattattgtggcaaatgttgtctgacttactgtttcaacaaaccagaagacaagtaactgtatgacttaataaaagacatgaactaaaaaaaaaaaaaaaaaa

SEQ ID NO: 45115 - DNA, 1071 bp, Homo Sapiens
atgagaccggattctcatccttacggttttccatgggaattggtgatacatgcagctgctgttggattttttgctgttcccttttttttgtggagaagttttagatctgttaggagtcggctttatgtgggaagagagaaaaaacttgctgtagcgctttctggactaattgaagaaaaatgtaaactacttgaaaaatttagcctcgttcaaaaagcgtatgaaggctatgaagtagcgtcatcgttagaggatgccagctttgagaaggcggcagcagaagcacaaagtttgcaggcaacctgtgaaaagctgaacaggtcaaattctgagcttgagcatgaaatactctgtctagaaaaagagttaaaagaagagaaatctaaacattctgaaagagatgaactgatagcagatatttccaaaaggatacagttgctggaagatgcgtcaaaatccctcaaatcacaaatagctaaaggcaaaatgactttcaagacatttcacatgaacggagaacaactgaagataacaatagaagatgctttgaatgaaaattctcaacttcaggaaaaccagaaacagcttttgcaagaagctgaagtatggaaagaagaagtgagtgaacttaataaacagaaaagaacatttgaagactccaaagtacacacagaacaagttctaagtgataaagaaaatcgcatcgagactctgaccgaacgtttgctaaagatgaaagattgggctgcgaggcttggagaagacacaacggatgatggtaacttagaagtgaacagtgaatcggaagatggtgctcactcagatgatccctccaaaggagctttgaagaagctgattcctgccgctaagttaaatgcttctttgaccttagaaggagaaagaaaccaaatttatattcagttatctgaagttgataaaacaaaggaagagcttacagagcatattaaaaatcttcagactgaacaagcatctttgcagttagaaaacacacattttgaaagtgagaatcagaagcttcaacagaaacttaaagtaatgactgaattatat

SEQ ID NO: 45116 - DNA, 252 bp, Homo Sapiens
tcagccatcccaggtaccggtggcaggatcaagttttcctttcatcacaatctttacttccacaatgaagtgaccattcaggagtattgcattggcatcctaggatacagggagtctcattccactgcagtccagtggttgtgggatcatgaaggtcaagcctccagctgcaggcagtacacttcctacctgagcttcttcagcccattggctgactgtgactgcccaggttctggcaggattcctgaggta

SEQ ID NO: 45117 - DNA, 2496 bp, Homo Sapiens
agttgctggtagtgcccgtggtgcttggttcgaggtggccgttagttgactccgcggagttcatctccctggttttcccgtcctaacgtcgctcgcctttcagtcaggatgtctgcccgtggcccggctatcggcatcgacctgggcaccacctattcgtgcgtcggggtcttccaacatggcaaggtggagatcatcgccaacgaccagggcaatcgcaccacccccagctacgtggccttcacggacaccgagcgcctcatcggcgacgccgccaagaaccaggtggccatgaaccccaccaacaccatcttcgacgccaagaggctgattggacggaaattcgaggatgccacagtgcagtcggatatgaaacactggccgttccgggtggtgagcgagggaggcaagcccaaagtgcaagtagagtacaagggggagaccaagaccttcttcccagaggagatatcctccatggtcctcacgaagatgaaggagatcgcggaagcctacctggggggcaaggtgcacagcgcggtcataacggtcccggcctatttcaacgactcgcagcgccaggccaccaaggacgcaggcaccatcacggggctcaatgtgctgcgcatcatcaacgagcccacggcggcggccatcgcctacggcctggacaagaagggctgcgcgggcggcgagaagaacgtgctcatctttgacctgggcggtggcactttcgacgtgtccatcctgaccatcgaggatggcatcttcgaggtgaagtccacggccggcgacacccacctgggcggtgaggacttcgacaaccgcatggtgagccacctggcggaggagttcaagcgcaagcacaagaaggacattgggcccaacaagcgcgccgtgaggcggctgcgcaccgcttgcgagcgcgccaagcgcaccctgagctcgtccacgcaggcgagcatcgagatcgactcgctctacgagggcgtggacttctatacgtccatcacgcgcgcccgcttcgaggagctcaatgccgacctctttcgcgggaccctggagccggtggagaaggcgctgcgcgacgccaagctggacaagggccagatccaggagatcgtgctggtgggcggctccactcgtatccccaagatccagaagctgctgcaggatttcttcaacggcaaggagctgaacaagagcatcaaccccgacgaggcggtggcctatggcgccgcggtgcaggcggccatcctcatcggcgacaaatcagagaatgtgcaggacctgctgctactcgacgtgaccccgttgtcgctgggcatcgagacagctggcggtgtcatgaccccactcatcaagaggaacaccacgatccccaccaagcagacgcagaccttcaccacctactcggacaaccagagcagcgtactggtgcaggtatacgagggcgaacgggccatgaccaaggacaataacctgctgggcaagttcgacctgaccgggattccccctgcgcctcgcggggtcccccaaatcgaggttaccttcgacattgacgccaatggcatccttaacgttaccgccgccgacaagagcaccggtaaggaaaacaaaatcaccatcaccaatgacaaaggtcgtctgagcaaggacgacattgaccggatggtgcaggaggcggagcggtacaaatcggaagatgaggcgaatcgcgaccgagtcgcggccaaaaacgccctggagtcctatacctacaacatcaagcagacggtggaagacgagaaactgaggggcaagattagcgagcaggacaaaaacaagatcctcgacaagtgtcaggaggtgatcaactggctcgaccgaaaccagatggcagagaaagatgagtatgaacacaagcagaaagagctcgaaagagtttgcaaccccatcatcagcaaactttaccaaggtggtcctggcggcggcagcggcggcggcggttcaggagcctccgggggacccaccatcgaagaagtggactaagcttgcactcaagtcagcgtaaacctctttgcctttctctctctctctttttttttgtttgtttctttgaaatgtccttgtgccaagtacgagatctattgttggaagtctttggtatatgcaaatgaaaggagaggtgcaacaacttagtttaattataaaagttccaaagtttgttttttaaaaacattattcgaggtttctctttaatgcattttgcgtgtttgctgacttgagcatttttgattagttcgtgcatggagatttgtttgagatgagaaaccttaagtttgcacacctgttctgtagaagcttggaaacagtaaaatatataggagcttaaattgtttatttttatgtactactttaaaactaaactgaacattgcagtaatgttaaggacaggtatactttttgcaaacaaatgcataaatgcaaatgtaaagtaaagctgaaattgatctcaaa

SEQ ID NO: 45118 - DNA, 2140 bp, Homo Sapiens
tcagctttggtggcggctaccggcggagacgggggcggcggccacgccaccgctgctgtcacagaaaggctctggtgggtggggtgggaggcggggaagtgccgggggcgcagccgacatgggcccgccgccacggctgctgtgagcagcctctttccctgtgtggccgccggcgtgggcggggacggcgcgaccctcgcgcggccgggctgcgggcttccaggccagcgcgcgggggccggacggacagccccacaccgacatgtaaccatggactgcaggaccaaggcaaatccagacagaacctttgacttggtgttgaaagtgaaatgtcatgcctctgaaaatgaagaggacagtccagcttatctgccgaggattccccctggaaaagtacgccgattcgcattttgcattaagaaactggaaaactttcctgtcggtcctggcgtagcgcctcccgtgtccggggtagaccttgtaccggctgaaaccgcatagctcgaccttcatggcggcagctccacgggaggagaaaagatggccccaacctgtattttcgagtaataccctttagaattcataaaagtctaagaacactttgtaaatggaatgtttcatagttcacactaaagtaaacataaactgttaagcaaaactttagatcacttcttctaacaaaggaaatgtacccgagaacccatgagaagtagcttcagagtatttttttttaacagtgaattctctgaggtcttggacttttaaattttatttagtttaattgccaaaagccaaggtggagctgtgtagcattctgaggaaataaaaccacttgaagcagaggtatagtagaataaagccattctgcctccagtatttgggtggatgtatttggtactgtaatcattttacagattgctaattcattgatgtaaaagatactcaatggtaggcatgttggacccattcaatattgttttttgtacctttctgttaacttttgtattattcatatataatatagatttaaccaaatctattttcttaaaattgcatattattgttttatgaaatgttcttttaaattttgttaaaattttgtccgctttttctacagaagtaggaatgaaatatttaacattttctgccagttcttacttatccactgtgttccagagtctttaatttaaatatttttgtttgccaggcttagattttcatgtgtctattaaaagagtaggaacatactcctccatgccagacatctgctatgtataagcattgattattttcccccttatgaataaatgtatttcttttgttaagtttgttgtaggttaaaaaaaaagcatatttatgtttctcctaaaatttgggaaatcaatttatattactctatggagtatgtaacaaatgatgtattctttaattctgaatcctgtatacagtagttacacccttatctttcattaattgctgtctgtttgtagggttttgaactattctgattattttgcaaagtttttttttttaaattacgaatgtaatgtattgcagtcaattttgaaagaaggaaaaagatttttctttttataccaataacacaaaacatctatttttgtgtattcctttttagatttcaatatgagcttattaaatgtggttgtaatcatatatagttttcacttaattttcaatatttgttgttgctattggtttaaattacaaaatatttcataaactgcagcagtccccaaagccccttgtaaatattcatgaactcaaccataacttaatatacttgagagaattatctttcactaccatcatatgactgaatttaaatttatctaatgtgtttaactttttacaggttaaaaaatttacagatagtttttataagaatggtttggtttatatactcttttcatttctaagttttaatcagttatctactttttagtttactgtttctcttctgttcaatattttaaaacttattcaggaatatgaaaagatatgacagttttattttgacttctgcattttgattgggtccttcagtgaaaaatacagtagcagaatttctaatgataaatatttaatgtaaatactgcaaataaaatataatttcttgtaa

SEQ ID NO: 45119 - DNA, 138 bp, Homo Sapiens
tcagggcacatgttgctaaacttaagtcgtggcaagcaagattttttaaaagtggttgttgaaacttttgccaacaaaagcgggcagtctgcattatatgatgctctgttttctagtcagtcacctaaggatacatct

SEQ ID NO: 45120 - DNA, 567 bp, Homo Sapiens
gtttgtgtgctggagaggcaaatatttgacttccttggatatcagtgggcacctatcctggcaaattttgtacatattattatcgtcattcttggtttgtttggaactattcaatatagacctcgttacataacaggatatgctgtctggctagtcctctgggttacgtggaatgtgtttgttatctgcttctatttggaggctggggacctctcaaaggaaacagaccttatcctgacttttaatatatcaatgcaccgatcttggtggatggagaatggaccaggatgtacggtgacgtcagtgacacctgccccagactgggccccagaagaccatcgctacatcacggtctcagggtgtttgctggagtaccagtacatagaagtggctcatagttccctccagattgtcctcgcactggcaggtttcatctacgcctgttatgttgtgaaatgtataactgaagaagaggacagctttgatttcataggtggctttgactcttatggctatcaagggcctcagaagacatctcatttacaactacagcctatgtacatgtaa

SEQ ID NO: 45121 - DNA, 2179 bp, Homo Sapiens
cgcgcaggtccccagcacatctgggcgagagcggcgccgctggagccgaggggggcgccgagcgcagatctggagcagcagagccacggcgcagctggggcccttcgaggcgctcggggcgcacatctgggacctcgagcgggggccgtgccgcgcgcagctggaccaggggaggggggcggcggctgcacagctggaccgaagggggcggggtcggccctgggcgacccgctgaggggagggccgcgggccgccggggactggagcatgggacggcgcgcctgaaggagcaggaaggggaaggaggcctgggaccccgaaaagagaaggggagagcgaggggacgagagcggaggaggaagatgcaactgactcgctgctgcttcgtgttcctggtgcagggtagcctctatctggtcatctgtggccaggatgatggtcctcccggctcagaggaccctgagcgtgatgaccacgagggccagccccggccccgggtgcctcggaagcggggccacatctcacctaagtcccgccccatggccaattccactctcctagggctgctggccccgcctggggaggcttggggcattcttgggcagccccccaaccgcccgaaccacagccccccaccctcagccaaggtgaagaaaatctttggctggggcgacttctactccaacatcaagacggtggccctgaacctgctcgtcacagggaagattgtggaccatggcaatgggaccttcagcgtccacttccaacacaatgccacaggccagggaaacatctccatcagcctcgtgccccccagtaaagctgtagagttccaccaggaacagcagatcttcatcgaagccaaggcctccaaaatcttcaactgccggatggagtgggagaaggtagaacggggccgccggacctcgctttgcacccacgacccagccaagatctgctcccgagaccacgctcagagctcagccacctggagctgctcccagcccttcaaagtcgtctgtgtctacatcgccttctacagcacggactatcggctggtccagaaggtgtgcccagattacaactaccatagtgataccccctactacccatctgggtgacccggggcaggccacagaggccaggccagggctggaaggacaggcctgcccatgcaggagaccatctggacaccgggcagggaaggggttgggcctcaggcagggaggggggtggagacgaggagatgccaagtggggccagggccaagtctcaagtggcagagaaagggtcccaagtgctggtcccaacctgaagctgtggagtgactagatcacaggagcactggaggaggagtgggctctctgtgcagcctcacagggctttgccacggagccacagagagatgctgggtccccgaggcctgtgggcaggccgatcagtgtggccccagatcaagtcatgggaggaagctaagcccttggttcttgccatcctgaggaaagatagcaacagggagggggagatttcatcagtgtggacagcctgtcaacttaggatggatggctgagagggcttcctaggagccagtcagcagggtggggtggggccagaggagctctccagccctgcctagtgggcgccctcagccccttgtcgtgtgctgagcatggcatgaggctgaagtggcaaccctggggtctttgatgtcttgacagattgaccatctgtctccagccaggccacccctttccaaaattccctcttctgccagtactccccctgtaccacccattgctgatggcacacccatccttaagctaagacaggacgattgtggtcctcccacactaaggccacagcccatccgcgtgctgtgtgtccctcttccaccccaacccctgctggctcctctgggagcatccatgtcccggagaggggtccctcaacagtcagcctcacctgtcagaccggggttctcccggatctggatggcgccgccctctcagcagcgggcacgggtggggcggggccgggccgcagagcatgtgctggatctgttctgtgtgtctgtctgtgggtggggggaggggagggaagtcttgtgaaaccgctgattgctgacttttgtgtgaagaatcgtgttcttggagcaggaaataaagcttgccccggggca

SEQ ID NO: 45122 - DNA, 387 bp, Homo Sapiens
aagggaggacgtgatgggtcttccagtatgaaattctggatttccctgggtcttctgttaggagtggaatcaactgtgctgacaacacaggagctgaaaaatctgtgtattttctcagtgaagggaatcaagggatggctgaacagactctccgctgctggtgtgggtgatgtggtgatggctacagttaagaaaggcaaaccacagcttagaaagaaggtacacccagcaataaaagatgaaatgcttctttattttgaagataatgtggaagttataggaaataataaaggtaagataaaaatttctgctatcacaggacagattgtgaaggagggtgcagaattgtgccccagtattagatacagctctggtagcattgcatga

SEQ ID NO: 45123 - DNA, 458 bp, Homo Sapiens
ctctctccggtccgtgcctccaagatgacaaagaaaagaaggaacaatggtcgtgccaaaaagggccgcggccacgtgcagcctattcgctgcactaactgtgcccgatgcgtgcccaaggacaaggccattaagaaattcgtcattcgaaacatagtggaggccgcagcagtcagggacatttctgaagtgagcgtcttcgatgcctatgtgcttcccaagctgtatgtgaagctacattactgtgtgagttgtgcaattcacagcaaagtagtcaggaatcgatctcgtgaagcccgcaaggaccgaacacccccaccccgatttagacctgcgggtgctgccccacgtcccccaccaaagcccatgtgaggagctgagttcttaaagactgaagacaggctgttctctggagaaaaataaaatggaaattgtacttaaaaaaaaaaaaaaaaaga

SEQ ID NO: 45124 - DNA, 348 bp, Homo Sapiens
atggaagccccagcgcagcttctcttcctcctgctactctggctcccagataccactggagaaatagtgatgacgcagtctccagccaccctgtctgtgtctccaggggaaagagccaccctctcctgcagggccagtcagagtgttagcagcaacttagcctggtaccagcagaaacctggccaggctcccaggctcctcatctatggtgcatccaccagggccactggcatcccagccaggttcagtggcagtgggtctgggacagagttcactctcaccatcagcagcctgcagtctgaagattttgcagtttattactgtcagcagtataataactggcctccc

SEQ ID NO: 45125 - DNA, 4323 bp, Homo Sapiens
agatccttccttctctcctccttcttcattctacaccacccccaacacatatccctgcaccccgcccattctttgctctctctcctttcttacacttaactccttcttgctccacagcctaacatgctgattaacaggaccccaaaggtttgggtgggtattaggggccttctcaacaaaagcagcacactcttgagcttgttcttccttttgttgccatctcagataaaaaggccccatgagggaggagacagataagtatagacttggtattctgataactctgtgttacatgggatcagatgtaaatgagttgtaccctgtggtgtttcatgctctgctgtgttgtcttctcatggtgagcttttctgtgcccttatttcatccagctctggtttctgtgtttcatgttatttctcctagcctctgtaaactctgcagcatactaataatgctctggctttctgattaaagataaatggcttactatcatcacccctggcttgagggccagctcacatgtaatcccttataggattccaaagttgttaaataaatgcagttctttttgtcattttgaagcattcaaaaatttttcaagaaaagctatgatcatataaatagaaattttatccagaatgttacagtgtagcatttgtgaataaatgtgtaggtgctgtatttgctcagactctagtttgggttgtgttttcttttccctttttttttttgagacagggtctctctctgtcatctgggctgcagtgcagtggtataatcacagctcactgcaacctctactcccaggctcaagcaatcctcctgagtagctgggactagagacatgcgccacaacgcccagctaatttttaggtttttctttcacatagacagggtctcactctgttggccaggctggtttcgaactcctggactcaagcaattccccccacctcagcctcctaaagtgctgggattacaggcctgagccaccatacccagcaagttatattttctttttccttatatagagtaaaataagggtgagtgaccgagaggttgatgcatagctagatcaccagtttaaatgccttcccacacacccctttcctcctgttccctccacctacaggttgtagatgagcatgagagtgtggagcagagttggcgagtgcaagtcgagcccatcaacctggacagctgtctccgtgctttcaccagtgaggaagagctaggggaagatgagatatactactgttccaagtgtaagacccactgctttagcaacaaagaagctggatctctggaggcttccacccttcctgattattcaccttaagcgatttcaatttgtaaatgatcagtggataaaatcacagaaaattgtcaaatttcctcgggaaagttttgatccgagtgcttttttggtaccacgagacccggctctctgccagcatcaaccactcacaccccagggggatgagctctccaagcccaggattctggcaagagaggtgaagaaagtggatgtgcagagtttggctggggaagaggacatgctcctgagcaaaagcccatcctcactcagcgctaacatcagcagcagcccaaaaggttctccttcttcatcaagaaaaagtggaaccagctgtccctccagcaaaaacagcagccctaatagctgcccacggactttggggaggagcaaagggaggctccggctgccccagattggcagcaaaaataaactgtcaagtagtaagaagaacttggatgccagcaaagagaatggggctgggcagatctgtgagctggctgatgccttggggcatatgcgggggggcagccaaccagagctggtcactcctcaggaccacgaggtagctttgggcaatggattcctttatgagcatgaagcatatggcaatggctacagcaatggtcagcttggaaaccacagtgaagaagacagcactgatgaccaaagagaagacactcatattaagcctatttataatctatatgcaatttcatgccattcaggaattctgagtgggggccattacgtcacttatgccaaaaacccaaactgcaagtggtactgctacaatggcagcatctgtgaggaacatcaccctgatgaaattgacaccgactctgcctacattcttttctatgagcagcagaggatagactacgcacaatttctgccaaagattgatggcaaaaagatggcagacacaagcagtatggatgaagactttgagtctgattacgaaaagtactgtgtgttacagtaaagctaccactctggctgctagatagcttggtggggagggagatgactccttgtagctgatacttggcaaaagtgtcactgagaggcaagctaaatgtagttattttatcctgttagaatacaaattctaattaaaatagttaactttaagagtagtagtaattttattttgaagtctcatgcaagttgtctgatagagaactttcaggcagatcccaccattagcctgtaaacaaaaagtttggcaccagccacctgggaccaaataagaattcaattgtgcttgtccagatatgaacaaatatgtagtgagtatagagtttatcaataatcataacaaatattaaagatttccttggagtcaaagtaaaaaacaaaaaattgtaatgttgtctagggatgacatgatatgctacctcctttttcctgaagttttattccattctgttgacaagatggagaaagcaagatcatgaaggtgtgcaaatgattcttacggcatgggcgaggatttttcaatttattttttaaagtttccataccctttctttgtctttcttgctttttgtttttgccgttgtgtttatgtttgagatacaaccagtcattggtggcaggggcatagagtggtcagtctgaaagggaggctctcttaagagctatgtgccttccacccagagggagacccagtagaaagaaaaacatcctgggaaatccagctaccatggccctcccagtggaggcatcttacatttaggatacttcaggtatcctcagaaatgtattctgcaccccccggccccgcccatgctgagggaaggggagcagttgccaatatttgcaccatcttcacatgcacatgttgcaacaagagcttctgggaaggtaagcggcatcggagctagatcacgtttcacaattagtggtggttcttttccatgtttgttttgcactttaaaaaagagagaacacatgcaaatgaacttgcttgtgtgtatttgatggctccaagggctataaattacaaacaaaacacatcccagacattaggagttcataagtatatttaatgaaattggtggttttaggaagtcaactttagttttgctttgtttgcatgtccactaatttttttattttgatattagtcttttttaaaaaattttacagtagtcattgaaagttatgtttctttgtttacttcattttttcctctaaatattcaagactgggacaaaagtataaatattatttatttcaggtagaatttttttggtgtagttttttaatatatacttgaaggaaatgtttcaccttatttttggtctttgtttattcatttagaccctgcaagttgattctcattaattgtcagattccactacactttcttcctcataggtagtaattaccagtgtaactaagcatttgtgttctgatatctgaggccagtaactattaatatctagttctcagagcatttggaaaggttatcttaaatggctacctaaattgaaatccttttcagaaaaaatataattgcaaataggtaggagtggcctaaattatctaatgtaataaagtcagacaaaatgcatactttatagttcaagattttcggtatataaaatctgtcctttcctacctggacatgtcccattaaaaagtggaagattttaaataatttctttacagatgttttatttaagcaggtagcacaatctactaatgttgtttgatctgtgtttgttatactggttgtaattaatttttttaattcatgaactagcggaaaatttattaaattaactattaaccacattcaccttgtaaatgactgtataaaacttgttgacaatgcactgactttagaaagatgttaatgtgcataaatagagtgtaaataaaatagtgttgatgtactgaaatatgaactgtataaaaagtattagtaattgtatatggggtgtacctgtttatctgtaactgttatccaaacaaattaaatactgtggatgccttta

SEQ ID NO: 45126 - DNA, 1434 bp, Homo Sapiens
agctctgggctttcccagctccgaagtcaatactgagatcccagatgtgtccagagacatcctgaagaggctcgggggtggaggagccttagtgtgtccacaaagggactcctgaaactgactgagagccagtggatttgccagcagtctgagcttctaccgagtcttcccccacctcaatccctgttgctatggagactaccaatggaacggagacctggtatgagagcctgcatgccgtgctgaaggctctaaatgccactcttcacagcaatttgctctgccggccagggccagggctggggccagacaaccagactgaagagaggcgggccagcctacctggccgtgatgacaactcctacatgtacattctctttgtcatgtttctatttgctgtaactgtgggcagcctcatcctgggatacacccgctcccgcaaagtggacaagcgtagtgacccctatcatgtgtatatcaagaaccgtgtgtctatgatctaacacgagagggctgggacggtggaagaccaagacacctggggattgcgtctggggcctccagaactctgctgtggactgcatcaggtctcagtgtccctatctgtaagatcaacaagaaacacggttaagggaggtcgtcactggggtgggagaagaggggctggtagaccgaagccttgtgcataaggattttttcccaggaaaagatagactttataaacagtgggagcccatgaacaaacatataaaagtagcaacagataatgaccaataactggttcagtggctggagtattaggggcctggggattggagaacggagaagaagttgtagcagagggaaatgagacaggaagatgctctggggacacattttttatgtgttatcttcagccatgagaagcagtgatgactatcccatatcacagatatgatttaccaccaccaccctgcccccgctcccgtgaagaaagcagggcaagtgctgtgctgcccatttgggcctgcatagtgccatgattggaacccaggaactctggtctccttgcctagtgcttttcaaaactctgtgctacacaggagtggatccaggcctgaaggtcatacaattctggggactctctttaagaaaaagaattctaaaatatcttacttttgcaaacattatgaaaatatactgccacattaatatgttgctagggcccctgctaggaccttaagaaggagctcatgtgagtcaggaccctgaatgttaggcctcgttagctctatggttcatatgcttcttgaaccaagtcacagggcacttcccagccacattgccaggcaacaggactaaactacctccaaagcaagcagtcttttcagttttgactgagtgatgtgagaaacttcttttcttttcttttctttttttttttttgagacagtc

SEQ ID NO: 45127 - DNA, 309 bp, Homo Sapiens
atgcctctgatcaaggagcctgcatggatttgcatgtttccctatatatgttactcattaatgagaactaagttcctgcatatgatcacccaatttgaattacaaagaaaccaaaaaagggggagttttatctttactatatttccccaccacagtgaaattctcctctttctgtttaaaattagtccagactccctttcttattcttctaacctcacaatagggtgctggggttcttacttcctcttagaatttttacttaagattttacttaggaatttttacttaagaagtcttcaagcatattaa

SEQ ID NO: 45128 - DNA, 1056 bp, Homo Sapiens
gggtgtgcgagggagtgcgcgcgggtgggagcgccaggggctggcggggcccgcgccctgggacgagcccctcgtgctccggctctgcgctcccgcagcgcccacgcagccgagaggagtgggtgatgacttcgtgacctcaacgtcctcccccgtccctcgacatgttcccgcgcctgaaaggtgcagaaaactccccccaccgctctggacgagactgagctaggcgtcgagggcgggcgccgccgcagaccggagctcgggctcgctggccgctcaggcgcagcggtgtggagggaacggacgcgcggcaaggcgacccgctctgggcaacgcgggcgcagctgccccgacgcaaggcactagctggtcgggggctcgggcgagccggggccggcgtgccggggcgtgcgctctctcggcaggcgagcgccgggctccgcggaggtccctgcgcccactgcctgcttctccgcccggcgacccggagtccccaggctgcggtgcgccaggccagacctgaccgagggcggaagacccgagcggcagggaggcagaaagaaaagagtgagaggcagaaggaagaaagaggagaaagagaagacaaatgtttttcccttcttgaagaggtggtcttgactactgctcaaccacagcctactgaaagagccctggaaaatctgagttctagatctgcctgtaccactgtgggacccaaggcaacaaaggactgggagacagaagccttcagtttgaatttcagattcttgaagactaactttctcaatcatattctcgggaaagtaactatgtgttcatttctaagaatcatgtgaagatggctctgtctactgagaatcgacttcaaatgcatgctactaaaatggagctaatatgcgtcatttcctcagctataatttggggaggttaatacttgttaaatcactagactgctataaggtttgcccataaacattgtaaataatgtattcaaaattattaaaatgttacaatataaacaagaatgtgatataataaaatgtaattatataaaca

SEQ ID NO: 45129 - DNA, 1488 bp, Homo Sapiens
atgacggtgatgtctggggagaacgtggacgaggcttcggccgccccgggccacccccaggatggcagctacccccggcaggccgaccacgacgaccacgagtgctgcgagcgcgtggtgatcaacatctccgggctgcgcttcgagacgcagctcaagaccctggcgcagttccccaacacgctgctgggcaaccctaagaaacgcatgcgctacttcgaccccctgaggaacgagtacttcttcgaccgcaaccggcccagcttcgacgccatcctctactactaccagtccggcggccgcctgcggaggccggtcaacgtgcccctggacatgttctccgaggagatcaagttttacgagttgggcgaggaggccatggagaagttccgggaggacgagggcttcatcaaggaggaggagcgccctctgcccgagaaggagtaccagcgccaggtgtggctgctcttcgagtaccccgagagctcggggcccgccagggtcatcgccatcgtctccgtcatggtcatcctcatctccatcgtcatcttttgcctggagacgctccccgagctgaaggatgacaaggacttcacgggcaccgtccaccgcatcgacaacaccacggtcatctacaattccaacatcttcacagaccccttcttcatcgtggaaacgctgtgtatcatctggttctccttcgagctggtggtgcgcttcttcgcctgccccagcaagacggacttcttcaaaaacatcatgaacttcatagacattgtggccatcattccttatttcatcacgctgggcaccgagatagctgagcaggaaggaaaccagaagggcgagcaggccacctccctggccatcctcagggtcatccgcttggtaagggtttttagaatcttcaagctctcccgccactctaagggcctccagatcctgggccagaccctcaaagctagtatgagagagctagggctgctcatctttttcctcttcatcggggtcatcctgttttctagtgcagtgtactttgccgaggcggaagaagctgagtcgcacttctccagtatccccgatgctttctggtgggcggtggtgtccatgaccactgtaggatacggtgacatgtaccctgtgacaattggaggcaagatcgtgggctccttgtgtgccatcgctggtgtgctaacaattgccctgcccgtacctgtcattgtgtccaatttcaactatttctaccaccgagaaactgagggggaagagcaggctcagttgctccacgtcagttcccctaacttagcctctgacagtgacctcagtcgccgcagttcctctactatgagcaagtctgagtacatggagatcgaagaggatatgaataatagcatagcccattatagacaggtcaatatcagaactgccaattgcaccactgctaaccaaaactgcgttaataagagcaagctactgaccgatgtttaa

SEQ ID NO: 45130 - DNA, 381 bp, Homo Sapiens
agaggctactgggggaacaagattggaaagccccatgccatcccttgcaaggtgacaggccgctgtggctccgtgctggtgctcatccctgtgcccaggagcactggcatcatctcggcccctgtgcccaagaagctgctgatgatggctggtattgatgactgctacacctcagccaggggctgcactgccaccctgggcaacttcggcaaggccacctttgatgccatctcaacctacagctacttgacctccgacctctggaaggagactgtatcaccaagtctccctataagtaattcactgaccacctcgtcaagacccactctagagtctccgtgcaaaggacccaggctccagctgtggctacaacatagagtt

SEQ ID NO: 45131 - DNA, 645 bp, Homo Sapiens
gtagagatctgctacaccaccgttgtggtgcccttgatgctttccaacatttttggggcccagaagcccattccattggctggatgtggggcccaaatgttcttctttctcacacttggtggtgctgactgtttcctcttggcgatcgtggcctatgaccgctatgtggccatctgccaccctttgcactacctcatcatgacctgcaatctgtgcgtgcagatgctgggcggcgctgtgggcctggccctcttcctctccctgcagctcaccgccttaatcttcaccttgcccttctgcggctaccgccaggaaattaaccacttcctctgcgatgtacctcccgtcctgcgcctggcctgcgctgccatccgtgttcaccaggctgtcctctatgtcgtgagcatcctcgtgctgaccgtccccttcttgctcatctgcgtctcctacgtgttcatcacctgtgccatcctgagcatccgttctgctgagggccgccaccaggccttctccacctgctcctcccacctcaccgtggtcctgctgcagtatggctgctgtgccttggcatacttgcatccccagtccagctcctctgcagatgaggatcgccagtttgcccttgtttacacctttatcacacca

SEQ ID NO: 45132 - DNA, 1690 bp, Homo Sapiens
caagcaggatacgtttttctgttgggcattgactagattgtttgcaaaagtttcgcatcaaaaacaacaacaacaaaaaaccaaacaactctccttgatctatactttgagaattgttgatttcttttttttattctgacttttaaaaacaacttttttttccacttttttaaaaaatgcactactgtgtgctgagcgcttttctgatcctgcatctggtcacggtcgcgctcagcctgtctacctgcagcacactcgatatggaccagttcatgcgcaagaggatcgaggcgatccgcgggcagatcctgagcaagctgaagctcaccagtcccccagaagactatcctgagcccgaggaagtccccccggaggtgatttccatctacaacagcaccagggacttgctccaggagaaggcgagccggagggcggccgcctgcgagcgcgagaggagcgacgaagagtactacgccaaggaggtttacaaaatagacatgccgcccttcttcccctccgaaaatgccatcccgcccactttctacagaccctacttcagaattgttcgatttgacgtctcagcaatggagaagaatgcttccaatttggtgaaagcagagttcagagtctttcgtttgcagaacccaaaagccagagtgcctgaacaacggattgagctatatcagattctcaagtccaaagatttaacatctccaacccagcgctacatcgacagcaaagttgtgaaaacaagagcagaaggcgaatggctctccttcgatgtaactgatgctgttcatgaatggcttcaccataaagacaggaacctgggatttaaaataagcttacactgtccctgctgcacttttgtaccatctaataattacatcatcccaaataaaagtgaagaactagaagcaagatttgcaggtattgatggcacctccacatataccagtggtgatcagaaaactataaagtccactaggaaaaaaaacagtgggaagaccccacatctcctgctaatgttattgccctcctacagacttgagtcacaacagaccaaccggcggaagaagcgtgctttggatgcggcctattgctttagaaatgtgcaggataattgctgcctacgtccactttacattgatttcaagagggatctagggtggaaatggatacacgaacccaaagggtacaatgccaacttctgtgctggagcatgcccgtatttatggagttcagacactcagcacagcagggtcctgagcttatataataccataaatccagaagcatctgcttctccttgctgcgtgtcccaagatttagaacctctaaccattctctactacattggcaaaacacccaagattgaacagctttctaatatgattgtaaagtcttgcaaatgcagctaaaattcttggaaaagtggcaagaccaaaatgacaatgatgatgataatgatgatgacgacgacaacgatgatgcttgtaacaagaaaacataagagagccttggttcatcagtgttaaaaaatttttgaaaaggcggtactagttcagacactttggaagtttgtgttctgtttgttaaaactggcatctgacacaaaaaaagttgaaggccttattctacatttcacctactttgtaagtgagagagacaagaagcaaattttttttaa

SEQ ID NO: 45133 - DNA, 3001 bp, Homo Sapiens
cgcaccccggcaagcagcagcgggccgcgacgcccagcctgccagtgagctgcgacgggcacaccccggagcgtcggcgactgcggacaggttagagtgggggcaggggcgggcgcgggagcagcccagggccagagagggagcccgagccaggccatctccaaccatgtccgacgaggcctcggccatcacttcctacgagaagtttctaacccccgaggagcccttcccactcctgggacctcctcgcggggtgggcacctgcccgagcgaggagccgggctgcctggacatcagcgacttcggctgccagctgtcctcctgccatcgcaccgacccgctccaccgcttccacaccaacaggtggaacctaacttcttgtggaacaagtgttgccagctcagaaggcagtgaggagctgttttcatctgtgtctgttggagatcaagatgattgctattccctgttagatgatcaggacttcacttcttttgatttatttcctgaggggagtgtctgcagtgatgtctcttcttctattagcacttactgggattggtcagatagcgagtttgaatggcagttaccaggcagtgacattgccagtgggagtgatgtactttctgatgtcatacccagtattccaagttcaccttgcctgcttcctaaaaagaaaaacaagcaccggaatttagatgaactcccttggagtgcaatgacaaatgatgagcaggtggaatatattgagtatctgagtcggaaagtgagtactgagatgggtcttcgggagcaacttgatattattaagatcattgatccttctgctcaaatctcccctacagacagtgagtttattattgaacttaactgtctcacagatgaaaaactgaagcaggtcagaaactatatcaaggaacatagccctcgccaacggcctgcaagagaggcctggaagagaagcaactttagttgtgcaagcaccagtggagtgagcggtgccagtgccagcgccagcagcagcagtgccagcatggtcagttctgcaagcagcagtgggtccagtgttggaaactctgcttcaaactccagtgccaacatgagtcgagcacacagtgacagcaacctgtctgcaagtgcagcagagcggattcgggattcaaaaaagcgatccaagcagcggaagttacagcagaaggccttccgcaagaggcagctgaaggagcagaggcaggcccggaaggagaggctcagtgggctcttccttaacgaagaggtgctgtccttgaaagtgactgaggaagaccatgaagcagatgttgatgttttgatgtaataagggtgaatttatcaacgttctttgtgagcattaaaatactccatccttatgggtttacatgcatcttgaccaaaattttggttagggctgtgctgatgtaccattaataatttaagccagtggttcttggcaggtgatcccaagacctgcagcttcagcatcacttgagaagttgttaggaatgcatactagtgggccccgcccccagacatagtgaatcagaaaccaacagggaggcgcctagcattgtttttttaacaagtgctgggttattctgatgcacagtctagtttaagaaccactactttgggtaaacgttttgactgtttaaagtttatggcggtgaagtgggcgtcttcaaagactagtacttacacagtttagaagatttcaaggtactgctgacagtagtttattatgtcagtatacatacatgtgtagagatcataatttagttcccttcttaatgttacaatttcttagtttacttttcctaaagggccatagcataattcttgattcctggtggaaatcttttctgaggtgtgggggtgggcaaggtgtggattgctgtttacgatagtgccttcattagttttagttctgtctgttttcattcattattgactcaaaggtattagaacaggcccttatctttttcctattagatttatttttgttttttactttatgtaagttcagaatccttttttaagtgatgactactgatgaaataatgttactagtagctgaattttagacttgatgctatgttgattaatatttaaatggtgaaagtaattaggcaaaataagcaattctgcttttctgttgctttcagaatttttaggctgtaaaattgtctcaggcaggaagtcagtctatatctctctcaagttcttattgtaggtcatttttttttcagcacagctctaatttttaaatatttggtataacagcttctggcatgtgacctagttaatgttgaaaattaactgatgaaaacccttgtagatctgctaaacttctctataaattgctagaaatatacagagcaatgagatatagaaaacaccttagcttgttggttattaatagagctctaattttaactgtgaaatcatggagtttctttaaatgttttcctagagtgtttgttatcatgaacattagaaatagcattattccttttcttctaccacatgtcttgaacattcacatgggttaaagaagatggaaactgatactactgacaatcaagctgctttctgactttcataattttctttatattgtggatagcattttgaaggtgaccgtgattctgtaggaagagctgtaatcaatatttttcaaactctaagagtacagaggttagtaagatttcttttttttttactttttgttacgtcaagtagcttattaagaaaaagattcatgacttaaattcttaattctcagttgatacaaaggcttataatcatgtgttttaaaattttgatttcattttcgttccttgaaggttaaagaatggaaactggggataaaaattaatacactgcagctttgccaaggtctgtgatatggttgtaaccttttaaagactactaaagtcataatttgaaatttttactaaaataaaacatatgtgtctatggttttcaa

SEQ ID NO: 45134 - DNA, 201 bp, Homo Sapiens
agctgtaaaggacctggccagaatgtggctgtgaccagggcacaccctgactcccaagggaggcggcggcggcctgagcggggggcccgaggaggccaggtgttttacaacagcgagtatggggagctgtcggagccaagcgaggaggaccactgctccccgtctgcccgcgtgactttcttcacagacaacagctactaa

SEQ ID NO: 45135 - DNA, 903 bp, Homo Sapiens
catggtgtgtctgaagctccctggaggctcctgtatggcagcgctgacagtgacattgacggtgctgagctccccactggctttggctggggacacccaaccacgtttcttggagcaggctaagtgtgagtgtcatttcctcaatgggacggagcgagtgtggaacctgatcagatacatctataaccaagaggagtacgcgcgctacaacagtgacctgggggagtaccaggcggtgacggagctggggcggcctgacgctgagtactggaacagccagaaggacctcctggagcggaggcgggccgaggtggacacctactgcagatacaactacggggttgtggagagcttcacagtgcagcggcgagtccaacctaaggtgactgtgtatccttcaaagacccagcccctgcagcaccacaacctcctggtctgctctgtgaatggtttctatccaggcagcattgaagtcaggtggttccggaacggccaggaagagaaggctggggtggtgtccacaggcctgatccagaatggagactggaccttccagaccctggtgatgctggaaacagttcctcggagtggagaggtttacacctgccaagtggagcatccaagcatgatgagccctctcacggtgcaatggagtgcacggtctgaatctgcacagagcaagatgctgagtggagtcgggggctttgtgctgggcctgctcttccttgggacagggctgttcatctacttcaggaatcagaaaggacactctggacttcagccaacaggactcttgagctgaagtgcagatgaccacattcaaggaagaaccttctgccccagctttgcaagatgaaaagctttcccacttggctcttattcttccacaagagctttgtcagg

SEQ ID NO: 45136 - DNA, 936 bp, Homo Sapiens
atggagatggaaaactgcaccagggtaaaagaatttattttccttggcctgacccagaatcgggaagtgagcttagtcttatttcttttcctactcttggtgtatgtgacaactttgctgggaaacctcctcatcatggtcactgttacctgtgaatctcgccttcacacgcccatgtattttttgctccataatttatctattgccgatatctgcttctcttccatcacagtgcccaaggttctggtggaccttctgtctgaaagaaagaccatctccttcaatcattgcttcactcagatgtttctattccaccttattggaggggtggatgtattttctctttcggtgatggcattggatcgatatgtggccatctccaagcccctgcactatgcgactatcatgagtagagaccattgcattgggctcacagtggctgcctggttggggggctttgtccactccatcgtgcagatttccctgttgctcccactccctttctgcggacccaatgttcttgacactttctactgtgatgtccaccgggtcctcaaactggcccatacagacattttcatacttgaactactaatgatttccaacaatggactgctcaccacactgtggtttttcctgctcctggtgtcctacatagtcatattatcattacccaagtctcaggcaggagagggcaggaggaaagccatctccacctgcacctcccacatcactgtggtgaccctgcatttcgtgccctgcatctatgtctatgcccggcccttcactgccctccccatggataaggccatctctgtcaccttcactgtcatctcccctctgctcaaccccttgatctacactctgaggaaccatgagatgaagtcagccatgaggagactgaagagaagacttgtgccttctgatagaaaatag

SEQ ID NO: 45137 - DNA, 723 bp, Homo Sapiens
atgtccaaaccttcagaccacatcaagcggcccatgaacgccttcatggtatggtcccggggccagcggcgcaagatggcccaggaaaaccccaagatgcacaactcggagatcagcaaacgcctaggtgccgaatggaagcttctgtccgaggcagagaagcggccatacatcgatgaagccaagcggctacgcgcccagcacatgaaggagcaccctgactacaagtaccgacctcggcgcaagcccaagaacctgctcaagaaggacaggtatgtcttccccttgccctacctgggcgacacggacccgctcaaggcggctggcctgcccgtgggggcctccgacggcctcctgagcgcgcccgagaaagcccgggccttcttgccgccggcctcggcgccctactccctgctggaccccgcgcagtttagctcgagcgccatccagaagatgggcgaagtgccccacaccttggctaccggcgctctgccctacgcgtccaccctgggctaccagaacggcgccttcggcagcctcagctgccccagccagcacacgcacacgcacccgtcccccaccaaccctggctacgtggtgccctgtaactgtaccgcctggtctgcctccaccctgcagccccccgtcgcctacatcctcttcccaggcatgaccaagactggcatagacccttattcgtcagcccacgctacggccatgtaa

SEQ ID NO: 45138 - DNA, 3671 bp, Homo Sapiens
tccctttcggccgtgggggagggggctcgtgtcccccccaacccagcccggaggccgcgtccgcccgcgcccgctctggcccccgcggagccgcgcaacttcccgggagcccgggccaaagtgagcgcaaagtgctgcccaagttgccgggatggagctgcagagccggcccgaggcgctcgccgtggaactcgcgcgccaccagaacggcgacctcaagaagcagctccacgaaaggcagccgcggatcgccgcgctcagcgacaaacaagctttgggaacgatcactgcagtgcctgtcacgggtcctcaggtcagctccttgcagaggttggccgggcaaggagcggcagtgctacctcaggttaggccaaagactctgattccagacagcctccccgttgccccgggccgggaccggccacccaagcagcccccaacattccagaaggccaccgtggtcagcgtcaagaaccccagcccagccctccccaccgccaacaacactgtcagccatgtgccagcgcccggcagccagccccaggccctcgccgagcccgccgccctcgcctctccgctgagcagtgcgggggtggcctacgccatcatctccacctcccccagcaatgccgccgccatggcccccagcaccgccgtgtctgtggtcagtgacagcatcaaagtccagcccctcctcatcagtgctgacaacaagcctcctccacgcctcctctcttcccctcaccccgcaacccatcactgtcccctccacccctcctctcttcccctcacccctccctccccatcactgtccccttcacccctccatggcatcttccaggtcatcatcattcagcctcaagtgcagacgcagcccgagagcacggcagagtcgcggccgcccacagaggagccatctcagggagctcaggccaccaaaaagaagaaggaagaccggcccccgacccaggagaaccccgagaaaatcgccttcatggtagcgctaggcctggttaccacggaacatttggaagaaatccagagcaagcgacaggagcggaagagaagaagcacagccaaccctgcctacagcggcctcctggagaccgagaggaaacggctggcctccaactatctcaacaaccccctgttcctcacagcgagagccaatgaggacccctgctggaagaacgagatcacccacgatgagcactgtgccgcctgcaagcgaggggccaacctgcagccctgcggcacctgcccgggggcctaccacctcagctgcctggagccgcccctcaagacggcgcccaagggcgtgtgggtgtgccccaggtgccagcagaaggccttaaagaaagacgagggtgtgccctggactgggatgctggccatcgtgcactcttatgtcacccacaagacagtcaaagaagaggagaagcagaagctgctgcaacgaggcagtgagctgcagaacgagcaccagcagctggaggagcgggaccggcggctggcgtcagcagtgcagaaatgcctggagttgaagacaagcctgctggcccgccagaggggcacccagtcatccctggaccgcctgcgggccctcctgagactgatacagggcgagcagctgctccaggtcaccatgacgaccactagccctgccccactgctggccgggccctggaccaagccctcagtggcagccacacaccccaccgtccagcacccccagggccacaactgaccccgagggaccagtcttcatacccacggaaagttattgggaccctgcttacacagcctgggggttctgtcggccttaattcataaacactatgaatttcagacaaaaattaaccagacagaggagaggagggaggaagagctgggcgagaggcctagagccaggaccaggtgggggtgcggccctgtgccctccaaattcacagggggtacctaggagccaggtggggtacgacaggctggggcacacagtctccccccggccacctcggggctgcctgggcctctggcttccaggccctgctctccacggcctccctctggcccgttggaggggcaggctgaggctgtggaggggacaagcacgccccccagaacgcagtctccactgagggcaccgcctattggtgtcctgtgggagggcgagctgagaacacatggactagctgagtggtagcggtagttgggacgagaagcggggtagtggatctaggtagttcctcaatgccccacgctcctaggaggtccccctggggtgggcgggcgggcctggggcactccgtcgcctttgcagaaccacctgggcccctttctgtcagtattattagggttacgaattgcagctgtttaacttgaaagacactgtcggaggtgagcatctgggcgccgggacgctgcagtgatccccgccagagcctgtgcccttcctgctccgtctttggggtcctcaaggctgcctccttccttttgccaatctcttggactcagtttgccgttgatgcgtttttctcatggagtttctgggcagagtggagctgcaaccctgttgtggggggcagcatttggcaggttttctccttggggttgaatcattcaacttaacgactgaagccctttcttgtctcctttggaagagccgataagtattccactcctcccttcttgccagtgcagacactatgccaaaaaataacttcacacttttgtatggcgtttttattgtgagatatttaatgtgaatggttggggggactctggctgacttcctttctgcttctagtagtctctgcttcaaggtacaaatgggaacacctcccctcgggaagcctggccaagctggaagatccggcaggttttttacgagccgggtggagggttggggaggaaagaaagggcggtggctcgggaggttccggccttcggggaccagacttgctgccaagggcttctgcatccagggtgggcagtggcagcttgtcacccttgcccgattcccacatcccagtcctgagggactcagcacaacaggataagcgtccaggagccacgggctcccaccccgagcatatcacatggtgccgaattgcactgaacacgcgtgtgtgcatcgcacgcggccacgaccacagacacgcatgcacacacgcagaggtgcagagcgaggaggccggcaaatcccgcagctgccacggtccctcctgtcattctcacgactccgggagaaactgtgctgtatgatacagatctattttaatacacttaccactgggtgaacaagatttttatattcttttattgatgaacaaagtgaaccgtgtgaggcacacgtcttctatattggctactctgtgccaagtatgcattaccgcgtggcttgcgatgtccatgtcttcagcttccttttctgttggtttggttttcttcgcggatggattgagttacatgttttaacagtgtaatgggaggatctgaaaggttggacccgggaggggtagctgccgatgtgtcttgagattgttaggttttttttggaccaaggaggaccgtccagtgggtagtgaggatagagaaaaagtgtttgtcttaaatacgccaatgtagttttccttctttacaatgtattaaactcgatcgatgatttcaaa

SEQ ID NO: 45139 - DNA, 447 bp, Homo Sapiens
atggttatggctagcgatttctacctgcgctactacgtagggcacaagggcaagtttgggcatgagtttttggagtccgaatttcagctggatggaaagcttagatatgccaacagtagcaattacaaaaatgacgtcatgatcagaaaagaggcttacgtgcacaagagtttaatggaagaactgaagagaattattgatgacaatgaaatcacaaaagaagatgatggtttgtggcctccccctgacagggctggccgacaggagcttgaaattgtaattggagatgagcacatatcttttaccacatcaaaaataggttctcttattgatgtaaatcagtcaaaggatcccgaaggccttcgagtattttactatttggtacaagacttgaattgtttagttttcagtctcattggattacacttcaagattaacccaatttaa

SEQ ID NO: 45140 - DNA, 2240 bp, Homo Sapiens
atgcatgtgtgcctgtgtgtgtgtgcctgtgtgtgtgggtgcacatttgtgtgtgtgtgtgtgcctgtgtgtgtgtgtgcacgtatgtatgtgtgcacacttgtatgcatgtgtgcctgtgtgtgtgggtgcacatttgtgtgtgtgtgcctgtgtgtgtgggtgcacatttgtgtgtgtgggtgcacatttgtgtgtgtgtgcgcctgtgtgggtgcacatttgtgtgtgtgtgtgcctgtgtgtgtgcctgtgtgtgtgggtgcctgtgtgtgtggggcacatttgtgtgtgtgtgtgcctgtgtgtgggtgcacatttgtgtgtgtgcctctgtgtgtgtgcctgtgtgtgggggtgcacatttgtgtgtgcgcctgtgtgtgggggtgcacatttgtgtgtgcgcctgtgtgtgtgggtgcacatttgtgtgtgtgtgcgcctgtgtgtgtgggtgcctgtgtgtgtgtggggcacatttgtgtgtgtgtgtgtgcctgtgtgtgggtgcacatttgtgtgtgtgcctgtgtgtgtgtgcctgtgtgtgggggtgcacatttgtgtgtgtgtgtgcctgtgtgtgggggtgcacatttgtgtgtgtgtgtgcctgtgtgtgtgggtgcacatttgtgtgtgtgtgtgcctgtgtgtgtgggtgcacatttgtgtgtgtgtgcctgtgtgtgtgggtgcacatttgtgtgtgtgtgtgcctgtgtgtgtgggtgcacatttgtgtgtgtgcctgtgtgtgggtgcacatttgtgtgtgtgtgcctgtgtgtgtgtgcctgtgtgtgtgggtgcacatttgtgtgtgtgtgtgcctgtgtgtgtgggtgcacatttgtgtgtgtgtgtgtgcctgtgtgtgtgttgcaggccctggatgccagacactgaataaacgcaggaagacgtctgtcttcattctcctcgtgggtcgctggtccagaaacacctggatggaaagtgctctgcaggaacggtgcctctgcctgtggcggggaccctggtgagcggatgggccagccccacgtgtcttccggccactcagcatgcagtgtttccaggggcactaagagaccaaaatcgagatatgattagctgtaggatgtcatctaatcacagatcatcccgaggctaatttatctcccccatgaccataacacatcaaaaagttgactttttgcagctcggctgtgcctcatcttcccacgaagccccgacaggcacatccagtgaggaaccacagtgggagtcctgtggcagggtcaccccacttccgatgccctccagctgcatcttggcacgaaaaaggctgcccagttctcatgccctttcaagtcccgggctggggggtagcagtggaggctggggttaaccgccgtccgtctcaaaggcctcattgtggagctgcaaacacgaacgtccttgaaatgtgaggggacagtgctctggggcaggggctgctcactggttcatggccagaggtgagcgggctctgggtctgggtctgtgaggtgctgtggacgtcgggggtgctcctggggcagggacacagccacggccctcacaccagtggagccgtcttccttcccgaggcagaggcttggccttctcacaccttgggacccttctctcccctgtgctcatgctggaagcacagcgtgagggggcaaaggtcatgggaggcaaaaggctgggctgaggccgaggctctgtggctgtggccggataccaggtcctgtggtggtgtgggcagggcgcgctctctcctctgagcagcctggggctgcgtgtgtgaacagaaacaggcctgccgatttgaagatggtttgaccaagtctcccaaagctgaagagaggtccctgcccatgtcccccgggtggcaatccacagacgcacctgtgtccatcagacggtatcgttgatagggagtctgaagccacccagacgtggtctgttcacgccgtggacaccacggtctgaggcagacggttacagccaccggcataggcgaatctcagccagagagagtgaactgggacaccattcacgtgatgggccagatgggctggcagcggctcgctggagccgtccgggtgggaacgctgtgtctgttggtctggtgctgcttatgtggctggttcaggtctgtcatccgtcaacctgcatatttatcactggtgcattttcatgtatgttgtacctcaattaaacattttagg

SEQ ID NO: 45141 - DNA, 1905 bp, Homo Sapiens
agcaaagagcagcctgtggtcttcaaccacgtgtacaacattaacgtgcccttggacaacctctgctcctcagggctagaggcctctgctgagcaggaggtgagtgcagaagacgagactctggcagagtacatgggccagacctcagaccacgagagccaggtcacctttacacacaggatcaacttccccaaaaaggcctgtccatgtgccagttcagcccaggtgctgcaggagctgctgagccggatcgagatgctggagagggaggtgtcggtgctgcgagaccagtgcaacgccaactgctgccaagaaagtgctgccacaggacaactggactatatccctcactgcagtggccacggcaactttagctttgagtcctgtggctgcatctgcaacgaaggctggtttggcaagaattgctcggagccctactgcccgctgggttgctccagccggggggtgtgtgtggatggccagtgcatctgtgacagcgagtacagcggggatgactgttccgaactccggtgcccaacagactgcagctcccgggggctctgcgtggacggggagtgtgtctgtgaagagccctacactggcgaggactgcagggaactgaggtgccctggggactgttcggggaaggggagatgtgccaacggtacctgtttatgcgaggagggctacgttggtgaggactgcggccagcggcagttcattgacggccccacgcagatcctggttcgcgatgtctcggacactgtggcttttgtggagtggattccccctcgagccaaagtcgatttcattcttttgaaatatggcctggtgggcggggaaggtgggaggaccaccttccggctgcagcctcccctgagccaatactcagtgcaggccctgcggcctggctcccgatacgaggtgtcagtcagtgccgtccgagggaccaacgagagcgattctgccaccactcagttcacaacagagatcgatgcccccaagaacttgcgagttggttctcgcacagcaaccagccttgacctcgagtgggataacagtgaagccgaagttcaggagtacaaggttgtgtacagcaccctggcgggtgagcaatatcatgaggtactggtccccaggggcattggtccaaccaccagggccaccctgacaggtgagccaataaatactgccctccaggggaacacatgtaaaataggccatttatgtcaatccacagaacttgacagtccccgagacctcatggtgacagcctcctcggagacctccatctccctcatctggaccaaggccagtggccccattgaccactaccgaattacctttaccccatcctctgggattgcctcagaagtcaccgtacccaaggacaggacctcatacacactaacagatctagagcctggggcagagtacatcatttccgtcactgctgagaggggtcggcagcagagcttggagtccactgtggatgctttcacaggcttccgtcccatctctcatctgcacttttctcatgtgacctcctccagtgtgaacatcacttggagtgatccatctcccccagcagacagactcattcttaactacagccccagggatgaggaggaagagatgatggaggtctccctggatgccaccaagaggcatgctgtcctgatgggcctgcaaccagccacagagtatattgtgaaccttgtggctgtccatggcacagtgacctctgagcccattgtgggctccatcaccacagtcctggaccctccggcaaacctgacagccagtgaagtcaccagacaaagtgccctgatctcctggcagcctcccagggcagagattgaaaattatgtcttgacctacaaatccaccgatggaagccgcaag

SEQ ID NO: 45142 - DNA, 442 bp, Homo Sapiens
atggcggactgggctcgggctcagagcccgggcgctgtggaagagattctagaccgggagaacaagcgaatggctgacagcctggcctccaaagtcaccaggctcaaatcgctcgccctggacatcgatagggatgcagaggatcagaaccggtacctggatggcatggactcggatttcacaagcatgaccagcctgcttacagggagcgtgaagcgcttttccacaatggcaaggtccggacaagacaaccggaagcttctatgtggcatggccgtgggtctaattgtggccttcttcatcctctcctacttcttgtccagggcaaggacgtgagccagtgggagctggtgtctgtgggtgccaagggcagccagggtcttccctgcctggtgttttgggctccagaggacttacctacaaaatactcctttgcaatgat

SEQ ID NO: 45143 - DNA, 306 bp, Homo Sapiens
atgttagtaggaaatcgtgctagagagagagagctcaagcaggacaggaggggcctagagattgcttgggatttgatgaagagacaggactgttttagagaggctgctcacggcagtgcctctgagcaggtagcactggagccgatcctctgctgcgatgaggtggcaagccaagaacatcatgagggagggaagggcagtcccagaagagagagcacagtgcaggtgccaggtggggaccacgggacactggaactgccttggtgtgtttatttccaaatagtgtctggcattacactgagatga

SEQ ID NO: 45144 - DNA, 1158 bp, Homo Sapiens
atggggtgcggcgccagcaggaaggtggtcccggggccaccagcgctggcttgggccaagcacgaaggtcaaaaccaagccggcgtcggaggcgcggggcctgggcccgaggcggcggcccaggcggcgcagaggatacaggtggctcgcttccgagccaagttcgacccccgggtccttgccagatatgacatcaaagctcttattgggacaggcagtttcagcagggttgtcagggtagagcagaagaccaccaagaaaccttttgcaataaaagtgatggaaaccagagagagggaaggtagagaagcgtgcgtgtctgagctgagcgtcctgcggcgggttagccatcgttacattgtccagctcatggagatctttgagactgaggatcaagtttacatggtaatggagctggctaccggaggggagctctttgatcgactcattgctcagggatcctttacagagcgggatgccgtcaggatcctccagatggttgctgatgggattaggtatttgcatgcgctgcagataactcataggaatctaaagcctgaaaacctcttatactatcatccaggtgaagagtcgaaaattttaattacagattttggtttggcatactccgggaaaaaaagtggtgactggacaatgaagacactctgtgggaccccagagtacatagctcctgaggttttgctaaggaagccttataccagtgcagtggacatgtgggctcttggtgtgatcacatatgctttacttagcggattcctgccttttgatgatgaaagccagacaaggctttacaggaagattctgaaaggcaaatataattatacaggagagccttggccaagcatttcccacttggcgaaggactttatagacaaactactgattttggaggctggtcatcgcatgtcagctggccaggccctggaccatccctgggtgatcaccatggctgcagggtcttccatgaagaatctccagagggccatatcccgaaacctcatgcagagggcctctccccactctcagagtcctggatctgcacagtcttctaagtcacattattctcacaaatccaggcatatgtggagcaagagaaacttaaggatagtagaatcgccactgtctgcgcttttgtaa

SEQ ID NO: 45145 - DNA, 915 bp, Homo Sapiens
aaagcctgggattttttgtctgaaaatcaactgcagactttaaatttccggcagagaaaggactctctcgttcagcacttggttctgctgtgtgagaagcatgcaaatatccctatgacgcagcccgacacagtttatactcaatttcatcagcacaagaaagtttgggatgcttttcagacgagtaaaggaccaggtgaagatgctgacctttttgatatgaaacaacttaaaaattcatttaagaaaattcctctaagcatttacaaatgtgacagctttagagacattgaggggaatgcagtctggattagaattgcctggggaacacagtacacaaatccaagtcagtacatacaaacctaccacctttctactgcatgtgccttcactttttcctccaagctgaggtgcaatagaccgcttctgggtcaggcactgataattgctagcagacagcatcagactgtgaaaatggatctgagaagcgacatctggactcccaagcctattgcttttaaacagtatgatcagatctttgaagctgtcacaactcgacgacacctcgaaagaagccttgggctggatataaatatggattctagaattattcatgaaaacatagtagaaaaaggaagagtccaaggaataactcaaaaagctgttggggacgatcctcaaccacaactagaatttgcacaattgaagcttgaaaggaaattcaaaagtgatttaaatgggaccatcttggctgagaaggaagaatccccttcagtaataaagttctcttgctcacgtcttttggaagcaatgaaatccttaacccccgccagccttgcagatagaccgctttctccaccactcacttgcatatccagcaagggaatgagttattttaaaattagagataaatga

SEQ ID NO: 45146 - DNA, 222 bp, Homo Sapiens
atgaaggacaaatcacagagatctgcaagcttgtctgctaaacctgctcctccaaagccagagcccaagcctaaaagggcccctacaaagaagagagagaaggtacacaaagggaaaaagggaaaagctgatattggcaaggaggagaataaccctgcacaacatggagatgccaaaacagaccgggcacagaaagctgaatgtgttggagatgccaagtga

SEQ ID NO: 45147 - DNA, 321 bp, Homo Sapiens
atggtgaatgttcctaaaacccaccggactttctgtaacaagtgtgtcaagcaccagtcccacaaagtgacacagaatgagatgggcaaagattctctgtatgcccagggaaagaagtgctataataggaagccaagtggctattgcgggcagactgagcccattttcaggaaaaaggctaaaactacaaagaagattgtgctgaggcttgagtgcattgagcccaactgcagatctacaaaagtgctggccattaagagatacaaggattttgaactgggaggaggtacaaagacaaagggccaagcgatccggttctaa

SEQ ID NO: 45148 - DNA, 2349 bp, Homo Sapiens
atgggaaattataaatctagaccaacccaaacttgtactgatgaatggaagaaaaaagtcagtgaatcatatgttatcacaatagaaagattagaagatgacctgcagatcaaggaaaaagaactgacagaactaaggaatatatttggctctgatgaagccttcagtaaagtcaatttaaattaccgcactgaaaatgggctgtctctacttcatttatgttgcatttgtggaggcaagaaatcacatattcgaactcttatgttgaaagggctccgcccatctcgactgacaagaaatggatttacagccttgcatttagcagtttacaaggataatgcagaattgatcacttctctgcttcacagtggagctgatatacagcaggttggatacggtggcctcactgccctccatattgctacaatagctggccacctagaggctgctgatgtgctgttgcaacatggagctaatgtcaatattcaagatgcagtttttttcactccattgcatattgcagcgtactatggacatgaacaggtaactcgccttcttttgaaatttggtgctgatgtaaatgtaagtggtgaagttggagatagacccctccacctagcatctgcaaaaggattcttgaatattgcaaaactcttgatggaagaaggcagcaaagcagatgtgaatgctcaagataatgaagaccatgtcccactccatttctgttctcgatttggacaccatgatatagttaagtatctgctgcaaagtgatttggaagttcaacctcatgttgttaatatctatggagatacccccttacacctggcatgctacaatggcaaatttgaagttgccaaggaaatcatccaaatatcaggaacagaaagtctgactaaggaaaacatcttcagtgaaacagcttttcatagtgcttgtacctatggcaagagcattgacctagtcaaatttcttcttgatcagaatgtcataaacatcaaccaccaaggaagggatgggcacactggattacactctgcttgctaccacggtcacattcgcctggttcagttcttactggataatggagctgatatgaatctagtggcttgtgatcccagcaggtctagtggtgaaaaagatgagcagacatgtttgatgtgggcttatgaaaaagggcatgatgccattgtcacactcctgaagcattataagagaccacaagatgaattgccctgtaatgaatattctcagcctggaggagatggctcctatgtgtctgttccatcacccttggggaagattaaaagcatgacaaaagagaaggcagatattctcctcctaagagctggattgccttcacatttccatcttcagctctcagaaattgagttccatgagattattggctcaggttcttttgggaaagtatataaaggacgatgcagaaataaaatagtggctataaaacgttatcgagccaatacctactgctccaagtcagatgtggatatgttttgccgagaggtgtccattctctgccagctcaatcatccctgcgtaattcagtttgtgggtgcttgcttgaatgatcccagccagtttgccattgtcactcaatacatatcagggggttctctgttctccctccttcatgagcagaagaggattcttgatttgcagtctaaattaattattgcagtagatgttgccaaaggcatggagtaccttcacaacctgacacagccaattatacatcgtgacttgaacagtcacaatattcttctctatgaggatgggcatgctgtggtggcagattttggagaatcaagatttctacagtctctggatgaagacaacatgacaaaacaacctgggaacctccgttggatggctcctgaggtgttcacgcagtgcactcggtacaccatcaaagcagatgtcttcagctatgctctgtgtctgtgggaaattctcactggcgaaattccattcgctcatctcaagccagcggctgcggcagcagacatggcttaccaccacatcagacctcccattggctattccattcccaagcccatatcatctctgctgatacgagggtggaacgcatgtcctgaaggaagacccgaattttctgaagttgtcatgaagttagaagagtgtctctgcaacattgagctgatgtctcctgcatcaagtaacagcagtgggtctctctcaccttcttcttcttctgattgcctggtgaaccggggaggacctggccggagtcatgtggcagcattaagaagtcgtttcgaattggaatatgctctaaatgcaaggtcctatgctgctttgtcccaa

SEQ ID NO: 45149 - DNA, 363 bp, Homo Sapiens
atggctcataaacactggggaaggaacagaaggggagggagcaaaggaactcggccgctcacctccgacccaaccacttcccgagaagccatctctgtggtcatggtggtcccaggcctggctctgcgcccacccccaccacccagtcactccacccagtcaccccacccagctgtgacctgccacttccctccatctcacatgctttcccctcacctccctcaggaagcctccccagcctctggcctccagtcccaacaagccatgctccttccagagggaacctctgccaggggagcctccactttcttgctcctgcctccctacctggcacccaggccggccctggtaccctggtactga

SEQ ID NO: 45150 - DNA, 2125 bp, Homo Sapiens
tgcgccctctcggggacgcgaatgccccgcgccgggcgggcgcccgcggagggaggtcccgctccagggacgcggagctccagatgcctgcgcccaaggcccctcgcctggcgccggctggtcccgaacttcggggcatgggcacccaggaagggggctgcgcgtgttgggaggcccgtcctctcgccgcgaacctccggggcagccggggaacccacctgcggagcgggaagcccaggaacgctcgaagagggtgtggcctcaggtaggacgcggcggcgaacccagagcgcgggagaagttgccaagtgtcgctggggccttggccaggagcccctctgcccgaggggcgccgtgctgctcaactctttctctccacctgcttggccccagttcccgcccgcccttcgcctccgggccctggcctggccacagccgcggggacctgcctgcggctccacggcccagtggccgcctcgcggagacccgacctggagaatcagctgagcgccggctgtgtgtaatcacctcgttcactggcatcgcagatgcacgctccagagccgcgggccgactctcccggacctgagcgggccgcgtgtgcccacccacacatcctggagagcccacgcgggagtcggaaaacctgtcaccttggatgatctgtcccatgtggacagggccccaagactgtgctggggtagccccttgcgcaggcaggaaagcgggatttaagggattccagttcccttgtcagcccttgcgcagtcctgagtcctgaggactttctagcctgagagtcctagggcaggagacccgcacccccagagcggctagggcctgtttcggagcccctccgcctgtgattttgtcccagagtcggcatcctctgcttgtcctcagcagtccctgcctaagatcagaatggccattccaaggggctcactcctggctgcccctgtgccatgtttcttttggggtacagggtgttttctatactgggggaagggacaggaatcactcatctcttccccagataaagaagtgagaagacctttgctctccttgtcttgggcccccagagaaaggctgtgttctggctgagtgctgaggaagttctggcttggaaactcagtacatgtggactccaaatggctgccgtcaagtggtggctgggtgactgccagtgtcacagagcggggaccaaggacagtgcagggattttaaaaatcattgttgggcacctcagacttcaatgattaactgaggtcactatggccacttatttttgttcactgattctttagacgcatcaatctactcacggctcaatcttttgcattataggctgtattggtttcacacaatttactctaaggcgcccacctaatagagctcaggcaacccgtgggaacctgacagtcccaaacaggtctgtaccctgtgtggctgcaccacaagcccaatgccctcggctttcctagggaaagcatggtgccaggtgcagatgctggccctctgtgctgtgggacagtggtgtgggagccagccagctaaccataccctgctgccatccccaacatccccaacacatatttatatttagtttctgttctcctccccttactctgtcgcctcctcctcctcctctttgtgtctttcccacgcggattctttctctttcctctgagtggacaatactgtaggcctgacccgcttagacaaactctgacctcctgtggtcacccaggaagctgactgctaggccttggatgagggggcagtgggagggggaccaggtgataccagaatggctccccccacagattcgttacccaaggacatgggtacactggtcgaatgctggctgcagaagcagaatgtgctgcgtggaggtggcagagattggttgctgaggatttgaaatgaaccatgaaccaaagctagaatgaaagcattatattgtctaacctagaatcgacaccctaaattatttttactgattcatgaatgcatatgtgaattattttctttgactacaaatgccttatatacccaaatcacagctccaagcagtacttttgaacagaactacaataaagtatgaatgttagattattaccag

SEQ ID NO: 45151 - DNA, 618 bp, Homo Sapiens
atggcggcctcgacggcctcccaccggcccatcaaggggatcttgaagaacaagacctctacgacttcctctatggtggcgtcggccgaacagccccgcaggagtgtcgacgaggagctgagcaaaaaatcccagaagtgggatgaaattaacatcttggcgacctatcatccagcagacaaaggctatggtttaatgaaaatagatgaaccaagccctccttaccatagtatgatgggtgatgatgaagatgcgtgtagggacaccgagaccactgaagccatggcgccagacatcctagccaagaaattagctgctgctgaaggcttggagccaaagtaccggattcaggaacaagaaagcagtggagaggaggatagtgacctctcacctgaagaacgagaaaaaaagcgacaatttgaaatgagaaggaagcttcactacaatgaaggactcaatatcaaactagccagacaattaatttcaaaagacctacatgatgatgatgaagatgaagaaatgttagagactgcagatggagaaagcatgaatacggaagaatcaaatcaaggatctactccaagtgaccaacagcaaaacaaattacgaagttcatag

SEQ ID NO: 45152 - DNA, 900 bp, Homo Sapiens
aatcagactgctggagtcaccttcatcctcttgggcttctcagaatttccagaccttcagatacccctgttcctggtcttcctgaccatctacacaatcactgtgatggggaatctgggcatgatcatggtcatcaggatcaaccccaaactccacacccctatgtactttttcctcagccacttgtcctttgttgatttctgttattccaccacaattacaccaaaactgctggagaacttggttgtggaagacagaatcatctccttcacaggatgcatcatgcaattcttctttgcctgtatatttgtggtgacagaaacattcatgctggcagcgatggcttatgacagatttgtggcagtgtcaatctgtaacccgctgctctatacagtgattatgtccaagaaggtttgttgccagcttgcaattggagcatttttggggggcactatgagctcaattattcataccacgaacactttccatctgtcattctgctccagagatattaaccatttcttttgtgatatctccccactcttctctctgtcctgcactgacacatacatgcatgacatcattctggtggtctttgccagttttgtggaagcaatctgtcttctatcagttctcctttcttatgtcttcattatggcagctattcttagaacaggttctgtggagggaagaagaagagggttctccacttgtgcttcccacctgactgtggtcactatgtatcatggtaccttgatcttcatttatttgcgtcccagcactggccattcactggatattgacaaagtgacctctgtgttctatactttgattatacctatgttgaaccctctaatttacagtctaaggaacaaagatgtcaaaaatgcttttagaaaa

SEQ ID NO: 45153 - DNA, 2465 bp, Homo Sapiens
tctccctgcagagatcagcaaggacaactcctgcaaagaaaactgtacttgttcctcctgcttgctccgggcccccaccataagtgacttgctcaatgatcaggacttactagacgtgatcaggataaagctggatccgtgtcacccaacggtgaaaaactggaggaattttgcaagcaaatgggggatgtcctatgacgaattgtgcttcctggagcagaggccacagagccccaccttggagttcttgctccggaacagtcagaggacggtgggccagctgatggagctctgcaggctctaccacagggccgacgtggagaaggttctgcgcaggtgggtggacgaggagtggcccaagcgggagcgtggagacccctccaggcacttctagagctcttcttcttccttcattggcctctccggatgttgaaacaaccacaggtcaagaaggaatgtgaatctgttgttttataagagtttaggacaaggacgtggaacagtggacactggttttccccaaagctggcagttttgtggaggggtagcttgtttcggtggtggatctctgtttatttttgcacatctgttataatttaatattcaaatctggaattaagaaaacatattttctagtatcctctaagggccaaagtcctacaatcggaatggattcatgccacgttgaagataaaattatcctctctctgaaatacggtaaagatttaaataggtcctgagactgttgatagccccagacatacccacagcattatatgtaacatctctcctgatcagtgccattcccacggtttcaaagaaaacagctacaaggaatgcttacctgagtgtctgcagcaccctccacttctctcctaggcaatgagacccagtggctagaaattcaccatgtctattctcaagatccatgccagggagctctttgactctcgtgggaatcccactgttgaggttgatctcttcacctcagaaggtctcttcagagctgctgtgcccagtggtgcttcaactggtatctatgaggtcctagagctccaggacaatgataagactcgctatatggggaagggtgtctcaaagcctgttgagcccatcaataaaactattgcacctgtcctggttagcaagaaactgaacgtcacagaacaagagaagattgacaaacttatgatagagatggatggaacagaaaataaatctaaatttggtgcaaatgccattctgggagtgtccctcgctgcctgcaaagctagtgctgttgagaagggggttcccctgtaccaccacatcgccgacttgtctggcaactccaaagtcatcttgccagtcccggtgttcaatgtcatcaatggcagttctcatgctgtcaccaagctggccatgcaggagttcatggtcctcccagtcggtgcagcaaacttcagggaagccatgcccattggagcggaggtttaccacagcctgaagaatgtcatcaaggagaaatatgggaaagatgccaccggtgtgggggatggaggcgcgtttgctcccaacatcctggagaataaagaaggcctggagctgctgaagactgcgattgggaaagctggctacactgataaggtgatcgtcagcatggacgtagaggcctccgagttcttcaggtctggaaagtatgacctggaattcaagtttctcgacgaccccaccaggtacatctcacctgactgtctggctgacctgtacaagtccttcatcaaaaactacccagtggtgtctactgaagatccctttgaccaggatgactggggagcttggcagaagttcacggccagtgcaggaatccaggtagtggaggatgatctcagagtgaccaacccaaagaggacagcctcggccgtgaatgagaagaagtgcaactgcctcctgctcaaagtgaaccagattcgctctgtgactgagtcccttcaggcgtgcaagctggcccaggccaatggttggtgtgtcatggtgcctcatcattctggggagactgaaaataccttcatcactgacctggtggtggggctgacctgggcagctcaagactggtgccccttgtctgagcgcttggccaagtacaaccagctcctcagaattgaagaggagctgggcagcaaggctaagtttgccggcaggaacttcagaaaccccccagccaagtaagctgtgggcaggcaagcccttcagtcacctggtggctaattagacccctccccttgtgtcaactccggcagctcaagacccccgagcaacatttgtaggggccgctgctagttagctacccttgcccaccgccgtggagttcgcacctcttccttagaacttctacagaagcaggttgcagtgagccgagattgcgccactgcacaccagtctggagacagagtgagagtccgtcccagaaaaaaaaaaaaaaaaaa

SEQ ID NO: 45154 - DNA, 2037 bp, Homo Sapiens
ggcagaagtcctgtagggagatgggcagttaccttctctccgtctctctctcggggactctatttgtggctggtggagctgtcttaaacgaagagaaccatgagcaatgaatcttgtttaccttattacacagcccacagctactcttcaatgagtgcgttcaaaacctccatgggggacctgcaacgacaattgtacaacagaggagagtacaacattttcaagtatgcaccaatgttcgagagtaattttattcagataaacaaaaagggagaggtgattgatgtacacaaccgtgtccgaatggtgacagtgggcatcgtctgcaccagccccatcctcccactgcctgacgtcatggttctggcccaaccaactaaaatctgtgaacagcatgtcagatggggccggtttgccaaggggagaggtcgcaggcccgtcaagactctagagctcacgagactgcttcccttgaaatttgtgaagatctccatccacgatcatgagaaacagcagctgcgcctgaaactcgccactggccgtactttttatctgcagttgtgtccctcttctgacacacgggaagatctcttttgctattgggaaaaacttgtctatctcctgaggccaccagtagagagttactgcagtaccccaacacttctatctggggacgcaccacccgaagacaacaaaagcctagtggctgcagagctccacagagaaggggatcagagtgagactgggctctacaagccttgtgatgtatctgcagccacctcttctgcttatgctgggggagagggaatccaacatgcctcccacggaacggctagtgcggcttctccatccacgagcactccaggggctgctgaaggaggagcagcaaggacagcaggtggcatggcagtggcaggaacagcaacaggacctagaacagatgtggcaatagcaggggcagcaatgagtcctgcaacaggtgctatgagcatagcaacaaccaaatctgcaggcccaggtcaagtgaccacagcgctggcgggagcagctatcaaaaatccaggagaaaatgaatccagcaagtccatggcaggtgctgccaacatatcctcagagggtattagcttggccttggtgggtgctgcaagcacctccttggaaggtacttccacctcgatggcgggggccgccagtctctcccaagacagcagcttgagtgcggcgtttgcaggcagtattacgaccagcaagtgtgcagcagaaagaactgaaggaccagcagtgggacccctcatctccaccttgcaaagcgaaggctacatgagtgaacgagatggaagccagaaagtttcccagcccagtgctgaagtctggaatgaaaacaaggaaagaagagaaaagaaggacagacatcccagtaggaaaagttctcatcaccgcaaggcaggtgaaagtcaccgcaggagagcgggggacaagaatcagaaagcgtcttcccaccggtccgcatctggccataaaaacacgagagatgacaaaaaagaaaaagggtacagcaacgtaaggggcaagcgacatggctcctctcgcaagagctccacccacagctccaccaaaaaggagtcgagaacaactcaggaactggggaagaaccaatctgcatctagcacaggagctttacaaaagaaagccagtaagatcagctcttttttaaggagcctcagggccactcctggttcaaaaacaagggtcacatcacatgacagagaggtagatatcgtggctaagatggtggagaagcaaaacatagaggccaaagtggagaaagcccagggtggccaggagctggagatgatcagtggcactatgacatccgagaagacggagatgatcgtctttgaaaccaaatccatttaaagaggagccagggctacaaccgcccagggatctggaagtatccctagaggagcccatcccagctttctttactgcagttcaaataataaaggaaatcgtacaactccaaaagaaatacaa

SEQ ID NO: 45155 - DNA, 873 bp, Homo Sapiens
atgggcgatgggggcgccgagcgcgaccggggccccgcgcgccgggcggagtctggtggcggcggtgggcgctgcggagaccgcagcggagcgggggacttgcgagctgatggcggtggccacagcccaacggaggtggccgggacctcagcctccagtcccgcaggctccagggagagtggagccgacagcgacgggcagcccgggcccggcgaggcagaccactgccgccgcatactggtgcgagatgccaaagggacaattcgggaaattgtcctgcctaagggcctggacctggaccggcccaagcggacacgtacatccttcactgccgagcagctgtaccgcctggagatggagttccagcgctgccagtatgtggtgggccgcgagcgcactgagctggcccgccagctgaacctctccgagacccaggtgaaggtctggttccagaaccgccgcaccaagcagaagaaagaccagagcagagacctggagaagcgggcgtcctcctcagcctccgaggcctttgccacctccaacattctgcggctgctggagcagggccggctgctctctgtgcccagggcccctagcctcctggcgctgacccctagcctgccaggcctacctgccagccacaggggcacctccttaggtgaccccaggaactcctccccacgcctcaacccgctgtcctcggcctcagcgtcccccccactgccgccccctctgccagctgtctgcttttcctcggccccgctcctggatctgcctgccggctacgaactgggttcctcggccttcgagccatacagctggctagaacggaaagtgggcagcgccagcagctgcaagaaagctaacacttaa

SEQ ID NO: 45156 - DNA, 570 bp, Homo Sapiens
tgggaacgccaggcggctgccagagcaaacacccagcccagggcccctggatttgagcagtgcctcggagcagagggatatctgccgcatcaggtgccaccccgggtgaaggatgccactctgggtgttcttctttgtgatcctcaccctcagcaacagctcccactgctccccacctccccctttgaccctcaggatgcggcggtatgcagatgccatcttcaccaacagctaccggaaggtgctgggccagctgtccgcccgcaagctgctccaggacatcatgagcaggcagcagggagagagcaaccaagagcgaggagcaagggcacggcttggtcgtcaggtagacagcatgtgggcagaacaaaagcaaatggaattggagagcatcctggtggccctgctgcagaagcacagcaggaactcccagggatgaagattcctcctgtgacccgggctacctgtagccaaaatgcaactggatccagttaatcctctcatttctgacccactttttcctttgaaaatacaataaaattcccccataccggtgtgcatttaaatgtt

SEQ ID NO: 45157 - DNA, 1985 bp, Homo Sapiens
ggagaggagggtcaccaactccaggcagggctgctaagtttattacaaacaggcaagactagaatatgtttccactttagtgagtggaaacctaatcattcataggtatcctgtacacacagaacaactatgatgaagagtgaggcctaaatcagaggagacgaggacaataatagtagtagtggtcatgatgataataataactaccagacatgaagattaaccatgcctaacattgtgttaaacgtctcacttctttcatttaatccttacaataatccaatgatgtagctgctattatttttattatacagatgaagaaactgagggcttgaggggtatactgctttgccaaagtcgtacaaatggtaagtgcagaaccaggatctgaattccgtcagtctgactgcagagtccacgccgacaccgtggaagctggtgatgcccattaggccctgtctgggcatgaagaggatgccctccctcatgagctggaacacagcatcccctgttgtgggtgtggctctcttaaagaccatctggtgaattttgcttgtgctggtttcttattaaacaaccttcagatttggcttcacgtgcaactcacatagagggaaaggagaccatgatccgccaacatgacagctgtatttttcattagtaaattagcaaactggctgcctgggtcaccatgcatacctgttaaggtgagcccgccccagagctaaaggctaccatgtgccaacttaactgagattctgagtgtgcaaggataacccccgtcatggccccgggtgccaaggaaatcccttttagcctcctcttggcagacttggccagccttccccagtgacagcctggctctttggattcaagctgcctggtcagactgcaagggtcatctgtacaaagaaggaagcaacagtgccaggttccagcgtgcgttccaagttccacattctgtgtgcagactcccaacgccagagcaaaggcaggcccctggcaggggactgctgagaaagtggaactccagagacactcctgaaattgtcctaagtcaaaggagccaaacggtgtacgagctccctctctgccgtcccctctgagagcagccatggccctgagtgatgtcgatgtgaaaaagcagattaagcacatgatggctttcattgagcaggaagccaatgagaaagcagaggaaatcgatgccaaggctgaggaagagtttaacattgagaaaggacgcctcgtgcaaacccaacgactgaagattatggagtattatgagaaaaaggagaagcagatagagcagcagaagaaaatcctgatgtccaccatgaggaatcaggcgaggctgaaagtcctgagagcccgaaatgacctcatctcagatttgctcagtgaggcgaagctgagactcagcaggattgtggaggacccagaggtctaccaggggctgctggataaactggtgctccagggtctgctccgactgctggaacctgtgatgattgtacgctgccggccacaagacctcctcctggtggaggctgctgtacaaaaagccatccccgagtacatgacaatttcccagaaacatgtggaggtccagattgataaagaggcatacctggctgtgaatgcagctggaggtgtggaggtctacagtggcaatcagagaataaaggtttcaaataccttggaaagccgactggatctctcagccaagcaaaagatgccagaaatacgaatggccttgtttggtgctaacaccaacagaaagttctttatataagcctctgggaagtgaagctagtgttgaaccactaaaccataaaagtttaagttttttggggaaaggaaactagtagtgtttcctcctctttgatgctctgatactgttctgtttttcttcacgaaataccctttggatagctaaagtgttaactttgaaataaagcccaaattaatgctcagaattcaaa

SEQ ID NO: 45158 - DNA, 985 bp, Homo Sapiens
gcacatgcgcagaatcatcgtggtgcacggctctccctttgcttcttcggttgcagtcctcttgcttcttgcgcgtgcgtgtagcgcttttgcaaagccgcggaggtgaagtgaacttagaggttgtggggccgaggggtcgtcttatagctaccagcccacaggcatttagtctacgttggaggtaaacaaatacgggtcctgcttaggagaaaagaaaaacgtcttacagccagtgtctaaactccaaacaacggaatgtatcaatgagaccttgtatatggatacacgtgcatttaaaaccgccctgccggcttgtagagcttttgccgttctccagcgctttacaggggttatcgcacttaagcctcggaacaactttaccagtgattctaccagaaaggaatgaagaacagaaccttcaggaattgagtcacaatgcagacaaatatcaaatgggagattgttgcaaggaagagattgatgatagtattttctactagccattgggaagataaaaggagacagaagattgaagcctttgccagccattctttccctttttgcttccaaactcctcaactgggaaccttcatatgtgcagtatttatattggatcatactggtgattataaaagttcctaggaggctagaagagccaaccaacagagaagggaaagcagtctgttctgaacatagggacataagttcattcatgccaagtatctttccagcatgtttctcccatttagaatatctagcatgtaaggcctttcaatattaatataagcccaatatcagctctttctctttgtatttcatctctttctactctcctatttgtattttgtgttcctatcaaagtgtcgtatctgggagatgacctgccttatcctgttctataacagttttgtttgctgctgtgtctttagaacagtgcctggcacacagtaagcactcaataaatctttgatgaatgaatgaa

SEQ ID NO: 45159 - DNA, 585 bp, Homo Sapiens
ctttccgcgggccgcggggatggcggcgcagggcgtagggcctgggccggggtcggcggcgcccccggggctggaggcggcccggcagaagctggcgctgcggcggaagaaggtgctgagcaccgaggagatggagctgtacgagctggcgcaggcggcgggcggcgctatcgaccccgacgtgttcaagatcctggtggacctgctgaagctgaacgtggcccccctcgccgtcttccagatgctcaagtccatgtgtgccgggcagaggctagcgagcgagccccaggaccctgcggccgtgtctctgcccacgtcgagcgtgcccgagacccgagggagaaacaaaggcagcgctgccctcgggggagcattggccctggcggaacgcagcagccgcgaaggatccagccagaggatgccacgccagcccagcgctaccaggctgcccaaggggggcgggcctgggaagagccctacacggggcagcacctaggatggggcagagacttgttgcatctttgtccccagcaaaggctacatgttacctccttcaattgataataaacctttctgagatgcaga

SEQ ID NO: 45160 - DNA, 1248 bp, Homo Sapiens
agggggaaccaaaaatatcgggctttgaaattctgtggattttcaaaggcggttcccaaccttgtcaaaaactacagtgggtgcgcgatctaatctggctcctataggtggcgctgtgacaaggtgcggtggccgggagaggcggctgggggactcgaagactgcgggaaattttctgcgactccgacgctaacccgctgctcccagcctccgcttcctgttttcgagggattagctaggactgtgcaacaccagtctccgctctcggagtcggcacgggggctggtgggtggcgggatgaactcggggaaggcgacaggctggaaacgcagctcctcgactttgcagcgcaccaaccccctatcgccccgtccgctgctcaggtgcgaggattcgccagacgccacaggactgggggcgactcgcaagggcatcatgccacctagaggaaacgcgcagtgagtgagccctgggtcactgaaaatgggagaacgttcgagtcggtcaagatgactccggcctgcgagttgattcagactcctcggaagccagaaattgggtctagagtgggttggtccctccgtcagcagttcgggcccagccgaagcttggggcctagagggcagacgtccggctctgatcagagtacagcgggctgggcctggcagcctgcaggcaacctggaccttgcaataaagctgcattcaacataactcagaccacagtgggagcccccgaagggcttcatgtgagtcccgaaaccagagtttagaggcgcggcctggttctcgtttatcttttccagacagcatttaggccaataaggtctttgaaaggaggcagccccaaagccctcaggccgacacctgagggcagggtctcaaacagctgtgcttgaagaaccggcaatcttgcttttcccacacgcagctgcacctctcctgagcgctgcagctgatggctgtatagtgaccacggactgcgtcctcctcacgaagctgcgcaacttctgctaatgctgcaaccctggcaagacgaaatccccctccctctggctagatcagcccagcctcccctcagggaccttcctgcccctccctacccctccctacccctaggccgctccccccttcctctgttgggatccgatccttgttcgctcttgcaatcccgcagcccggagttttgccccgtgcattaaaacatgttctctttcatttgcagatttaataaacaaacgtaaccata

SEQ ID NO: 45161 - DNA, 1223 bp, Homo Sapiens
atggcgtctgcggcagcagcggaggccgagaagggatctccagttgtggtgggcctgctagttgtgggcaatatcattattctgctgtcaggcctgtccctgtttgctgagaccatatgggtgacagccgaccagtaccgtgtatacccactgatgggagtctcaggcaaggatgacgtcttcgctggtgcctggattgccatcttctgcggcttctccttcttcatggtagccagttttggtgtgggtgccgcactctgccgccgccggtccatggtcctcacgtacctggtgctcatgctcatcgtctacatcttcgagtgcgcctcctgcatcacgtcctacacccaccgtgactacatggtgtccaacccatccctgatcaccaagcagatgctgaccttctacagcgcggacaccgaccagggccaggagctgacccgcctctgggaccgcgtcatgattgagcaagaatgctgtggcacatctggtcccatggactgggtgaacttcacgtcagccttccgggcggccactccggaggtggtgttcccctggcccccactgtgctgtcgccggacgggaaacttcatccccctcaacgaggagggctgccgcctggggcacatggactacctgttcaccaagggctgcttcgaacacatcggccacgccatcgacagctacacgtggggtatctcgtggtttgggtttgccatcctgatgtggacgctcccggtcatgctgatagccatgtatttctacaccatgctctgagggacaggaggggaaggcaacatacacaccccggactcctccgcatcctcctcctgcttcctccgctgggcctggatggctgcctcacctctcacctcccaacgtccctagcccttacgtccttccacttccaagatctttttccaggttcctgagccctactgtgtctcaggtgtgccctgaaaccccagggcttgtgtgcacatatccttagcccatctttcaagggacctctccatgatcccacctcccattcacagatacctctcttgtagctctctgacctcctccttcatggcaggcatcgccattcttgctgaaccgtttgtgattgccatttgagctctggaagcctctattgccatgagagttctgtcacggtcactttactgtccccatcatcacccagcacggggctaagcatatactagatagtcaataaataa

SEQ ID NO: 45162 - DNA, 1278 bp, Homo Sapiens
atcgtgtacttcactgctacattcccctacgtggtcctggtcgtgctgcttgtgcttggagtgctgctgcctggcgccctggacagcatcatttactatctcaagcctgactggtcaaagctggggtcccctcaggtatggatagatgtggggacccagattttcttttcttatgccattggcctgggggccctcacagccctgggcagctacaaccgcttcaacaacaactgctacaaggacgccatcatcctggctgtcatcaacagtgggaccagcttctttgctggcttcgtggtcttctccatcctgggcttcatggctgcagagcagggcatgcacatctccaaggtggcagagtcagggccgggcctggccttcatcgcctacccacaggctgtcacactgatgccagtggccccactctgggctgccctgttcttcttcatgctgttgctgcttgcctggccacagtttgtaggtgtggagggcttcatcaccggcctcctcaacctcctcccagcctcctactacttctgtttccaaagggagatctctgtggccctctgttgtgccctccgctttgtcattgatctctccatggtgactgatggtgggatgtatgtcttccagctgtttgactactactcagccagcggcaccaccctgctctggcaggccttttgggagtgcgtggtggtggcctgggtgtatggagctgaccgcttcacggacgacattgcctgtatgatcgggtaccgaccttgcccctggatgaaatggtgctggtccttcttcaccccgctggtttgcatgggcatcttcatcttcaacgttgtgtactacgagccgctggtctacaacaacaccaacgtgtacccgtggtggggtgaggccatgggctgggccttcgtgctgtcctccatgctgtgcatgccactgcacctcctgggctgcctcctcagggccaagggcaccatggctgagtgctggaagcacctgacccagcccatctggggcctccaccacttggagtaccgagctcaggatgcagatgtcaggggcctgaccaccctgaccccagtgtccgagagcagcaaggtcgtcgtggtggagagtgtcatgggacagctcagctcacatcaccagctcacctctggtagccatagcagcccctgcttcatccccaccccacccctccagggggcctgcctttccctgacgcttttggggtctgcctgggagaggaggggagaaagcaccatgagtgctcactaa

SEQ ID NO: 45163 - DNA, 369 bp, Homo Sapiens
tcagcccctggggtagatcccagccccccgcgtaggtcccttggctgcaaaaggaagagggagtgtttggatgaatctgatgatgagccagagaaggagctcgcccctgagcctgaggagacctgggtggcggagacgctgtgtggcctcaagatgaaggcgaagcgacggcgagtgtcgctcgtgctccctgagtactacgaggccttcaacaggctgcttgaggatcctgtcattaaaagattcctggcctgggacaaagatctgagggtgtcagacaagtatctcctggctatggtcatagcgtatcagccgggccggcctcccctcctggcaataccaacgcattcatttcttcctggctctgtg

SEQ ID NO: 45164 - DNA, 2610 bp, Homo Sapiens
atgaagattattttcccgattctaagtaatccagtcttcaggcgcaccgttaaactcctgctctgtttactgtggattggatattctcaaggaaccacacatgtattaagatttggtggtatttttgaatatgtggaatctggcccaatgggagctgaggaacttgcattcagatttgctgtgaacacaattaacagaaacagaacattgctacccaatactacccttacctatgatacccagaagataaacctttatgatagttttgaagcatccaagaaagcctgtgatcagctgtctcttggggtggctgccatcttcgggccttcacacagctcatcagcaaacgcagtgcagtccatctgcaatgctctgggagttccccacatacagacccgctggaagcaccaggtgtcagacaacaaagattccttctatgtcagtctctacccagacttctcttcactcagccgtgccattttagacctggtgcagtttttcaagtggaaaaccgtcacggttgtgtatgatgacagcactggtctcattcgtttgcaagagctcatcaaagctccatcaaggtataatcttcgactcaaaattcgtcagttacctgctgatacaaaggatgcaaaacccttactaaaagaaatgaaaagaggcaaggagtttcatgtaatctttgattgtagccatgaaatggcagcaggcattttaaaacaggcattagctatgggaatgatgacagaatactatcattatatctttaccactctggacctctttgctcttgatgttgagccctaccgatacagtggtgttaacatgacagggttcagaatattaaatacagaaaatacccaagtctcctccatcattgaaaagtggtcgatggaacgattgcaggcacctccgaaacccgattcaggtttgctggatggatttatgacgactgatgctgctctaatgtatgatgctgtgcatgtggtgtctgtggccgttcaacagtttccccagatgacagtcagttccttgcagtgtaatcgacataaaccctggcgcttcgggacccgctttatgagtctaattaaagaggcacattgggaaggcctcacaggcagaataactttcaacaaaaccaatggcttgagaacagattttgatttggatgtgatcagtctgaaggaagaaggtctagaaaagattggaacgtgggatccagccagtggcctgaatatgacagaaagtcaaaagggaaagccagcgaacatcacagattccttatccaatcgttctttgattgttaccaccattttggaagagccttatgtcctttttaagaagtctgacaaacctctctatggtaatgatcgatttgaaggctattgcattgatctcctcagagagttatctacaatccttggctttacatatgaaattagacttgtggaagatgggaaatatggagcccaggatgatgccaatggacaatggaatggaatggttcgtgaactaattgatcataaagctgaccttgcagttgctccactggctattacctatgttcgagagaaggtcatcgacttttccaagccctttatgacacttggaataagtattttgtaccgcaagcccaatggtacaaacccaggcgtcttctccttcctgaatcctctctcccctgatatctggatgtatattctgctggcttacttgggtgtcagttgtgtgctctttgtcatagccaggtttagtccttatgagtggtataatccacacccttgcaaccctgactcagacgtggtggaaaacaattttaccttgctaaatagtttctggtttggagttggagctctcatgcagcaaggttctgagctcatgcccaaagcactgtccaccaggatagtgggaggcatttggtggtttttcacacttatcatcatttcttcgtatactgctaacttagccgcctttctgacagtggaacgcatggaatcccctattgactctgctgatgatttagctaaacaaaccaagatagaatatggagcagtagaggatggtgcaaccatgacttttttcaagaaatcaaaaatctccacgtatgacaaaatgtgggcctttatgagtagcagaaggcagtcagtgctggtcaaaagtaatgaagaaggaatccagcgagtcctcacctctgattatgctttcctaatggagtcaacaaccatcgagtttgttacccagcggaactgtaacctgacacagattggcggccttatagactctaaaggttatggcgttggcactcccatgggttctccatatcgagacaaaattaccatagcaattcttcagctgcaagaggaaggcaaactgcatatgatgaaggagaaatggtggaggggcaatggttgcccagaagaggagagcaaagaggccagtgccctgggggttcagaatattggtggcatcttcattgttctggcagccggcttggtgctttcagtttttgtggcagtgggagaatttttatacaaatccaaaaaaaacgctcaattggaaaaggaatcttctatttggttagtgccaccataccatccagacactgtttag

SEQ ID NO: 45165 - DNA, 1509 bp, Homo Sapiens
atggcaattcatctggataagcaaaacattattttaaagaatgataaggatgaatatcttaagaagactagagatggtgttttgcctccctaccaggatgctaaaccaccctctcctgcttcaattaaaaagacatacaccactagcaaattcaatgatgctgaacctgcaaagggaaacttatttattggagtggaagtactgcctgaaaatttgcacttggatgaaagtgaaacatcagaggaagatcatgggtctctggaaaaggaaaaatatgaacaattcctttctcttgaggaaggaacaaaggcacactacttttttgagaaggttgtaaatgcagcacagacctggttcagtctctttggctggcctgaaggaccccattctttttctattccagagactataagaagggatgtatataaaatgcaattctactcatcaacctcgccaccccaaaagttttccagacagaatgacttttccaaatataataagaccatttatgatgtgctgctccatttgagtggaaaaatgccacctggaattaattcaagtcaatctttacctgtagataaccatgaaaaaagggtaattcaactccatttgcaacattcctcacttctggactttctcaatgctcaaggaggatgtatttcacatgtcctgccagaatttttgcttgaaccagaagattataagaggtggattgaaattatgtcttccactaatacgatgcctgtgagttcctgtacacctaagaaaaaatgttctattgttatagaaatgtctaaatttgaagcctggagtaaacgggcatggacagatgtatttctacagatatacaaggttttggttctatcccgtgtagtgccatactgcagcaataatatgccccccatatgtgtgcaaaatacaccaaaagtcaatccttgttttgcatccagcaacatatattctgattctgaaagaattttgcttagttggatgaacataaattatgagaatactcgacatgtgatatggaaaaactgtcacaaagatgttatcccttctgagagatggatagtaaattttgacaaagacctttcagatggtcttgtttttgcaacacagttgggagcctattgcccattcttgattgagtctcattttataaatatgtacacacgaccaaaaagtcctgaagagtatctgcacaattgcctgattattgtaaatactctttatgaaattgactttgacgtggaaatacaggtgtgtctgagggtgtttccaaaggagatggatgcaggagtcagtggcctgagaaaggaagatatgccctcagtgtgggttgttaccatccgattggctgtggcagtggccagaacaaagagacagaagaagggggatattcagtttgcttgtttttttgtttgtttgttcttttttatttttgtcgtgatctctttctccctttggagcaggatgcatttttttctccttctgcccttggacatctga

SEQ ID NO: 45166 - DNA, 408 bp, Homo Sapiens
atggcggcggcaacagagacagggcaagcggcagtcccgagcagaaagcgccggaggggccgccgccccccagcttcggatccccagaccctggcgcggctcgctgcgggaccatggcttcctgggactcttacctgcccggagcggactggaggggacgcggctacacgttctgctcgaccgcccgttttgccgcctccgcctcgccctccccagcgccgctgccgccatcttgtgtcccgggccgggactccgcgctgcgcatgcgctggtaccgcctctgagggacctcgccgcggccgcgccgccatcttgagtgtggcagggtcggctggctcctcgcacccagcttgctttcggccccctccccttcttcccatccgtccctgctgttccttgtggcgctga

SEQ ID NO: 45167 - DNA, 225 bp, Homo Sapiens
atgctgccttgcctcgccctgcttctcctgatggagctgtccgtgtgcactgtggcaggtgatggtggagaggaacagacactcagcactgaagcagagacctgggtaattgtggccttggaggaaggcgctggccccagcattcagctccagctgcaggaggtgaagacgggcaaggcaagccagttctttgggctgatggggaagcgagtgggaggtgagtga

SEQ ID NO: 45168 - DNA, 1654 bp, Homo Sapiens
ccccccagtcctccctcccctcccctccagcatggtgctcgcggccccgctgctgctgggcttcctgctcctcgccctggagctgcggccccggggggaggcggccgagggccccgcggcggcggcggcggcggcggcggcggcggcagcggcgggggtcgggggggagcgctccagccggccagccccgtccgtggcgcccgagccggacggctgccccgtgtgcgtttggcggcagcacagccgcgagctgcgcctagagagcatcaagtcgcagatcttgagcaaactgcggctcaaggaggcgcccaacatcagccgcgaggtggtgaagcagctgctgcccaaggcgccgccgctgcagcagatcctggacctacacgacttccagggcgacgcgctgcagcccgaggacttcctggaggaggacgagtaccacgccaccaccgagaccgtcattagcatggcccaggagacggacccagcagtacagacagatggcagccctctctgctgccattttcacttcagccccaaggtgatgttcacaaaggtactgaaggcccagctgtgggtgtacctacggcctgtaccccgcccagccacagtctacctgcagatcttgcgactaaaacccctaactggggaagggaccgcagggggagggggcggaggccggcgtcacatccgtatccgctcactgaagattgagctgcactcacgctcaggccattggcagagcatcgacttcaagcaagtgctacacagctggttccgccagccacagagcaactggggcatcgagatcaacgcctttgatcccagtggcacagacctggctgtcacctccctggggccgggagccgaggggctgcatccattcatggagcttcgagtcctagagaacacaaaacgttcccggcggaacctgggtctggactgcgacgagcactcaagcgagtcccgctgctgccgatatcccctcacagtggactttgaggctttcggctgggactggatcatcgcacctaagcgctacaaggccaactactgctccggccagtgcgagtacatgttcatgcaaaaatatccgcatacccatttggtgcagcaggccaatccaagaggctctgctgggccctgttgtacccccaccaagatgtccccaatcaacatgctctacttcaatgacaagcagcagattatctacggcaagatccctggcatggtggtggatcgctgtggctgctcttaaggtgggggatagaggatgcctcccccacagaccctaccccaagacccctagccctgcccccatccccccaagccctagagctccctccactcttcccgcgaacatcacaccgttccccgaccaagccgtgtgcaatacaacagagggaggcaggtgggaattgagggtgaggggtttgggggaaaggggaagcaggggcatagtcagggtggggagtgtttgaagtttgcagatgagaaggtttgacaaaaagacagagagatgtagagacagtgatagagacagaggaacaaaaagagcagcagtgagaaggcaaagagagaggcagaagagacagacgaggcagagacaaaacactgagaaagagactgaaatggagtaataaatgaaagccccaca

SEQ ID NO: 45169 - DNA, 279 bp, Homo Sapiens
attcctctctttggtgctgacactattggccagagaagtcctgatggaccggtactgagcaaagctgaatttgttgagaaagttcgtcagagtaatcaggcctgtcatgatggagatttccacacagctattgttctgtataatgaagccctggctgttgaccctcagaactgcatcttatacagcaatagatctgcagcctacatgaaaatccagcagtatgacaaggcactggatgatgcaatcaaagctcgacttctcaatcccaagtggccaaag

SEQ ID NO: 45170 - DNA, 4255 bp, Homo Sapiens
ccgggctgtgagtctctcgccgccggaggaagatgaggctgaagattgggttcatcttacgcagtttgctggtggtgggaagcttcctggggctagtggtcctctggtcttccctgaccccgcggccggacgacccaagcccgctgagcaggatgagggaagacagagatgtcaatgaccccatgcccaaccgaggcggcaatggactagctcctggggaggacagattcaaacctgtggtaccatggcctcatgttgaaggagtagaagtggacttagagtctattagaagaataaacaaggccaaaaatgaacaagagcaccatgctggaggagattcccagaaagatatcatgcagaggcagtatctcacatttaagcctcagacattcacctaccatgatcctgtgcttcgcccagggatcctcggtaactttgaacccaaagaacctgagcctcctggagtggttggtggccctggagagaaagccaagccattggttttgggaccagaattcaaacaagcaattcaagccagcattaaagagtttggatttaacatggtggcaagtgacatgatctcactggaccgcagcgtcaatgacttacgccaagaagaatgcaagtattggcattatgatgaaaacttgctcacttcgagcgttgtcattgtcttccataatgaaggatggtcaaccctcatgagaacagtccacagtgtaattaaaaggactccaaggaaatatttagcagaaattgtgttaattgacgatttcagtaataaagaacacttaaaagaaaaactggatgaatatattaagctgtggaatggcctagtgaaggtatttcgaaatgaaagaagggaaggtttaattcaagcacgaagtattggtgctcagaaggctaaacttggacaggttttgatataccttgatgcccactgtgaggtggcagttaactggtatgcaccacttgtagctcccatatctaaggacagaaccatttgcactgtgccgcttatagatgtcataaatggcaacacatatgaaattataccccaagggggtggtgatgaagatgggtatgcccgaggagcatgggattggagtatgctctggaaacgggtgcctctgacccctcaagagaagagactgagaaagacaaaaactgaaccgtatcggtccccagccatggctgggggattatttgccattgaacgagagttcttctttgaattgggtctctatgatccaggtctccagatttggggtggtgaaaactttgagatctcatacaagatatggcagtgtggtggcaaattattatttgttccttgttctcgtgttggacatatctaccgtcttgagggctggcaaggaaatcctccgcccatttatgttgggtcttctccaactctgaagaattatgttagagttgtggaggtttggtgggatgaatataaagactacttctatgctagtcgtcctgaatcgcaggcattaccatatggggatatatcggagctgaaaaaatttcgagaagatcacaactgcaaaagttttaagtggttcatggaagaaatagcttatgatatcacctcacactaccctttgccacccaaaaatgttgactggggagaaatcagaggcttcgaaactgcttactgcattgatagcatgggaaaaacaaatggaggctttgttgaactaggaccctgccacaggatgggagggaatcagcttttcagaatcaatgaagcaaatcaactcatgcagtatgaccagtgtttgacaaagggagctgatggatcaaaagttatgattacacactgtaatctaaatgaatttaaggaatggcagtacttcaagaacctgcacagatttactcatattccttcaggaaagtgtttagatcgctcagaggtcctgcatcaagtattcatctccaattgtgactccagtaaaacgactcaaaaatgggaaatgaataacatccatagtgtttagagagaaaaaaataaaccaataacctacctactgacaagtaaatttatacaggactgaaaaccgcctgaaacctgctgcaactattgttattaactctgtatagctccaaacctggaacctcctgatcagtttgaaggacattgataaactgtgattttacaataacattatcatctgcagttactgtttacaagactgcttttaccttaaactttgtagatgtttacatctttttgttgtgttttaagatgatgttggtaatttgtgcctttagctctgttttattagacagagttaaagcatgttgtcttctttgggattacactcaggggtctgaaaggcagtttgatttttatttttaacacacttgaaaaaaggttggagtagccagactttcatatataacttggtgattatcaacctgttgtgtctttatttaattttacatctttttgaagcactgccacaggttattagccaaggtggccttccttcacagtcatgctgcttttttgaaaggtgaatttcaacacatttagtgcctctttcatttctcagtatatatttcaagagcttgtgatgaaatctataggatggtaatgatggacttgtcacctgtatggggaatacttttactactcagaaatgaatttatgtgctgccatttgctataaagttgaactttgtatggcttgaaaaagaaatgacaatatggaacatcccaaggctgtcccatagggttggaagttgtgtagcattcactcccttacctactggcattcccagtgccctctgtccatacctacttctaggattgcaaaggagtcttccaactagagaaaaattgtccactgacatttgggatttacttttctccaatacctgccaatacagaaaactattatcagttgttattgttatcccttgaaagcgagggtgacaaaaacaacaaaacaccgttataaacacatcaaaggttcattctgactgaggtaagactttccaagcccttgttagattaggccttataaaacttgtgtgcattataacctaagctgtgcaacctgtgaagccaagagtgaactgatgtttcatttatattttcatccaaatgacattatctgcacgtttttaaaatttaaaaacaaaggactatttaaaaatacagtttattaacaaacgtgaactactttctgttacattaggtgttccctagtgtttcttaatttctttttagaaagtgtatttttattagtatttttccggtgaacagaagatttgtttggatttaaacatttactaagacagtacctattaggaaaaccaaatattgcaaatggtcaattcgattttaatttctcaaaagatactctgttatccagaagattaaaatgcctacattgagtgcttaaaaaaaaaaaaacaactgtgatgatgtgagcagaatggcaagtaagttaagcatttttgatcctgtaatcatggtatcattacaatgaaaggaattcacaaactactgccagaggaagtttgttttttaatttaagagggaaatataacctataaatttgtttcttccaagcttagctcttaaatttggagactcaaagttaaacatcctcaacagagttttatttataattttgaattgtcaatttgtattttgctactgatctgtgatcaaccattttaactttcatctctagggatgtttaacatttataattgcaaaataaaccaactataaaaaaagaaactaagagagaattggtactttaattacttgtgtgtttgcaaataggctccattttccatgttgagtagattataaccttattaactatgcataggcctaagaaaggtggcaatgaactgtgcatgtaaattttaaatgggtactttgtgcaattcgttaaaagaagatactctatgaatatgattctatatattgaaatcagaaaacctaccaaacaaaaacatcagaagctgctgccataatgactattttctactgtaggctgctttggaaataattcccatatccttgctttgtaagttggtaatatcactatgcatttctacacattttataaatttgatttatgcagattttgatacactgtatgtttctgtagaaattgtataaatattcaaaattttattaggataaatttgagaaacttacgtatatcttaattctgggttgcttgttttttaggtgacaaaaataaaatattgtattttaattc

SEQ ID NO: 45171 - DNA, 465 bp, Homo Sapiens
atgtgctgtggctgttatttattttttgaacacgaagtagctctctgcctcactcatggccttcctatgtttgggaaagcatatggaaagcaaacctgttttcccatttgtgaagagggtttgagtttccacatggctgatccctgtgcttggggtacccagaacagggctccctgggggctggtggaggggccctacgctaactcagatatctgggaaaattctggttggggttcattctttcaacaaatatacattgagcacctactttgtgcaggtttctgcctgcagaaggcactccctggggattgtctgaattctagctggggagtcatgggtgcactagacatcataagcaggctgcgtccacagtatgttgacattgtgatgtcctcctggcctcttccagatacacatgcatcctgccatattctgacagagatgatggacctcaggatcaactaa

SEQ ID NO: 45172 - DNA, 399 bp, Homo Sapiens
atgtactccgttctccaactcctgaaatgcctctgcagttgctggagaaaagggcccgaaggtcgccgttttcaaacagaagctgccgtgtgtgcgcgcccggcatggtctcctcatcccgccggggccagtgaggctctgggggctttgcccccgccgcggcagctggtagagaagagacgtgtttcacctccccgacgtctggaccagtctggaagggatggaggcgctgtggccaagtgcagtctctctcggggtctctccccgcccgggtggacagggcgctccctcctccgcccctggggctcagcagcagtcctgggcagccgtgcggccctcgcctgcgtcctgcggccgtcccgcggtgtcatgccggcaacaatacaaagtcgtcgttga

SEQ ID NO: 45173 - DNA, 1493 bp, Homo Sapiens
ccagacctgttcacaagtgcccacaagaactgccccatgccccagggtgcggaccccttgaacccagatctgccctcgggccgcactcccaccgtggctccagactgtgtcattggcaaggacaaacagatggatttctgttgggatccttggcagaggtgcttccagaccaccaacggctacctgtccgactccagatcccgccccggcaactacaacgtggcagccctggccacctcgtcccttgtgggggtggtgcagagcatcaaggaccacatcacaaagcccacggccatggcccgaggccgcgtggcccacctcatcgagtggaagggctggagtgcccagccggcaggctgggagctgtccccagctgaggacgagcattactgctgcctcccggatgagctgcgtgaggcccgctttgctgcaggggtcgccgagcagtttgccatcacagaggccacactgagcgcttggtcctcgctggacgaagaggagctgcaccccgagaacagcccccaaggcatcgtccagctccaagatctggagagcatctaccttcaggacagccttcccagcggcccctcacaggatgacagccttcaggccttctcctcgcccagcccctcccctgacagctgtccctcacctgaggagccccccagcaccgctggcatcccgcagccccccagcccagagctgcagcatcggcggcggctgcccggggcccaaggacccgagggtgggacccaccccccgggctccctcccctccatggacagcggctccctctgggaggaggacgaggtgttctataactgaggtgggggctgtgctggtccagcacctgctctcaccatgacctcgcctggtgggcagcccaggcatatctggaccccggggtccagggcagggcatcccttgacccctcgggtaggcacagggtaggtgcggcagggatggggccagtgctcatggtggcctctctgtgcctcggtggacctgccccagcagtgggagccataaccccctcccccttcattacttcactcaggtgggcaccttcccctgcagggtgtctgccctcagggaactcacggactctcagagacaccagggcagcctggcccagaggagcaacagccaggcccccaggaggacagccatggagagaactgagacccacttacagtggggtctgggaaccctgcctgtacctggggttcagtccctcccaactccctccttgtgtctgccccccagcaaaggtggggtgaccacttctggtagctaagcacctgctccccggctctcttcacccaggacatctgtctctctggagtgtctgtctgtctgtccctccctctctgaacctgcttcctccgtgtcccctgctcctcacccctgggagcccactccccctccttgcggctccctcccatctcactcaaggttctctgaggacattaaagtggtggattcaccctgga

SEQ ID NO: 45174 - DNA, 443 bp, Homo Sapiens
tgcatctcttacattcaggaaaattaggtggatttacgcaagaaaataacaccatagattccggagaacttgatattggccgaagagcaattcaagagattcctcccgggatcttctggagatcacagctcttcattgatcagccacagtttcttaaattcaatatctctcttcagaaggatgcattgattggagtatatggccggaaaggcttaccgccttcccatactcagtatgacttcgtggagctcctggatggcagcaggctgattgccagagagcagcggagcctgcttgagacggagagagccgggcggcaggcgagatccgtcagccttcatgaggccggctttatccagtacttggattctggaatctggcatctggctttttataatgatgggaaaaatgcagagcaggtgtcttttaataccattgttata

SEQ ID NO: 45175 - DNA, 2903 bp, Homo Sapiens
atggctgtgcagcgcgccgcgtctccgcgccgcccgcccgccccgctctggccccggctcctgctgccgctgctgttgctgctgctgcccgcgccgagcgagggtcttggccactctgctgaactggcatttgctgtggagccaagtgatgatgttgccgtccccgggcagcctatagtgctggactgcagggtggaggggacccctccagtgcgaatcacctggaggaagaatggggtagagctgccagagagtacccactccaccttgctggccaatgggtccttgatgatccgtcacttcaggctggagccgggaggcagcccttcggatgaaggtgactatgagtgtgtggcccagaaccgctttgggctggtggtcagccggaaggctcgcatccaagctgcaaccatgtcggacttccacgtgcatccccaggccaccgtgggtgaggagggtggtgtggcccgcttccagtgccaaatccatgggcttcccaaacccctgatcacttgggagaagaacagagtcccaattgacacggacaatgagaggtacacattgctgcccaagggggtcctgcagatcacaggacttcgagctgaggacggtggcatcttccactgtgtggcctcaaacatcgccagtatccggatcagccacggggccaggctcactgtgtcaggctcgggctctggggcctacaaggagccagccatcctcgtggggcctgagaacctcaccctgacagtgcaccagaccgcggtgcttgagtgtgtcgccacgggcaacccgcgccccattgtgtcctggagccgcctggatggtcgccctatcggggtggagggcatccaggtgctgggcacaggaaacctcatcatctcagacgtgacggtccagcactctggcgtctacgtctgtgcagccaacagacctggcacccgggtgaggagaacggcacagggccggctggtggtgcaagccccagctgagtttgtgcagcatccccagtccatctccaggccagctgggaccacagccatgttcacctgccaagcccagggtgagccaccgcctcatgtcacgtggctgaaaaatggacaggtgctggggccaggaggccacgtcaggctcaagaataacaacagcacactgaccatttctggaatcggtcctgaggatgaagccatttatcagtgtgtggccgagaacagtgcgggctcatcacaggccagtgccaggctgaccgtactgtgggctgaggggctccccgggcctccccgcaatgtgcgggcagtctctgtgtcttccactgaggtgcgtgtgtcctggagtgagccgctggccaacaccaaggagatcatcggctacgtcctgcacatcaggaaggctgctgacccaccggagctggagtatcaggaggcagtcagcaagagcacctttcagcacctggtcagcgacctggagccctccacagcctacagtttctacatcaaggcctacacaccaaggggggccagctcagcctctgtgcccaccctagctagcaccctgggtgaagcccctgccccacccccactgtcagtgcgagtcctgggcagctcctccttgcagctgctgtgggagccttggccccggctggcccagcacgagggcggcttcaagctgttttaccgcccagcaagcaagacctccttcaccggccccatcctgctgcctggaaccgtctcctcctacaacctcagccagctcgaccccactgcagtgtatgaggtgaagctgctcgcctacaaccagcatggagatggcaatgccacagtccgctttgtgtctttgaggggagcatctgagaggacagccttgagcccaccatgtgactgccggaaggaggaggccgccaaccagacgtccaccacaggcatcgtcatcggcatccacatcggggtcacttgcatcatcttctgtgtcctcttcctcctgttcggccaaaggggcagggtcctcctgtgtaaagatgtggaaaaccagctgtcccctccacagggtccccggagccagagggaccctggcattctagccctaaatggggcgagacggggacagcggggccagctgggccgagacgagaaacgtgtggatatgaaggagctggagcagctgttccccccggccagcgcagcagggcagccggaccccagacccacacaggatcctgcagcccccgctccgtgtgaggagacccagctctccgtgctgccacttcaggggtgcggcctgatggaggggaagacgacggaggcgaagaccacagaggccacggctccctgcgccggcctggcggctgccccaccacccccagatggaggccctggcctcctcagtgaaggccaggcttccaggcctgcagcggcccgggttacccagccagctcactcggaacagtagccagtgtctggcaggctccagagggtggacggagcggggcccattctcaggtcaaaagcaagatttctactgtcatgtgggatttggatggtcctgggggctccccagcatttctatcctgactgcctcttgggttgtcaaaacccaaggcagccttgacagggaccccccggccctaacacccatcaggagttggagcagttcctgcaggagcctgttccttccctgggctgacgcccccttgcctctgcctggtacccacatgacttggaactgaactaacatttttctttaaaaagcaaaacttaaaaaaaaaaaaaaagaggagagagatagaggaaggtgaattagactccaaaagatgaccctgctgtagctgggccctgacactgtcaccctccaccgactttgttttctcaggatggatttttgctgttttggctctcagcacctacctc

SEQ ID NO: 45176 - DNA, 1831 bp, Homo Sapiens
ctatgatgaaagcagccatcagtgagacggaagatatgccaatgtttgagcctaaaatgacacgctctaaactgaaggaagtagtggaaaaaggagtggtaattccaacatggaatatttcaccaattaagaaggccaatgaaattaagcctcctcagtttgtggatatccaccttgaagaagatgattcctcagatgaagaataccagccggatgatgaagaagaagatgaaactgctgaagagagcttattggaaagtgatgttgaaagcactgcttcatctccacgtggggcaaagaaatccagattgaggcagtcttctgagatgactgaaacagatgaggagagtggcatattatcagaggctgagaaagtcaccacaccagccatcaggcacatcagtgctgaggtagtgcccatggggcccccgccccctccaaagccgaaacagaccagagatagtactttcatggagaagttacatgcggtagatgaggagctggcttccagtccagtctgcatggattctttccagcccatggatgacagtctcattgcatttcgaacgcgttctaagatgcccctgaaagatgttcccctgggccaattagaggcagagctccaagctccagacatcactccagatatgtatgaccccaatacggcagatgatgaggactggaagatgtggctggggggacttatgaatgatgatgtggggaatgaagatgaagcagatgatgatgatgatccagaatataatttcctggaagacctcgatgaaccagacacagaggatttccggactgaccgggcagtgagaatcaccaaaaaggaagtaaatgagctgatggaagagctgtttgaaactgtgagtaatgatcctcgagtgagaacacgggattttaagtcagttctccagcaagatgtgtcatttggtctctgtgatgctccctctaggagagggggtctgactgaaccaattctccttttagtctacctgggaaagaatataatgacaagggaattttgctaactactagactcttgattatatacatgtatgttgttcttattaacattttccttgaaacttctttttgtttgagggggttcttgctccatcacccaagccagagtgcagtggtgaaattacagctcacagcagccttgaccttctaggctcaagcagtccttcgtctaagcctcctgagtagctgggacataccaacacacccagctaattattttatttgtagagacagggtcttaccacattgctcaggttgttctggaacttctgggctcaagcaattttcctgccttgggcctcccagtgctggaattataggtgtgagccagcatgcctggcccctggaaaacttttgatgacttcccctactgtcatttggtgtgtccttaaagattgtcaactagttttaaactactttgtgtacaaataattacctttttcataaatttgtttcaaaagatttttcattttaagagattgatcattttgaggctgggtgcagtggctcacgcttgtaatcccagcactttgggaggccacggcaggtggatcatctgaggtcaggagtttgagaccagcctggccaacatgatgaaaccctgtctctattaaaaatacaaaaattaggcatggtggcgggcacctgtagtcacggttactgcagaggctgaggcaggaaaattgcttgaacctgggaggcggaggttgcagtaagcccagattgtgccactgcactccagcctgggcaatagagcaagactgcaagactctgtctcaaaaaaaaaaaaaaaaaaaaa

SEQ ID NO: 45177 - DNA, 1131 bp, Homo Sapiens
ctcaccatggatgatgatactgccgtgctcgtcattgacaacggctctggcatgtgcaaggccggctttgcaggtgacgatgccccccgggctgtcttcccttccatcgtggggtgccccaggcaccagaacatgatggggggcatgcgtcagatggagtcctatgtgggcaatgaggcccagagcaagagaggcatcctgaccctgaagtaccccatggagcacggcatcatcaccaactgggacgacatggagaagatctggcaccacaccttctacaatgagctgcgtgtggctcccgaggagcaccccatcctgctgaccgaggcacccctgaaccccaaggccaaccgtgagaagatgacccagatcatgtttgagaccttcaacaccccagccatgtacgtggccatccaagccgtgctgtccttgtacacctctggccgtactactggcattgtgatggactctggtgacggggtcacccacactgtgcccatctatgaggggaatgccctcccccatgccaccctgcgcctagacctggatggccgggaactgactgactacctcatgaagatcctcaccgagcgtggctataggttcaccaccatggccgagcaggaaatcgtgcgtgacatcacagagaagctgtgctatgttgccctggacttcgagcaggagatggccacagcggcctccagctcctccctagagaacagctatgagctgcccaacggccaggtcatcaccattagcaacgagcggttccgctgccccgaggtgctcttccagccttgcttcctgggcatggaatcctgtggcatccacgaaactaccttcaactctatcatgaagtctgatgtggacatccacaaagacctgtacaccaacacagtgctatctggtggcaccaccatgtaccctggcattgcccacaggatgcagaaggagatcgctgccctagcgcctagcacgatgaagatcaagattgttgctcctcccaagcgcaagtactccgtgtgggtcggtggctccatcctggcctcgctgtccaccttccagcagatgtggatcagcaagcaggagtatgagtcaggcccctccattgtccaccgcaaatgcttctag

SEQ ID NO: 45178 - DNA, 645 bp, Homo Sapiens
atggaagataaaaagccctttatcctgtcttccatgaggcttcctctcctggacaccaacagcaaggtgaagcgggcagtggtgcaggtgattagcgccatggcccaccacggctacctggagcagcctggaggtgaggcgatgatcgagtacatcgtgcagcagtgcgcgctgccccccgagcaggaggtaaggggctgccaccttgcctgcctcctaggcccacgctgcccctggcctgtgttaggcactggcatcaggagccactggcccagcagagggtggatatgtgggctgcagtctgcgtgcggaggtgccctctgctgtcttttgtttaatagagacagggtcttgcttctgtggcccaggctggagtgcagtgcaggttgtgggcatgaccagtgctccctgctcagacccggctcccacgctgcctcttttcaggttgtgtcttccagcccctacctaggggacggacgtggggcagcggcgctgcgcctcctcagtgttctgcacccaaacattcaccctttgctgggtcagcattgggaaacgactgtcccgctgctgctggggtacctggatggtgaggccagggtcaggatggggtgcatagccctgtggggagggcaggtctcagagtag

SEQ ID NO: 45179 - DNA, 1170 bp, Homo Sapiens
atgctggaggagccccggccgcggcctccgccctcgggcctcgcgggtctcctgttcctggcgttgtgcagtcgggctctaagcaatgagattctgggcctgaagttgcctggcgagccgccgctgacggccaacaccgtgtgcttgacgctgtccggcctgagcaagcggcagctaggcctgtgcctgcgcaaccccgacgtgacggcgtccgcgcttcagggtctgcacatcgcggtccacgagtgtcagcaccagctgcgcgaccagcgctggaactgctccgcgcttgagggcggcggccgcctgccgcaccacagcgccatcctcaagcgcggtttccgagaaagtgctttttccttctccatgctggctgctggggtcatgcacgcagtagccacggcctgcagcctgggcaagctggtgagctgtggctgtggctggaagggcagtggtgagcaggatcggctgagggccaaactgctgcagctgcaggcactgtcccgaggcaagagtttcccccactctctgcccagccctggccctggctcaagccccagccctggcccccaggacacatgggaatggggtggctgtaaccatgacatggactttggagagaagttctctcgggatttcttggattccagggaagctccccgggacatccaggcacgaatgcgaatccacaacaacagggtggggcgccaggtggtaactgaaaacctgaagcggaaatgcaagtgtcatggcacatcaggcagctgccagttcaagacatgctggagggcggccccagagttccgggcagtgggggcggcgttgagggagcggctgggccgggccatcttcattgatacccacaaccgcaattctggagccttccagccccgtctgcgtccccgtcgcctctcaggagagctggtctactttgagaagtctcctgacttctgtgagcgagaccccactatgggctccccagggacaaggggccgggcctgcaacaagaccagccgcctgttggatggctgtggcagcctgtgctgtggccgtgggcacaacgtgctccggcagacacgagttgagcgctgccattgccgcttccactggtgctgctatgtgctgtgtgatgagtgcaaggttacagagtgggtgaatgtgtgtaagtga

SEQ ID NO: 45180 - DNA, 987 bp, Homo Sapiens
acagcgccgggcggcggcggggagatgcggctgctggcactggcggcggccgcgctgctggcgcgggctccggctccggaggtctgtgcggccctcaatgtcactgtgtccccggggcccgtggttgactacctggagggggagaatgccactctcctctgccacgtctcccagaaaaggcggaaggacagcttgctggccgtgcgctggttctttgcacactccttcgactcccaggaggccttgatggtgaagatgaccaagctccgggtggtgcagtactatgggaatttcagccgcagcgccaaacggcggaggctgcgcctgctggaggagcagcggggggcgctctacaggctctccgtcttgacactgcagccctccgatcaagggcattacgtctgcagagtccaggaaatcagcaggcacaggaacaagtggacggcctggtccaatggctcctcagccacggaaatgagagtcatttccctcaaagcttctgaagagtcatcctttgagaaaacaaaagagacttgggcattttttgaagatctctatgtgtatgctgtcctcgtgtgctgcgtggggatcctcagcattctgctcttcatgctggtcatcgtctggcagtctgtgtttaacaagcggaaatccagagtgagacattatttggtgaaatgccctcagaacagctcaggggagactgtcactagcgtgaccagcttggccccactacagcccaagaagggcaagaggcagaaggagaagcctgacattcctcccgcagtccctgccaaagctccgatagcccccacgttccataaaccgaagctgctgaaaccacagagaaaagtcacgctgccaaagattgctgaggaaaacttaacctatgccgaactggagctgatcaaaccccaccgggctgccaaaggcgcccccaccagcactgtctacgcccagatcctcttcgaggagaacaagctgtag

SEQ ID NO: 45181 - DNA, 1615 bp, Homo Sapiens
gtatgggctgctgcagaggcggctggagaacatggagaacctgctgaaaaacagaaatttctggatcctgcggctgccccccggcagcaatggagaagttcccaaggtccctgtcacatttgatgatgttgctgtgcacttctcggagcaggagtggggaaacctgtctgagtggcagaaggagctctacaagaacgtgatgaggggcaactacgagtccctggtttccatggactatgcaatttccaaaccagacctcatgtcacagatggagcgcggggagcggcccaccatgcaggagcaggaagactctgaggagggcgaaacgccgacagatcccagtgctgcgcacgatgggatcgtgattaagatcgaggtacagaccaacgacgagggctcagaaagtttggagacacctgagcccctgatgggacaggtggaagagcacggcttccaggactcagagctgggtgacccctgtggggaacagccagacctggacatgcaggagccagagaacacgctggaggagtccacggaaggctccagcgagttcagcgaactgaagcagatgctggtgcagcagaggaactgcacggaggggatcgtgatcaagacagaggaacaagacgaggaggaagaagaggaggaggaggatgagctgccgcagcacttgcaatcccttgggcagctgtccgggagatatgaggccagtatgtaccagaccccgctgcccggggagatgtcccccgagggcgaggagagccccccgcccctgcagctaggaaaccccgcagtgaaaaggctggcgccctccgtgcacggtgagcggcacctgagcgagaaccgcggggcctcgagccagcagcagcggaaccggcgcggcgagcggcccttcacatgcatggagtgcggcaagagcttccgcctgaagatcaacctcatcatccaccagcgcaaccacatcaaggaggggccctacgagtgcgccgaatgcgagatcagcttccggcacaagcaacagctcacgctgcaccagcgcatccaccgcgtgcgcggaggctgcgtctcacccgaacgcgggcccacgttcaaccccaagcacgcgctcaagccgcgtcccaagtcacccagctctggtagcggcggcggtggccctaagccctacaagtgccccgagtgcgacagcagcttcagccacaagtccagcctgaccaaacaccagatcacgcacacgggtgagcggccctacacgtgccccgacgcgcgccccgccgccgccgcccggccaggtgcgcgggccgtgccccccctcggacaccgccaggcccgagcccagcgggggcggggcgccccccagcccctttgccgtgagctccccctctcctctcgtccctcctcccaaggacatgggggcagtgagaccaggtcccttgctgccgcgtttccccgggggccccaggggggagggcgcggacctggggaaccctttcgggctgttaatttccttgacaataaaatggatgaaaccaatcagcacggggggcgtgatttggccgccggccactcagaggggcggtgtagggcccatctagttggggatagaactttataa

SEQ ID NO: 45182 - DNA, 924 bp, Homo Sapiens
ataggcctggttggtttacacaacattggacagacctgctgccttaactccttgattcaggtgtttgtaatgaatgtggacttcgccaggatattgaagaggatcacggtgcccaggggagctgacgagcagaggagaagcgtccctttccagatgcttctgctgctggagaagatgcaggacagccggcagaaagcagtgtggcccctggagctggcctactgcctgcagaagtacaacgtgcccctgtttgtccaacatgatgctgcccaactgtacctcaaactctggaacctgattaaggaccagatcgctgatgtgcacttggtggagagactgcaggccctgtatatgatccggatgaaggactccttgatttgccttgactgtgccatggagagtagcagaaacagcagcatgctcaccctccgactttctttttttgatgtggactcaaagcccctgaagacactggaggacgccctgcactgcttcttccagcccagggagttatcaagcaaaagcaaatgcttctgtgagaactgtgggaagaagacccgtgggaaacaggtcttgaagctgacccatttgccccagaccctgacaatccacctcatgcgattctccatcaggaattcacagacgagaaagatctgccactccctgtacttcccccagagcttggatttcagccagatccttccaatgaagcgagagtcttgtgatgctgaggagcagtctggagggcagtatgagctttttgctgtgattgcgcacgtgggaatggcagactccggtcattactgtgtctacatccggaatgctgtggatggaaaatggttctgcttcaatgactccaatatttgcttggtgtcctgggaagacatccagtgtacctacggaaatcctaactaccactggtaa

SEQ ID NO: 45183 - DNA, 2434 bp, Homo Sapiens
tcggactctgagcaggtgcctccttgctgccccagccaggaaaccagaacagctgttggcagtaaccctgaccctccccatttcccccgcttgggcagcgaaccgaagagctccccagctggactcattgcagcagccgacggcagctgtgccggtggtgagccttctccatggcaggacagtaaaccccgtgagcatccaggactggggcaactagaacctccccactgtcactacgtggctcccttgcaaggcagcagtgacatgaaccagagctgggtcttcacccgtgtgataggggtcagcagagaagaggctggggctctcgaggctgcctccgatgttgacctgaccctgcatcagcaggagggcgcccccaactcctcctataccttctcatccatagcccgcgtccgaatggaggagcatttcatacagaaggcggagggggttgagccccggctcaagggcaaggtgtacgactactatgtggaatctacctctcaggccatcttccagggcaggctggctcccaggacagcagccctgactgaggttccatcccctaggccaccgccagggtccctgggaacaggggctgcctcgggaggccaagccggtgacacaaagggtgcagccgaaagagccgcctccccgcagacagggccgtggccctccacccgaggcttcagccggaaggagagccttctgcagatagcggagaacccagagctgcagctgcagccagatggcttccggctccccgctccaccctgcccagacccgggcgccctgcctggcttaggcagaagcagccgggagccccatgtgcagccggtggccgggaccaatttcttccatatcccgctcacccctgcttcagccccacaggtccgcctggatctgggcaattgctatgaggtgctgaccttggccaagaggcagaacctggaggccctgaaagaggcggcctacaaggtgatgagcgaaaactacctgcaggtgctgcgcagcccggacatctacgggtgcctgagcggggcagagcgcgagctgatcctgcagcgccggctccggggccgccagtacctggtggtggctgacgtgtgccccaaggaagactccggcggcctctgttgctatgacgatgagcaggatgtctggcgcccgctggctcgcatgccccccgaggccgtgtcccggggctgtgccatctgcagtctcttcaattatctcttcgtggtgtccggctgccaggggcccgggcaccagccctccagccgcgtcttctgctacaacccgctcacggggatctggagcgaggtgtgcccgctgaaccaggcccggccgcactgccggctggtggccctggacgggcacctgtatgccatcggcggagagtgtctgaactcggtggagcgttacgacccccgcctggaccgctgggactttgccccgccgctccccagtgacacgttcgccctggcgcacacggccacggtgcgtgccaaggaaatcttcgtcaccggcggctcgctgcgcttcctgctgttccgcttctctgcgcaggagcagcgctggtgggccggccccaccgggggcagcaaggaccgcacggccgagatggtggcggtcaacggctttctctaccgctttgacctcaaccgcagcctgggcatcgccgtgtaccgctgcagcgccagcacccggctctggtacgagtgcgccacgtaccggacgccttacccggatgccttccagtgcgccgtggtggacaacctcatctactgcgtgggacgccggagcaccctctgcttcctagcagactctgtctcacccaggtttgtgcccaaggagctgcggagtttcccggccccgcagggcaccctcctgcccaccgtcctgaccttgcccacccccgatttgcctcagaccagggtctagcagtccctcaactgagctcctcatgcaaagctgggggccaccgggctccactgccagccgtccctctgggggccatttctaggcaaacaggcaacccaggaatgtggccatcaagaggtgaattccggtcctttctcctcccctagctggggagagagggatcttagatgagtcttacccttcatgggctgcagaggccccactgcagaaaagaggaccaggagctggtgttccaaggcagaaggcattcatgtcttcagggatgaccgcccttgcttcaactctgaattcttggggggatacaccgggaccccaccaaagcttagggggcatagtctttttgcaatcacaattctaggagccagttgaccccagcagcccctcgctagttgctctggagaggggttggctctctgagccatcagtgccccttcctaaacatcagccactgggccccacctccacagttcccagaagcaccgggacacac

SEQ ID NO: 45184 - DNA, 642 bp, Homo Sapiens
ttcgcctcgcgcctgctggtgcacctgttccccgagctcttcacgcacgagaacctgcgcaagcagtacaactgcagcggctccctgggcaagaagcagctggacccctcccgcatcaagctcatccgccactacgtgcagctgctctacccacgcgccaaaaacgaccgcgtctggaccctggagttcgtgggcaaactggatgagcgctgccggcgccgggacacggagcaaaggcgctcctaccagcagcagcgcaaggacttttgcaagatccccttggacgagctggtggtcccctcgcctgacttcccggtgccttctccctacctgctgtctgacaaggaggtgcgtgagatcgtgcagcagagcctctccgtgggcaactttgccgcccggctcctcgtccgcctgtttcccgaactcttcaccgccgagaacctccggctgcagtacaaccattccggggcttgcaacaagaagcaactggaccccacgcggctgcggctcatccgccactacgtggaagccgtctacccggtggagaagatggaggaggtgtggcactacgaatgtatccccagcatcgatgagaggtgccgccgccccaacaggaaaaaatgcgacatcctcaagaaagca

SEQ ID NO: 45185 - DNA, 4654 bp, Homo Sapiens
gcagcgtagcgggctggcggtgacttacaccgggactccagagggagagaggaagcgctgcaggccacttgcattgcgtcttccaggctgcgtggacccggcgccccggcgtgtgcggttgtgggggagctcgccgtggcctcccctccctctggctttagcttcctttggggttggcgcaggtgggccaggcagcgcaccgcagatctccccgttcccacgaaggctggctcgctgtctctctccgagcgggagggaccatcctaaaaatatgtaaatatccaagcgctggctccaggctggggcagctgccaaggtccccgcgccgccgccgggtgttttacatgaaaatgagaagcctgatgggaaccgcgttctaacttaaggcagcctggtgattagcatgagactgggcggctgtcctgcttcctgcccttcaatagccgttccgcgcgctcgcgccggagcagcgctgccgccgcgcgggggtcgatcgcaggctcggcgtccttggcagccatggctccggcgccgcctcggccagtaagtaggagcatgcatgtgtagggggcacatgcgtgtcggcgcacccacccagccatccacccgcgcgcacgcacagcgcccggagcctcggcaaggggaagattgacgaggcgctgcagtcgcggggacgacgcgggctcttcctggattccgcaggagcccgcccgccgcagctgctgtctgcagagcctgctcggatcctgtgcacacgcgccccccgctcgagcctctgtgatgaagactgtctcccggggactgcagcggaggcagagccagccagcgccggggactgcgggccgtgcggctgataggcccgcggggacacgactcggacactgtcatccccacgcctcgcgctgagctgcccggcgcggagggtctgccgccgcccctccggcctcccgcacgcccgatcccgggtcagccccggaggcctcggctgcctcatttgtttgggtcttttgtgccgtggctcccagttggccaagcactcctgcgctgaatcgggccattgtctgcgctcccattgccttcacgctgcaagtctcggcgcccccaccccgcccgccccctccccgcctcctcccggccggggagcctcctaacgtgcctttccccccaggaatctggaagctataagccgggcggattgcaaatgaagtgtaatgcattgtgggacgtgtgtaaaatcggagccttcgccgtgggggtgtgggggggcgtggggagggccggacccgccgctggcggtgtagacgccgacgaggaggggctgggaaaatgtgcgcagagtccgcccgggtcgtgcccgccgtagacggatgaaggagcgcgctgcgccccggcgctgaggccccgaggatcggggcggcaggtcgccctccccaccatgaagaagacccggagcacaaccttgcggcgagcctggcctagctcggatttctcggaccgggcctcggaccgcatgaggtcccgcagcgagaaggactaccgcctgcacaagcgtttccccgcggccttcgcgccccaggcttcgcggggctacatgacatcaggtgatgtatcacccatcagtatgtctcccatcagtcagtctcagtttattccactcggggagatcctctgcttggccatctcagcaatgaactcggcaagaaagcctgtcacccaagaagcactgatggagcacctgaccacgtgcttcccaggtgttccaacgccaagccaagaaattctgcggcacacgctgaacacgctggtacgggagaggaagatctacccaactccagatggctacttcatcgtgaccccacagacttatttcataactccttccctcataagaactaacagtaaatggtaccatttggacgagaggatacctgaccggtctcagtgcacctctccgcaacccgggaccatcacgccctctgcctcaggctgtgtcagggaaaggacattgccccgaaaccactgcgactcttgccactgctgcagagaagacgtgcacagcacgcatgcacccaccctgcaaaggaagtctgccaaggactgcaaagacccttactgtcccccttctctgtgccaggtgccacccactgaaaagagcaaaagtactgtaaatttttcctataagacagaaactctctcaaaacctaaagatagtgaaaagcagtcaaaaaaattcgggctaaagttattccggttaagttttaaaaaagacaagaccaaacagctggccaatttttctgcccagtttcctcctgaagagtggcccctgcgagacgaggacacgccagctacgatccctcgggaagtagagatggaaatcattaggcgcattaacccagacctgaccgtggaaaatgtcatgcggcacaccgcgctcatgaagaaactggaagaagaaaaggcccagaggagtaaagccgggtcctctgcccatcacagcggaaggagtaaaaagagtaggactcatcggaagtcccatggaaagtctcggtctcacagcaagacacgggtgtctaaaggagacccttccgacggttcacatctggatatcccagctgaaagagagtatgacttttgtgatcctcttaccagggtgcccagggagggctgcttcatcattgaacacaaaggagataacttcatcatgcacagcaacacaaacgtgctcgagtcccacttccccatgacaccagaatgggatgtgtctggtgaattggctaaaaggagaactgagatgccttttcctgaaccttctaggggaagctcccactcaaaagtgcaccgaagccacagccatacacaggaccggaggtccaggaatgagagatccaacaaagccaaggagagatccaggtcgatggataactccaaaggccctctgggtgcttcttctctagggacgccggaagaccttgctgaaggctgcagccaagacgaccagacccccagccaatcctacattgacgacagtactttaaggcctgcacagaccgttagtctccaaagggctcacatttcgtccacaagctataaagaggtgtgtattccagagatagtcagtggcagcaaggaaccgtccagcgcttgcagccttttggagccaggaaaaccacccgagagtttgccatcctatggcgaactcaactcttgtccaacaaaaacagccacagatgactatttccagtgcaacacctctagtgagacggtgctcacggcaccatcacctctgggaaagaataaggaggaccatgacactctgactttggcagaaggggtgaaaaagctctccccttctgataggcaggtcccccactcctccagggagcctgtggggcacaaggaggagtcaccaaaagggccgggtgggggccccgctgcttcgggaggagtggctgaagggatcgccaacggacgcctcgtccagcaccatggtgccgagcccagcagcttggacaagaggaaagagatatttagcaaagacacactgttcaaacctcttcacagcaccttgtctgtaaacagctatcacaagtcgagcctgtccctcctcaaatctcacccgaagacacctgctgacacattgccaggccgatgtgagaaactggaaccgtccctggggacctcggcggcacaagccatgcctgcttcccagcgtcagcaggagtcaggagggaaccaggaagcctcttttgactattacaacgtctctgatgatgacgactctgaggaaggggcaaacaagaacacagaggaggagaaaaatagagaggacgtaggcaccatgcagtggctcctcgagcgggagaaggaaagagacttgcagaggaaatttgaaaagaacctcacccttcttgctccaaaagaaaccgacagcagcagcaaccagagagccacccattcagcccggctcgacagcatggacagcagcagcatcacagtggacagtggattcaactccccacgtactcgggagagcctggcttccaacacatcaagcattgttgaaagtaaccgtcgtcagaaccccgctttgagcccggcccatggtggagctggtccagccttcaacttccgagcgagcgcggagcccccgacaaatgaagctgagaagctacagaaaccttccaactgcttgcaagcttctgttactagcgtgtgattgtccttctgcctcagatcttctgtctcattcgatacagcaaagtttacgacactgggactgatgtttacatctttggaaagacaagcatctcaaccacagtttttgtgtttacttaaactgtgctgctaagtagggctagggcaaaaaaacaaaaaatctttatttcagagtattgcttttcacatttatggctctgtagcaactgagtaacagtaggggtgatatgtatacttttgcttcactaattgtatctgagcacacataggaaagtctagacactgtaagtgtaatacgcattttcaatgtcatgcagttgccaattccattttaaaatgccacagatgcgtgttgctcccagtctgtggttaaacggtgccacagaactgatccttgacacttccaaaaaaaaaaaaacaaaacaaaacaaaaaaaatt

SEQ ID NO: 45186 - DNA, 3435 bp, Homo Sapiens
atgccgaggaaccagggcttctccgagcccgaatactcggccgagtactcagccgagtactccgtcagcctgccctccgaccctgaccgcggggtgggccggacccatgaaatctcggtccggaactcgggctcctgcctgtgcctgcctcgcttcatgcggctgactttcgtgccggagtccttggagaacctctaccagacctacttcaaaaggcagcgccacgagaccctgctggtgctggtggtctttgcagccctctttgactgctacgtggtggtcatgtgtgctgtggtcttctccagcgacaagctggcttccctcgccgtggctggaattggactggtgttggacatcatcctcttcgtgctctgcaaaaaggggctgctcccggaccgggtcacccgcagagtgctgccctacgtgctgtggctgctcataaccgcccagatcttctcctacctgggcctgaacttcgcgcgtgcccacgcggctagtgacacggtgggctggcaggtcttctttgtcttctccttcttcatcacgctgcccctcagcctcagccccatcgtgatcatctccgtggtctcctgtgtggtgcacacgttggtcctgggggtcaccgtggcccagcagcagcaggaggagctcaaggggatgcagctgctgcgggagatcctggccaacgtcttcctctacctgtgcgccatcgctgtgggcatcatgtcctactacatggctgaccgcaagcaccgcaaggccttcctggaggcccgccagtcgctggaggtgaagatgaacctggaagagcagagccagcagcaggagaacctcatgctttccatcctgcccaagcacgtggctgacgagatgctgaaagacatgaagaaagacgagagccagaaggaccagcagcagttcaacaccatgtacatgtaccgtcacgagaacgtcagcatcctctttgccgacatcgtgggctttacccagctgtcttctgcctgcagtgcccaggagcttgtgaagctgctcaacgagctctttgcccgctttgacaagctggcagctaaataccaccagctgcggattaagatcctgggcgactgctactactgcatctgcggcttgcccgactaccgggaggaccacgccgtctgctccatcctcatggggctggccatggtggaggccatctcgtatgtgcgggagaagaccaagactggggtggacatgcgtgtgggggtgcacacgggcaccgtgctggggggcgtcctgggccagaagcgctggcagtacgacgtgtggtcgactgatgtcactgtagccaacaagatggaggccggcggcatccctgggcgcgtgcacatctcccagagcaccatggactgcctgaaaggggagtttgatgtggagccaggcgatgggggcagccgctgtgattacctagaagagaagggtattgaaacctacctcatcattgcctccaagccagaggtgaagaaaacagccacccagaatggcctcaatggctcggccctgcccaatggagcaccagcttcctcaaagtccagctcccctgccctcattgagaccaaggagcccaacgggagtgcccacagcagtgggtccacgtcggagaagcccgaggagcaggatgcccaggccgacaacccctcattccccaacccacgccggaggctgcgcctgcaggacctggctgaccgagtggtggatgcctctgaagatgagcacgagctcaaccagctgctcaacgaggccctgcttgagcgagagtccgcccaagtagtaaagaagagaaacaccttcctcttgtccatgcggttcatggaccccgagatggaaacccgctactcggtggagaaggagaagcagagtggggctgccttcagctgctcctgcgtcgtcctgctctgcacggccctggtcgagatactcatcgacccctggctaatgacaaactatgtgaccttcatggtgggggagattctgctcctcatcctgaccatctgctccctggctgccatctttccccgggcctttcctaagaagcttgtggccttctcaacttggattgaccggacccgctgggccaggaacacctgggccatgctcgccatcttcatcctggtgatggcaaatgtcgtggacatgctcagctgtctccagtactacacgggacccagcaatgcaacggcagggatggaaacggagggcagctgcctggagaaccccaagtattacaactatgtggccgtgctgtccctcatcgccaccatcatgctggtgcaggtcagccacatggtgaagctcacgctcatgctgctcgtcgcaggcgccgtggccaccatcaacctctatgcctggcgtcccgtctttgatgaatacgaccacaagcgttttcgggagcacgacttacctatggtggccttagagcagatgcaaggattcaaccctgggctcaatggcactgacaggctgcccctggtgccttccaagtactctatgacggtgatggtgttcctcatgatgctcagcttctactacttctcccgccacgtagaaaaactggcacggacacttttcttgtggaagattgaggtccacgaccagaaggaacgtgtctatgagatgcgacgctggaacgaggccttggtcaccaacatgttgcctgagcacgtggcacgccatttcctggggtccaagaagagagatgaggagctgtatagccagacgtatgatgagattggagtcatgtttgcctccctgcccaactttgctgacttctacacagaggagagcatcaacaatggtggtattgagtgtctgcgtttcctcaatgaaatcatctcagattttgactctctcctggacaatcccaagttccgggtgatcaccaagatcaaaaccattggcagcacgtatatggcggcttcaggagtcacccccgatgtcaacaccaatggctttgccagctccaacaaggaagacaagtccgagagagagcgctggcagcacctggctgacctggccgacttcgcgctggccatgaaggatacgctcaccaacatcaacaaccagtccttcaataacttcatgctgcgcataggcatgaacaaaggcggggttctggctggggtcatcggagcccggaaaccacactacgacatctggggcaatacagtcaatgtagccagcaggatggagtccacgggggtcatgggcaacattcaggtggtagaagaaacccaagtcatcctccgagagtacggcttccgctttgtgaggcgaggccccatctttgtgaaggggaagggggagctgctgaccttcttcttgaaggggcgggataagctagccaccttccccaatggcccctctgtcacactgccccaccaggtggtggacaactcctga

SEQ ID NO: 45187 - DNA, 2093 bp, Homo Sapiens
cggaggggggcgccgagccgcagtccccgcccccacctcccgcctaccgcgaaaaacgcggaaatgcggtggctgcggcccgcgggcaggcgtcgggagcaagagtcggtcagtggtcacctgggacctccagcaggcgcacctgcagcccccgagactcccacgtgcctgccagacaccacgccccaccccacaccggtggtctgctctgccgacccgcagttggctcttgagtccctggaccctcgcacactgcggctgctgtggagacagcgagaactggagatccaggccttgcggtgggccatccagaatggcgaggacgcccggctctgccacatcctggaagaggtggcggggcttccgcccaagaggagctcccacagtcaggagaaactcctgcagaaccaggtccagaagctgatccaggagttgaaggaacagaaggagcgagcccagtgggagaaggagcacctggaggagcggctgctgcagaccacccgcacgctccaagagatggaggccgagctgcagaacttgcagaagtcctgcctcctgcagctggcccgctcctcgtgggtgggccgcatgctacgatcccagactggcagtgtggaggtagtgacggcagagactctgatggacccaagcgacctctctgaaaacattcaggcccccaccggggagggctttcggctggaggacgtggattggaacagcgttgcccgccggtatcccaacctcttcaccaacatggagcccagctcaaagcaaaagcagccccggccctggccacagctggacacagggagcccagagtcctctggaaagcattccgagcggcatcacaagaccgtggagtggggctccctgccctgtctgaacaccagcagctcagggggcgctgactccgactccagcagctgccggccgggcctgccttccttcgtgcaggtgatagggcacccgccccgggaccaccgcgcttcctccgagcaagcgctggtgcaggccgggagctacagcagggactcagaagatctccagaaaacccactcacccaggcacggcgagccggtcctgtcgccccagccctgcacagaccccgaccactggagcccggaactcctgcagagcccgacaggcctgaagatcgtggctgtgagctgccgggagaagttcgtccgcatcttcaacccgtcgcaggagagcacggccgacctgagcggcatggtgctgaagcagctggtgcgcggcttcccggagcgcctgtaccgcttcccgccgggcacgctgctggccccgcggcaccacgtcacggtctggggcgaggcgacccgcagcgccaagaagccgctgcgcgcgtcctcgagccgggagcccgttcccctcctctccatccgcggctgcgcgacgctgctcctgagccccaagggcgaggtcctcagtgagcaccggatcccacgccgcgagactccggccccgagggtcttcgccgacggcaccgacttgtccatcgaccgcttcccgctccctgaggccgggcccggcgccgacacccgcaagccgccgcgcccacctcgacccctgcgcaaaggccgggtgcgggagccccgggtcagtcgccggagaccagggacgcggggcctgctgcccccagtgagctcggggaagctcttccacgcgcgggaggggcctgcgcggcccgagaaccccgagatccccgcgccgcagcacctgcccgccatcccgggtgaccccaccctgccgtcgcctcccgcagaggccgggctgggcctggaggactgtcggctccagaaagaacaccgagttcgggtgtgccggaagagcgtggaccgtagctgccccctggtggccctgtcggtgcagaacacggcggagagcagattcggcttccgcttcctcagctgcctgccggtcaccgcggacacctgccgcggcgcctaggggcggaggagtggggccgggaccgcgagggagggcgcgggcgggcgccggggctgggcgggctgtgtccgctgcatcatttattgaaccaacgtggcctacaaagtaaaccgcatttctgtaca

SEQ ID NO: 45188 - DNA, 2312 bp, Homo Sapiens
ggagtttggggatgaggcagctgaagaacagagtcttgtgatggtggaaccaggacttcgttgttccttcattgtgtgggcagaagaggtggaggattttaggcgccacctggtcttgtccccactgcccagacaggcagggaatccctcttcttccttttgctgaatcagctggagaagaaagcccagcaggaggcctgctagcctcagcctcgggccctaccagggtcctaggtactggaatggaacttcgccgaggtcaccgctcaaacggccacaacgagggagccgatttagatcctctgggcctgttccttccttttctttaaacgtcccagtctagcttagaggaggacctgttttgttagataaatggcaagcaaaaaacgagaagtccagttacagacagtcatcaataatcaaagcctgtgggatgagatgttgcagaacaaaggcttaacagtgattgatgtttaccaagcctggtgtggaccttgcagagcaatgcaacctttattcagaaaattgaaaaatgaactgaacgaagacgaaattctgcattttgctgtcgcagaagctgacaacattgtgactttgcagccatttagagataaatgtgaacctgtttttctctttagtgttaatggcaaaattatcgaaaagattcagggtgcaaatgcaccgcttgttaataaaaaagttattaatttgatcgatgaggagagaaaaattgcagcaggtgaaatggctcgacctcagtatcctgaaattccattagtagactcagattcagaagttagtgaagaatcaccatgtgaaagtgttcaggaattatacagtattgctattatcaaaccggatgctgtgattagtaaaaaagttctagaaattaaaagaaaaattaccaaagctggatttattatagaagcagagcataagacagtgctcactgaagaacaagttgtcaacttctatagtcgaatagcagaccagtgtgacttcgaagagtttgtctcttttatgacaagtggcttaagctatattctagttgtatctcaaggaagtaaacacaatcctccctctgaagaaaccgaaccacagactgacaccgaacctaacgaacgatctgaggatcaacctgaggtcgaagcccaggttacacctggaatgatgaagaacaaacaagacagtttacaagaatatctggaaagacaacatttagctcagctctgtgacattgaagaggatgcagctaatgttgctaagttcatggatgctttcttccccgattttaaaaaaatgaaaagcatgaaattagaaaagacattggcattacttcgaccaaatctctttcatgaaaggaaagatgatgttttgcgtattattaaagatgaagacttcaaaatactggagcaaagacaagtagtattatcggaaaaagaagcacaagcactgtgcaaggaatatgaaaatgaagactattttaataaacttatagaaaacatgaccagtggtccatctctagcccttgttttattgagagacaatggcttgcaatactggaaacaattactgggaccaagaactgttgaagaagccattgaatattttccagagagtttatgtgcacagtttgcgatggacagtttgccggtcaaccagttgtatggcagcgattcattagaaaccgctgaaagggaaatacagcatttctttcctcttcaaagcactttaggcttgattaaacctcatgcaacaagtgaacaaagagagcagatcctgaagatagttaaggaggctggatttgatctgacacaggtgaagaaaatgttcctaactcctgagcaaatagagaaaatttatccaaaagtaacaggaaaagacttttataaagatttattggaaatgttatctgtgggtccatctatggtcatgattctgaccaagtggaatgctgttgcagaatggagacgattgatgggcccaacagacccagaagaagcaaaattactttcccctgactccatccgagcccagtttggaataagtaaattgaaaaacattgtccatggagcatctaacgcctatgaagcaaaagaggttgttaatagactctttgaggatcctgaggaaaactaaagtatatactgtgaaaactttgagaagataatacatatgttcacgtcaatatacaaccatttggcacagcttcctgggaggaataataagaaaaacatgctttggaggaaaactcaagatacaaaaatgaatggctatgcataataacaataagaatgtattccccaaacaaa

SEQ ID NO: 45189 - DNA, 489 bp, Homo Sapiens
atggggagccaccccacccctgggctccagagaaccacatcagctgggtaccgattgccccccaccaggccaccagcctcggtctccccagctgcccggggtggccctatggccagcaggggtcttgctggtggctgccaggccccccaggctctgaaggcgcagcgggtggctcagggagctgcctgcgatggcgtgcagcaggaccagctgtggcgggagctcctggaggccgagcggcggggccagcagcgctggattcagaactggagtttcctgaaagactatgacccaatgggcaacaagaaggagcctgagaagttgccagaccatgtgcctctcttttcggacacagttcccagttccacgaaccaggttgtgggcagcaggctggacacacccctgggacagactctcatccgcatggacttcttcttcacagaaggggcccggaagaagaagctggaggaccagatgcagcccatctag

SEQ ID NO: 45190 - DNA, 222 bp, Homo Sapiens
gcatctggaggtgatgttcttactgacaatgagcaggtgactgggttggagagggatatcatgatggctgcacggaagggactggacccatataatatactacccccaaaggcagcttcaggtaccaaagaggaccttaatttagcccccctccttcaccaggtgggcagcatctgtgaagagaatagtgccatcatctggttttggctggacaaaggtgag

SEQ ID NO: 45191 - DNA, 1275 bp, Homo Sapiens
ctcacgcagatcgggcagtgcgggaaccagatcggggccaagttctgggaggtgatctctgatgaacatgctatcgactccgctggcacctaccacggggacagccacctgcagctggagcgcatcaacgtgcaccaccacgaggccagcggtggcaggtacgtgccccgcgctgtgctcgtggatctggagccgggcaccatggactctgtgcgctcggggcccttcgggcaggtcctcaggccagacaacttcatcttcggtcagtgtggggccggaaacaactgggccaagggacgctacaccgaaggcgcggagctgacggagtcagtgatggacgttgtcagaaaggaggctgagagctgtgactgcctgcagggtttccagctgacccactccctgggtggggggactgggtctgggatggttaccctcctcatcagcaagatccgggaggagtacccagacaggatcataaacacattcagcatcctgccctcgcccaaggtgtcagacaccgtggtggagccctacaacgccaccctctcagtccaccagctcatagaaaacgcagatgagaccttctgcatagataacgaagcgctatatgacatatgttccaagaccctaaaactgcccacacccacctatggtgacctgaaccacctggtgtctgctaccatgagtggggtcaccacgtgcctgcgcttcccaggccagctgaatgctgacctgcggaagctggccgtgaacatggtcccgtttccccggctgcatttcttcatgcctggctttgccccactgaccagccggggcagccagcagtaccgggccttgactgtggctgagctcacccagcagatgtttgatgctaagaacatgagggctgcccgtgacccccgtcacggccgctacctaacggcggctgccattttccagggtcgcatgcccatgagggaggtggatgaacagatgttcaacattcaagataagaacagcagctactttgctgactggttccccgacaacgtaaaaacagccatctgtgacatcccaccccgggggctaaaaatgtcagccagcttcattgggaataatgcggccatccaggaactcttcacgtgtgtctcagagcagtttacagcaatgttcaggcgcaaggccttcctccactggtacacgggcgagggcatggatgagatggaattcaccgaggccgagagcaacatgaatgacctggtgtctgaatatcagcaatatcaggatgccacggcc

SEQ ID NO: 45192 - DNA, 461 bp, Homo Sapiens
gagtcctgagctgcgtcccggagcccacggtggtcatggctgccagagcgctctgcatgctggggctggtcctggccttgctgtcctccagctctgctgaggagtacgtgggcctgtctgcaaaccagtgtgccgtgccagccaaggacagggtggactgcggctacccccatgtcacccccaaggagtgcaacaaccggggctgctgctttgactccaggatccctggagtgccttggtgtttcaagcccctgcaggaagcagaatgcaccttctgaggcacctccagctgcccccggccgggggatgcgaggctcggagcacccttgcccggctgtgattgctgccaggcactgttcatctcagcttttctgtccctttgctcccggcaagcgcttctgctgaaagttcatatctggagcctgatgtcttaacgaataaaggtcccatgctccacccga

SEQ ID NO: 45193 - DNA, 1227 bp, Homo Sapiens
atgagctctaagtacccgcggtctgtccggcgctgcctgcccctctgcgccctaacactggaagcagctctcattctcctcttctatttttttacccactatgacgcttccttagaggatcaaaaggggctcgtggcatcctatcaagtcggccaagatctgaccgtgatggcggcccttggcttgggcttcctcacctcaaatttccggagacacagctggagcagtgtggccttcaacctcttcatgctggcgcttggtgtgcagtgggcaatcctgctggacggcttcctgagccagttccctcctgggaaggtggtcatcacactgttcagtattcggctggccaccatgagtgctatgtcggtgctgatctcagcgggtgctgtcttggggaaggtcaacttggcgcagttggtggtgatggtgctggtggaggtgacagctttaggcaccctgaggatggtcatcagtaatatcttcaacacagactaccacatgaacctgaggcacttctacgtgttcgcagcctattttgggctgactgtggcctggtgcctgccaaagcctctacccaagggaacggaggataatgatcagagagcaacgatacccagtttgtctgccatgctgggcgccctcttcttgtggatgttctggccaagtgtcaactctgctctgctgagaagtccaatccaaaggaagaatgccatgttcaacacctactatgctctagcagtcagtgtggtgacagccatctcagggtcatccttggctcacccccaaaggaagatcagcatgacttatgtgcacagtgcggtgttggcaggaggcgtggctgtgggtacctcgtgtcacctgatcccttctccgtggcttgccatggtgctgggtcttgtggctgggctgatctccatcgggggagccaagtgcctgccggtgtgttgtaaccgagtgctggggattcaccacatctccgtcatgcactccatcttcagcttgctgggtctgcttggagagatcacctacattgtgctgctggtgcttcatactgtctggaacggcaatggcatgattggcttccaggtcctcctcagcattggggaactcagcttggccatcgtgatagctctcacgtctggtctcctgacaggtttgctcctaaatctcaaaatatggaaagcacctcatgtggctaaatattttgatgaccaagttttctggaag

SEQ ID NO: 45194 - DNA, 1191 bp, Homo Sapiens
aaagttaagaaagaagaaaagaaaaggcataaatcatcatcatcttcctcctcctcatctagtgactcagatagctcaagtgattctcagtcctcttctgattcctctgattccgaaagtgctactgaagagaaatcaaagaaaagaaaaaagaaacatcggaaaaattcccgaaaacacaagaaagaaaagaaaaagcgaaagaaaagcaagaagagagtaaaagagagaaaaataacagatcacaggaatgtatctgagagtccaaacagaaaaaatgaaaaggagaagaaagttaaagaccataaatctaacagcaaagagagagacatcagaagaaattcagaaaaagatgacaagtataaaaacaaagtgaagaaaagggccaaatctaaaagtaggagtaagagcaaagagaaatcaaagagtaaagaaagagattcaaaacataatagaaatgaagaaaagaggatgaggtcaaggagtaaaggaagggatcatgaaaatgttaaagaaaaagaaaagcagtctgattctaaaggaaaagatcaggaaaggagtagaagtaaagagaagtctaaacagttagaatcaaagagtaatgagcatgatcacagtaaaagtaaggaaaaggatagacgcgcacaatccaggagtagagaatgtgatataactaaaggtaaacacagttataatagcagaacaagagaacgaagcagaagtagggacagaagcagaagagtgcgatcaagaacccatgacagagatcgcagcagaagcaaggagtaccatagatacagagaacaggaatacaggagaagaggacggtcacgaagccgagagagaagaacaccaccaggaagatcaagaagtaaagataggaggagaaggaggagagactcacggagctcagagagagaagaaagtcaaagcagaaacaaagacaaatacagaaaccaagagagtaagagctcacacagaaaagaaaattctgagagtgagaaaagaatgtactctaaaagtcgtgatcataatagctcaaataacagcagggaaaaaaaggctgatagagatcaaagtcccttctcaaaaataaaacaaagcagtcaggacaatgaattaaagtcctccatgttgaaaaataaggaggatgagaagatcagatcctcagtggaaaaagaaaaccaaaaa

SEQ ID NO: 45195 - DNA, 2929 bp, Homo Sapiens
atggatcccaccgcgggaagcaagaaggagcctggaggaggcgcggcgactgaggagggcgtgaataggatcgcagtgccaaaaccgccctccattgaggaattcagcatagtgaagcccattagccggggcgccttcgggaaagtgtatctggggcagaaaggcggcaaattgtatgcagtaaaggttgttaaaaaagcagacatgatcaacaaaaatatgactcatcaggtccaagctgagagagatgcactggcactaagcaaaagcccattcattgtccatttgtattattcactgcagtctgcaaacaatgtctacttggtaatggaatatcttattgggggagatgtcaagtctctcctacatatatatggttattttgatgaagagatggctgtgaaatatatttctgaagtagcactggctctagactaccttcacagacatggaatcatccacagggacttgaaaccggacaatatgcttatttctaatgagggtcatattaaactgacggattttggcctttcaaaagttactttgaatagagatattaatatgatggatatccttacaacaccatcaatggcaaaacctagacaagattattcaagaaccccaggacaagtgttatcgcttatcagctcgttgggatttaacacaccaattgcagaaaaaaatcaagaccctgcaaacatcctttcagcctgtctgtctgaaacatcacagctttctcaaggactcgtatgccctatgtctgtagatcaaaaggacactacgccttattctagcaaattactaaaatcatgtcttgaaacagttgcctccaacccaggaatgcctgtgaagtgtctaacttctaatttactccagtctaggaaaaggctggccacatccagtgccagtagtcaatcccacaccttcatatccagtgtggaatcagaatgccacagcagtcccaaatgggaaaaagattgccaggaaagtgatgaagcattgggcccaacaatgatgagttggaatgcagttgaaaagttatgcgcaaaatctgcaaatgccattgagacgaaaggtttcaataaaaaggatctggagttagctctttctcccattcataacagcagtgcccttcccaccactggacgctcttgtgtaaaccttgctaaaaaatgcttctctggggaagtttcttgggaagcagtagaactggatgtaaataatataaatatggacactgacacaagtcagttaggtttccatcagtcaaatcagtgggctgtggattctggtgggatatctgaagagcaccttgggaaaagaagtttaaaaagaaattttgagttggttgactccagtccttgtaaaaaaattatacagaataaaaaaacttgtgtagagtataagcataacgaaatgacaaattgttatacaaatcaaaatacaggcttaacagttgaagtgcaggaccttaagctatcagtgcacaaaagtcaacaaaatgactgtgctaataaggagaacattgtcaattcttttactgataaacaacaaacaccagaaaaattacctataccaatgatagcaaaaaaccttatgtgtgaactcgatgaagactgtgaaaagaatagtaagagggactacttaagttctagttttctatgttctgatgatgatagagcttctaaaaatatttctatgaactctgattcatcttttcctggaatttctataatggaaagtccattagaaagtcagcccttagattcagatagaagcatcaaagaatcctcttttgaagaatcaaatattgaagatccacttattgtaacaccagattgccaagaaaagacctcaccaaaaggtgtcgagaaccctgctgtacaagagagtaaccaaaaaatgttaggtcctcctttggaggtgctgaaaacgttagcctctaaaagaaatgctgttgcttttcgaagttttaacagtcatattaatgcatccaataactcagaaccatccagaatgaacatgacttctttagatgcaatggatatttcgtgtgcctacagtggttcatatcccatggctataacccctactcaaaaaagaagatcctgtatgccacatcagcagaccccaaatcagatcaagtcgggaactccataccgaactccgaagagtgtgagaagaggggtggcccccgttgatgatgggcgaattctaggaaccccagactaccttgcacctgagctgttactaggcagggcccatggtcctgcggtagactggtgggcacttggagtttgcttgtttgaatttctaacaggaattccccctttcaatgatgaaacaccacaacaagtattccagaatattctgaaaagagatatcccttggccagaaggtgaagaaaagttatctgataatgctcaaagtgcagtagaaatacttttaaccattgatgatacaaagagagctggaatgaaagagctaaaacgtcatcctctcttcagtgatgtggactgggaaaatctgcagcatcagactatgcctttcatcccccagccagatgatgaaacagatacctcctattttgaagccaggaatactgctcagcacctgactgtatctggatttagtctgtagcacaaaaattttccttttagtctagccttgtgttatagaatgaacttgcataattatatactccttaatactagattgatctaagggggaaagatcattatttaacctagttcaatgtgcttttaatgtacgttacagctttcacagagttaaaaggctgaaaggaatatagtcagtaatttatcttaacctcaaaactgtatataaatcttcaaagcttttttcatttatttattttgtttattgcactttatgaaaactgaagcatcaataaaattagaggacacta

SEQ ID NO: 45196 - DNA, 492 bp, Homo Sapiens
atggttaaccccaccgtgttcgacatcgctgtcgacggcaagcccttgggccgcgtgtccttcgagccgtttgcagacaaggttccaaaggcagcagaaaactttcgtgctctgagcaatgtagagaaaggatttggttataaaggttcctgctttcacagaattattccagggtttatgtgtcagggtggtgacttcacatgccataatggcactggtggcaagtacacctgcggggagaaatttgatgacgagagcttcgtcctaaagcatacacatcctggcatcttgtccatggcaaatgctggacccaacacaaatggttcccagtgtttcatctgcactgccaagactgagtggctggatggcaatcctgtggtctttggcaaggtgaaagaaggcatgaatattgtggaggccatggggcactttgggtccgagaatggcaagaccagcaagaagatcaccattgctgactgtggacaactctaa

SEQ ID NO: 45197 - DNA, 940 bp, Homo Sapiens
tgtgattttccaaaaataaaccatggaattctatatgatgaagaaaaatataagccattttcccaggttcctacaggggaagttttctattactcctgtgaatataattttgtgtctccttcaaaatcattttggactcgcataacatgcacagaagaaggatggtcaccaacaccaaagtgtctcaacacttcctgtgtgaatccgcccacagtacaaaatgctcatatactgtcgagacagatgagtaaatatccatctggtgagagagtacgttatgaatgtaggagcccttatgaaatgtttggggatgaagaagtgatgtgtttaaatggaaactggacagaaccacctcaatgcaaagattctacgggaaaatgtgggccccctccacctattgacaatggggacattacttcattcccgttgtcagtatatgctccagcttcatcagttgagtaccaatgccagaacttgtatcaacttgagggtaacaagcgaataacatgtagaaatggacaatggtcagaaccaccaaaatgcttacatccgtgtgtaatatcccgagaaattatggaaaattataacatagcattaaggtggacagccaaacagaagctttatttgagaacaggtgaatcagctgaatttgtgtgtaaacggggatatcgtctttcatcacgttctcacacattgcgaacaacatgttgggatgggaaactggagtatccaacttgtgcaaaaagatagaatcaatcataaaatgcacacctttattcagaactttagtattaaatcagttcttaatttcatttttaagtattgttttactcctttttattcatacgtaaaattttggattaatttgtgaaaatgtaattataagctgagaccggtggctctcttcttaaaagcaccatattaaaacttggaaaactaa

SEQ ID NO: 45198 - DNA, 2148 bp, Homo Sapiens
gcgctgcgttggctgcggcctggcaccaaaggggcggccccggcggagagcggacccagtggcctcggcgattatggacccggccgaggcggtgctgcaagagaaggcactcaagtttatgaattcctcagagagagaagactgtaataatggcgaaccccctaggaagataataccagagaagaattcacttagacagacatacaacagctgtgccagactctgcttaaaccaagaaacagtatgtttagcaagcactgctatgaagactgagaattgtgtggccaaaacaaaacttgccaatggcacttccagtatgattgtgcccaagcaacggaaactctcagcaagctatgaaaaggaaaaggaactgtgtgtcaaatactttgagcagtggtcagagtcagatcaagtggaatttgtggaacatcttatatcccaaatgtgtcattaccaacatgggcacataaactcgtatcttaaacctatgttgcagagagatttcataactgctctgccagctcggggattggatcatattgctgagaacattctgtcatacctggatgccaaatcactatgtgctgctgaacttgtgtgcaaggaatggtaccgagtgacctctgatggcatgctgtggaagaagcttatcgagagaatggtcaggacagattctctgtggagaggcctggcagaacgaagaggatggggacagtatttattcaaaaacaaacctcctgacgggaatgctcctcccaactctttttatagagcactttatcctaaaattatacaagacattgagacaatagaatctaattggagatgtggaagacatagtttacagagaattcactgccgaagtgaaacaagcaaaggagtttactgtttacagtatgatgatcagaaaatagtaagcggccttcgagacaacacaatcaagatctgggataaaaacacattggaatgcaagcgaattctcacaggccatacaggttcagtcctctgtctccagtatgatgagagagtgatcataacaggatcatcggattccacggtcagagtgtgggatgtaaatacaggtgaaatgctaaacacgttgattcaccattgtgaagcagttctgcacttgcgtttcaataatggcatgatggtgacctgctccaaagatcgttccattgctgtatgggatatggcctccccaactgacattaccctccggagggtgctggtcggacaccgagctgctgtcaatgttgtagactttgatgacaagtacattgtttctgcatctggggatagaactataaaggtatggaacacaagtacttgtgaatttgtaaggaccttaaatggacacaaacgaggcattgcctgtttgcagtacagggacaggctggtagtgagtggctcatctgacaacactatcagattatgggacatagaatgtggtgcatgtttacgagtgttagaaggccatgaggaattggtgcgttgtattcgatttgataacaagaggatagtcagtggggcctatgatggaaaaattaaagtgtgggatcttgtggctgctttggacccccgtgctcctgcagggacactctgtctacggacccttgtggagcattccggaagagtttttcgactacagtttgatgaattccagattgtcagtagttcacatgatgacacaatcctcatctgggacttcctaaatgatccagctgcccaagctgaacccccccgttccccttctcgaacatacacctacatctccagataaataaccatacactgacctcatacttgcccagggacccattaaagttgcggtatttaacgtatctgccaataccaggatgagcaacaacagtaacaatcaaactactgcccagtttccctggactagccgaggagcagggctttgagactcctgttgggacacagttggtctgcagtcggcccaggacggtctactcagcacaactgactgcttcagtgctgctatcagaagatgtcttctatcttttgtgaatgattggaacttttaaacctcccctcctctcctcctttcacctctgcacctagttttttcccattggttccagacaaaggtgacttataaatatatttagtgttttgccagaa

SEQ ID NO: 45199 - DNA, 585 bp, Homo Sapiens
atggatgatgacttgatgttggcactgcggcttcaggaggagtggaacttgcaggaggcggagcgcgatcatgcccaggagtccctgtcgctagtggacgcgtcgtgggagttggtggaccccacaccggacttgcaggcactgtttgttcagtttaacgaccaattcttctggggccagctggaggccgtcgaggtgaagtggagcgtgcgaatgaccctgtgtgctgggatatgcagctatgaagggaagggtggaatgtgttccatccgtctcagcgaaccccttttgaagttgaggccaagaaaggatcttgtagaggtataccatacttttcacgatgaggtggatgagtatcggcgacactggtggcgctgcaatgggccgtgccagcacaggccaccgtattacggctatgtcaaacgagctactaacagggaaccctctgctcatgactattggtgggctgagcaccagaaaacctgtggaggcacttacataaaaatcaaggaaccagagaattacaaaaaaaggcaaaggaaaggcaaaactaggaaaggaaccagtattggccgcagagaataa

SEQ ID NO: 45200 - DNA, 1008 bp, Homo Sapiens
cagatagcagaccccacgttagctgaaatgggaaaaaacttgaaggaggcagtgaagatgctggaggacagtcagagaagaacagaagaggaaaatggaaagaagctcatatccagagatattccaggcccactccagggcagtggacaagatatggtgagcatcctccagttagttcagaatctgatgcatggagatgaagatgaggagccccagagccccagaatccaaaatattggagaacaaggtcatgtggctgtgttgggacatagtctgggagcttatattttgactctggacgaagagaagctgagaaaacttacaactaggatactttcagataccaccttatggctatgcagaattttcagatatgaaaatgggtgtgcttatttccacgaagaggaaagagaaggacttgcaaagatatgtaggcttgccattcattctcaatatgaagacttcgtagtggatggcttcagtgggttatataacaagaagcctgtcatatatcttagtgctgctgctagacctggcctgggccaatacctttgtaatcaggatgttgccttcctggagaaactgattaaagatgatatagagcgaggaagactgcccctgttgcttgtcgcaaatgcaggaacggcagcagtaggacacacagacaagattgggagattgaaagaactctgtgagcagtatggcatatggcttcatgtggagggtgtgaatctggcaacattggctctgggttatgtctcctcatcagtgctggctgcagccaaatgtgatagcatgacgatgactcctggcccgtggctgggtttgccagctgttcctgcggtgacactgtataaacacgaccctgccttgactttagttgctggtcttatatcaaataagcccacagacaaactccgtgccctgcctctgtggttatctttacaatacttgggacttgatgggtttgtggagaggatcaagcatgcctgtcaactggtgagtaga

SEQ ID NO: 45201 - DNA, 762 bp, Homo Sapiens
ctgattttcatttcagaaccatcaagaaatggggacctggattttgtttgcctgccttgtgggagcagcttttgccatgcctctaccacctcatcctgggcaccctggttatatcaacttcagctatgaggtgctcacccctttgaagtggtaccagagcatgataagaccaccatactcttcctatggttacgagcccatgggtggatggctgcaccaccaaatcatccccgtggtgtcccaacagcaccccctgactcacaccctgcagtctcatcaccacatcccagtggtgccagctcagcagcccagggtccgccagcaagcactgatgcctgttcctggccagcaatccatgactccaacccaacaccatcagccaaacctccctctgcctgcccagcagcccttccagccccagcctgttcagccacagcctcaccagcccatgcagccccagccacctgtgcaacccatgcagcccctgctgccacagccacctctgcctccaatgttccccctgcggcccctgccccccatacttcctgatctgcatctggaagcttggccagcaacagacaagaccaagcaggaggaagtggattaaaagaccagaatatgagacaggaactgaagtaaacactttagttgctttcagggatgacacaagcacacaatgatttttgcttacaatcacttaacttagcaaattctgtaactaaaaatgtaccaatagtagacaataaaatgttttaaaaatca

SEQ ID NO: 45202 - DNA, 1695 bp, Homo Sapiens
ggcacggcctagcgagtggttcttctgcgctactgctgcgcgaatcggcgaccccagtgcctcgaccactatgccgcgctctttcctcgtcaggaagccctccgaccccaatcggaagcctaactacagcgagctgcaggactctaatccagagtttaccttccagcagccctacgaccaggcccacctgctggcagccatcccacctccggagatcctcaaccccaccgcctcgctgccaatgctcatctgggactctgtcctggcgccccaagcccagccaattgcctgggcctcccttcggctccaggagagtcccagggtggcagagctgacctccctgtcagatgaggacagtgggaaaggctcccagccccccagcccaccctcaccggctccttcgtccttctcctctacttcagtctcttccttggaggccgaggcctatgctgccttcccaggcttgggccaagtgcccaagcagctggcccagctctctgaggccaaggatctccaggctcgaaaggccttcaactgcaaatactgcaacaaggaatacctcagcctgggtgccctcaagatgcacatccgaagccacacgctgccctgcgtctgcggaacctgcgggaaggccttctctaggccctggctgctacaaggccatgtccggacccacactggcgagaagcccttctcctgtccccactgcagccgtgccttcgctgaccgctccaacctgcgggcccacctccagacccactcagatgtcaagaagtaccagtgccaggcgtgtgctcggaccttctcccgaatgtccctgctccacaagcaccaagagtccggctgctcaggatgtccccgctgaccctcgaggctccctcttcctctccatacctgcccctgcctgacagccttccccagctccagcaggaaggaccccacatccttctcactgccatggaattccctcctgagtgccccacttctggccacatcagccccacaggactttgatgaagaccattttctggttctgtgtcctctgcctgggctctggaagaggccttcccatggccatttctgtggagggagggcagctggcccccagccctgggggattcctgagctggcctgtctgcgtgggtttttgtatccagagctgtttggatacagctgctttgagctacaggacaaaggctgacagactcactgggaagctcccaccccactcaggggaccccactcccctcacacacacccccccacaaggaaccctcaggccaccctccacgaggtgtgactaactatgcaataatccacccccaggtgcagccccagggcctgcggaggcggtggcagactagagtctgagatgccccgagcccaggcagctatttcagcctcctgtttggtggggtggcacctgtttcccgggcaatttaacaatgtctgaaaagggactgtgagtaatggctgtcacttgtcgggggcccaagtggggtgctctggtctgaccgatgtgtctcccagaactattctgggggcccgacaggtgggcctgggaggaagatgtttacatttttaaaggtacactggtatttatatttcaaacattttgtatcaaggaaacgttttgtatagttatatgtacagtttattgatattcaataaagcagttaatttatatattaaaaa

SEQ ID NO: 45203 - DNA, 992 bp, Homo Sapiens
agctgcttcaggctgaggtggcagatagtgagcgctggtggcggagttaaagtcaaagcaggagagtaattatgaatagcgcagcgggattctcacacctagaccgtcgcgagcgggttctcaagttaggggagagtttcgagaagcagccgcgctgcgccttccacactgtgcgctatgacttcaaacctgcttctattgacacttcttctgaaggataccttgaggttggtgaaggtgaacaggtgaccataactctgccaaatatagaaggttcaactccaccagtaactgttttcaaaggttcaaaaaaaccttacttaaaagaatgcattttgattattaaccatgatactggagaatgtcggctagaaaaactcagcagcaacatcactgtaaaaaaaacaagagttgaaggaagcagtaaaattcagtatcgtaaagaacaacagcaacaacaaatgtggaattcagccaggactcccaatcttgtaaaacattctccatctgaagataagatgtccccagcatctccaatagatgatatcgaaagagaactgaaggcagaagctagtctaatggaccagatgagtagttgtgatagttcatcagattccaaaagttcatcatcttcaagtagtgaggatagttctagtgactcagaagatgaagattgcaaatcctctacttctgatacagggaattgtgtctcaggacatcctaccatgacacagtacaggattcctgatatagatgccagtcataatagatttcgagacaacagtggccttctgatgaatactttaagaaatgatttgcagctgagtgaatcaggaagtgacagtgatgactgaagaaatatttagctataaataaaaatttatacagcatgtataatttattttgtattaacaataaaaattcctaagactgagggaaatatgtcttaacttttgatgataaaagaaattaaatttgattcagaaatttca

SEQ ID NO: 45204 - DNA, 948 bp, Homo Sapiens
atgctgccacctcccttagagctggggtaccgggtcactgttgaagacctggaccgggagaaggaggcggcattccagcgcatcaacagtgcactgcaggttgaggacaaggccatctcggactgcagaccctcacggccttcccacactttgtcctcacttgcaacaggggcttctggtctgcctgccgtttctaaagcacccagtatggatgcacagcaggagacacacaagtcccaagactgcctgggcctactggcccccttagcatctgctgcaggggtcccctctacagctcccatgtctgggaagaagcacagaccaccaggccccctgttctcctcctcagatccccttcctgccacctcttcccattcccaggactcagcccaggtcacctcgctgattcctgcccccttcccagctgcaagcatggatgcgggcatgagaagaacaaggtgtggcacttctgctcctgcagctgccgcagcagcccctcccccctccacattgaaccccacgttggggtcactactggagtggatggaggcccttcacatttctgggcctcagccacagctgcagcaggtgcccagaggtcagaaccagagatcccagacctcccggaccagctcgtgccccaaacgaaatgccatctcgagcccctaccgctctacgggaggcctcccggaacgaaagcggagaagggggccagcctcatcccactgccagctgaccctcagttcccacaggtgcgtgcccatctccagcccagggcagctcccctgtaagctgggtgagctactgaagccaaggcgggaggcagctgacaacacccacagcccatgcggaggtggtggaaaggctggactcagcagcaacaccaaatcctggaccaggcagaaaccacccaagactgaggggctcatgccagagcggtggccacag

SEQ ID NO: 45205 - DNA, 1050 bp, Homo Sapiens
atgaattctggaatctcgcaagacttccagatggaaattacctgccccatctgcatgaattacttcatagacccagtcaccatagactgtgggcacagcttttgcaggccctgtttctacttcaactggcaagacatcccaattcttactcagtgctttgaatgcatgaagacaacatggcagagaaacctgaaaactaacattcatttgaagcagatggcttcccttgccagaaaagccagtctctggctattcctgagctctgaggagcaaatgtgtggcactcacagggagacaaagaagatattctgtgaagtggacaggagcctgctctgtttgctgtgctccagctctcaggagcaccggtatcacagacaccgtcccattgagtgggctgctgaggaacaccgggagaagcttttaaagaaaatgcagtctttatgggaaaaagcttgtgaaaatcagagaaacctgaatgtggaaaccaccagaatcagccactggaaggttagttctgtactactctaccttctaccttctccaggaacttatgtggatattactctgcctcataatgaagccaacagtcatatcttccgatgtggagatttgagaagcatgtgtattggatgtgaccgtcaaaatgtgccccatatcactgcaacacctacaagttttcttgcatggggtgctcagactttcacctctggcaaatattactgggaggtccatgtgggggactcttggaattgggcctttggtgtctgtaataagtattggaaagggaagaatcagaatgacaatatatatggagaggagggactctttagtcttggatgtgtcaagaatgacattcagtgcagtctctttaccacctccccacttacactgcaatatatcccaagaactaccagccgcataggattattcctggattgtgaagctagaactagcttcgttgatgttaaccaaagctgccttatatacaccatccctaattgctccttctcacctcctctcaggcctatctttcggtgtattcacctctga

SEQ ID NO: 45206 - DNA, 1977 bp, Homo Sapiens
ctcttgctgctggggctctgggtgctcctgactccagtccggtgttctcaaggccatccctcgtggcactacgcatcctccaaggtggtgattcccaggaaggagacgcaccacggcaaagaccttcagtttctgggctggctgtcctacagcctgcattttgggggtcaaagacacatcattcacatgcggaggaaacaccttctttggcccagacatctgctggtgacaactcaggatgaccaaggagccttgcagatggatgacccctacatccctccagactgctactatctcagctacctggaggaggttcctctgtccatggtcaccgtggacatgtgctgtgggggcctcagaggcatcatgaagctggacgaccttgcctatgaaatcaaacccctccaggattcccgcaggcttgaacatgtttctcagatagtggccgagcccaacgcaacggggcccacatttagagatggtgacaatgaggagacaaaccccctgttctctgaagcaaatgacagcatgaatcccaggatatctaattggctgtatagttctcatagaggcaatataaaaggccacgttcaatgttccaattcatattgtcgtgtagatgacaatattacaacttgttccaaggaggtggtccagatgttcagtctcagtgacagcattgttcaaaatattgatctgcggtactatatttatcttttgaccatatataataattgtgacccagcccctgtgaatgactatcgagttcagagtgcaatgtttacctattttagaacaaccttttttgatacttttcgtgttcattcacccacactacttattaaagaggcaccacatgaatgtaactatgaaccacaaaggtatagcttctgtacacatttaggcctattacacattggtactctaggcagacattatttattagtagccgtcataacaacccagacactgatgagaagtactggtgagaagtacgatgataactactgcacatgtcagaaaagggccttctgcattatgcagcaatatcctgggatgacagatgcgttcagtaactgttcttatggacatgcacaaaattgttttgtacattcagcccggtgtgttttcgaaacacttgctcctgtgtataatgaaaccatgacaatggttcgctgtggaaacctcatagcggatgggagggaggaatgtgactgtggctccttcaagtattattgctgccgaagtgactgtcgcttaacaccggggagcatctgtcatataggagagtgctgtacaaactgcagctactccccaccagggactctctgcagacctatccaaaatatatgtgaccttccagagtactgtcacgggaccaccgtgacatgccccgcaaacttttatatgcaagatggaaccccgtgcactgaagaaggctactgctatcatgggaactgcactgaccgcaatgtgctctgcaaggtaatctttggtgtcagtgctgaggaggctcctgaggtctgctatgacataaatcttgaaagttaccgatttggacattgtttgacgacaaacagctctcaacaacaggcttgtgcaggaatagataagttttgtggaagactgcagtgtaccagtgtgacccatcttccccggctgcaggaacatgtttcattccatcactcagtgacaggaggatttcagtgttttggactggatgaccaccgtgcaacagacacaactgatgttgggtgtgtgatagatggcactccttgtgttcatggaaacttctgtaataacaccaggtgcaatgcgactatcacttcactgggctacgactgtcgccctgagaagtgcagtcatagaggggtgtgcaacaacagaaggaactgccattgccatataggctgggatcctccactgtgcctaagaagaggtgctggtgggagtgtcgacagcgggccacctccaaaa

SEQ ID NO: 45207 - DNA, 1427 bp, Homo Sapiens
ctgggaatatgattatgcttaatctatgctcagttgaaaggggctggggctgctttctcccctcccttcttgactctctgttcacagaactcaggctgcctccagccagcctttgcccgctagactcactggccctgagcacttgaaggtgcagcaagtcactgagaatgagcactttcttctcggacacagcatggatctgcctggctgtccccacagtactatgtgggacagtattttgcaaatacaagaagagctcagggcagctgtggagctggatggtctgcctggcaggcctctgtgcagtctgcctgctcatcctgtcccctttttggggcttgatcctcttctcggtgtcatgcttcctcatgtatacttacttatctggccaagaattgttacctgtggatcagaaggcagtcctggtgacaggtggtgattgcgggcttggccatgctttgtgcaagtatctggatgagctgggcttcacggtatttgccggagttttgaatgaaaatggcccaggagctgaggaattgcgaagaacctgctctccgcgcctctcggtgctccaaatggacatcacgaagccagtgcagataaaagatgcttacagcaaggttgcagcaatgctgcaggacagaggactgtgggctgtgatcaacaatgctggggtgcttggctttccaactgatggggagcttcttcttatgactgactacaaacaatgcatggccgtgaacttctttggaactgtggaggtcacaaagacgtttttgcctcttcttagaaaatccaaagggaggctggtgaatgtcagcagcatgggaggaggggccccaatggaaaggctggcatcttatggctcatcaaaggcggctgtgaccatgttctcatcagttatgagactggagctttccaagtggggaattaaagttgcttccatccaacctggaggcttcctaacaaatatcgcaggcaccagtgacaagtgggaaaagctggagaaggacattctggaccacctccccgctgaggtacaggaagactacggccaggactacatcttagcacagcggaatttcctcctattgatcaactcgttagccagcaaggacttctctccggtgctgcgggacatccagcatgctatcttggcgaagagcccttttgcctattacacgccagggaaaggcgcttacttgtggatctgccttgctcactatttgcctattggcatatatgattactttgctaaaagacattttggccaagacaagcccatgcccagagctctaagaatgcctaactacaagaaaaaggccacctaggcaatggaagccctcaaagaagtcggaatgtcatagtcttgaaatgaaagggaaactgggaaactgggtttctcattaaagttgtttcccactctg

SEQ ID NO: 45208 - DNA, 1239 bp, Homo Sapiens
gcagccagatctgctgggacacctttcccaaggaagagcccgttgcactgggctttgaaggataagcaggagcttgttactcaggcagaggaagaaagagcatcccaggcggggggagcagcatatgcaaaggcacgaaggggccccaggagcctagggagtctggggaagtgtgagcactttggagagtggaggctggagcgctgtggagagtgggggctggtggccgggaatgaggctgcagctggctgggccacatggtaaaggctgacaactggacccagaggccaactagcctatgatcagcatttcccaaaatctgtttcccgactcatggttctgtgagatgtgacaagggctcctttttcattcctgagacgccggttttcatctgtgatgcggggacagctgcgctccttgctgcgaggcgtcaggacccaggtgatagtgaagggagggtggcgcccgcggttcccggcggccactgatgcctgtctctctgtcgtgtgtacgtgcgtgtgtgctccacgcctggcttctcaggctttcaaatgtgtgtcagcagcagcagcagcagccacgacgaggcccccgtcctgaacgacaagcacctggacgtgcccgacatcatcatcacgccccccacccccacgggcatgatgctgccgagggacttggggagcacagtctggctggatgagacagggtcgtgcccagatgatggagaaatcgacccagaagcctgaggaggtgtcctgggtttggctggctggctcctgctccagcggcccggcttcaggtgtccgggggcgtggctgcctggagcaggtgtgctgaataccctggatgggaactgagcgaacccgggcctccgctcagagagacgtggcaggaccagcgaggaatccagcctgtccacttccagaacagtgtttcccaggccccgctgagtggaccggacctctgacacctccaggttcttgctgactccggcctggtgaaagggagcgccatggtcctggctgttggggtcccagggagaggctctcttctggacaaacacaccctcccagcccccagggctgtgcaaacacatgcccctgccataagcaccaacaagaacttcttgcaggtggagtggctgttttttataagttgttttacagatacggaaacagtccaaaatgggatttataatttcttttttgcattataaataaagatcctctgtaacaaata

SEQ ID NO: 45209 - DNA, 1487 bp, Homo Sapiens
tgggtgcctgtaatcccagctacttgggagactgaggcaggagaatcacttgaaccaaggaggtagaggctgcagtgagccgagatcacgccactgcactccagcctgggtgacagatagagactctgtctcaaaaataaaacaaaacaaacactttccacccatggacaccgccaagtctaagtcagagtctcctaaagagctcgtacagctgaagaagctcttcattggagggctgagctttgaaacaaccaatgagagcctgaggagccattctgagcaatggggaacactcgcggactgtgtggtaatgagagatccaaacaccaagcactccaggggctttggatttgccacatatgccactgaggaggaggtggatgcagccacgaatgcaaggccacacaaggtggatggaagagttgtggaaccaaagagagctgtctcaagagaagattctcaaagaccagatgcccacttaactatggaaaagatatttgttggtggcattaacgaagacactgaagaatatcacctaagtgattattttgaacagtatggaaaaactgaagtgattgaaatcatgactgaccaaggcagtggcaagaaaaggggctttgcctttgtaacctttgatgatcatgactccgtggataagactgtcattcagaaataccatactgtgaatggccacaactgtgaaattaggaaaggcctgtcaaagcaagagatggtgagtgcttcatccagccaaagaggtcaaagtacttctggaaactttggtggtggtcgtggaggtggtttcggtaggaatgacaactttggttgtgaaggaaatttcagtggtcatggtggctttggtggcagctgtggtggtggtggatatcgtgcagtggggatggctataatggatttggtaatgatggaagcaattttggaggtggaagctacaatgattttggcaattacaacaattagtcttcaatttttggacccatgaagggaggaaactttggaggcagaagctctggcccctatggtggtgcaggccaatactttaccaaaccacgaaaccaaggtggctatggcggttccagtagcagcagtagctatggcagtggcggaagattttaattaggcaacaaagcttagcatgagaggagagccagcgaagtgacagggaagctacaggttacaacagatttgtgaactaagccaagcacagtggtggcagggcctagctgctacaaagaagatatgttttagacaaatactcatgtgtatgggcaaaaaactcgaagactgtatttgtgactagttgtataacaggttgttttagtttctgttctgtggaaagtgtaaagcattccaacaaagggttttaatgtattttttttttttgcacccaagctgttgattgctaaatgtaatagtctgatcgtgacactgaataaatgtctttttaaaaaaaaaaaacaacaaaaaaa

SEQ ID NO: 45210 - DNA, 534 bp, Homo Sapiens
agggccgtctcagtctcataaaaggggatcaggcaggaggagtttgggagaaacctgagaagggcctgatttgcagcatcatgatgggcctctccttggcctctgctgtgctcctggcctccctcctgagtctccaccttggaactgccacacgtgggagtgacatatccaagacctgctgcttccaatacagccacaagccccttccctggacctgggtgcgaagctatgaattcaccagtaacagctgctcccagcgggctgtgatattcactaccaaaagaggcaagaaagtctgtacccatccaaggaaaaaatgggtgcaaaaatacatttctttactgaaaactccgaaacaattgtgactcagctgaattttcatccgaggacgcttggaccccgctcttggctctgcagccctctggggagcctgcggaatcttttctgaaggctacatggacccgctggggaggagagggtgtttcctcccagagttactttaataaaggttgttcatagagttgacttgttcat

SEQ ID NO: 45211 - DNA, 2319 bp, Homo Sapiens
cagttgcatgctgctgtcaccaagatccaggttccaaggcctggttttaattacacgtttgcccatatatgtatcctgaataatgataagacttgcatcgtggatgacatagtgcacgtcctggaagagctaaagaatgctcgggccaccaatcggaccaattttgctatcacatacccaatcactcacttaaaggacgggagggctgtgtacaatgggcaccagcttgggggcgtcactgtgcacagcaaagaccgggtgaaatctgcagaggccatccagctcacctactacctgcagtcaatcaacagtctcaatgacatggtggctgagaggtgggagtccagcttctgcgacactgtcagactgtttcagaaatccaacagcaaagtcaaaatgtacccttacacgtcctcctcactgagggaagatttccagaagaccagccgcgtatcagaacgttacctggtcaccagcctgattctggtggttaccatggccatcctgtgttgctctatgcaggactgcgtccgcagcaaaccctggctaggcctgctcggattggtgaccataagcctggccactctcactgcagccgggatcatcaatcttactggtgggaaatataattccaccttcctgggagtccctttcgtcatgctaggtcatggattatatgggacttttgaaatgttatcctcctggaggaaaactagagaagaccaacatgttaaagagagaactgcagcagtctatgcagactccatgctctccttttctctcaccactgccatgtacctggtcacctttggcataggggccagccctttcacgaacattgaggcagccaggattttctgctgcaattcctgtattgcaatcttcttcaactacctctatgtactctcgttttatggttccagcctagtgttcactggctacatagaaaacaattaccagcatagtatcttctgtagaaaagtcccaaagcctgaggcattgcaggagaagccggcatggtacaggtttctcctgacggccagattcagtgaggacacagctgaaggcgaggaagcgaacacttacgagagtcacctattggtatgtttcctcaaacgctattactgtgactggataaccaacacctatgtcaagccttttgtagttctcttttaccttatttatatttcctttgccttaatgggctatctgcaggtcagtgaagggtcagaccttagtaacattgtagcaaccgcgacacaaaccattgagtacactactgcccagcaaaagtacttcagcaactacagtcctgtgattgggttttacatatatgagtctatagaatactggaacactagtgtccaagaagatgttctagaatacaccaaggggtttgtgcggatatcctggtttgagagctatttaaattaccttcggaaactcaatgtatccactggcttgcctaagaaaaatttcacagacatgttgaggaattcctttctgaaagcccctcaattttcacattttcaagaggacatcatcttctctaaaaaatacaatgatgaggtcgatgtagtggcctccagaatgtttttggtggccaagaccatggaaacaaacagagaagaactctatgatctcttggaaaccctgaggagactttctgtcacctccaaggtgaagttcatcgtcttcaatccgtcctttgtatacatggatcgatatgcctcctctctgggagcccccctgcacaactcctgcatcagtgctttgttcctgctcttcttctcggcattcctggtggcagattcactgattaacgtctggatcactctcacagttgtgtccgtggagtttggagtgataggtttcatgacattatggaaagtagaactggactgcatttctgtgctatgcttaatttatggaattaattacacaattgacaattgtgctccaatgttatccacatttgttctgggcaaggatttcacaagaactaaatgggtaaaaaatgccctggaagtgcatggggtagctattttacagagttacctctgctatattgttggtctgattcctcttgcagctgtgccttcaaatctgacctgtacactgttcaggtgcttgtttttaatagcatttgtcaccttctttcactgctttgccattttacctgtgatactgactttcctgccaccctctaagaaaaaaaggaaagagaagaaaaatcctgagaaccgggaggaaattgagtgtgtagaaatggtagatatcgatagtacccgtgtggttgaccaaattacaacagtgtga

SEQ ID NO: 45212 - DNA, 1041 bp, Homo Sapiens
atgggtagcaagaaactaaaacgagtgggtttatcacaagagctgtgtgaccgtctgagtagacatcagatccttacctgtcaggactttttatgtctttccccactggagcttatgaaggtgactggtctgagttatcgaggtgtccatgaacttctatgtatggtcagcagggcctgtgccccaaagatgcaaacggcttatgggataaaagcacaaaggtctgctgatttctcaccagcattcttatctactaccctttctgctttggacgaagccctgcatggtggtgtggcttgtggatccctcacagagattacaggtccaccaggttgtggaaaaactcagttttgtataatgatgagcattttggctacattacccaccaacatgggaggattagaaggagctgtggtgtacattgacacagagtctgcatttagtgctgaaagactggttgaaatagcagaatcccgttttcccagatattttaacactgaagaaaagttacttttgacaagtagtaaagttcatctttatcgggaactcacctgtgatgaagttctacaaaggattgaatctttggaagaagaaattatctcaaaaggaattaaacttgtgattcttgactctgttgcttctgtggtcagaaaggagtttgatgcacaacttcaaggcaatctcaaagaaagaaacaagttcttggcaagagaggcatcctccttgaagtatttggctgaggagttttcaatcccagttatcttgacgaatcagattacaacccatctgagtggagccctggcttctcaggcagacctggtgtctccagctgatgatttgtccctgtctgaaggcacttctggatccagctgtgtgatagccgcactaggaaatacctggagtcacagtgtgaatacccggctgatcctccagtaccttgattcagagagaagacagattcttattgccaagtcccctctggctcccttcacctcatttgtctacaccatcaaggaggaaggcctggttcttcaaggtaag

SEQ ID NO: 45213 - DNA, 4100 bp, Homo Sapiens
cagggagtgttgacatttagggatgtggccttagaattctctctggaggagtggcaatgcctggacaccgcacagcagaatttatataggaatgtgatgttagagaactacagaaacctggtctttgtgggtattgctgcctctaagccagacctgatcacctgtctggagcaaggaaaagaaccttggaatgtgaagagacatgagatggtaactgaacccccagttgtatattcttattttgcccaagacctttggccaaagcagggcaaaaaaaattatttccaaaaagtgatactgagaacatataaaaaatgtggacgtgaaaatttacagttaagaaaatactgtaaaagcatggatgagtgtaaggtgcacaaagaatgttacaatggacttaaccagtgtttgacaactacccagaacaaaatatttcaatatgacaaatatgtgaaagtctttcataaattttcaaattcaaacagacataagataggacatactggaaagaaatctttcaagtgtaaagaatgtgaaaagtcattttgcatgctttcacacttagctcaacataaaagaattcatagtggagagaaaccctacaaatgtaaagaatgtgggaaagcctataatgaggcctcaaacctttctacacataaaagaattcatactggaaagaaaccctacaaatgcgaagagtgtggaaaagcctttaaccggctctcacaccttactacacataagataattcatactggaaagaaaccctacaaatgtgaggagtgtggcaaagcttttaaccaatctgcaaaccttactacacataagagaattcatactggagagaaaccctacaaatgtgaagaatgtggcagagcttttagccagtcctcaacccttactgcacataagataattcatgctggagagaaaccttacaaatgtgaagaatgtggcaaagcttttagccagtcctcaacccttactacacataagataattcatactggagagaaattctacaaatgtgaagaatgtggtaaggcctttagccggttatcccaccttactacacataagagaattcattctggagagaaaccctacaagtgtgaagaatgtggcaaagcttttaaacaatcctcaacccttactacacataagagaattcatgctggagagaaattctacaaatgtgaagtatgtagcaaagcctttagccggttctcacaccttactacacataagagaattcatactggagagaagccctacaaatgtgaagaatgtggcaaagcttttaacctatcatcacaacttactacacataagataattcatactggagagaaaccctacaaatgtgaagaatgtggcaaagcttttaaccagtcctcaactctttctaaacataaggtaattcatactggagagaagccctacaaatgtgaagaatgtggcaaagcttttaaccagtcctcacaccttactacacataagatgattcatactggagagaaaccctacaagtgtgaagaatgcggcaaagcctttaacaactcctctattcttaacagacataagatgattcatactggagagaaactctacaaacctgaaagttgtaacaatgcttgtgacaacattgcaaagatttccaaatataaaagaaattgtgctggtgagaaataatagaaatatgaatgtgacaaagcctttaaatggttatcacactggattgtaggtaaggtaattcattctggagaaaacttctacaagtgtgaacagtgtggcaaaacttacacaatgctcaaaccttattgcacaggaaagcctttatacttgatgagaacaaatgtacaaatataaagaaagtaaaaaagtgattaatatctgcacacatcttattcagcatcagagaatttatacttaatagcattaaaggtgcaattactgtcaaaagagttcagaaaatataagcatttaaagtgctgaagaggatttattttgaagacaaacattacaaatataaacgaagttgtggtaactttacttgtaacacagatcttgttgtattcattctgtattagagcaaaccctgaggcaattgctcaaactttgttcaacatcagagaatttatatcaaagaaaaaccctgtaaatgtaataaatttagaaaaaaacatttattcaaaaactacaggttagaaaattccagagttcatattaaaatatttttgcatatacagtaaatagaaaaaaaatttaattcaatggtaagtctatgtaaatatcagagaatttacattagaaatatataaggcaatgacacttcagactttacactgaatcagagttctgagtttagaaaataatccaaaactaaacttggtagaaaaattatttgtttataactttaaaagagtagaagattctttggagagttacaagtatacttttttttagaaagattacagatttttttaaaagtaaataactgtcaaattacttcatacaaataatgtaattaactcaaattacttcatgttaatgttgtaattaactctcaaattacttcatgctaaagaaattagtttttctttttcttttttctttttctttttttttagatggagtcttgctctgtcgcccacccaggctggagtacagtggcacgatctcagctcactgcaacctccatctccaggtttcaagtgattctcctgcctcagcctcccaagtagctgggattacaggcacaaaccaccatgcctggctaaattttgtatttttaatggagccagggttttgccatgttggccaggctggtctagaactcgagactttaggtgatccgcccagcttggcctcccacaatgctggaattacaggtgttagccactgctcctggctgatgttgtttctttattcctattgtattcatatgtgaaagcatgtgaccaaaagatatgagagattattttttattaggtgagcatttatgacctcttctatgaaagagtaaggacattaaaatgcatgatgaaaatctaagtaaagaggttctttgtgattcacttacagtactgagtgatgcatgaggtaggtgttccgagtaatattctgcattatattgagagacaaattttgttttagttaaaattaaaaataaattagtatattattttactaattgtacttttatgaaaaaaaggcagtatgttaaaaattttagattatgtgtgaacttaatttcttaattcaacattttaaacagtttaaatattgtgcattcaatcaagtcacattattccacttactttaacctagtccaccttactcaagggtgtaggtaaaaggtggtagcaaggccaggcgcggtggctcacgcctgtaatcccagcactttgggaggcaaaggcgggcggatcacctgaggtcaggagttcaagaccagcctgacccacatggagaaacgccatctctactaaaaatacaaaattagccaggcatggtggcgcatgcctgtaatcccagctactcgggaggctgaggcaggagaatcacttgaacccaggaggcagaggttgcggtgagccgagatcatgccatggcactccatcctgggtgacaaagtgagactccctctcaaaaaataaataagtaaataaaataaatggtggtaacaatacactatttggtaaaagaatgcactaacatctgtagtactaatcttttttccagtggctttaaactgcaaataaggaatgttgtttctgtaggtaaaacttttatttattttttcccatttaaatttacttttgttagttttttcaggcacataatatttatgttatatatggcatattctgataagaggcatacaatatataataatcacattagggtaaatgaggtatccatcacctttagtatttattttttgtattatgaacagttcaattgtacagttttagtttttttaaaatatacgattattattgactacagggttatttttataataataaaaattatatagacgtataaaatttacacatttctgagtcctgaataaatacttaaaaataatttcttgt

SEQ ID NO: 45214 - DNA, 1495 bp, Homo Sapiens
caaaagcaacccttcttgctccaggcatgtgcaggaggttttttggtttcagcattttgttgcatgctgactatgtcctttaccttctcttaaattatgtatcaattcatgctggtttattcacttcctgatgtctatatgaagaggctgtctgccaacatctttcatcactctgcctgcaactatgaaaaatttagttctaaaaaatgcaaccttgctaaattgagtactaataggattggttcaattatgttctatgtctgttccatattgacattgtgtgcatctttgccatgcaggctttttaggaattatcgcatctctaacttcccacgagtgtttatgaaaatgtttagatttaaagaactttattgctttagacagaataaggcatgcagttctaacagaaagatccatgaattccagaaatatcactgaaaattattgacatttaagattattttctgtttgttactatggttcacaattcaagaataactctggccaggtgcagtagctcacaccctgtaatcccagcactttgggaggctgaggtaggcagatcacttgagctcaagagttcaagaccagcctgggaaacatggcaaactcccaccattacaaaaaaatacaaaaattagttggtcatggtggtgttcacctatagtcccagtgacttgggaggctgggatgggaggatctcttgagcccaggagatgcaggcttgcagtgagccatgatcatgccactgtactgcagactgggtgaaacagcaagatcttgtctgaaaagaaaaaaaaaagtaaaagaaaaagaaaagaaaataactcccattgctaaagacatatatgcttatcaggttaagataaagtgaattttgttcttcccaatgacatttcaggatatttgttcacaggaaagaacatgttgggaattggtactggctagaaatttctgttgagtatttattaccccatggtaataatggtaaaccacagtttagaaagattttttttttgacagccacagcatgttccgaagagatgattggaagatggaagtggagggttaaataatgaaatgcagctaacatttcggaaagtttctaaaagttgtacaacatgccctacagctactctttaaatctccaaatcaaatgagtttcaggtggagcctctgggaggtgatgaggtcatgagagtggagcctcatgaatgggatgagcactcctacaaaaaggattccagagagctcgcttgctccttccacagtgtgaggacacagagggaaggctctgtctatgaatgagaaagtgggtccccaccagacattgaatctgccgcatcttgatactggacttccagtctccagaactgtgggcaataaatgtctgttgtttattacctgtccagtatctttggtattttgctatagcaacccaaatggactaagaaaacaccagaggccatacctaataaaaatattgacatcacaa

SEQ ID NO: 45215 - DNA, 3224 bp, Homo Sapiens
gtcccacatcccgcatccggcatcccagcggccgggcatgtagcagcggcagcaacggcggaatatgggcgggaaccactcccacaagccccccgtgtttgacgagaatgaggaagtcaactttgaccattttcagattctgcgggccattggtaaagggagttttggaaaggtatgcatcgtgcagaagcgagacactaagaaaatgtatgcaatgaagtacatgaacaagcagaagtgcatcgagagggatgaggttcggaatgttttccgggagctgcagatcatgcaagggctggagcaccccttcctggtcaatctgtggtactccttccaggatgaggaggacatgttcatggtggtggacctgctcctgggaggcgacctgcgctaccatctgcagcagaatgtgcatttcacagaggggactgtgaaactctacatctgtgagctggcactggccctggagtatcttcagaggtaccacatcatccacagagacatcaagccagacaatatcctgctggatgaacacggacatgttcacattacagacttcaacatagcgacggtagtgaaaggagcagaaagggcttcctccatggctggcaccaagccctacatggctccagaagtattccaggtgtacatggacagaggccccggatactcgtaccctgtcgactggtggtccctgggcatcacagcctatgagctgctgcggggctggaggccgtacgaaatccactcggtcacgcccatcgatgaaatcctcaacatgttcaaggtggagcgtgtccactactcctccacgtggtgcaaggggatggtggccctgctgaggaagctcctgaccaaggatcctgagagccgcgtgtccagccttcatgacatacagagcgtgccctacttggccgacatgaactgggacgcggtgttcaagaaggcactgatgcccggctttgtgcccaataaagggaggttgaactgcgatcccacatttgagcttgaagagatgattctagaatccaagccacttcacaaaaagaagaagcgattggcaaagaacagatccagggatggcacaaaggacagctgcccgctgaatggacacctgcagcactgtttggagactgtccgggaggaattcatcatattcaacagagagaagctcaggaggcagcagggacagggcagccagctcttggacaccgacagccgagggggaggccaggcccaaagcaagctccaggacgggtgcaacaacaacctcctcacccacacctgcacccgtggctgcagcagctgagcccacacttgttgctgctcaacaggactgcactcgtctctgccctgcccacccagagcccctctttgtgccctgatggtccctgtctcacccctgaaaacatcagatgcagaaaaagccctggacttggagctgggaagcctgggttctggtcccatctccatgactgattcacgtgtgacctcagacaagtcacgccctctctgtgcctccgttttctgcatctgccaaaggggttaaacacttctgccccacttcaaattacaagattatggggagaacccaattaggtaggaaacatgaaaaacctttgatatttataaaatcatttttacgtgcaaaatataaccttaatatttgaagtgacccccattccccaaagcaatcaaaccgtcatgactttgcaatttggcacatcctagcttgttagagggcacttccgaaaaacacagccctgacagcaaaataaaggtctgatatgttggccccttctatggaaacaacgctgccaaatcctggagcaaaacctgaagtgtcttcatgtgcattctctggcaggccacagtcctgagcttgtaagatggtgcagcatgcagaccagacttgtccccaaggtctcagcgctgcggtctcactcctcccctcatttaagaagactatccttaccttttagtttcagcagtcctcaccaccaccatatccccagtgctgggatggcacacaggtgtccattcagatgagagttgggtcgctgagcattggttactcctgcagagtgtaatcagcaccccatccaactggcccgaaagcccagacctgcagcagaactctccaactctctatcagctttcagggttttctctcctgggaagggtgtaaaatcagcttgtcagattcttcttacagagagtatccaatcggtattggtggagcggctccctatttatacaataggaagcatgggtgcttagaaagtttatttcaggaggaaaatgggttcacacaaaaagcaaactacattctggtctgctcagggagaagcttgcctttgaactggaagatgttgggatgagcagggaaagcttagactttggagtcaggtttgtgttcagaatccagccctgctggctactaactaactgggagaccttaggcaaagcatgcaatcgctctgaatggcagtttcctcatttttaaacagggataataaaactaatattgcaggggagttacagggttaaataagatcctgtgtgtaaccccaagcattggatgactcatagaatggccttttttgtcagcataatcgtcatcattatttagatactttcttccttcactcacccagcaggtcagttttctgtgcaaacaaacctgtttaggattcttccaaatgttcttcctggggtctttgatatttgtttgttacatcctgctgaagttcgactgtgtttttattttttcatccaacttccatttttcactttttacatgattactcaatccttggggctgtccatgtcatctcttagatttcttaaaagacattttaatgtatggttaggttttatatttttattttttaaaaaagaaatagtcagtgttttcctcctttcaaccgagactatttctggattgtgtgctcctcgtcagttgacttgttttgcacacttttctttacttcatgtccccatcaacaaccgtcctgctccccacctcccccaggaaataaggggcctgctcctctccctactgtgaccctggaggctcttaagatgatgatggttttttttattgggctgagttcacgaattaggggcaggagctggaagtcgccctaggaacaccagatttcctggttctgttcaagttggcatttcttgtttggaataaactatttcttggacattccttc

SEQ ID NO: 45216 - DNA, 558 bp, Homo Sapiens
tcctccaccccagggaccacctggatcctcacagagccgagcactacagccaccgtgacggtgcccaccggatccacggccaccgcctcctccacccaggcaactgctggcaccccacatgtgagcaccacggccacgacacccacagtcaccagctccaaagccactcccttctccagtccagggactgcaaccgcccttccagcactgagaagcacagccaccacacccacagctaccagctttacagccatcccctcctcctgggcaccacctggacccgcctatcacagaccaccacacccacggccaccatgtccacagccacaccctcctccactccagagactgtccacacctccacagtgcttaccaccacggccaccacggggccaccggctctgtggccaccccctcctccaccccaggaacagctcacactaccaaagtgctgactaccacaaccacttcacagccaccccctcctccagcccagggacggcacgcacgcttccagtgtggatcagcacaaccaccacacccacaaccagaggttcc

SEQ ID NO: 45217 - DNA, 4625 bp, Homo Sapiens
gagaggtgaatattattgaatgaaaatggctgacagaagtgggaagattattccaggacaagtgtatattgaggtggaatatgattatgaatatgaagcaaaggacagaaagattgtgataaaacaaggggagaggtacatcttggtgaaaaagaccaatgatgactggtggcaagtcaagccagatgaaaactccaaagcgttttatgtgccagcccagtatgtgaaggaggtcacgcgcaaagctctcatgccacctgttaagcaggtagctggtctgccaaataactccacgaaaataatgcagagtttgcatcttcagagatcaacagaaaatgtgaacaaattgcctgagctttcaagtttcggaaagccatcgtcatctgttcaaggaacaggtcttattcgtgatgccaatcagaattttggacccagttataatcaaggtcagactgtcaacctaagcctggacctgacccataataacggaaagtttaacaatgactcacattctcctaaagtttccagccagaataggacacgctcatttggtcattttcccggtccagagttcttggatgtagagaaaactagcttctcccaggaacaatcttgtgattccgcaggagaaggctctgaaagaatacatcaagattctgaatctggtgatgaacttagcagcagctccactgaacagataagggcaaccacacctccaaatcaaggaaggccagattctcctgtctatgctaaccttcaagaactgaaaatatcccagtctgctcttcccccacttcctgggagcccggcaattcagattaatggagaatgggaaactcataaagacagctcagggcgttgctattactataacagagggacacaggaaagaacttggaaacctcctcgttggactcgggatgcaagcatcagcaaaggagatttccaaaatccaggggatcaagagtggctcaagcatgttgatgatcaaggtagacaatattactacagtgcagacggatctcggtcagaatgggaattgccaaagtataatgcttcatcccagcagcaaagagaaataattaaaagtaggagcctggacaggcggctgcaagaaccaatagtattaacaaagtggagacatagcaccattgtattggacactaatgataaggaatctccaactgcctcaaaaccctgctttcctgaaaatgagtcttctccctcctcaccaaagcaccaagatacagatcaagagaaatatggattattaaatgtaacaaaaattgctgaaaatgggaaaaaggttcgaaagaactggttgtcttcttgggcggtgttgcagggttcatctttactttttaccaaaactcaaggaagtagcacaagttggtttggcagtaatcagtccaaaccagagttcacagtggacctcaagggggcaacaattgagatggcttcaaaggataaatccagcaaaaagaatgtatttgagctgaaaactcgtcaaggaacagaactgctaattcagtctgacaatgacactgttattaatgattggtttaaagttcttagtagtacaatcaataatcaggcagtagaaactgatgaaggaattgaagaggagataccggattcaccaggaatagaaaagcatgataaagaaaaggaacaaaaggatcccaaaaagcttcgttcctttaaagtatctagcatagattcttcagaacagaaaaaaaccaagaaaaacttaaagaagtttcttacacgacgccccactttgcaagctgttcgtgaaaaaggttatattaaagatcaggtatttggatccaatctcgctaatctgtgtcagagagagaatggcacagtaccaaagtttgtgaagttatgtattgaacatgttgaagaacatggtttggatattgatgggatatacagagtaagtggcaacctcgcagtgatccagaaactaaggtttgcagtcaatcatgatgagaaattggacttgaatgacagtaaatgggaagatattcatgtcattactggagccctcaaaatgttttttcgagaattaccagaacctctttttacatttaatcattttaatgattttgttaatgcaattaagcaagaaccaagacagcgagtcgctgctgttaaggacctaatcagacagttgccaaagccaaaccaagacacaatgcagattcttttccgacatctcagaagagttatagaaaatggagagaaaaatcgaatgacctatcagagtatagcaattgtttttggtcccactctattaaaaccagaaaaagagactggtaatatagcagttcatactgtgtaccagaatcagattgtagaattaattcttctggaactgagttccatcttcggacgttgattcttactgaagacaacctgtggaatagaagctggattccatcagatttcaaatgtttatacacaatgtattttattttttggaccaagcagtgactctttgattttgcactttttttttgagggatcagaagggaaggggagagtcgagatgtgtgttaggccctcatatttgctgctttgttgcaagttgatataactgcgtgtaattatgaattcattttatcctgaatgtttgcatttcatactctgaatttcagtaaaaatcaaaacttaaaattctaaccagtcatatacactggataatttggtaagaaaactgtattttttttccctgaaattggataatgtactttcttctcaagattcatgacttgatagaacaatactttcagttatgttgcaaaggctcttgggcattttaaacaaaatgaagtatatccattttgaaacctgtgtatttctttttcggggtttctgcatgcagtggcagtcttaagtgccaaaattcattataaccccaaaataaccccttgatgaaggcttgctgtcttttactgtgttacacagcatccttactggatatcttagttgcttgtttgggcagcacactaatattacttaaaacactgtgatatactggagttttagttagcggaagtcagttcagggcattttagggctgtcttgctatactgaattgtagctaacaatcctaattatatctagtaccatactgagttattggtatgaccctgtggaaacacacattattttatgtaaatataggctaaagacttaatgtcctttagcttgtgtatataattgtgttgtatagtctcagagtacattctaaccctacatttctaatcattgttattggtaatcttttctgtgaatattaggtttcctccagaaatagtccgttatttgggaaagttaactgtgtgcacttttagatattaactacatttacaggcaaatcactgtaatgagaatggtactggaaaaatactgaatagacttgctaaatggcacatgcactacaagaggaaccttttgggttatttaatatgtacagaaaacattagaaaaaatttattacagaattctaattccagtatgaatagtggaaacccatctgtaaattagatggatgttggatggaaaatgacattgctaaatttgagaatttctttttacctactaatgtagattgctttgtataataaaacacagggtttggaaggttttgttacagggagcatggtctgttgaagatttttaaaatgtatttttctagattaacttctgtacatgaaatgtctaataaaactataagaggtttagagatttttccattggaaatgtgcattttggtttctaatttttttgttttttcatttactggcatactgttatacctcatttttaaaaatcaactgaatccaatatttcctgtggcaaataacactttcctcatttcataccttttctcctctcttccatgccaacatttctccacccacaacgtacactttttatttctccatcaatatttgaaagcgagtgatttgtgaccaggatttttttttcttagggttgcatttataatttacagattgccttccttgggaacaagtatttttttgtatgatctgtctaaaaacctctcacctgaattttgtggtagaaagtctgtatttgttgttgtgagcgtgttaaattgataacaaaccaaactacttgatagctaaagcagattgtttcgggtggggagaaaaagccctaaatcagaatgtttatatttgcctaaagatgtccttaataatacaatatgctttagatcttgcttatttagtgattgtataccaggaaaacaattagactcaaatcagtgatgttcttgttcttggtgttcatgaacatatatcaaagattaaaattgtcctgtgtttcttgtttcaaggtacgtgtgtgtgtgtgtgtgtgtgtgtgtgtgtgtgtgtgaagtcttaaatgttttattagtctacagctaatcagtttattgtaatattgtatgtacagtgagattaatgtcttgcgttttcatcctttgtgaattaaaaattctcacttgttttgtaataacaaagctagtaatattttcctgtcttgacagcttggttttatagtagaaaatatattaaaagctgaaataaattatcagtggaatttta

SEQ ID NO: 45218 - DNA, 543 bp, Homo Sapiens
atggtaggcggcggcggggtcggcggcggcctcctggagaatgccaaccccctcatctaccagcgctctggggagcggcctgtgacggcaggcgaggaggacgagcaggttcccgacagcatcgacgcacgcgagatcttcgatatccgccgctgctgggcgcgggcggagtcccttttccttcacttcccacatctgattcgctccatcaatgacccggagcatccactgacgctagaggagttgaacgtagtagagcaggtgcgggttcaggttagcgaccccgagagtacagtggctgtggctttcacaccaaccattccgcactgcagcatggccacccttattggtctgtccatcaaggtcaagcttctgcgctcccttcctcagcgtttcaagatggacgtgcacattactccggggacccatgcctcagagcatgcagtgaacaagcaacttgcagataaggagcgggtggcagctgccctggagaacacccacctcttggaggttgtgaatcagtgcctgtcagcccgctcctga

SEQ ID NO: 45219 - DNA, 1149 bp, Homo Sapiens
aaggctctacaattgaatgagctcaccatggatgatgataccgctgtgctcgtcattgacaacggctctggcatgtgcaaggccggctttgcgggcgacgatgccccccgggctgtcttcccttccatcgtggggcgccccaggcagcagggcatgatggggggcatgcatcagaaagagtcctatgtgggcaaggaggcccagagcaaaagaggcatcctgaccctgaagtaccccatggaacacggcatcatcaccaactgggatgacatggagaagatctggcaccacaccttctacaacgagctgcgtgtggctcccgaggagcaccccgtcctgctgaccgaggccaccctgaaccctaaggccaaccgcgagaagatgacccagatcatgtttgagaccttcaacaccccagccatgtacgtggccatccaggctgtgctgtccctgtacacctctggccgtactactggcatcgtgatggactctggtgacggggtcacccacactgtgcccatctatgaggggaatgccctcccccatgccaccctgcgcctagacctggctgggcgggaactgcctgactacctcatgaagatcctcaccgagcatggctataggttcaccaccatggccgagcgggaaatcgtgcgtgacatcaaagagaagctgtgctatgttgccctggacttcgagcaggagatggccacggtggcctccagctcctccctagagaagagctacgagctgcccgatggccaggtcatcaccatcggcaacgagcggttccgctgccccgaggcgctcttccagccttgcttcctgggcatggaatcctgtggcatccatgaaactaccttcaactccatcatgaagtctgatgtggacatccgcaaagacctgtacaccaacacagtgctgtctggcggcaccaccatgtaccctggcatggcccacagaatgcagaaggagatcgctgccctggcgcctagcatgatgaagatcaggatcattgctcctcccaagcgcaagtactccgtgtgggtcggtggctccatcctggcctcgctgtccaccttccagcagatgtggatcagcaagcaggagtatgatgagtcaggcccctccattgtccaccgcaaatgc

SEQ ID NO: 45220 - DNA, 904 bp, Homo Sapiens
cttttccacagagaagagggcagccaagatgacccgatggtccagttacctgttgggatggacaaccttccttctctattcctatgagtcaagtggagggatgcatgaggaatgtgtctttcctttcacctacaagggatctgtttacttcacttgcacccatattcatagcttatccccttggtgtgccaccagagccgtgtacaacggccagtggaagtactgccagagtgaagattacccacgctgtatcttccctttcatctatcgaggaaaggcttataacagctgcatctcccagggcagcttcttaggcagtctgtggtgctcagtcacctctgtcttcgatgagaaacagcagtggaaattctgtgaaacgaatgagtatgggggaaattctctcaggaagccctgcatcttcccctccatctacagaaataatgtggtctctgattgcatggaggatgaaagcaacaagctctggtgcccaaccacagagaacatggataaggatggaaagtggagtttctgtgccgacaccagaatttccgcgttggtccctggctttccttgtcactttccgttcaactataaaaacaagaattattttaactgcactaacgaaggatcaaaggagaaccttgtgtggtgtgcaacttcttacaactacgaccaagaccacacctgggtgtattgctgatgctgaggaaaggagaaatatcttcagaggaagactgccgccatactgaggctgagcacagatttgtctttttcattgcatctgtcaagcttaaataaccacctttagaaataccctctgcaccacctgcttcaatcagctggtcctttgtgaagaacgtagagagaatgcggcataaccaccaataaaggagtcttgatttaa

SEQ ID NO: 45221 - DNA, 1122 bp, Homo Sapiens
atgggatcctcagaggaccaggcctatcgcctccttaatgactacgccaacggcttcatggtgtcccaggttctcttcgccgcctgcgagctgggcgtgtttgaccttctcgccgaggccccagggcccctggacgtggcggcagtggctgcaggtgtgagggccagcgcccatgggacagagctcctgctggacatctgtgtgtccctgaagctgctgaaagtggagacgaggggaggaaaagctttctatcgaaacacagagctgtccagcgactacctgaccacggtcagcccgacgtcacaatgcagcatgctgaagtacatgggcaggaccagctaccggtgctggggccacctggcagacgccgtgagagaaggaaggaaccagtacctggagacgtttggcgttcccgctgaagagctttttacggccatctacaggtccgagggcgagcggctacagttcatgcaagctctgcaggaggtctggagcgtcaacgggagaagcgtgctgaccgcctttgacctgtcagtgttcccacttatgtgtgaccttggtgggacatggataaagctggaaaccatcattctcagcaaactatcgcaaggacagaaaaccaaacaccgcgtgttctcactcataggtggggctggagctctggctaaggaatgcatgtctctgtaccctggatgtaagatcaccgtttttgacatcccagaagtggtgtggacggcaaagcagcacttctcattccaggaggaagaacagattgacttccaggaaggggatttcttcaaagaccctcttccggaagctgatctgtacatcctggccagggtcctccatgactgggcagacggaaagtgctcacacctgctggagaggatctaccacacttgcaagccaggtggtggcattctggtaattgaaagcctcctggatgaagacaggcgaggtcctctgctcacgcagctctactctctgaacatgcttgtgcagacggaagggcaggagaggacccccacccactaccacatgctcctctcttctgctggcttcagagacttccagtttaagaaaacaggagccatttatgatgccattttagccaggaaataa

SEQ ID NO: 45222 - DNA, 393 bp, Homo Sapiens
atggaggcgccggccgagctactggccgcgctgcctgcgctggccaccgcgctggcccttctgctcgcctggctactggtgcggcggcgtgggcaggctggaccttcgagggcctcctctgtctcccctaccttctgcccccccaccacttcccatcacccagtctgtgccaagggcactgaccctgtccttgtcttgcaggaagaggagcaggacttggatggtgagaaggggccatcatcggaagggcctgaggaggaggacggagaaggcttctccttcaaatacagccccgggaagctgaggggaaaccagtacaagaagatgatgaccaaagaggagctggaggaggagcagaggattgagctgacctctgacctcacttccctgtag

SEQ ID NO: 45223 - DNA, 2344 bp, Homo Sapiens
gcagattctccaggcccagcatctgcctcaccgtggccccccacaagccaagcgcctgcctttcagcagcctctacacacccagctcctgccacccaatggctctttaggccaagctcatacctcacgatgatttttccaggcccaacttttgtctcatggcaaccttccctggccaagtttccacctatttcctggcagcctggacaggcccaggtcctgccacacactggcctctctacgcccagctcatgcctcacagtggcctctccaggcccagctcctgtcccgggacatcatctccaggcccaaaacttcctcaagtcggcctctccaggcccagttgctgcctcccggcattctctccaggcctagctcttcctcctggctgtatctacaagaccaactcctgcctcacaacaaccttttatggctcagctcctgcccaactactgccggcctttgtaggcccaaaacttcctcaagtcaagctctttaggcccaccttctgccttgcagtggcctgtacagacccagctctggcttgagaacagcctctgcaggccctgctcttgcctcttagctccctctccaggcccatctcttgcctcacagtggcttccgtgggccaagttcccgcctgcctcccagcagcctcaacaggcctagctcctccctcacaatggcttgtttaggtccagttgatgcctctggcaacctgtccaggcccagctcctgcctcacactggcctctctaggccgaggtcctttctcatactggcctgtttaggcccagctcattcctcttgtcatctctccaggcccagcttttgcctgttgttggcctctacctcacagtgcaccttccagtcccacctcttgcctcaccatggcctcctctgaccaggttcctgcctttcggcagcctctacaggcctagctgctgcctcccaatggcctttgtaggccacgctcatgcctcactgtggcctttccaggcctagctttcgctttttggccactccaggcccagaacttcccccagtcagcctctccaggcccagctcttcctcccagcaacctctgcaggcccaaatcatcctcaaattggcctcttctttcccagctcctgcctcctggtggcctctgaagacccaaatcgtcctccagttggtttttccaggcccagctcctgccttttggtggcctctccaggtgcaaaacttcctcccatcagcctgtccaggcccagctcatgcctcttggtggccttctcaggccctgcttttgacttggtggcctcttcaggcccagaacttgaactcaagtcagcctctccaggcccagctcctgccttcttaaggtctgtacaggcccagcctctacctcacagcggactctccacacccagctcttgcctcactgtagcctccccagtccaaaactcctgccttttggcagcttcgacaagcccagctcctgcctttcaatgacctctttaggccccgctcattccttacaacggcctttccaggcccagtttttcccttttggcggcctctccaggcccagaacttcctcaagtcggcctctttaggcccagttgctgcctcctggcatcctctgcaggccgagctcttcctccctgctgtgtctacaggcccaactcctgcctcacaacaacctccttggactcagcttctgcccagctcctggtggcctttgtaggctcaaaattttctcaaatcaagctctccaggcctactgtcagcctcgtggcagcctaaacaggcccagctcctgcctgacaatggcctctccaggcttttctcctgcctcgcagcaggctttccaggcccagctcttgcctcatggtggccttccccggccatgttcctatctgacttctggcagcctcaaccggcccagcttctgcctcacactggcctctctaggcccagctcctttttcacagtggcctcactaggcccatctcctacctcagatctgcctcccaagacccagctcctgtctcatggtggtctctcttacaccagctcctgcctcacaatggcctcgtctggcccatcttctgcctcacagtggccactcaaggcccatcttttgcctcatggtagcctcttctggttttgctcttgcctcacagttgcctcttccagatccagctttaagcctttgatggtcaacagcatcaaggagcctaaagcttccctggactctcatttgttcactttacagcagagtgccttagcaaaaactgtctcttaaccttgagagtggatttctgacaaatcgatagtaaattctgcctgtgtggtttcaca

SEQ ID NO: 45224 - DNA, 1629 bp, Homo Sapiens
atgctggatgggtccccgctggcgcgctggctggccgcggccttcgggctgacgctgctgctcgccgcgctgcgcccttcggccgcctacttcgggctgacgggcagcgagcccctgaccatcctcccgctgaccctggagccagaggcggctgcccaggcgcactacaaggcctgcgaccggctgaagctggagcggaagcagcggcgcatgtgccgccgggacccgggcgtggcagagacgctggtggaggccgtgagcatgagtgcgctcgagtgccagttccagttccgctttgagcgctggaactgcacgctggagggccgctaccgggccagcctgctcaagcgaggcttcaaggagactgccttcctctatgccatctcctcggctggcctgacgcacgcactggccaaggcgtgcagcgcgggccgcatggagcgctgtacctgcgatgaggcacccgacctggagaaccgtgaggcctggcagtgggggggctgcggagacaaccttaagtacagcagcaagttcgtcaaggaattcctgggcagacggtcaagcaaggatctgcgagcccgtgtggacttccacaacaacctcgtgggtgtgaaggcaagtggggtgatcaaggctggggtggagaccacctgcaagtgccacggcgtgtcaggctcatgcacggtgcggacctgctggcggcagttggcgcctttccatgaggtgggcaagcatctgaagcacaagtatgagacggcactcaaggtgggcagcaccaccaatgaagctgccggcgaggcaggtgccatctccccaccacggggccgtgcctcgggggcaggtggcagcgacccgctgccccgcactccagagctggtgcacctggatgactcgcctagcttctgcctggctggccgcttctccccgggcaccgctggccgtaggtgccaccgtgagaagaactgcgagagcatctgctgtggccgcggccataacacacagagccgggtggtgacaaggccctgccagtgccaggtgcgttggtgctgctatgtggagtgcaggcagtgcacgcagcgtgaggaggtctacacctgcaagggctgagttcccaggccctgccagccctgctgcacagggtgcaggcattgcacacggtgtgaagggtctacacctgcacaggctgagttcctgggctcgaccagcccagctgcgtggggtacaggcattgcacacagtgtgaatgggtctacacctgcatgggctgagtccctgggctcagacctagcagcgtggggtgagtccctgggctcagtcctagctgcatggggtgcaggcattgcacagagcatgaatgggcctacacctgccaaggctgaatccctgggcccagtcagccctgctgcacatggcacaggcattgcacacggtgtgaggagtgtacacctgcaagggctgaggccctgggcccagtcagccctgctgctcagagtgcaggcattgcacatggtgtgagaaggtctacacctgcaagggacgagtccccgggcctggccaaccctgctgtgcagggtgagggccatgcatgcagtatgaggggtctacacctgcaaggactgagaggctttt

SEQ ID NO: 45225 - DNA, 1593 bp, Homo Sapiens
agccatggagcgctctgggcccagcgaagtgacaggctcagacgcatcgggaccggacccgcagcttgcggtcaccatgggcttcacggggttcggtaaaaaagctcgcacatttgacttggaagcaatgtttgaacaaactcgaagaacagctgtggaaagaagttgcaaaacactgggatccaccttgatgttcagtgaagagtaccagaaaagtctgctagagcagtaccatctgggtctcaatcaaaaacgcagaaaatacgtggttggagagctcatctggaattttgccgatttcatgactaaccagtaaagaagatggaagaagaaggaaagaaaaggcataatgtaaatataaacgctgtctttatttctggatctagcaaagagttagtttgaaagagcaattgcttataagactacaaggctgatttctcccatccctgcaatgctgaaagtctgtgcccttctaagcaaattctagtttccctgacaattagtctaatggaatgcctggatgtaggaatattgattccgatgacagtacttttacagatggacctgagatatttctgctggttcttcactgacaacacacaacatatggatgatcataactttcccatataccccactagggcaaaaccagaaactgagaaagctagatggaagaataatgatgtggaaggggagttctccactaggaaggatccgatgagtagatagacacaaggacaaagagggcctaactttgggctgtggaagcggagttgcactcataggagccatagtgagtcattgcatcagaaccactaagcatcagtcatgaagagcaaacgggcttgctgttacaggagctaaaccctgaacccttccatcgtggttacagagagcttctgggggacagcatgagacagcttagcacttccccaatattatgaggaaacccaaaggcccagatgccacttgggaaaggagaaccaagaaggaaggacttcagaaaaggaagaaaccatgaaacattaagtaatttacaaactagactcttctttattctcttattttatttatttctttatttttgagacagagtctcactttttgcccttgatgaaatggactggcccaatcatggctcactgcagcctcaaaatcctggcctcaagaaatcctccagactcagcctcctaaagtgctgggattacaggcatgagccacagcacctgacctagactgttttaaactagatttccctgagaaaactttcactggaaaaatcaaaattatcctgctgtcattaagagaaaactatctgttgtagaaaattacattcttttttttttcagacatgtcatataaatatttggacccctctctgagaacaaactacttaaaagtcatttcaatcattaacgaatatcataattgagggcctgtgctgggtgccagaaatctaccagtgagcaaaacagcacggatctttgtccacagtaaatttacagatcagaggaaacagaaaaacaatcagttaaataaaacaggtctgaaaattgcgtatgagaacccaaagcagaggtacctaatcaggtc

SEQ ID NO: 45226 - DNA, 754 bp, Homo Sapiens
catcaccagtgtgtggagcctgccacacccacccgctgccaaaccacggcctttacctgtgtcttccggtgtttcccgtgcgacccatcctgtgggagtgcctcgtgggctgccccagagttcaccccacactcagcagcaccaatggtgaagatgacaagatcgaagactttccaggcatatctgccctcctgccaccggacctacagctgcattcactgcagagctcacttggccaatcatgatgaactaatttccaagtcattccaaggaagtcaaggacgagcatacctctttaactcagtagttaatgtgggctgtgggcctgcagaagagcgagtgttgctaacaggactgcatgcagtcgcagacatttactgtgaaaactgcaaaaccactctgggctggaaatacgaacatgcttttgaaagcagccagaaatataaagaaggcaaatacatcattgaactagcacacatgatcaaggacaatggctgggactgattggacagcatctacccaacccagtgtccacgtgaacgccattcaaccgaacattcttcccaagcgtgagagagtgactgacacttggttccatccatttaggggccttgccatccggggcatcctcccaccctgacgccatctttctggtgaccggcctctaaatcgctgtctctctgtctctttgctttgtatctgtttgtgagttgatcctggcttctctctctgttctagttttggctgaaaacaa

SEQ ID NO: 45227 - DNA, 2198 bp, Homo Sapiens
gcagagccatggggccttcacaggctgcagtgggtcccgagcccccagggctgtgcctgctggtcctgaccaagatcgcggctgccgaggtcagtccagcgccaagggcacagggccagggcaggcggggcagggctacccgaagcgcatagaggctgctggtgtcaacgtgacgtcttctggggcgcctggcatccctaggagtggaagccgctgatgaagtcaaagctgcctcctccttcaggaagactttgctcccatagctggcgaacaggaagcggagcagcgccaggaggatctgcgggcgctgctgagggcttctttgcagggacagtgcagcaggcagccagggacaagactgcacggcagcgccccatggccaggggaagctcagaaccggagtcgcccgctgcccggcgattctccatccctggatcggtacaggggcatttggacgctgtggggaagtcgcggtctggggatattgggtccagccttcgggtagaagcaggtgataaacgcactcaggccagcccggagcgtcagccacactgcggtgcccacgatgcccagggtgagcgccacgaggcgcaggaaattggctagggtgggagctcactggtaggcggccctggaagtcaaagatctgctgctccagcgctgccaccagttgcaggcagcagaaggcgaggagcgtgtggcacccgcgtactcgcccatcgctccgcggacctctttatccaaccttcaataattattctttttattatattcaatgattattctacttttcatagagagcagctgtcagtccaataacacacttaacaaatgatatacctagtcctcaaggttaacaaacacatgaagaccagcccaaccctgaaaatcagtttgcaaaccttcgctatatctgatgccattcctaaaaatttttagggacaagttttgtttgtggtaaacaacataaggtggggtgtgtgctgagcccaaagctgaccaattgctcacaattactcataactacccattgacttgattttatcaaacttcagacagtcttgtctcctctcctcaggcccctggaccttggctcaccacctaagactgaacaagcactaaaggacagaccagcccgctaacagctcactccaaaaatgagcgggactcccagagaaactatttttattggagcatcctggttttgccacctgctcaccccactgcctgttcttctctccaaggaggcttctgccagccctgcttgtccttccctagaaaaggaaagccttttcctgtttgatcctgagacacctgtagattgagtttggaatattctccctattgcaatagtatttttgaataagttttatttttccctacctctggttgatttttaattaataccagtaagcttggatgaaagcctgcacaccttaggtgtgtgtgtgtgtgtgtatgtatgtactttagcattatcataaagtaataacagtaaaatcaaacaaacacagatggataagcaatatgttggactagtatgaaaatggcattgccagcagtgatatgatttttttttcaaaatggtacactttttgaagtataatcttattttaacctaaaatcttactatcagaaaatgcagtgtacattaaaatgttctgaactgcttttattcatatattaaatggttgtactcaaatatctacaaatttgtttttcacttatgtaattgtcttatagaatgttcaaaagtcttgcagaatgtgagacaattttctattgaatacgatcgctttatcattgcaagacatcaaacatccctgtttcctgccaaataaatgtacaatagcaataaatgtaaagatgtgttttgtaaaaaagatatatttttgagttacaaaacaaggattttaaaacttgaattgttacagtgaatatgtcttaatacaggccagagtcatttaggtaaaaaattacctcatatctattctttacagtatcacttaaaggtgtttatttagcggcaaagatttttttttttttgtgcctagaggcagatattttgccccatggctatttacggtatgaaactgtatttaaatgagtgtacatacataaaagctgccattctggctgtaaactattgcaggttatcaagattaaaaaataaacaaataaaaatatttcagtttttc

SEQ ID NO: 45228 - DNA, 427 bp, Homo Sapiens
tgtggggtccacaggatattcccatagttctaggagaggacagacattagcctgcctaaagaaacatcaagcagagccccaggaataaactgtggaattcctaacgattcaaaaagatttgcaggatgcatcagacctgcctagacattgtaaggcccttcttgggaatggagttagaagagcatattccagcgataacctcacagtcatgaaatggttcttcctccagcgtgacccaaccatggtgatggtcataggagtcctaaggatgaaatcccaagacgatggaggagtgtcacctcacaacatgaagcacccactcagctgtgaaccaaattcgaggatcatgggactatactgtggatcccacaaaaaagacagttcaatttgagatatagaaacactggaacatttcacagcatggcct

SEQ ID NO: 45229 - DNA, 1323 bp, Homo Sapiens
atggcagcccccggggccccagctgagtacggctacatccggaccatcttgggccagcagatcctgggacaactggacagctccagcctggcgctgccctctgaggccaagctgaagctggctgggagcagcggccgcggcccagtcaagagcctgcggatccaggagcaggtgcagcagatcctcgcccggaagggccgcagctccgtgggcaacggaaatcttcaccgaaccagcagtgttcctgagtatgtctacaacctacacttggttgaaaatgattttgttggaggccgttcccctgttcctaaaacctattacatgctaaaggctggcacaactgccacttatgaaggtcgctggggaagaggaacagcacagtacagctcccagaagtccgtggaagaaaggtatttgaggcatcctctgaggagactggagatttctcctgacagcagcccggagagggctcactacacgcacagcgattaccagtacagccagagaagccaggctgggcacaccctgcaccaccaagaaagcaggcgggccgccttcctggtgccaccgagatatgatcgttctgagatcgcgggggtccgccgtactggcaccacaagcaggcagcaccactttgacaccacaggcagtaccagcggctctgttagtgacaccgtttttgacagcatccctgccaacccggccctgctcacgtaccccaggccagggaccagccgcagcatgggcaacctcttggagaaagagaactacctgagggcagggctcaccgtcggccaggtcaggccgctggtgcccctgcggcccctcactcagaacagggcttccaggtcctcctggcaccggagctccttccacagcacccgcacaccgaggaaagctgggcccagtgttgccgtggattccagcgggaggagagcgcacttgaccgtcggccaggcagcggcagggggaagtgggaatcttctcacccagagaagcactgactcccagctggggaatgcagacatggagatgactctggagcgagcagggagtatgctcgatgcagaccagatgccgccgtccaggatttctgccgcagccactttcatacagcacgagtgcttccagaaatctgaagctgggaagagggttaaccagttttgtggcatccccaagcttctgcagctcctaaaagttcagaatgaagatgttcagcgagctgtgtggggggccttgagaaacttactatttgaagacaatgacaacaaattggaggtggctgaactaaatggggtaactcggctgctccaggtgctgaag

SEQ ID NO: 45230 - DNA, 1212 bp, Homo Sapiens
aggacagccatcatcaaagagatcgttagcagaaacaaaaggagatatcaagaggatggattcgacttagacttgacctatatttatctaaacattattgctatgggatttcctgcagaaagacttgaaggcgtatacaggaacaatattgatgatgtagtaaggtttttggattcaaagcataaaaaccattacaagatacacaatctttgtgctgaaagacattatgacaccgccaaatctaattacagagttgcgcaatatccttttgaagaccataacccaccacagctagaacttatcaaacccttttgtgaagatcttgaccaatggctaagtgaagatgacaatcatgttgcagcaattcactgtaaagctggaaagggacgaactggtataatgatttatgcatatttattacatcggggcaaatttttaaaggcacaagaggccctagatttctatggggaagtaaggaccagagacaaaaagggagtaactattcccagtcagaggcgctatgtgtattactatagctacctggtaaagaatcatgtggattatagaccagtggcactgttgtttcacaagatgatgtttgaaactattccaatgttcagtggcggaacttgcaatcctcagtttgtggtctgccagctaaaggtgaagatgtattcctccaattcaggacccacacgatgggaggacaagttcatgtattttgagttccctcagccgttacctgtgtgtggtgatatcaaagtagagttcttccacaaacagaacaagatgctaaaaaaggacaaaatgtttcacttttgggtaaatacattcttcataccaggaccagaggaaacctcagaaaaagtagaaaatggaagtctatgtgatcaagaaattgatagcatttgcagtatagagcgtgcagataatgacaaggagtatctagtacttactttaacaaaaaatgatcttgacaaagcaaataaagacaaagccaaccgatacttttctccaaattttaaggtgaagctgtacttcacaaaaacagtagaggagccgtcaaatccagaggctagcagttcaacttctgtaacaccagatgttagtgacaatgaacctgatcattatagatattctgacaccactgactctgatccagagaatgaaccttttgatgaagatcagcatacacaaattacaaaagtctga

SEQ ID NO: 45231 - DNA, 1065 bp, Homo Sapiens
aatacacattgcagaaaaaggatgaagttgaccagtgaaaagttgcccaagaaccccttttatgcctctgtatctcagtatgctgctaaaaaccaaaaatttttccagtggaaaaaggaaaagactgattacacccatgctaatttggtggataaggcattgcagctcttgaaggaaagaatactgaaaggagacactctggcatatttcctacgaggtcaactatattttgaagagggatggtatgaagaagcattagaacagtttgaagaaatcaaggagaaagaccatcaagcaacttaccagctaggagtgatgtactatgatgggctggggaccactctagacgctgagaaaggggtggactatatgaagaaaattcttgattctccatgtcccaaagcaagacacttaaaatttgcagctgcttacaacctcggaagagcttattatgaaggaaaaggtgttaaacgatcaaatgaggaagctgaaagactgtggcttatcgcagcagacaatggaaatcccaaagctagtgtgaaggctcaaagtatgctcgggctgtattactcaaccaaggagcccaaggagttagaaaaggcattttactggcattccgaagcatgtggcaatgggaatctggagtcccagggtgcacttgggctcatgtacttgtatggacaaggcatccggcaggatacggaagctgccctgcagtgcttaagagaagcagcagaacgcggaaacgtctatgctcaagggaatctcgtggagtattactataagatgaaattttttacaaagtgtgttgcattttccaaaaggatcgctgactatgatgaggttcacgacatccccatgatcgcccaggtcacagactgtctcccggagttcatcggcagaggcatggcaatggcatccttctaccacgcaaggtgtcttcagcttggcttgggcatcaccagggatgaaacaaccgctaaacactattattctaaagcttgtcgtctgaatcccgcattggcagatgaacttcactccttacttattcgtcaaagaatttag

SEQ ID NO: 45232 - DNA, 2316 bp, Homo Sapiens
caggcggcgaggcggccgtcgagggcgcgggcggcggggacgcggcgctgggcgagccggggctgagcttcacgaccaccgacctgagcctggtggagatgacggaggtggagtacacgcagctgcagcacatcctctgctcgcacatggaggcggcggctgacggcgagctcgagacgcgcctcaactcggcgctgctggcggcggcgggcccgggcgcaggcgcgggcggcttcgcggcgggcggtcaggggggcgcggcgcccgtgtaccccgtgctgtgcccgtccgcgctggcggccgacgcgccctgcctgggccacatcgacttccaggagctgcgcatgatgctgctaagcgaggcgggcgcggcggagaagacgtcgggcggcggggacggagcgagggcccgggccgacggcgccgccaaggagggcgcgggcgcggctgcggctgcggctggacccgacggcgcgcccgaggcccgggccaagccggccgtgcgcgtccgcctggaggaccgcttcaacagcatccccgccgagccgccgcccgcgccgcgcggccccgagccccccgagccgggcggggcgctcaacaatttggtaactctcattcgacatccatctgaactaatgaatgttcctcttcagcaacaaaacaaatgtacagcattagtgaaaaataaaactgcggctacaactactgctttgcaatttacatacccactgtttactacaaatgcttgctctactagtggaaattctaatctttcacagacacagagttctagtaactcatgttctgtacttgaagctgccaagcaccaggatattggattgcctagagcattttctttctgttatcagcaagaaattgaatccactaaacagacgttaggtagtagaaacaaagttttgcctgagcaagtttggattaaagtgggagaagcagcgctatgcaaacaagcactgaagaggaatcggagtagaatgcgtcagttggacacaaatgtagagcgaagagcccttggagagattcagaatgtgggcgaaggtgccaccgccacacaaggcgcttggcagtcctcggagtcctcacaggcaaacctgggggagcaggcccagagtgggccccagggaggaaggtctcaacgtagggagaggcataaccgaatggaaagagatagaaggcgcagaatccgcatttgctgtgatgagttgaatctcttagtgccgttctgcaatgccgagactgacaaggccacaactctgcagtggaccacagcattcctgaaatacatccaggaaagacatggagattctcttaaaaaggaatttgagagcgtattttgcggtaaaactggccgaaggctaaagctgaccagaccggactccttggtgacctgtcctgcacaggggagtttacagagcagcccctcgatggagatcaagtgatcggactgaacaggaatcctcggggggtgaacagccattccttcgtgacctgtgcacgccttctgcaaccctggagctctgctcggctagtctgactcgaaaagggcgtgactcaagctgacgggactccagtagggactttgagagcacattttgtaaaaatatttatctagacgcaaatgcttatccatgaatgtcctcttagaccatttggggatgaagccatcttaataattagtaataattaattagtaataattagtaagcattttctcaatgctctgattccatcatgttttcttaacatgataacttaaaaaattgacatcctttgtactttctttaatcttaaaaagtacacggctttttacttatttaccttttaaatatgcccctttagcaattggaacaagttaaattgttaactaaaaacagtttggaaattttatttcattcgttatatcacacccccttgtcatgactctgagtcacgtgctgctgtattgcaacgtgcaggaccattttaaacctgtgtgctaaaaattttccagatacttgctttaaagctacttttgtccacaaatgaaatactgtcacagtagacgcttaaatgccacgttttcataccaagagtcattcattacttcatgtgtcacaaactgtggtgtttggaattgggtttttcaatgagtggctttacttatcaatcacaacaggtaatagcaatagacgttagtgcaatacaaagtcaccctcaataaatactgttaattggagatgtgagtttgtacacaaaacatcagactagacctttgtatgggagagaatttactgtacattaaattctttattttttgtt

SEQ ID NO: 45233 - DNA, 1854 bp, Homo Sapiens
atagtgacaagtttggaagaaggtccagctatggaggaagttcatatgggaatagtactaacaatgtcccagcatcttcctctacagctacagcttccacacagacgcagcattcgggaatgtccccgtcacctagcaacagttatgatacttccccacagccttgcactaccaatcaaaatgggagggagaataatgagcgattatctacatccaatggaaagatgtcaccaactcgctaccatgcaaacagcatgggtcagaggtcatacagttttgaagcctcagaagaggacctagatgtagatgataaagtggaagaattaatgaggagggacagcagtgtgataaaagaggaaatcaaagcctttcttgccaatcggaggatttcccaagcagttgttgcacaggtaacaggtatcagtcagagccggatctctcattggctgttgcagcagggatcagacctgagtgaacagaagaaaagagcattttaccgatggtatcaacttgagaagacaaaccctggcgctacactaagtatgagaccagcccccattccaatagaggaccctgaatggagacaaacgcctcccccagtctctgccacatctggtactttccgactgcgacgagggagtcgatttacctggagaaaggagtgcctggctgttatggaaagttacttcaatgagaatcaatacccagatgaagcaaagagggaagaaattgcaaacgcttgcaatgcagttatacagaagccaggcaaaaagctgtcagatctggaaagagttacctccctgaaagtatataattggtttgctaacagaaggaaggagatcaagaggagagccaatattgaagcagcaatcctggagagtcatgggatagatgtgcagagtccaggaggccactcaaacagtgatgatgtcgacgggaatgactactctgagcaggatgacagtacgagccatagtgaccaccaagaccccatctcattagctgtggaaatggcagcagtcaaccacactatcttggcattggcccgacaaggagccaacgaaatcaagacagaggccctggatgatgactgatcagggaggttaaacatgacaagttaacttagtttagacgtagcaccttagcagactttcctcggtccttaacatgtgttcttacagtataacttgcagtttcttgtatgtcaggtagctgttagggtcttgttctgtgaagatggcatggtgccctcagcctttgcatatactctctcagtattaactcccagtaaataataaccaaccaaccaaccaaacttccctctcccagcccccgaggctagaaaatcttgctgctccgtcttagcattccaagaaagtgcttccaggtatttagatagccctcagttctcaaatattagactacgtgtaaaatcttgggtacctttagattcttgtaacactagtctgtactcccttttccttccccaagactgataggatgcaagctgaggtcgtggcacaggaatgacagacaccatttggggagtatccacagagtcaaaggaacactagaatccccacctcagcgtgaggataattgatttccagctgcaataagccgtgcctcattatagccacactgtggctagattatacttctttgggtgctgtgctaagaatgtcaatggaaaaagccgatctcagattttgtttgaagttaacatgcctgacacagacatcctttcctctcacaagctgtgtgacttagtagataaaatactgccttctgcctttgggaccatgattaaaaacaaagacaaaaaccaaaagtcattaaaaaaaaaaaaaaaaa

SEQ ID NO: 45234 - DNA, 2620 bp, Homo Sapiens
ggctgaacagacaagaaatcacttgaatgctggggacatcacctactctgtccgggccatggaccagctggtaggcctcctagatgtacagcttcggaacttgaccccaggtggaaaagatagtgctgcccggagtttgaacaaggcaatggtcgagacagttaacaacctccttcagccacaagctttgaatgcatggagagacctgactacgagtgatcagctgcgtgcggccaccatgttgcttcatactgtggaggaaagtgcttttgtgctggctgataaccttttgaagactgacattgtcagggagaatacagacaatattaaattggaagttgcaagactgagcacagaaggaaacttagaagacctaaaatttccagaaaacatgggccatggaagcactatccagctgtctgcaaataccttaaagcaaaatggccgaaatggagagatcagagtggcctttgtcctgtataacaacttgggtccttatttatccacggagaatgccagtatgaagttgggaacggaagctttgtccacaaatcattctgttattgtcaattcccctgttattacggcagcaataaacaaagagttcagtaacaaggtttatttggctgatcctgtggtatttactgttaaacatatcaagcagtcagaggaaaatttcaaccctaactgttcattttggagctactccaagcgtacaatgacaggttattggtcaacacaaggctgtcggctcctgacaacaaataagacacatactacatgctcttgtaaccacctaacaaattttgcagtactgatggcacatgtggaagttaagcacagtgatgcggtccatgacctccttctggatgtgatcacgtgggttggaattttgctgtcccttgtttgtctcctgatttgcatcttcacattttgctttttccgggggctccagagtgaccgtaacaccatccacaagaacctctgcatcagtctctttgtagcagagctgctcttcctgattgggatcaaccgaactgaccaaccaattgcctgtgctgttttcgctgccctgttacatttcttcttcttggctgccttcacctggatgttcctggagggggtgcagctttatatcatgctggtggaggtttttgagagtgaacattcacgtaggaaatacttttatctggtcggctatgggatgcctgcactcattgtggctgtgtcagctgcagtagactacaggagttatggaacagataaagtatgttggctccgacttgacacctacttcatttggagttttataggaccagcaactttgataattatgcttaatgtaatcttccttgggattgctttatataaaatgtttcatcatactgctatactgaaacctgaatcaggctgtcttgataacatcaagtcatgggttataggtgcaatagctcttctctgcctattaggattgacctgggcctttggactcatgtatattaatgaaagcacagtcatcatggcctatctcttcaccattttcaattctctacagggaatgtttatatttattttccattgtgtcctacagaagaaggtacgaaaagagtatgggaaatgcctgcgaacacattgctgtagtggcaaaagtacagagagttccattggttcagggaaaacatctggttctcgaactcctggacgctactccacaggctcacagagccgaatccgtagaatgtggaatgacacggttcgaaagcagtcagagtcttcctttattactggagacataaacagttcagcgtcactcaacagagaggggcttctgaacaatgccagggatacaagtgtcatggatactctaccactgaatggtaaccatggcaatagttacagcattgccagcggcgaatacctgagcaactgtgtgcaaatcatagaccgtggctataaccataacgagaccgccctagagaaaaagattctgaaggaactcacttccaactatatcccttcttacctgaacaaccatgagcgctccagtgaacagaacaggaatctgatgaacaagctggtgaataaccttggcagtggaagggaagatgatgccattgtcctggatgatgccacctcgtttaaccacgaggagagtttgggcctggaactcattcatgaggaatctgatgctcctttgctgcccccaagagtatactccaccgagaaccaccagccacaccattataccagaaggcggatcccccaagaccacagtgagagctttttccctttgctaaccaacgagcacacagaagatctccagtcaccccatagagactctctctataccagcatgccgacactggctggtgtggccgccacagagagtgttaccaccagcacccagaccgaacccccaccggccaaatgtggtgatgccgaagatgtttactacaaaagcatgccaaacctaggctccagaaaccacgtccatcagctgcatacttactaccagctaggtcgcggcagcagtgatggatttatagttcctccaaacaaagatgggacccctcccgagggaagttcaaaaggaccggctcatttggtcactagtctatag

SEQ ID NO: 45235 - DNA, 1041 bp, Homo Sapiens
atgtacaacgggtcgtgctgccgcatcgagggggacaccatctcccaggtgatgccgccgctgctcattgtggcctttgtgctgggcgcactaggcaatggggtcgccctgtgtggtttctgcttccacatgaagacctggaagcccagcactgtttaccttttcaatttggccgtggctgatttcctccttatgatctgcctgccttttcggacagactattacctcagacgtagacactgggcttttggggacattccctgccgagtggggctcttcacgttggccatgaacagggccgggagcatcgtgttccttacggtggtggctgcggacaggtatttcaaagtggtccacccccaccacgcggtgaacactatctccacccgggtggcggctggcatcgtctgcaccctgtgggccctggtcatcctgggaacagtgtatcttttgctggagaaccatctctgcgtgcaagagacggccgtctcctgtgagagcttcatcatggagtcggccaatggctggcatgacatcatgttccagctggagttctttatgcccctcggcatcatcttattttgctccttcaagattgtttggagcctgaggcggaggcagcagctggccagacaggctcggatgaagaaggcgacccggttcatcatggtggtggcaattgtgttcatcacatgctacctgcccagcgtgtctgctagactctatttcctctggacggtgccctcgagtgcctgcgatccctctgtccatggggccctgcacataaccctcagcttcacctacatgaacagcatgctggatcccctggtgtattatttttcaagcccctcctttcccaaattctacaacaagctcaaaatctgcagtctgaaacccaagcagccaggacactcaaaaacacaaaggccggaagagatgccaatttcgaacctcggtcgcaggagttgcatcagtgtggcaaatagtttccaaagccagtctgatgggcaatgggatccccacattgttgagtggcactga

SEQ ID NO: 45236 - DNA, 408 bp, Homo Sapiens
atgggccacgtttgcaccaaaaccatgaagaaggctgcctgggtcatcatagaaaagtactacatgcacctgggcaacgacttccacacaaacaagcacatgtgcaaggagattgccattatccccagcaagaagctccacaacaagacagcaggttatgtcacccatctgatgaagcagattcagagaggcccagtaagaggtatctccatcaagctgcaggaggaggtgagagaaaggagagacaattatgttcctgagatctcagccctggatcaggagatcattgaagtagatcctgacactaaagaaatgctgaagcttttggactttggtggtctgtctaacctgcaggtcactcagcctacagttgggatgaatttcaaaatgcctcggggacctgtttga

SEQ ID NO: 45237 - DNA, 1167 bp, Homo Sapiens
atgagcgccccctcgacgctgccccccgggggcgaggaagggctggggacggcctggccctctgcagccaatgccagtagcgctccggcggaggcggaggaggcggtggcggggcccggggacgcgcgggcggcgggcatggtcgctatccagtgcatctacgcgctggtgtgcctggtggggctggtgggcaacgccctggtcatcttcgtgatccttcgctacgccaagatgaagacggctaccaacatctacctgctcaacctggccgtagccgacgagctcttcatgctgagcgtgcccttcgtggcctcgtcggccgccctgcgccactggcccttcggctccgtgctgtgccgcgcggtgctcagcgtcgacggcctcaacatgttcaccagcgtcttctgtctcaccgtgctcagcgtggaccgctacgtggccgtggtgcaccctctgcgcgcggcgacctaccggcggcccagcgtggccaagctcatcaacctgggcgtgtggctggcatccctgttggtcactctccccatcgccatcttcgcagacaccagaccggctcgcggcggccaggccgtggcctgcaacctgcagtggccacacccggcctggtcggcagtcttcgtggtctacactttcctgctgggcttcctgctgcccgtgctggccattggcctgtgctacctgctcatcgtgggcaagatgcgcgccgtggccctgcgcgctggctggcagcagcgcaggcgctcggagaagaaaatcaccaggctggtgctgatggtcgtggtcgtctttgtgctctgctggatgcctttctacgtggtgcagctgctgaacctcttcgtgaccagccttgatgccaccgtcaaccacgtgtcccttatccttagctatgccaacagctgcgccaaccccattctctatggcttcctctccgacaacttccgccgattcttccagcgggttctctgcctgcgctgctgcctcctggaaggtgctggaggtgctgaggaggagcccctggactactatgccactgctctcaagagcaaaggtggggcagggtgcatgtgccccccactcccctgccagcaggaagccctgcaaccagaacccggccgcaagcgcatccccctcaccaggaccaccaccttctga

SEQ ID NO: 45238 - DNA, 2206 bp, Homo Sapiens
tttcagagaggtcgcttgggtccatcagagtctctgccgtcactacctgcaagaggggaccggaagccagtgggcaggggctgggtgctcccctacagcacctctcctctttgacctcacctgtgctttgaggcctcctgattcctccctgctggagcccagagttccagaggcacctgagcagggcaggcttccaggcaggccagggcgccccagcagaggcacccgacgagatggggagggctggggagggcagcctggggcaggagggcttgggggacaggctcacctccacactgccagtctgggatcgtagcatgcggcccacccacgaggagcgggccagctgcaggaggcaggacttctgcaagttctgcagctcggcctccatctcttggagcgtgcgggtggtctgcagcagccgctcctccaggtgctccttctcctgctccgagagggcctgtggttggtggtgggggggtgtcttctgcagaaggcccccaggccagccccagcctggctccccaacaccaggaccctgcccactccctgtgcccctgcctcacccactgggctcgctccttctgttccttcaactcctggatcagcttctggacctggttctgcaggagtttctcctgactgtgggagctcctggaggaggggtgacctcagcagcccccaccctgctcaggcaggggttcctaatgtcaggtcagtggcgaaggaggggagaaggaggggctccactgccaccttggccccaagggcacacagtacagccccgctggggctggccagcctccggctggtctggacaagggtctagcacccatccacatgcgcagggttagggtggaggctatagcgtgttaacttaggatcagggtggagggtcagcgcgggcaaggatgagggtaaggatctgcctcagcggttggggttggggtcagacagaaaccaggagtccgggcgaggacagggcggggttgggttgggctggggactgtgctgcagacctcttgggcggaagccccgccacctcttccaggatgtggcagagccgggcgtcctcgccattctggatggcccaccgcaaggcctggatctccagttctcgctgtctccacagcagccgcagtgtgcgagggtccagggactcaagagccaacctgcagcggcagcagaccctgctgcttactcaggccggcccctggccacctggcccaggaggctcaccagtcctccctctcctccttactgcgggtcggcagagcagaccaccggtgtggggtggggcgtggtgtctggcaggcacgtgggagtctcgggggctgcaggtgcgcctgctggaggtcccaggtgaccactgaccgactcttgctctgtgggggacaggagagcctcttcctcggtttctttaacctcctggccagacttgggggccattctcaatgttcttcgggagctgggaggggtggggggcccgtctgccgtgtgcgcctcgtgtggccacacaggttggagcagcccaggcgtcaccacttactcacagagcgttgctctctgaagggacccacatgtgggtgtccacacccgtgtgtttctgaccaggctggcgcagcaggtcaccacccgacatgtccctggcgtgtacccctgccacccaggtgctggccctttgcctgtgatgtggtgtccctctttctctctcttgtccccccagctcagggccctacccccagcactcacctgaggcccgacctccaagcaggcctgggagggaagggctgtataccgttgccatggataccagcacccagaaggggtggggctgtttgttaccaggagcctccagggagaccccagaccaggcccctagagacagggtcttgctccgctgtccaggctggaatgcttcggtgtgatgacagcgcacgttaacctcgaattcctgggctcaggtgatcctcccacttccgcctcctgacttgctgaaactacaggcacccgcctccaccgccaggcccagcccacagctcctttgacctcagtgacaggcacttacctgacccccaaactgaagcctcacttttcccagccgtgtccacaccctctgggctaccccattaccatgacaagtattccctctgctccaggagaaaagccaggtcccagacctgacccattaaaacccaatcattcc

SEQ ID NO: 45239 - DNA, 4719 bp, Homo Sapiens
gcgagacctagcaggcccggggctgggcgtgccctcgcctgccacgctgcgcgctgccctcagccgggccgctggggccgtgcagtgcaccgggcacgccgcgccaggctgggggcaggcaccgagcctccgtgggaggtcccgaggcagcttcgcctgctcgccctggctccagccctcacctgccgcagccttagctgagcagccgccgccactgggcgccccccgctccccacttcgccagcgcccgctcctcggctcggcccggggtagtttgtagggacgcagctctccacgtgcgcgactgcgaggctggacgctacgggctcctggaaaggagacaccagcatttgccacaatgctgtcatccactgactttacatttgcttcctgggagcttgtggtccgcgttgaccatcccaatgaagagcagcagaaagacgtcacactgagagtatctggagaccttcatgttggaggagtgatgctcaagttagtagaacagatcaatatatcccaagactggtcagactttgctctttggtgggaacagaagcattgctggcttctgaaaacccactggaccctggacaaatatggggtccaggcagatgcaaagcttctcttcacccctcagcataaaatgctgcgccttcgtctgccgaatttgaagatggtgaggttgcgagtcagcttctcagctgtggtttttaaagctgtcagtgatatctgcaaaatcctgaatattagaagatcagaagagctttccttgttaaagccgtctggtgactattttaagaagaagaagaaaaaagacaaaaataataaggaacccataattgaagatattctaaacctggagagttctccaacagcttcaggttcatcagtaagtcctggtttatacagtaaaaccatgacccctatatatgaccccatcaatggaacaccagcatcatccaccatgacttggttcagtgacagccctttgacggaacaaaactgcagcatcctcgcattcagccaacccccccagtccccagaagcacttgcggatatgtaccagcctcggtctctggttgataaagccaagctcaatgcaggttggctagactcctcacgctcccttatggaacaaggcatccaagaggatgagcagctgctcttacgatttaaatattattctttcttcgacttgaatcctaaatatgatgctgtccgaataaaccaactctatgagcaagccaggtgggccattctcttagaagaaattgattgcacagaggaagaaatgttgatctttgcagctctacagtaccacattagcaaactgtcgttgtctgctgaaacacaggattttgcaggcgagtccgaggttgatgaaatagaagcggcgctttctaatttggaagtaaccctagaaggtggaaaagcggacagccttttggaggacattactgatatccctaaacttgcagataatctcaaattatttaggcccaagaagttactaccaaaagctttcaaacaatattggtttatctttaaagacacatccatagcatactttaaaaataaggaacttgaacaaggagaaccactagaaaaactaaatcttagaggctgcgaagttgtgcccgatgtaaatgtagcaggaagaaaatttggaatcaagttactaatccctgttgccgatggtatgaatgaaatgtatttgagatgtgaccatgagaatcaatacgcccaatggatggctgcctgcatgttggcatcgaagggcaaaaccatggcagacagctcctaccagccagaggtcctcaacatcctttcatttctgaggatgaaaaacaggaactctgcatctcaggtggcttccagtctcgaaaacatggatatgaacccagaatgttttgtgtcaccacggtgtgcaaaaagacacaaatccaaacagctggccgcccggatcctggaggcgcaccagaacgtggcccagatgcccctggtcgaagccaagctgcggttcatccaggcgtggcagtcactgcctgagtttggcctcacctactaccttgtcagatttaaaggaagcaaaaaagatgacattctgggagtttcatataacaggttgattaaaattgatgcagccaccgggattccagtgacaacatggagattcacaaatatcaaacagtggaatgtaaactgggaaacccggcaggtggtcatcgagtttgaccaaaacgtctttactgctttcacctgcctgagtgcagattgcaagattgtgcacgagtacattggcggctacattttcttgtccacccgctccaaggaccagaatgaaacactcgatgaggacttgttccacaaattgaccggcggtcaggattgaaacaagcacgcgtgctcggctcacaccaacaaggcaagccaaaggcgcccctccccagagggatccctaacgtgcccagcatgtagattctggactaacagacaacatacattcaccgctggtcacccagatcctcattcaaacccactgctggcacatccctttccttactttgccctgtgctaccagccacggaaggagcctctcttgttttttctataaaatgggtaggcaggagaaaagcaggtgccctaagattgctctaaggcccagcatgtggttacagttctctgacttgcagaacctgccaggtgtatggctacaagttatcctcgtgctgatctgtctcattactaagtcaatggagaagacagaaaggtaaaaatcacgtgtagcaagaacaactcttatttcacaaactcaggtatgaaacgaaacgcctgtccttcatggaactgcttttagctcctgtcttttcaaaatggcagagggagttcctacacacactttttccctggaggccaaggtctaggggtagaaaggggaggggtggggctaccaggtagcagttgacaacccaaggtcagaggagtggccctcagtgtcatctgtccacagtgatacctgccaagatgaccactgacccacatctggtcttagtcattggtctcctcagatttctggggccacctgcaagccccattccattcctacagatctctcagccacctgtaagtcctttgtgaagatgtgggtgacacagggggacaggaaaacccatttctcaacccagatccatgtctccactgcttctactctgggttgggattcaggaagacaggcacagtcctctctgttcatagaaacacctgccagtgtcaaggattccagtcaggtgtctatcccaactggtcagggagagaagggcagacccattctcaaagaccaccatgtccaaggtctgacagctccccactggctgcccccacaggggctttaggctggtctgggtcatggggaagcgtccctcttatcgctggtctgtgttctcctggatttggtatctatgttggtacgactcctggccttttatctaaaggactttggcttttgtaaatcacaagccaataatagacttttttctccccctctgttttttgctgtgtcatctctgccttgagactgccttgagacagtgcttgccttgagagagtgagccaattaacagctgcctgaattgtcattttccattttggtttgttagaggtgggaggggtgggttttgagaaggtcaaaagcaataccagaagtaaagggaaatatcagacaatattttattattttttcatagatgttctgccacacaaagaacttggggtgtaaggataaggcaaaagctccaatcccatttttcagttctcctaggatgcacccctcagggagcctggccagagttccgaggcccgtgagcgtcagctgttgctttattttccatcaaagccctctgagaagtgagacctcagcaattccgggagccacatagagacagacttggcaagggaccccctggttctgagccagtagctgccatctggaaattcctcttttagcctctccttagaggtgaatgtgaatgaagcctcccaggcacccgctgaatttctgaggccttgcttaaagctcagaagtggtttaggcatttggaaaatctggttcacatcataaagaacttgatttgaaatgttttctatagaaacaagtgctaagtgtaccgtatatacttgatgttggtcatttctcagtcctatttctcagttctattattttagaacctagtcagttctttaagattataactggtcctacattaaaataatgcttctcgatgtcagattttacctgtttgctgctgagaacatctctgcctaatttaccaaagccagaccttcagttcaacatgcttccttagcttttcatagttgtctgacatttccatgaaaacaaaggaaccaactttgttttaaccaaactttgtttggttacagttttcaggggagcgtttcttccatgacacacagcaacatcccaaagaaataaacaagtgtgacaaaaaaaaaaaaaaacaaacctaaatgctactgttccaaagagcaacttgatggttttttttaatactgagtgcaaaaggtcacccaaattcctatgatgaaattttaaattaatgggcacctttcaacatcatttgcttccttatctacagttgattcagaaatctgcattttttattcttttatatgacttttaagtaaaagatttatatggatttg

SEQ ID NO: 45240 - DNA, 774 bp, Homo Sapiens
agcaagggcttccccataatcctggcaggcaggcctcccctggggttcccaacttctgaccccactgaagtgtttatcttcttccctaatcccagcctccttttccctgtctccatgtgctctgagagatgctctgagagatgctcctgctcccccaggctccctccgcatccccctcattttcctcctccccagtgtgtcattggagtcctaaccccatcctcgacattgtcgcgttttcctcctccagagtgggaccttcttttcccccgagtggtcctgtctaggggtgccgctgccgggccccctctggtcttcctgctggagactggagcctttcgggagtcagcaggcgcccgggccaaccgcagccagcgtggggtgagcgatacttcaccggtgagtcatcagggtgagctggccgtgtgcgatgcagtcactgtctgggtgacagacccctggactgctgtggacttgggtgtgctcgaggtggaggtgttgggtgaggtgcctgcagctggcagcagttccctccgccagcacttctttgttacccgcttcgaggccgataaatctaaggaaggtggcccgggggtaggtggaggacctgccgccggggtgtggaccggggggcactgggtgtctgagtgcaaggccaagcagtcctatgggcgggcattgaccactgatgcccagggccgtgtggactggcgatggattcaaattggcactgcctgtgtctgcacactcctcagccggactggccgggcctga

SEQ ID NO: 45241 - DNA, 2409 bp, Homo Sapiens
attcctctttccttgcagagtaaagaagtcggccagcagctccaagatgatttgatgaaggtcctgaacgagctctactcggtcatgaagacatatcacatgtacaatgccgacagcatcagtgctcagagcaaactaaaggaggcggagaagcaggaggagaagcaaattggtaaatcggtaaagcaggaggaccggcagaccccatgctcccctgactccacggccaacgttcgcattgaggagaaacatgtccggaggagctcagtgaagaagattgagaagatgaaggagaagcaccaagccaagtacacggagaataagctgaaggccatcaaagcccagaatgagtacttgctggctttggaggcaaccaatgcatctgtcttcaagtactacatccatgacctatctgaccttattgattgttgtgacttaggctaccatgcaagtctgaaccgggctctacgcaccttcctctctgctgagttaaacctggaacagtcgaagcatgagggtctggatgccatcgagaatgcagtagaaaacctggatgccaccagtgacaagcagcgcctcatggagatgtacaacaacgtcttctgcccccctatgaagtttgagtttcagccccacatgggggatatggcttcccagctctgtgcccagcagcctgtccagagtgagctggtacagagatgccaacaactgcagtctcgcttatccactctaaagattgaaaacgaagaggtaaagaagacaatggaggccaccctgcaaaccatccaggacattgtgactgtcgaggactttgatgtgtctgactgcttccagtacagcaactccatggagtccgtcaagtccacggtctctgaaaccttcatgagcaagcccagcattgctaagaggagagccaaccagcaagagacagagcagttttatttcacagtaagggagtgctatggcttttaaagagcgtcagcatgcactgcagcactcaagggagatttggaactcagagtccttgttaagtgtctgaaggacaggcattgaatatcttagatacgaatgtgggcatactcagagaccatccctacacttaaaggtgcaaacattaaaagttgtatatgtctaacagggatccgcccaagagaaaggatgctcccaagtatacaactaagaagattttcttttttaagaaatttttaactagctagtaggctttcactggaaagtttccttctcaggcacaggggatcctgaaaggggaacttcatcttttagttcttggagagtacatacaaatattcataataacacatattttgtttataaaaatctataatctcttctaggtgatatgatgacattattttataacttttattgttgggaaactattttttctaattattgctaaaacttaaaggatgggtaatatgcagcattactattttgcacataattccaaaacatcgtattttcttattcatgtatctctagtcttcttttagacagttggacccttttttctttttctttttttttttttttttttaagtattgttaacaatcctttggaagtcactactggtctttgtgtgctgctttttaataattgagttattttgagcttgccaagtaggatctattgcctggactaaaatttatttcctaatcttctgatgaccaagaaaggaaaaattaagtttgcagatgtgagatgaaatatagccagtgaatatgcatactgattctgaatgaaaggaattaacttttcagtcaagaaacagtctgcatgcagtaaattgaatttttcctgcaactggaatgatttgtttaattcttctttgaacactgccctttctccagtaagaacactaatgatttgctaatattttttaaagaaatctgtttttttaattagttaagctcagacttcctcttattttttatcctagagaaaactgctaaaagggaatgatatatcagtactattcttctaaaacaactttttaaaaatgattatacaaagccaaatatgctcattatataaaatttagaagcaaaaagaaggaaataaaaattttccataattctaccagctagagataatggtgttagaatatattcctttctaatctgttttctatgcatgcacaaacacatatgtgagcacatatttataattttattctaaaaaataggacactgctgtacatattgttttacaatctaagtcatataattataatattctttaagcatatttatgagtaaaatattaaaacctatacaaaaaaataacagaatggcattttagctcattcattgatttttataaaatatttaacacactccctggtttgtagttagcgttcaataaatgctaaaaatttatcttcacca

SEQ ID NO: 45242 - DNA, 1256 bp, Homo Sapiens
attcctgcgctggaggccgcctctgacgccaccggctgggctccgccatgagttcggcgccggcctcaggctccgtgcgcgcgcgctatcttgtgtacttccagtacgtgggcaccgactttaacggggtcgcggccgtcaggggcactcagcgcgccgtcggggtccagaactacctggaggaggccgccgagcggctgaattccgtggagccggtcaggttcaccatctccagccgcacggacgccggggtccacgccctgagcaacgcggcgcacctggacgtccagcgccgctcaggccggccgcccttcccgcccgaggtcctggccgaggccctcaacacacacctgcggcacccggccatcagggtcctgcgggccttccgagtgcccagcgacttccacgctcgtcacgcagccacgtcccggacctacctgtaccgcctggccactggctgtcaccggcgtgatgagctgccggtgtttgaacgcaacctatgctggactctcccggcagactgcctggatatggtcgccatgcaggaagccgcccagcacctcctcggcacacacgacttcagcgccttccagtccgctggcagcccggtgccgagccccgtgcgaacgctgcgccgggtctccgtttccccaggccaagccagccccttggtcacccccgaggagagcaggaagctgcggttctggaacctggagtttgagagccagtctttcctgtatagacaggtacggaggatgacggctgtgctggtggccgtggggctgggggctttggcacctgcccaggtgaagacgattctggagagccaagatcccctgggcaagcaccagacacgtgtagccccagcccacggcttattcctcaagtcagtgctgtacgggaacctcggtgctgcctcctgcaccctgcaggggccacagttcgggagccacggatgaccctggacactcaagccaaagttaggccacaccaggcccaaccctgtgctggtcaagccagggcagtcacagctgcttggggcccacagcactgctgcctggtctccacagtagcctccctgcccgggtcccagcaccctggatgcccgtctctgtcccaggcgggatggggcacagtgcaggacacagccatgtacaccaagaagagagtaccaagtagtcttttgttcagcttttactggaaactgctgtctaggaccacctgccctaaccaggaataaaggcaagacagcctgg

SEQ ID NO: 45243 - DNA, 469 bp, Homo Sapiens
gtcaccaggagggtatgcatagggagggcaagagctctgggccactgcgaagattcaaaagctccaaaaacctactgtagacatcgaagaaccaatatatacaatgggccaacaatccagtgtccgcaggctgaagaggagcgtcccctgtgaatccaacgaggccaacgaggccaatgaggccaacaagacgatgccggagaccccaactggggactcagacccgcaacctgctcctaaaaaaatgaaaacatctgagtcctcgaccatactagtggttcgctacaggaggaacgtgaaaagaacatctccagaggaactgctgaatgaccacgcccgagagaacagaatcaaccccgaccaaatggaggaggaggaattcatagaaataacgactgaaagacctaaaaagtagcaagaagctacatccctcaaacttcggcaatgaaaataaagtttgagaagctga

SEQ ID NO: 45244 - DNA, 3124 bp, Homo Sapiens
ccgcggcggagccagaggctgcaggaagagcccgcgggggcccggagggtgcgattcctcggcccccgcaaaacaatgtgtgttgtgagccaggacgcaacttgccggaggcggcgggggcgcgccgagcccgcctgagaccgcgctgaccttctccccccgccgtccgttgggcccgagcgcccagctcctcgctccccagttcgcgggggccgggccgagccgcggggcggggccgcccctccgtcgccgctgcctcctcccccacccccagccgcggaggatgcggacggcccccggcggcgtctagcggccccgggcccaggcgcgatggtgcagcagcggggcgcgagggccaagcgggacggcgggccgccgcccccgggacccgggccggccgaggagggggcgcgcgagcccggctggtgcaagaccccgagcggccacatcaagaggccgatgaacgcattcatggtgtggtcgcagcacgaacggcggaagatcatggaccagtggcccgacatgcacaacgccgagatctccaagcgcctgggccgccgctggcagctgctgcaggactcggagaagatcccgttcgtgcgggaggcggagcggctgcggctcaagcacatggcggattacccggactacaagtaccggccgcgcaaaaagagcaagggggcgcccgccaaggcgcggccccgcccccccggtggtagcggtggcggcggctcaagcccgggccgcagctgcctggccgcgggggccgccgagcagcgggagggcctttggggggcggggcggcggcgcccgaggacgacgatgaagacgacgacgaggagctgctggaagtgcgcctggtcgagaccccggggcgggagctgtggaggatggtcccggcgggacgggccgctcggggacaagcggcgcgcccaagggccgtcgggcgagggggcggccgccgccgccgccgcctccccgacaccgtcggaggacgaggagccggaggaagaggaggaggaggcggcagcggctgaggaaggtgaagaggagacggtggcgtcgggggaggagtcgctgggctttctgtccaggctgccccctggcccggccggcctggactgcagcgccctggatcgcgacccggacctgcagcctccctcgggcacgtcgcacttcgagttcccggactactgcacccccgaggttaccgagatgatcgcgggggactggcgcccgtctagcatcgcagacctggttttcacctactgagcccaccgtcagcggggcgcgcacgcccccaaaccagctgtttacatacaggaatcaggtattggggcccctcggaggccgaggctggcaccccatctcccgcgcagcctgccccctcctggacgtgcccatcccccctcagatccagacatgcccctcccccgcagacacaccccaaggcagcccaacccccaccccttccccgacacccaagcccctccccacgtcgccccctcctgcacagccaccagcagccagccccctccgatacacctcccgtcctctcctacagacctgcacccctccccccttttgcacacgcccctcctcgtggccggaggacccgccccctcctttgctccggaatctctcctccctcgcccggcccgccttctctgggttaggggggcgatgcggccgggtggcaacgcacgcgcctcctgcgcccctcccttccctggggggaggggcgcaccccttttatccccggagcgctagggcccgcccctccgctggggcccacccccttcgtgcgcatgcttaatgcttctggggaggagggggctggtcccagcggagccgcactcttcgcccgctccgggcaaaagcgggggcgagtgtagagcgatcctgggaaatcctttgatccgggagccctaggtttcctctccagccaacggggcgtcgctgccttaatgggaggagcactcggaagggttggtttgggcctgaaactctcccaagtggcatagccccttttccggtatggggtctcctacacccacgcgcaccacctctccggtcgcgtggctgcctctacagcctacctatacgtccctttttccccccaactgggaattgagaggtaaggtctttctctggaaatccagcagtagaggaagggaccacccaagaaaactaaaaaccaaggcaccttaccagtctgtctggggacaggatccctgctgcaccttccccaccccctcctgggaagtgccccctcacctcagggcacccgcaacctgggctcctccctgagcgcaccggcccttcctgtcacccaggtccaccctcagtactcaagctgcagtatacagcgggaaaaactgaggcactttggtgctaggggtttgggactgaggcgtggagagcagatgtgatggcaggaagactctcgcttttaaacatctggtttgggagagaccatcgacttggccagtgagactgagaatggattccgagtagtgatgggccgtttgcacctcggtttttccacgtgagaaatggggagaacgctgctgttaggaggaagttgtgtccagttcagggtgccctcgggagccctgtccctgttgctgtggcccctctcacgccgccatctctctgccccgccccgcccctccggcctccccacaccccccttgccctcactacctgtatctcaccggcgtgtgttcaccctcccgggtggctcacacactctcattcacacacacaaatctcaggaacaaacggtcccagagtcctccggacccctgcccagggtctctgcaggtctctgccccacgcgttcccgtcgctgacaaagccaccagctgcctcctttaagcttggtgctccggctctgggcctttcttgcgctctattttttttttttttttttttaagaaaaacaacaacaacaaaaaaagacaatgaaaaaaaaaacgtcatgtgagtgaagagatgtcactgtctgtggtcttggagaactagtctcgtagctgaggggtggggtccctctgtctggggcactggcacccacagcaggactccgccagtctgatgccaggactgaataaagtgtatttgc

SEQ ID NO: 45245 - DNA, 603 bp, Homo Sapiens
tcacccatggagaccggcaggcaaacaggtgtgtctgctgagatgctcgccatgccccgaggtctgaagggcagcaagaaggatggaatccctgaggacctagacgggaacttggaagcacccagggatcaggaaggtgagctcaggagtgaggatgtcatggacctcacagaaggtgacagtgaggcctcagcctcagctcctcctgcagccaaaagacggaaaacacatacgaaaggcaagaaggagagcaagcccaccgtggatgcggaggaggctcagaggatgacaaccctgctgtctgccatgtctgaggagcagctgtcccgctacgaagtgtgtcgccggtcagcgttcccgagagcacgcgttgcgggtctgatgcgggctatcactggcagttcggtgtcggagaacgcggccattgccatggctggaatagccaagctctttgttggagaggtggtggaagaggccctggacgtgtgtgagatgtggggagagacgcccccgctgcagcccaagcatttaagggaggccgttcgcaggttaaagcccaagggcctcttccccaacagcaactgcaaaagaatcatgttctag

SEQ ID NO: 45246 - DNA, 390 bp, Homo Sapiens
ggatgaatgagctgtttccagcattcctggcttcaactcaaaattttccttcatggcacagtggaaagctttgaagacggcggttctgggggctgaatatgaaggcaactcggactaagaagacgactgctttccaactgccctcccgtcctgcagccgcctgatttgaggaaggggctgggatccttccccttgccctctggttgttcttggagttacagcagccccgcggcagctctgccccctagtgcacatgtgaggcagcgcgcccttctccaatccagaagcctcgtcgcggtgctgccagcaagggagtttttctgtattcactttggtggaaatagcaaaacttgacagaaaaaaaacccaagccaaaccaaaacacacgaa

SEQ ID NO: 45247 - DNA, 1970 bp, Homo Sapiens
gtggcgctgccctgggcgggcttgcacccccacacccaagtgagcggcctgctcactcctcagctgcaggagccagacgtgtggagtcccagcagaggccaacctgtgtctcttcatctccctgggaaaggtgcccccgaggtgaaagagatggcctggtggaaatcctgggactcaggaattctcccactccggaatgccttgctgctggggtgaccaggtcttcacttgtgaaacaggagtcggccacctcagccctgcgcctggcctggtggaacatgggtcaccgccccaacctggggcagccgccccatcccaacgcagttgctgccgctctccatgcctccctgtgcccagctaaccgggggacttgtcccctgggaaaacctgggtacccaggctgcctttggtttcagcccctactcctcttcccgggctgcctttgctccccggacggcccctttccccgggctgtgttcacatcggctgggaagggtcccttgcagacagatcttggacgaggtcgcgtcccccctcgtgaccagcaaactcctaaaagccgcccttgccccagagcccctgtagcctccaaccggcagtcaggaggcagcgccgtctcagcgccgcttagtggcgccaggcgtgcctggaaatccgctttcgcagcgccccctcgtagccgcctccgcccgcagaaaggcgttccctggacagagaagcgggcgcgcgggggcgggcgcgcggggccttgccggagaacctgactctccgcagcagcagtggaagccagagtgacgcgttgtgttgaacaccagttttctggagcgctgtgtgttctcatagctgagcagtctgtttctccaatcaggtttcaaagccacttcaactgcactggcccctgtgggtcactgctgcaccgccctggcccatgtgggtccctgaggagcgacctgccggggccacctggctggacgaaaaagacacaccttggacttaagccgtgagaaaaaaaaaacttcatcagtaagaaacaagtcaatagacaagtaaaagactaggagaaaatatgcataaaacataaaaaagtgacttgattcctgattctggagtatttaagaattcctataactcaacaaaaagttcagttttttaaaatgagcaaaaggcttgggtaaactattcacaaaggaacatagacaaatgccagtacacacatgagaagcgcatacacatccacaaacttcaaacaagcccacctcatgtatttctagtgagtaaggaaaagaacgcaaacacttttgaaaattgtttggttgtttcttgtaaatttaaacaaataccctattatattatccagcgagtccatccttaggtttttatccaaggataaagaggtgaaaactcatatctaacaaatagacttctgaaaagatgaaaatagaagctttattcataaaagacaaaaactagaaataacccaaatattcattcacaggagaatgaataaacagactaggttgaatccatacaatggaatggtagcagacaataaaaagaaaatgaactattgatgccccctactgcacagcagaagctctgaatcgtgttcctgaatgaaagaagtcaggtatgaaagaataaacattgtatgattccatttatatgaaaatgaatctgtgatttaaaaatcagactagtattaggttggtgcaaaagtaattgcggtttttgccttttttttttttttttttaaatagttgctttggggtttatggatggagtggcatggtagaggttagctgaagggggcatgaaataactttttgggggtgctagagtgttgtaaatcttacagtgggggagggacaggagtgcaggcatttgacaaaacacattgaattgtgaaatttaagatttttgaatttctttgtatgtaaattacctgccaataaaaacatgacgaatagagc

SEQ ID NO: 45248 - DNA, 663 bp, Homo Sapiens
ctgcggaagaggaccctgaaagtgctcaccttcctcgtgctcttcatcttcctcacctccttcctgaactactcccacgccatggtggccaccacctggttccccaagaagatggtcctggagctcttggagaacctgaagagactgatcaagcacaggccctgcacttgcacccactgcatcaggcagcatgggctctcagcctggttcgatgagaggttcaaccagatagtgcagctgctgctgactgcccagaacgcgctcttggaggacaacacctaccaatggtggctgaggctccagcaggagaagaagcccaatatcatcaacaataccatcaaggaattcagagcagtacctgggaatgtggacccaatgctggagaagaggtcggtgggctgctggcactgtgctgtcgtgggcaactcgggcaacctgaggcaattgtcatataggcctgcgataagtcacaattttatgctcaggatgaacaaggcacccacggcagggtttgaagctgctgccgggagcaaaaccgcccaccatctggtgtaccctgagagcttccgggagctgggggacaatgtcagcatggtcctggtgcccttaaagaccatgaacttggagtgggtggtgagcaccaccaccacgggtgccatttcc

SEQ ID NO: 45249 - DNA, 489 bp, Homo Sapiens
tcagattacatcagtgcaaataccatcatgcctgaatttgaaaccaggtgcaacaattcaaagcccaaaacgtgttacattgccacacaaggctgtcagcaaaacacagtgaatgacttttggcagatgaagttccaagaaaactcccgagtgattgtcatgacaacaaaagaagtggatagaggaaagagtaaatgtgtcaaatactggcctgatgagtatgctttaaaagaatatggcgtcatgcgtgttaggaacgtcaaagaaagcgcagctcatgactatacactaagagaacttgaactttcaaagattggaccagggaatatggagagaccggtcgggcaatatcactttcggacctggccggaccatggagtgcccagcgaccccggggtcgtgctggacttcctggaggaggtgtaccataagcaggggagcatcacggatgcagggccggtcgtggtgcactgtagtgctggaattggc

SEQ ID NO: 45250 - DNA, 395 bp, Homo Sapiens
acggaaggggttttcccatggatcatgttgtataagtgaaccagaccaccctgatggcatccacagtgatgtcaaggttggggctggccaggggtgggtggactagaagcatttgggagtagtggccaggggccctggacgctagccacggagctgctgcacagagcctggtgtccacaagcttccaggttggggttggagcctgggatgagccccggcagcgccttggcccttctgtggtccctgccagcctctgacctgggccggtcagtcattgctggactctggccacacactggcgttctcatccacttggaaacaagccagtcttttctgcaaggtcagttgaccaagagcatatttcccctctgttgtacatcgttgttttgtgtttg

SEQ ID NO: 45251 - DNA, 2506 bp, Homo Sapiens
tagaaggatgccatgaaggaaatgactgctttgtaaagcgagggtaaacttctgaaatgctttgattaaaataagctatattaaagaccccaaaaccacttccctcgcagctttcctctgaatgtctttcacatgaaatgggcctgagtcactctaagactcaccttagggtgatcaaagtagcacctttgcaaaacaaagaggtagagactccctcggctggccgtgtggactttgcattcaatcagaatttggaagaaaagacttcatattcactggcaagactgcaggaccagaataaagccttggaagggcagctgccacctttacaagaaaactggtatggaagatattctacagcatccagagacatgtattttgacatcccactggaacacagagaaacaagtattattaaaaggcatccaccccaaagacttcaaaagcttgaacccattgacttgccacgagtaattacttcaggaagactcctgagccagcgagaagccaggacaatgcacaaagcaaagcaggtactagaaaagaaaatgcaaactccaatgtatacttctgagaacagacaatatttgcataagatgcaagtgctggaaatgatccgtaaaagacaagaggcccaaatggagttaaagaaaagtcttcatggagaggcaagaattaataagcaaagtccaagggaccataaagccaagaaaacccttcaaagcaccccaaggaatgatgaccatgaccttctaaccatgttgcctgatgaaatcttgaacagaggtcccggaaattcaaagaatacagaatttttgaaacatcaagcagtgaataactactgtccctggaaaattggcaaaatggaaacatggcttcatgaacaagaggcccagggacagcttctctgggacagttccagctctgactcagatgagcaggggaaagatgagaagaagccacgagcactggtgaggaccaggacagagagaatcccacttttcgatgagttttttgatcaagaataagaatactattcattaacctagaaactgagtgctttgaaagcttgttttactctcaaaatcttccaaactgatatatgaattactttgaggacagcaaatcactttggtaaaaagaaatgatatctttagagtcttatgattaacaagtccgtcacatgtgctgttaactattgctgcataactaaatgcctcaaaacacaggggctaaccaagagccattttattgtctcactttcctgtgggttgctgagttcagctaggtggttcttctgctgttcccttttgaaatctttcatgtcattgaaattggactacatttggactactaagactggagtcatccagaggccccattaggacactgacacagggggaccttgccccctatccatgtagcctcagagcatctgcatatgatctcttcagcaggacactgcagagatttctctcatatgagcccagggctcccaaaagcaattgtctcaagaggaggaaacagaagttgccagtcttcttaaaagctagtcatagaactgactttgcatcacttccaccatgttctgttggttaaagtcatagaccagcttggagttaatgcagaagaggactacacaagggcatgagtgccaaagtgtggtcctttggggttcatctttgacatttgccacctcaccatgtttttaaaaagaaaattagattacataaaacaaatagatgggctggatgtggtggctcacacctgtaatcccagcactttgggaggccgaggtgggcagatcacttgaggtcaggagttcaagaccagcctggccaacatggtgagacaccgtctctactaaaatacaaaaattagccagacatggtggcattcgtctgtaatcccagctacttgatgcgaaggctgaggcaaaagaattgcttgaacccaggagatagaggttgcaatgagccaagatcactccactgcactccagcctgggcgacagaatgagactctgtctcaaaattaaaaaacaaaaaaccaaaaacaaatagatgaaaaagtagactggagacaaataaaagtgagtttctaaaggaaattcacagtaatgctgcattaaacactaagctcacttaggtcactttctagtgagctaaccgtaacagagagcctacaggatacacgtgagataatgtcacgtgtagaagatcgttgtgaattaaagttcaaaattaagacttcttagattatgatgtagattttagagctccttaaaacataaagcgaatcttataaatgttcaattctaaagttattccacttggaaaaattagcttttgggacaatttttaagaacttttgtgtaaaatgcagctccatgtttagcataatctaaaaataatttcaagcaatccagaatcttccaagaatttattaaagctttaaaacaaagcaaaacaaaaagacccttttgtgccttatatgggaagactcc

SEQ ID NO: 45252 - DNA, 441 bp, Homo Sapiens
atggtggatgagttggtgctgctgctgcacgcgctcctgatgcggcaccgcgccctgagcatcgagaacagccagctcatggaacagctgcggctgctggtgtgcgagagggccagcctgctgcgccaggtacgtccgccgagctgcccggtgcccttccccgaaacgtttaatggcgagagctcccggctccccgagtttatcgtgcagacggcgtcttacatgctcgtgaacgagaaccgattctgcaacgacgccatgaaggtggcattcctaatcagcctcctcaccggggaagccgaggagtgggtggtgccctacatcgagatggatagccccatcctaggtgattaccgggccttcctcgatgagatgaaacagtgctttggctgggatgacgacgaagacgacgacgacgaagaagaggaggatgattattag

SEQ ID NO: 45253 - DNA, 2460 bp, Homo Sapiens
gagagcttattcagtcttcagatctgcaggctttctttgagaccaagcaacaaggaaggtgtttttacatttttgttaaatcttggagcagtggccctttccctgaagatcgctctgtcaagccccgcctttgcagcctcagttcttcattataccagatctgagacctctgtgcgttccatggactcaagagaggcattctgtttcctgaagaccaaaaggaagccaaaaatcttggaagaaggaccttttcacaaaattcacaagggtgtataccaagagctccctaactcggatcctgctgacccaaactcggatcctgctgacctaattttccaaaaagactatcttgaatatggtgaaatcctgccttttcctgagtctcagttagtagagtttaaacagttctctacaaaacacttccaagaatatgtaaaaaggacaattccagaatacgtccctgcatttgcaaacactggaggaggctatctttttattggagtggatgataagagtagggaagtcctgggatgtgcaaaagaaaatgttgaccctgactctttgagaaggaaaatagaacaagccatatacaaactaccttgtgttcatttttgccaaccccaacgcccgataaccttcacactcaaaattgtgaatgtgttaaaaaggggagagctctatggctatgcttgcatgatcagagtaaatcccttctgctgtgcagtgttctcagaagctcccaattcatggatagtggaggacaagtacgtctgcagcctgacaaccgagaaatgggtaggcatgatgacagacacagatccagatcttctacagttgtctgaagattttgaatgtcagctgagtctatctagtgggcctccccttagcagaccagtgtactccaagaaaggcctggaacataaaaaggaactccagcaacttttattttcagtcccaccaggatatttgcgatatactccagagtcactctggagggacctgatctcagagcacagaggactagaggagttaataaataagcaaatgcaacctttctttcggggaattttgatcttctctagaagttgggctgtggacctgaacttgcaggagaagccaggagtcatctgtgatgctctgctgatagcacagaacagcacccccattctctacaccattctcagggagcaagatgcagagggccaggactactgcactcgcaccgcctttactttgaagcagaagctagtgaacatggggggctacaccgggaaggtgtgtgtcagggccaaggtcctctgcctgagtcctgagagcagcgcagaggccttggaggctgcagtgtctccgatggattaccctgcgtcctatagccttgcaggcacccagcacatggaagccctgctgcagtccctcgtgattgtcttactcggcttcaggtctctcttgagtgaccagctcggctgtgaggttttaaatctgctcacagcccagcagtatgagatattctccagaagcctccgcaagaacagagagttgtttgtccacggcttacctggctcagggaagaccatcatggccatgaagatcatggagaagatcaggaatgtgtttcactgtgaggcacacagaattctctacgtttgtgaaaaccagcctctgaggaactttatcagtgatagaaatatctgccgagcagagacccggaaaactttcctaagagaaaactttgaacacattcaacacatcgtcattgacgaagctcagaatttccgtactgaagatggggactggtatgggaaggcaaaaagcatcactcggagagcaaagggtggcccaggaattctctggatctttctggattactttcagaccagccacttggattgcagtggcctccctcctctctcagaccaatatccaagagaagagctcaccagaatagttcgcaatgcagatccaatagccaagtacttacaaaaagaaatgcaagtaattagaagtaatccttcatttaacatccccactgggtgcctcgaggtatttcctgaagccgaatggtcccagggtgttcagggaaccttacgaattaagaaatacttgactgtggagcaaataatgacctgtgtggcagacacgtgcaggcgcttctttgataggggctattctccaaaggatgttgctgtgcttgtcagcaccgcaaaagaagtggagcactataagtatgagctcttgaaagcaatgaggaagaaaagggtggtgcagctcagtgatgcatgtgatatgttgggtgatcacattgtgttggacagtgttcggcgattctcaggcctggaaaggagcatagtgtttgggatccatccaaggacagctgacccagctatcttacccaatgttctgatctgtctggcttccagggcaaaacaacacctgtatatttttccgtggggtggccattag

SEQ ID NO: 45254 - DNA, 1372 bp, Homo Sapiens
gagccacctcagtctgggctttcttttcttccaggggactttcccatgcctttcatatctgccaaatcgagtcctgtgattcccttggatggatctgtgaaaatccagtgccaggccattcgtgaagcttacctgacccagctgatgatcataaaaaactccacgtaccgagagataggcagaagactgaagttttggaatgagactgatcctgagttcgtcattgaccacatggacgcaaacaaggcagggcgctatcagtgccaatataggatagggcactacagattccggtacagtgacaccctggagctggtagtgacaggcttgtatggcaaacccttcctctctgcagatcggggtctggtgttgatgccaggagagaatatttccctcacgtgcagctcagcacacatcccatttgatagattttcactggccaaggagggagaactttctctgccacagcaccaaagtggggaacacccggccaacttctctttgggtcctgtggacctcaatgtctcagggatctacaggtgctacgactccatccaccaagattacacgacgcagaacttgatccgcatggccgtggcaggactggtcctcgtggctctcttggccatactggttgaaaattggcacagccatacggcactgaacaaggaagcctcggcagatgtggctgaaccgagctggagccaacagatgtgtcagccaggattgacctttgcacgaacaccaagtgtctgcaagtaaacacctggaggtgaaggcagagaggagccaggactgtggagtccgacaaagctacttgaaggacacaagagagaaaagctcactaagaagcttgaatctacttttttttttttttgagacagagtctggctctgtcacccaggctggagtgcagtggagcaatctcggctcattgaacctcttgggttcaagtgattcttgtgcctcagcctcccaagtagctggaattacaggcacataccactgcacccagctaatttttgtatttttagtagagatggggtttcactgtgttggccaggctggtctcgaactcctgacctcaggtgatccacccaccttggcctcccaaagtgctgagattataggcatgagccaccacgcctggccagatgcatgttcaaaccaatcaaatggtgttttcttatgcaggactgatcgatttgcacccacctttctgcacataagttatggttttccatcttatctgtcttctgattttttatatcctgtttaatttcttccttcattgttcttctctttttttatttattttatttatttttatttttatttttatttgagacagagtctcactctgttgcccagg

SEQ ID NO: 45255 - DNA, 1971 bp, Homo Sapiens
atggccacccctgtggtcaccaagacagcctggaagttgcaagagatcgtcgcgcatgccagcaacgtgtcctcactggtgctgggcaaagcctccgggcggctgctggctacaggcggggatgactgccgcgtcaacctgtggtccatcaacaagcccaactgcatcatgagcctgacgggccacacatccccagtggagagcgtccgcctcaacacccccgaggagctcatcgtggccggctctcagtcgggctccatccgtgtctgggacctggaagctgccaaaattcttcgcacactcatgggacacaaagccaacatctgcagcctggatttccacccgtacggcgagtttgtagcctctggttcccaggacacaaacatcaagctctgggacatcaggaggaaaggctgtgtcttccgatacagggggcacagccaggccgtgcggtgtctccggttcagccccgatgggaagtggttggcgtcggccgcagatgaccacaccgtgaagctctgggatctcactgccggcaagatgatgtctgagttccctggtcacacggggcctgtcaacgtggtcgagtttcaccccaacgagtacctcctggcctccggcagctctgacaggacaatccgcttctgggacctggagaagttccaggtggtgagctgcatcgaaggggagcctgggcccgtcaggagcgtcctcttcaacccagacggctgctgcctgtacagcggctgccaggactcactgcgtgtctacggctgggaacctgagcggtgctttgatgtggtcctcgtcaactggggcaaggtggccgacctggccatctgcaatgaccagttgataggtgtggccttctcccagagcaacgtctcctcctacgtggtggatctgacgcgtgtcaccaggactggcacggtggcccgggaccctgtgcaggaccaccggcccctggcacagccactgcccaaccccagcgcccccctccggcgcatctatgagcggcccagcacaacctgcagcaagcctcagagggtgaagcagaactcagagagcgagcgccgcagccccagcagcgaggatgaccgggacgagcgcgagtcccgcgcggagatccagaacgccgaggactacaacgagatcttccagcccaagaacagcatcagtcggacgccaccccggagaagtgagcccttccctgcacccccagaggacgacgcagccacagcaaaggaggcagcaaagcccagccctgccatggatgtgcagttcccggtgccaaatctggaggtcctgccccggcccccagtggttgcttccacacctgcacccaaggctgagcctgccatcatccctgccacccggaacgagcccatcgggctgaaggcctccgacttcctgcccgccgtgaagatcccccagcaggccgagctggtggacgaggatgccatgtcacagatccgcaaaggccacgacaccatgtgtgtggtgctcaccagccgccacaagaacctggacactgtgcgggctgtgtggaccatgggcgacatcaaggcaaactcggtggactccgctgtggccatcaacgacctgtcggtggtggtggacctcctgaacatcgtcaaccagaaagcctccctgtggaagctggacctgtgcaccaccgtcctgccacagattgagaagcttctgcagagcaagtatgagagctacgtccagacgggctgcacctccctgaagctgatcctgcagcggtttctgcccctcatcacagacatgctggcggccccaccctctgtgggtgtggatatcagcagggaggagaggctgcataagtgccggctctgctacaagcagcttaagagcatcagcggcctggtcaagagcaagtcaggcctgagcggccgccatggcagtaccttccgcgagctgcacctgctcatggccagtctggactga

SEQ ID NO: 45256 - DNA, 942 bp, Homo Sapiens
atggttgcagaggaaggaggcgtccctgcagatgaggtgatcttggttgaactgtatcccagtggattccagcggtctttctttgatgaagaggacctgaataccatcgcagagggagataatgtgtatgcctttcaagttcctccctcacccagccaggggactctctcagctcatccactgggtctgtcggcctccccacgcctggcagcccgtgagggccagcgattctccctctctctccacagtgagagcaaggtgctaatcctcttctgtaacttggtggggtcagggcagcaggctagcaggtttgggccacccttcctgataagggaagacagagctgtttcctgggcccagctccagcagtctatcctcagcaaggtccgccatcttatgaagagtgaggcccctgtacagaacctggggtctctgttctccatccgtgttgtgggactctctgtggcctgcagctatttgtctccgaaggacagtcggcccctctgtcactgggcagttgacagggttttgcatctcaggaggccaggaggccctccacatgtcaagctggcggtggagtgggatagctctgtcaaggagcgcctgttcgggagcctccaggaggagcgagcgcaggatgccgacagtgtgtggcagcagcagcaggcgcatcagcagcacagctgtaccttggatgaatgttttcagttctacaccaaggaggagcagctggcccaggatgacgcctggaagtgtcctcactgccaagtcctgcagcaggggatggtgaagctgagtttgtggacgctgcctgacatcctcatcatccacctcaaaaggttctgccaggtgggcgagagaagaaacaagctctccacgctggtgaagtttccgctctctggactcaacatggctccccatccagagaagcaccagccctga

SEQ ID NO: 45257 - DNA, 3455 bp, Homo Sapiens
gcgagggaagaaggtggcggctcccactcgcttctccctcgggtcgggtccgagctgccaggccgcatgccactccctgacggggcgcggaccccggggggcgtctgccgggaggcgcgcggcgggggctacaccaaccggaccttcgagtttgacgacggccaatgcgcccccaggcggccctgcgcgggggacggcgcgctcctggacaccgccggcttcaagatgagcgacctggactccgaggtgctgcccttgccgccgcgctaccgcttccgggacctgctgctgggcgacccgtccttccagaacgacgacagggtccaggtggagttctacgtcaacgagaacaccttcaaggagcggctcaagctgttcttcatcaaaaaccaaagatcgagcctgaggatccggctgttcaacttctccctgaagctgctcacctgcctgctctacattgtgcgcgtcctgctcgatgacccggccctgggcatcggatgctggggctgcccaaagcagaactactccttcaatgactcgtcctccgagatcaactgggctcctattctgtgggtggagagaaagatgacactgtgggcgatccaggtcatcgtggccataataagcttcctggagacgatgcttctcatctacctcagctacaaaggcaacatctgggagcagatcttccgcgtgtccttcgtcctggagatgatcaacactctgcccttcatcatcacgatcttctggccgccgctgcggaacctgttcatccccgtctttctgaactgctggctggccaagcacgcgctggaaaacatgattaatgacttccaccgtgccatcctgcggacacagtcagccatgttcaaccaggtcctcatcctcttctgcaccctgctgtgcctcgttttcacggggacctgcggcatccagcacctggagcgggcgggcgagaacctgtccctcctgacctccttctacttctgcatcgtcaccttctccaccgtgggctacggtgacgtcacgcccaagatctggccatcgcagctgctggtggtcatcatgatctgcgtggccctcgtggtgctcccactgcagttcgaggagctcgtctacctctggatggagcggcagaagtcagggggcaactacagccgccaccgtgcgcagacggagaagcacgtggtcctgtgtgtcagctccctcaagatcgaccttctcatggacttcctgaacgagttctacgcccacccccggctccaggactattacgtggtcatcctgtgccccacggagatggatgtccaggtgcgcagagtcctgcagatccctctgtggtcccagcgggtcatctacctccagggctctgcactcaaagaccaggacctcatgcgagccaagatggacaatggggaggcctgcttcatcctcagcagcaggaacgaggtggaccgcacggctgcagaccaccagaccatcctgcgcgcctgggccgtgaaggacttcgcccccaactgccccctctacgtccagatcctcaaacctgaaaacaagtttcacgtcaagtttgctgaccacgtggtgtgtgaggaggagtgcaagtacgccatgctggcgctgaactgcatctgcccggcgacctccaccctcatcaccctgctggtgcacacgtcccgcggccaggagggacaggagtctccggagcagtggcagcgcatgtatgggcgctgctccggcaacgaggtgtaccacatccgcatgggtgacagcaagttcttccgcgagtacgagggcaagagcttcacctacgcggccttccacgcccacaagaagtatggcgtgtgcctcatcgggctgaagcgggaggacaacaagagcatcctgctgaacccggggccccggcacatcctggccgcctctgacacctgcttctacatcaacatcaccaaggaggagaactcggccttcatcttcaagcaggaggagaagcggaagaagagggccttctcggggcaggggctgcacgagggtccggcccgcctgcccgtgcacagcatcatcgcctccatggggacagtggccatggacctgcagggcacagagcaccggcctacgcagagcggcggtgggggcgggggcagcaagctggcactgcccacggagaacggctcgggcagccggcggcccagcatcgcgcccgtcctggaactggccgacagctcagccctgctgccctgcgacctgctgagcgaccagtcggaggatgaggtgacgccgtcggacgacgaggggctctccgtggtagagtatgtgaagggctaccctcccaactcgccctacatcggcagctccccaaccctgtgccacctcctgcctgtgaaagcccccttctgctgcctgcggctggacaagggctgcaagcacaacagctatgaagacgccaaggcctacgggttcaagaacaagctgatcatcgtctcggcagagacggccggcaatgggctgtacaacttcatcgtgccactgcgggcctactacagatcccgcaaggagctgaaccccatcgtgctgctgctggacaacaagcccgaccaccacttcctggaagccatctgctgcttccccatggtctactacatggagggctctgtggacaacctggacagcctgctgcagtgtggcatcatctatgcggacaacctggtggtggtggacaaggagagcaccatgagcgccgaggaggactacatggcggacgccaagaccatcgtcaacgtgcagaccatgttccggctcttccccagcctcagcatcaccacggagctcacccacccttccaacatgcgcttcatgcagttccgcgccaaggacagctactctctggctctttccaaactagaaaagagggagcgagagaatggctccaacctggccttcatgttccgcctgccgttcgccgccggccgcgtcttcagcatcagcatgttggacacactgctctaccagtccttcgtgaaggactacatgatcaccatcacccggctgctgctgggcctggacaccacgccgggctcggggtacctctgtgccatgaaaatcaccgagggcgacctgtggatccgcacgtacggccgcctcttccagaagctctgctcctccagcgccgagatccccattggcatctaccggacagagagccacgtcttctccacctcggagccccacgacctcagagcccagtcccagatctcggtgaacgtggaggactgtgaggacacacgggaagtgaaggggccctggggctcccgcgctggcaccggaggcagctcccagggccgccacacgggcggcggtgaccccgcagagcacccactgctacggcgcaagagcctgcagtgggcccggaggctgagccgcaaggcgcccaagcaggcaggccgggcggcggccgc

SEQ ID NO: 45258 - DNA, 552 bp, Homo Sapiens
atctcttgaagcttcacttcaacttcactacttctgtagtctcatcttgagtaaaagagaacccagccaactatgaagttccttgtctttgccttcatcttggctctcatggtttccatgattggagctgattcatctgaagagaaatttttgcgtagaattggaagattcggttatgggtatggcccttatcagccagttccagaacaaccactatacccacaaccataccaaccacaataccaacaatataccttttaatatcatcagtaactgcaggacatgattattgaggcttgattggcaaatacgacttctacatccatattctcatctttcataccatatcacactactaccactttttgaagaatcatcaaagagcaatgcaaatgaaaaacactataatttactgtatactctttgtttcaggatacttgccttttcaattgtcacttgatgatataattgcaatttaaactgttaagctgtgttcagtactgtttctgaataatagaaatcacttctctaaaagcaataaatttcaagcac

SEQ ID NO: 45259 - DNA, 1608 bp, Homo Sapiens
cgggcccagccgccgcagcagagtcaccacccccctcaccaccaccggccgcagccccatctgggcagctttcccgagagctgcagcagcgactccgagtccagctcctactcggaccacgcggccaacgactcggattttggctccagtttgtccagctccagcaattctgtcggggcctcggattccagtgaagtcagctcggaggaggaggactcgtccaccgagtcggactccagctccggctccagccaagtgtcagtgcagagcatccgattcaggcgcaccagcttctgcaagcctcccagcgtgcaggcgcaggccaacttcttgtaccatctggcctccgccgccgctgcaaccaaacccgctgctttcgaggatgccggcagacttcccgacctcaagagtagtgtcaaagcggagtcgccggcggagtggaatctgcagagctgggcccccaaagcatctccggtgtactgcccggccagcctggggagttgtttcgctgagataaggaacgatagggtatctgagattacattcccacactctgaaatttccaatgctgtaaagagaactgacctgacaattaactgcctggcagagggggcctcttcacctagcccaaagacaaacaatgcatttccacaacaaagaatactccgagaggctaggaaatgcctacaaacaactcctactacacactgtgcagataacaacacaatagctgctaggttcttaaataatgattcttcaggagcagaagcaaattcagaaaaatattccaaaatccttcattgtcctgaatttgctacggatttgccctcttcgcagactgatcctgaagtgaacgctgcaggagcagcagcaactaaagccgagaatccctgcactgacacaggcgacaagacattgccatttctgcacaatattaaaatcaaagtagaagacagtagtgctaatgaagaatatgaacctcacctttttacaaataagctaaagtgcgagtgcaatgatacaaagggtgagttttacagtgtgactgagagtaaagaggaggacgccttgttaaccacagccaaggaaggttttgcatgccctgaaaaagaaactccttccttaaatccactggctcaaagtcagggcctttcatgcactttaggttctccaaaacctgaggatggggaatataaatttggtgccagggtgagaaaaaattaccggacactagtactgggaaagcgacctgtccttcagacacctccagtcaaaccaaatttgaaatcagctagaagccctcgtcctacaggtaaaactgagacaaatgaaggaacactggatgattttacagttataaacagacgcaaaaaggtagccagcaatgtagcatcagcagtgaaaaggccatttcatttcatggcaaattttccttgtccaccatcactcattattgggagagatggggatttgtggccggcgtattccttaaacaccactaaggattctcaaactcctcacaaggcccatcctatatggaaatggcagctgggcggttctgcaatacctcttccacctagtcacaaattcaggaaatttaattcataa

SEQ ID NO: 45260 - DNA, 201 bp, Homo Sapiens
atggagcggggcgcaggagccaagctgctgccgctgctgctgcttctgcgggcgactggtttcacatgtgcacagacagatggccggaacggctacacggcggtcatcgaagtgaccagcgggggtccctggggcgactgggcctggcctgagatgtgtcccgatggattcttcgccagcgggttctcgctcaaggttggg

SEQ ID NO: 45261 - DNA, 2709 bp, Homo Sapiens
agattagcagggtgactttcaccctgcaacagtcacgctggagtactctggtgaaggatcaagaatattaccagttttctgatgaagaaaggaatatatttggtcaccagcaatctgcctttgaccatcctcaaagccaagtttttcatcgctgtctagaaaaatacttcattcagaggacacatatgtcctctttgaatgtctcctttttgggagcagtaggagaaagaaacttcaagatgtagaaagaattaatagtgtaacggaaagaaagaaggcaaaaggaagtaaatgtggaggccatagaaatagtaataagaataaagaagaaaaacaggaaagaagagggaaaagccatagaaaataacagccagagcgagtaggaggagacagagagaacgagagagagaaaagctgataaattcctgagaaaagtttctcttcttaagaattctaggtcaagaagtaaaatatggcacagagcattgaaaggaggcaacggatgcccagtgcaagattctgaagaagcaggaattcagcccgatgggagtccgagttcatgtcgtggcggcctcagccctgctgtatttcatcctgttgcctgaccacagactgggtacatctctggtatatatggttgctagtggtaattggcgcgctgcttctcctgtgtggcctgacgtccctgtgcttccgctgctgctgtctgagccgccagcaaaatggggaagatgggggcccaccaccctgtgaagtgaccgtcattgctttcgatcacgacagcactctccagagcactatcacatctctgcagtcggtgtttggccctgcagctcggaggatcctggctgtggctcactcccacagctccctgggccagctgccctcctctttggacaccctcccagggtatgaagaagctcttcacatgagtcgcttcacagtagccatgtgcgggcagaaagcacctgatctacccccagtacctgaagaaaagcagctgcctccaacagagaaggagtcgactcgaatagttgactcttggaactgatgagagctgtcattttataaataggagtggagtgatgtccagagtctgtgggaaaatggaacacatacttttctaaccctcagaagttttaagatggcatctaacaccatcattctatgggaaagatggttcttactcttcgttcacaggcctttatatcttccgatacagaatgctctaattgggaactctaattttgtatccaatggccaaaatctgcaagtaatctctagccacactgattactactaaaccaggaaagcatcaaggtgtcttgaattcctttaactattgagtgcatatagaattcctgtacccacatgatactgcaagttgtgtctctctctgtcagcgaatccactgcggttaactggaaaagaaagacaacagtgtcagcacagccatcgacattaatgcactgaatgcatgcatctttcctcctgagacagcaatcgattttacaccgaatgacaatgatcatcttagacagcacaacatacccactcggatatctaaaagctagggatggcattgctgatatgggcaaagagaacacagtatagtatttaagtgccaaatatcagtctttctttctctctggtcctacccctcagcagtatgaaaaactccatactgtgcagtcacagttggattaattcttcagttcctccgcactgcaaacacatatatgtgcgcacatgcatgtatacctgcaccctgttttaactctaaaggaatagtgttgctttacttctttcctgttttgcctggaccacttaaagccacaacacctctatagtgacacacgctagtctctagtggtggccctcactgccacctagaggagccatggtggaaaacacactctctcctttgagcctatctgcacatctctcgagttcttggagcaaaaactaaatgctgaactaagcctggttgagatgcttcccatggaccatgccgcagcacagtgctaatctatccacaaaacataccacctcccaaagtattattattggaaaatcgaggaagtgacgcacatttagggaaaaactactcaccttagaaaagtcactgaaatccttttttttttttttgagatggagttttgctcttgtagcccaggctgggatgcaatggcatggtctcagctcactgtaacctccacctcccggattcaagcaattcttctgcctcagcttcccgactagctgggattacagctgcctgccaccgtgcccagctaatttttgtatttttagtggagagggggtttcaccatgttggccagtctggtctagaactcctgacgtcaggtgatccgcccaccttggcctcccaaagtgctggaattagaggcctgaccccctgctcctggcctgaaatctttaaagccgttttttccctaaaaaatgggaaataataacacctcagaaggtttttgtgaagatcaaagaagctaaatatatgtggcatgatttgtaaagtgttatgcatatgtatgttattcttcctactgtcttctaaccttcccttgcctgctatgacttatctgagagccatgttcccatttatctttttgccaactatgttactgttgtcacacctgaaatggctttgtttttatcaataaatacttgttgattgcggtaaacagc

SEQ ID NO: 45262 - DNA, 1077 bp, Homo Sapiens
cagggagcgttgacatttagagatgtggccatagaattctctctggaggagtggcaatgtctggacaccgaacaacagaatttatatagaaatgtaatgttagataactacagaaacctggtcttcctgggtattgctgtctcaaagccagacctgatcacctgtctggagcaagaaaaagagccttggaatttgaagacacatgatatggtagccaaacccccagttatatgttctcatattgcccaagacctttggccagagcaaggcataaaagattatttccaagaagtcatactgagacaatataaaaaatgtagacatgagaatttactgttaagaaaaggctgtaaaaatgtggatgagtttaagatgcacaaaaaaggttataatagacataaccagtgtttgacaacttcccatagcaaaatatttcagtgtgacaaatatgtgaaagtctttcataaattttcaaattcaaacagacataagataagacatacttcgaagaaacctttcaaatgtaaagaatgtggaaaattattttgcattctttcacacttagctcaacataaaaaaattcatactggagagaaatcctacaaatgtgaagaatatggcaaagcctttaatgagtcctcaaactgtactacacataaaagaattactgagaaaaaaccttacaaatgtaaagaatgtggcaaagcctttaactggttttcacattttactacacataagagaattcatactggagaaaaaccctaccaatgtgagaaatgtggcaaattttttaaccaatccacaaaccttactacacataaaagaattcatactggagagaaaccctataaatgtaatgtggcaaagcctttaaccagtcctcaaaccttactgaacataagaaaattcatactaaagagcaaccatacaaatgcgaaaaatgtggcaaagcttttaagtggtcctcaacccttacaaaacataaaagaattcataatggagaaaaaccctacaaatgtgaagaatgtggcaaagcttttaaccgatcctcaacccttaatagacataagataa

SEQ ID NO: 45263 - DNA, 651 bp, Homo Sapiens
ctcacatacctgcccccaccgtggggtgagtgccgatcctcagagatgggcctcgacttttttcctgtttacagcatcaccgcctgtaggattgactgtgagacccgctacattgtggaaaactgcaactgccgcatggttcacatgccaggggatgcccctttttgtacccctgagcagcacaaggagtgtgcagagcctgccctaggtctgttggcggaaaaggacagcaattactgtctctgcaggacaccctgcaacctaacccgctacaacaaagagctctccatggtgaagatccccagcaagacatcagccaagtaccttgagaagaaatttaacaaatcagaaaaatatatctcagagaacatccttgttctggatatattttttgaagctctcaattatgagacaattgaacagaagaaggcgtatgaagttgctgccttacttggtaagctccccatggagggggcgccattcagaaggtctgggttgcatctcagtctgttcacccttcctggaagctgcataaaagcaaagtttggtcttttccctctctctccaggtgatattggtggtcagatgggattgttcattggtgctagtatccttacaatactagagctctttgattatatttatgaggta

SEQ ID NO: 45264 - DNA, 2570 bp, Homo Sapiens
gctgtcctgagcctgagtactctagctgccttgtcgtcatcgcatctggctgccatccagcgccagcacacagtaatgagtggccgagcttcctctgggagggaggaaacagttaaaatcttgcagcagctgcaatcatctaggcgtggttctcttgtctgacttgggctgcacagatcctgggccaagggacagaagaaagacagcctaggagcagagcctcccagatggctgagttggatctaatggctccagggccactgcccagggccactgctcagcccccagcccctctcagcccagactctgggtcacccagcccagattctgggtcagccagcccagtggaagaagaggacgtgggctcctcggagaagcttggcagggagacggaggaacaggacagcgactctgcagagcagggggatcctgctggtgaggggaaagaggtcctgtgtgacttctgccttgatgacaccagaagagtgaaggcagtgaagtcctgtctaacctgcatggtgaattactgtgaagagcacttgcagccgcatcaggtgaacatcaaactgcaaagccacctgctgaccgagccagtgaaggaccacaactggcgatactgccctgcccaccacagcccactgtctgccttctgctgccctgatcagcagtgcatctgccaggactgttgccaggagcacagtggccacaccatagtctccctggatgcagcccgcagggacaaggaggctgaactccagtgcacccagttagacttggagcggaaactcaagttgaatgaaaatgccatctccaggctccaggctaaccaaaagtctgttctggtgtcggtgtcagaggtcaaagcggtggctgaaatgcagtttggggaactccttgctgctgtgaggaaggcccaggccaatgtgatgctcttcttagaggagaaggagcaagctgcgctgagccaggccaacggtatcaaggcccacctggagtacaggagtgccgagatggagaagagcaagcaggagctggagaggatggcggccatcagcaacactgtccagttcttggaggagtactgcaagtttaagaacactgaagacatcaccttccctagtgtttacgtagggctgaaggataaactctcgggcatccgcaaagttatcacggaatccactgtacacttaatccagttgctggagaactataagaaaaagctccaggagttttccaaggaagaggagtatgacatcagaactcaagtgtctgccgttgttcagcgcaaatattggacttccaaacctgagcccagcaccagggaacagttcctccaatatgcgtatgacatcacgtttgacccggacacagcacacaagtatctccggctgcaggaggagaaccgcaaggtcaccaacaccacgccctgggagcatccctacccggacctccccagcaggttcctgcactggcggcaggtgctgtcccagcagagtctgtacctgcacaggtactattttgaggtggagatcttcggggcaggcacctatgttggcctgacctgcaaaggcatcgaccggaaaggggaggagcgcaacagttgcatttccggaaacaacttctcctggagcctccaatggaacgggaaggagttcacggcctggtacagtgacatggagaccccactcaaagctggccctttccggaggctcggggtctatatcgacttcccgggagggatcctttccttctatggcgtagagtatgataccatgactctggttcacaagtttgcctgcaaattttcagaaccagtctatgctgccttctggctttccaagaaggaaaacgccatccggattgtagatctgggagaggaacccgagaagccagcaccgtccttggtggggactgctccctagactccaggagccatatcccagacctttgccagctacagtgatgggatttgcattttagggtgatttgggggcagaaataactgctgatggtagctggcttttgaaatcctatggggtctctgaatgaaaacattctccagctgctctcttttgctccatatggtgctgttctctatgtgtttgcagtaattcttttttttttttttgagacggagtctcgcactgttgcccaggctggagagcagtggcgcgatcttggctcactgcaagctccgcctcccgagttcaagcaattctcctgcctcagcctcccgagtagctgggattacaggtgcctgccaccacacccagctaatgttttgtatttttagtagagatggggtttcaccatgttggccaggcagatctcaaactcctgacctcgtgatgcacccacctcggcctcccaaagtgctgggattacatgcgtgagccactgcgccctgcctgtttgtagtaatttttaggcaccaaatctccctcatcttctagtgccattctcctctctgttcaggtaaatgtcacactgtgcccagaatggatgaccaggaaccttaaagagtggctgaaaagattgcagagttatcataataaattgctaacttgcgt

SEQ ID NO: 45265 - DNA, 2594 bp, Homo Sapiens
gactcgatgtcctcggagagcacctgggacgcatggaacgagaggctgctggagattgagaaggaggcttcccggaggtaccacgccaagagcaagagagaggaggcggcagacaggagctcagaagcagggagcagggtgcgggaggatgatgaggacagcgtgggctctgaggccagttccttctacaacttctgcagcaggaacaaggacaagctcactgccctggaaagatggaagatcaagagaatccaatttggatttcacaagaaagacttgggagcgggagacagcagcggtgagcccggtgcagaggaggcagtaggggagaagaacccctccgacgtcagcctgacagcctaccaggcctggaagctgaaacaccagaagaaggtgggcagtgagaacaaggaggaggtggtggagctcagcaagggggaggactcggccttggctaagaagagacaacggaggctggagctgctggagagaagccggcagacgctggaggagagccagtctatggcaagctgggaggcggacagctccacggccagcgggagcattcccctgtctgcgttctggtctgcagacccctcagtcagcgctgatggggacacgacgtcagtactgagcacccagagccaccgctcccacctgtctcaggctgcaagcaacatagcggggtgttcaacctccaaccccaccacacccctgcctaacctgccagtggggcctggagacaccatttccattgccagtatccagaactggattgccaatgtagtcagtgagacccttgctcagaagcaaaatgaaatgctgctgttgtcccgctcaccgtctgttgcaagcatgaaggcagtaccagcggctagctgcctgggggatgaccaagtctccatgcttagtggacacagcagctcctccttgggtggctgcctgttgcctcagagccaggcaagacccagctctgacatgcagtctgtgctgtcctgcaacaccacactgagctcacccgcggaaagttgcagaagcaaagtgagggggaccagcaagcccatcttcagcctctttgctgacaatgtggacctaaaggaacttggccggaaggagaaggagatgcagatggagcttagggagaagatgtctgagtacaaaatggaaaagctggcctcagacaacaaacgcagctccctcttcaagaagaagaaggtcaaggaagatgaggatgatggtgtgggtgatggggatgaggacactgacagtgccatagggagcttccgatattcttcccgcagtaattcccagaaacctgaaacagacacatgctcctccctggctgtctgtgatcactatgcaagtggcagcagagttggcaaagagatggatagcagtattaataagtggctcagtggcctcaggacggaggaaaaacctcctttccaaagtgactggtctggaagttccagagggaagtacaccagatcgtccctgctcagggagacagagtctaaatcctccagttacaagttttccaaatcccagtcagaggaacaggacacctcctcctaccacgaggcaaatggcaactctgtaagaagcacttcacggttctcatcttcctccaccagggagggcagagagatgcacaagttctccaggtccacgtacaacgagacctcaagttcccgagaggagagcccagagccctacttcttccgccggaccccagagtcctcagaaagggaagagtccccagaaccacagcgcccaaattgggccaggtccagggactgggaagatgtggaagagtcatccaagtcagacttctctgaatttggagccaagaggaagttcacccagagctttatgaggtctgaagaagagggagagaaagagaggacagaaaacagagaagaagggaggtttgcatctggacggcggtcccagtatcggagaagcactgacagggaggaagaggaagaaatggacgatgaagccatcattgctgcttggagacgccggcaagaagaaaccaggaccaagctgcagaaaaggagggaggactgagctggggaaaatctgagaacactgaaagaaaccactcacgttagcatagggctcagggcacacgttgccaccactcatcgcaggatgaggatacagagaggatcttccagaggggcagagccaaaatgagaggtaccaagcataagggcagcagaggtggagtagggaggaggcaaggagggggagaaccatcaatacgaatacgaggtccgaatgcggaccaactgataccattttctgttgctcagcgccctctaagctttggtgtttcacttaatgtatttggcagtgttcatcacaggctagagaggtgagcttggaaaagcactgtagtttgtcagagactccagtttacatccagaaaggccatgaacataggacacgcttctgtctgtagaggcttcatatgagacccagaaagtctatcctatggcaagtctgacctctcctggcaatgctcagttctgatttttttttttttaatgttttgagtctccattaaaaatggtatgttggcaaat

SEQ ID NO: 45266 - DNA, 825 bp, Homo Sapiens
gtgcggtctgcggcgcggagccgagtgggctgcggggatgcgggggaccagctgcgtgggcggcggcgccgagagccccggaggcgcggggctgagcgagggcccgcgggggcgctggctgcgcttggctccggtatgcgcctacttcctctgcgtctcgctagctgccgtgctgctcgccgtgtactacggtctcatctgggtacccacgcggtctcccgcggcacccgccggcccacagcccagcgcgccgtcccctccgtgtgctgcccgcccgggcgtgccgcctgtcccggcgcccgccgctgcctccctctcctgcctcctgggagtccccggcgggccgcgaccccagctccagctgccgctgagccgccgccgccgctacagcgaccctgaccgccgtccgagccgccagacacccagagagacgccagaggccgcggaggggcgaagacccgggtaactctcccttccaccccaacccggatcgccagccctcgagagctctgtgctccacgccgaggatgcaccgtctctggattggtccggccttcttcctaatgacatcgctcagcgtctctggagccgtcatcccgcggaatgggggcccagggggtgtcagctcggggccttgcctcttgcagctactctgtggtcaggccgggtcctccaccatcaggaagatcccatcctgagctctgtctcctgcccctcctgctgtgggatgctgagcacagagcccacagcccatctgcctcttcacctccctgaatccgtgtccatctgcaataaacgacagcctcggctgcctcgtgctgtgtc

SEQ ID NO: 45267 - DNA, 1877 bp, Homo Sapiens
aactgatgatgatgaaacctattgccgagcagccactgagtatgctagagcctgctctcatgctggctaccctattcaagactggagagatgactttccagcatgcactgataaatgtgatgatagctttgtccatcgggactgtatcagttgttgtccaccaacctgcacatttgagaagcaatgtcttgggagcaatctccattgtcttgatggatgttactgcccagatggcctcgtaatggacaatgggacttgcatctccttggaaaattgcccatgcggttttcatggattagcttattcagttggttcaaaaattgaacaagaatgtactgaatgtgtgtgtgttggtggagtttggaactgcactgagcaagactgtccagttcaatgctcagttgtaggtgattctcactttacaacttttgatggtcgacattattcttttattggcatgtgccaatacatcctcgtgaaaggaactggaaaagataaattcacgattactttacagaaagctccctgtgagcaggaaccactagcctgcctctcctccttccctggtatctggggaagagagtcctggtggtgtaccctagcatttcagaacaccgtctattcaaagctgatttacgtatgttcttttcctgcaggtattgttgaaattcaaactctgtcatccttatttatacttctaaaaaccacatttggtttaaagattctgtttgctatagatggggaaagaatttatattcagcttactagcgcatggaaaagaagaacattaggtctgtgtggcacttttaatggcaacataagggatgattttctttctccatcaggcatgatagaaggtacaccacaacttcacgcaaatgcgtggagagtttcttctacctgttttgcacctgttcatgtcccagtggtggacccctgtaacatcaatcaacaaaacattgggtatgcagcacactgtgatgtcatccaccaggagctctttgctccttgccacatctatattagccctgggctgtactatcagctatgccgccacgatgcatgcaagtgtggaagctcctgcctgtgcaatgctcttgcccactatgcctacctctgcggccagcacggtgttcccattgatttcagaactcagatttctttctgtgctgtggtgtgccagaagggcatgctgtaccatcactgttcctcgttctgcctccattcctgcatttctctctcttccccggagcagtgcagtgatgactgtgctgaaggctgtaattgtccggaaggcaaattctatgaagacactcttaacttttgtgtacccatattccactgccgttgtcattataggggcagtgtttatcaacctggagagctcatccccacaccctcgggcttatgccagtgttcaaatgggactgtgaaatgtgatgaattagcaacgccctctgctgttcacatctgcccagagggaaaagagtatttcgactgcaggtttcctgaccctgaattaccagctggtggtgttaattgtgagactacatgtgcaaacctagccatgaacttcacctgcaccccatcctcaccctgtataagtggctgtgtttgtgctccaggaatggcagagcacagaggaaagtgttatgttcctgaaagctgcccatgtatttggaaagattgggagtatctctcaggagaagtgattgctacaccgtgttacacctgcgtttgtcgacgaggaatgttcaattgcacatattatccatgcccagcagtgtgcacaatatacggggaccgacattattattcttttgatggactagaatatgactatatcagtgattgccaggtgtttttgataaaggtag

SEQ ID NO: 45268 - DNA, 7161 bp, Homo Sapiens
ctttcctcttggaattggcgactgctgcggggctgagcgctggtctcacgcatctcgggagccaggttggtggcgcgatgagttgcagcaaggcctacggggagcggtacgtcgcctcggtgcagggctccgccccgtcgcctcgaaagaagtcaacgagaggattctattttgcaaagctgtattatgaagctaaagaatatgatcttgctaaaaaatacatatgtacttacattaatgtgcgagagatggatcccagagctcacagatttctgggtcttctttatgaattggaagaaaacacagagaaagccgttgaatgttacaggcgttcagtggaattaaacccaacacaaaaagatcttgtgttgaagattgcagaattgctttgtaaaaatgatgttactgatggaagagcagaatactgggtggaaagagcagcaaaacttttcccaggaagtcctgcaatttataaactaaaggaacagcttctagattgtgaaggtgaagatggatggaataaactttttgacttgattcagtcagaactttatgtaagacctgatgacgtccatgtgaacatccggctagtggagttgtatcgctcaactaaaagattgaaggatgctgtggcccgctgccatgaggcagagaggaacatagctttgcgttcaagtttagagtggaattcgtgtgttgtacagacccttaaggaatatctggagtctttacagtgtttggagtctgataaaagtgactggcgagcaaccaatacagacttactgctggcctatgctaatcttatgcttcttacgctttccactagagatgtgcaggaaagtagagaattactggaaagttttgatagtgctcttcagtctgcgaaatcttctttgggtggaaatgatgaactgtcagctactttcttagaaatgaaaggacatttctacatgcatgctggttctctgctcttgaagatgggtcagcatggtaataatgttcaatggcgagctctttctgagctggctgcattgtgctatctcatagcatttcaggttccaagaccaaagattaaattaataaaaggtgaagctggacaaaatctgctggaaatgatggcctgtgaccgactgagccaatcagggcacatgttgctaaacttaagtcgtggcaagcaagattttttaaaagtggttgttgaaacttttgccaacaaaagcgggcagtctgcattatatgatgctctgttttctagtcagtcacctaaggatacatcttttcttggtagcgatgatattggaaacattgatgtacaagaaccagagcttgaagatttggctagatacgatgttggtgctattcgagcacataatggtagtcttcagcaccttacttggcttggcttacagtggaattcattgcctgctttacctggaatccgaaaatggctaaaacagcttttccatcatttgccccaggaaacctcaaggcttgaaacaaatgcacctgaatcaatatgtattttagatcttgaagtatttctccttggagtagtatataccagccacttacaattaaaggagaaatgtaattctcaccacagctcctatcagccgttatgcctgccccttcctgtgtgtaaacagctttgtacagaaagacaaaaatcttggtgggatgcggtttgtactctgattcacagaaaagcagtacctggaaactcagcaaaattgagacttctagttcagcatgaaataaacactctaagagcccaggaaaaacatggccttcaacctgctctgcttgtacattgggcaaaatgccttcagaaaatgggcagcggtcttaattctttttatgatcaacgagaatacatagggagaagtgttcattattggaagaaagttttgccattgttgaagataataaaaaagaagaacagtattcctgaacctattgatcctctgtttaaacattttcatagtgtagacattcaggcatcagaaattgttgaatatgaagaagacgcacacgtaacttttgctatattggatgcagtaaatggaaatatagaagatgctatgactgcttttgaatctataaaaagtgttgtttcttattggaatcttgcactgatttttcacaggaaggcagaagacattgcaaatgatgccctttctcctgaagaacaagaagaatgcaaaaattatctgagaaagaccaggggctacctaataaagattttagatgacagtgattcaaatctttcagtggtcaagaaattgcctgtgcccctggagtctgtaaaagagatgcttaagtcagtcatgcaggaactcgaaaactatagtgaaggaggtcctctctataaaaatggttctttgcgaaatgcggattcagaaataaaacattctacaccatctcctaccaaatattcactatcaccaagtaaaagttacaagtattctcccaaaacaccacctcgatgggcagaagatcagaattctttactgaaaatgattcgccaagaagtaaaggccattaaggaagaaatgcaggagttgaaactaaatagcagtaagtcagcatcccatcatcgttggcccacagagaattatggaccagactcggtgcctgatggatatcaggggtcacagacatttcatggggctccactaacagttgcaactactggcccttcagtatattatagtcagtcaccagcatataattcccagtatcttctcagaccagcagctaatgttactcccacaaagggttcttctaatacagaatttaagtcaaccaaagaaggattttccatccctgtgtctgctgatggatttaaatttggcatttcggaaccaggaaatcaagaaaagaaaagtgaaaagcctcttgaaaatgatactggcttacaggctcaggatattagtggccggaagaagggccgtggtgtgatttttggccaaacaagtagcacttttacatttgcagatgttgcaaaatcaacttcaggagaaggatttcagtttggcaaaaaagacctcaatttcaagggattttcaggtgctggagaaaaattattctcatcacaatacggtaaaatggccaataaagcaaacacttccggtgactttgagaaagatgatgatgcctataagactgaggacagcgatgacatccattttgaaccagtagttcaaatgcctgaaaaagtagaacttgtaacaggagaagaaggtgaaaaagttctgtattcacagggggtaaaactatttagatttgatgctgaggtaagtcagtggaaagaaaggggcttggggaacttaaaaattctcaaaaacgaggtcaatggcaaagtaagaatgctgatgcaaagagaacaagtactaaaagtgtgtgctaatcattggataacgactacaatgaacctgaagcccctctctggatcagatagagcatggatgtggtcagccagtgatttctctgatggtgatgccaaactagagcgattggcagcaaaatttaaaacaccagagctggctgaagaattcaagcagaaatttgaggaatgccagcggcttctgttagacataccacttcaaactccccataaacttgtagatactggcagagctgccaagttaatacagagagctgaagaaatgaagagtggactgaaagatttcaaaacatttttgacaaatgatcaaacaaaagtcgctgaggaagaaaataagggttcaggtacaggtgcggccggtgcctcagacacaacaataaaacccaatgctgaaaacactgggcccacattagaatgggataactatgatttaagggaagatgctttggatgatagtgtcagtagtagctcagtacatgcttctccattggcaagtagccctgtgagaaaaaatcttttccactttgatgagtcaacaacaggatctaacttcagttttaaatctgctttgagtctatctaagtctcctgccaagttgaatcagagtgggacttcagttggcactgatgaagaatctgatgttactcaagaagaagagagagatggacagtactttgaacctgttgttcctttacctgatctagttgaagtatccagtggtgaggaaaatgaacaagttgtttttagtcacagggcagaattctacagatatgataaagatgttggtcaatggaaagaaaggggcattggtgatataaagattttacagaattatgataataagcacgttcgtatactgatgagaagggaccaagtattaaaactttgtgccaatcacagaataactccagacatgagtttgcaaaatatgaaagggacagaaagagtatgggtgtggactgcatgtgattttgcagatggagaaagaaaagtagagcatttagctgttcgttttaaactacaggatgttgcagactcgtttaagaaaatttttgatgaagcaaaaacagcccaggaaaaagattctttgataacacctcatgtttctcggtcaagcactcccagagagtcaccatgtggcaaaattgctgtagctgtattagaagaaaccacaagagagaggacagatgttattcagggtgatgatgtagcagatgcagcttcagaagttgaagtgtctagcacatctgaaacaacaacaaaagcagtggtttctcctccaaagtttgtatttggttcagagtctgttaaaagaatttttagtagtgaaaaatcaaaaccatttgcatttggcaacagttctgccactgggtctttgtttggatttagttttaatgcacctttgaaaagtaacaatagtgaaactagttcagtagcccagagtggatctgaaagcaaagtggaacctaaaaaatgtgaactgtcaaagaactctgatatcgaacagtcttcagatagcaaagtcaaaaatctctctgcttcctttccaacggaagaatcttcaatcaactacacatttaaaacaccagaaaaggagcctccattatggtatgctgaatttactaaagaagaattggttcagaagctcagttccaccacaaaaagtgcagatcacttaaacggcctgcttcgggaaatagaggcaaccaatgcagtccttatggagcaaattaagcttctcaaaagtgaaataagaagattggaaaggaatcaagagcaagaggtgtctgcagctaacgtggaacacttgaagaacgtcttgctgcagttcattttcttgaagccaggtagtgaaagagagagacttcttcctgttataaatacgatgttgcagctcagccttgaagaaaagggaaaacttgctgcggttgctcaaggtgaggaataaaatgcttcccgttcttctggatgggcatcctatcttcgtagttggtttggacttcgataggttgatggaaggaatgtttttattaaccaaataaaatctatttacaaaaatggttcatgtgtattaccatcattcttttgtcaaaaagtgtgtatatgtttgcatttacatatatttgtacatctatatgacagatgtattttaaaagtttcaacttgaagtaaaagtacaacagcttgaagtgttgataccaggccacagccctctaactcatgtgatctcccatgcatgctgccagaataaaaccaccaggaatgaattcactccccacttctctggaacctcaggacccgcccatttctcggcagtactgtgaattttgaagttaaactaaattttggtaccataccaactggaatttaggctttaaaaataatgtttcaaggccaggtgtggtgattcatgcctgaaatcccactacttggggaggctgaggctggagaatcgtttgaggctagtgagctgtgattgtatcactgcactccagctcggggaacagagcgagaccttgtctctaaaaataataatagtaataaaaataacattttatgactatttattgcaaggtcagatttacagattgttataaattgttgagaaatttttgtgattagaatatgaaggaaaaagctttgttggtaaaagtgacatgttaaggggctatgaagtaaatatgctgcagttaattgtgctaagttaaaatacagtttagttatttgctttaaaataaactcttctttttttctttaaagtatactatctcaaaactcattatgttgtcagagccctagagctggctagtgtaacactgactatgaataggtgggcccaccacttgagttgaggtgatttcatggtgtctttccaggctcttgatagggtgtcactgcatgcaagccatgaatctgttttgagaatcctctccattttcccaaataaaaacctatcccaacagtgactatatcactcagcattgaatctaaatataaaagtggtgctttcagtgtttttggcagatagtgttccataagctttccatcagaagggattttagacaccttagaggtccgtgctacatcttcacagttcctctgaataaccttaggtggtagtgttacttgcctttgacaccgctgcatatgttttaatgactagatccaaactgtgttgttcttaaatcaaaaattggataatttttaatatttatgtattaatcacatagtatgctctctgaagttctcttaagccttcagtttatactcttaattttctttctgagctggggaactgactttgcactttggttacacagaacattggtttccaatttagtttaactgaaatttgctgctgatatgttgagtttgttctttaaaaaatatctcatatatctcgtctttcctccttagaagaacagacctaactagcgaatgtatgaatgaaaatgcatctatttcagagccgacatgaagagtttagtttttttactttataaactgtgaatatgagtatgccagctgcatacgatgtaactaatcatatttaaatatatttcactttctctttgacttgagaccttttgaagtctgtataaacttgttttgaaatatagtctccacttacaaatgtcataacaaaatacttttttgcatgataaaaaattgattacaaaaggcatattctttcatggtttctgcaatgagaggaagtgtaatgattattttaatatttctattaaatatgttta

SEQ ID NO: 45269 - DNA, 1257 bp, Homo Sapiens
gagggctgcgcggaccaccggccgcaccgctatcgcagcttcatgattgaggagatcctcacggagccacccgggcccaagggcgccgcgcccgcagccgccgctgccgcggcgggcgagctgctgaagttcggcgtgcaggcgctgctggcggcgcggcccttccacagccacctggccgtgctgaaggccgagcaggcggcggtgttcaagttcccactggcgccgctgggctgttcagggctgagctctgcgttgctggcggcagggcccgggctgcccggcgccgcgggtgcgccacacctgccgctcgagttgcagctccgcgggaagctggaggcggcaggccctggggagccaggcaccaaagccaagaaggggcgtcggagccgcactgtgttcaccgagctgcagctgatgggcctggagaaacgcttcgagaagcagaagtacctttccacgccggacagaatagatcttgctgagtccctgggcctgagccagttgcaggtgaagacgtggtaccagaatcggaggatgaagtggaagaaaatagtgctgcagggcggcggcctggagtctcccaccaagcccaaggggcggcccaagaagaactcaattccaacgagcgagcagcttactgagcaggagcgcgccaaggatgcagagaaaccggcggaggtgccgggcgagcccagcgacaggagccgcgaggactgagggcggtatacggtgcggggcctgggatgcccgcgccacccgcagccccctcactcggcggaaacccgcgagccggcccttccgcgtccaagaagtttacttcctaagcctttttattatgatcttgaatgcggacaattggggccaaacgaggaaggacacagacccaaaagccagacccaggtcccagcgcgcttctgggctctaacctgggagactcgcatccagcccggcggaagctacagtctctaccctgagctccgtggcgcagagcgctccacgcgtattcacgccccgctcctcgcctgcacccccaccccgtctggggcctgccctcccggccggggagcctccaggcacacacccgcttctggacgtcggggacccagcggttgggctcaggccacaacggcctgagattgccccggggcaacccgtcggctcggcctggaggccgggtccccgatgtcgctggggcccctaccccctcttgcgaagacggtgactttttttccaataaaatattttatgacacaa

SEQ ID NO: 45270 - DNA, 435 bp, Homo Sapiens
atggctaaagccttaacgaccatgcaagaacaaatcgactctttagcagccgtagtccttcaaaatcgtcgaggactagacatgttaacggcagcacagggaggaatttgtttggccttagatgaaaaatgttgcttttgggtaaatcaatcaggaaaagtacaagacaacatcagacaactcctaaatcaagcctccagtttacgggaacgagccactcagggttggttaaattgggaaggaacttggaaatggttctcttgggttcttccccttacaggcccacttgttagtctcctacttttgctcctttttggtccatgtctcctaaatctaataacccaatttgtctcctctcgccttcaggccataaagctccagacgaatctcagtgcaggacgccatcctcgcaatattcaagagtcacccttctaa

SEQ ID NO: 45271 - DNA, 1137 bp, Homo Sapiens
atggtctgggggaaaatttgctggttcagccagagggctggatggacagtgtttgctgagtcacagatatctctctcatgtagcctttgtctccacagtggtgaccaggaggcacagaacccaaacctggtatctcagctctgtggcgtctttcttcaaaatgagacgaatgaaaccatacatatgcagatgagcatggcagtgggacagcaggccctgcccttgaatatcattgcccccaaggctgtgctggtctccctctgtggggtcttattgaatggcactgtcttctggctgctttgctgtggggccacgaatccctacatggtatacatcctccacctggtcgctgctgacgtgatctatctttgctgctcggcagtggggttcttacaggtgactctgctaacttatcatggagtcgtgttttttatccctgatttcctggccatattgtctcccttctcctttgaggtgtgtctctgtctcctggtggccatcagcacagagcggtgtgtgtgtgtcctcttccccatctggtacagatgccaccgcccaaaatacacatctaatgttgtctgcaccctcatctggggcctgcctttttgcatcaacatagtaaaatcacttttcctaacttactggaaacatgtaaaggcatgtgtcatatttctaaagctttctgggctcttccatgctatcctttcacttgtgatgtgtgtgtcgagtctgactctactcattagattcctgtgctgctcccagcagcaaaaggccaccagggtctatgcggtggtgcagatctcggcccccatgttcctactctgggccctacccctgagcgtggcacccctcataacagatttcaaaatgtttgtcaccacctcctatttaatttccttgttcctcattataaacagcagcgccaaccctatcatttatttctttgtggggagcctcagaaagaaaaggctgaaggaatctctcagagtgattctccaacgggcgttagcagataagccagaggtggggaggaacaaaaaggcagctggcatcgacccaatggagcaaccacactctactcagcatgtggagaaccttcttcccagggagcacagggtcgatgtggaaacataa

SEQ ID NO: 45272 - DNA, 1891 bp, Homo Sapiens
tggagccatgctccctgggctcttccgcgggcgcccgcgcgctgcccttcgcttgaggcaaaaggactcttgtggaagatggaactcattgtccattttccagaatgtatttccaagcccatcaatgggacctgatactgctgttctgtgttgaaatgcttgaagaactcctgcatctctgcttgcatcttccatcctactgaaaccatggtcttctcggcagtgttgactgcgttccataccgggacatccaacacaacatttgtcgtgtatgaaaacacctacatgaatattacactccctccaccattccagcatcctgacctcagtccattgcttagatatagttttgaaaccatggctcccactggtttgagttccttgaccgtgaatagtacagctgtgcccacaacaccagcagcatttaagagcctaaacttgcctcttcagatcaccctttctgctataatgatattcattctgtttgtgtcttttcttgggaacttggttgtttgcctcatggtttaccaaaaagctgccatgaggtctgcaattaacatcctccttgccagcctagcttttgcagacatgttgcttgcagtgctgaacatgccctttgccctggtaactattcttactacccgatggatttttgggaaattcttctgtagggtatctgctatgtttttctggttatttgtgatagaaggagtagccatcctgctcatcattagcatagataggttccttattatagtccagaggcaggataagctaaacccatatagagctaaggttctgattgcagtttcttgggcaacttccttttgtgtagcttttcctttagccgtaggaaaccccgacctgcagataccttcccgagctccccagtgtgtgtttgggtacacaaccaatccaggctaccaggcttatgtgattttgatttctctcatttctttcttcatacccttcctggtaatactgtactcatttatgggcatactcaacacccttcggcacaatgccttgaggatccatagctaccctgaaggtatatgcctcagccaggccagcaaactgggtctcatgagtctgcagagacctttccagatgagcattgacatgggctttaaaacacgtgccttcaccactattttgattctctttgctgtcttcattgtctgctgggccccattcaccacttacagccttgtggcaacattcagtaagcacttttactatcagcacaacttttttgagattagcacctggctactgtggctctgctacctcaagtctgcattgaatccgctgatctactactggaggattaagaaattccatgatgcttgcctggacatgatgcctaagtccttcaagtttttgccgcagctccctggtcacacaaagcgacggatacgtcctagtgctgtctatgtgtgtggggaacatcggacggtggtgtgaatattggaactggctgacattttgggtgatgcttgttctttattgacattgaattctctttctcatagcctctccactttatttttttttatagggtttgtgtatgtatgtgtgtgagcagtgtaaagaaagaatggtaattatagttctgttaccaagaataaataataggaaagtgattacaaatattacctccagggttcaatagaaatcctcaatttagggtgaggagacttttttttggttttggggtttttccttgattgattttgttttcatagtgggaatcaggattgtgctttattgagcctgcagttacattgaattgtaggtgtttcgtgtgctgctaaggtatgcttatttgagtttatcaagactttttttttctggaagacactgctgcttttaccatcacattggagcc

SEQ ID NO: 45273 - DNA, 633 bp, Homo Sapiens
cgcgccctcgtcggcccagttgggcattcccggattgcagagagcgggctgggcgcggcggcaggcgcgagaacgggcactgcgcgcccccgcccgccgactcggacgagagcagcgcagcggccgagaggcggcggcgccgggttgcggcggggcgggcggcggcgagcgggcgcggaggggggcgcgggcggtgcggacgggcagggggcggggccgggggcggctgagtcgggggcgctgaccgcctccaggtccccggggcccggtggccgcctgtcgcgcgccagctcgcgctccgtcgagttcttcctgtcgcgccggcgccgggcgcgcagcagcgtgtgccgccgcaaggtggcccaggcgcgggggaaaagcttcacctttgtgctggctgtggtcatgggcgtgttcgtgctctgctggttccccttcttcttcagctacagcctgtacggcatctgccgcgaggcctgccaggtgcccggcccgctcttcaagttcttcttctggatcggctactgcaacagctcgctcaacccggtcatctacacggtcttcaaccaggatttccggcgatcctttaagcacatcctcttccgacggaggagaaggggcttcaggcagtga

SEQ ID NO: 45274 - DNA, 1314 bp, Homo Sapiens
tctcttgtccccagccctcctggtccccaatggcagcagccgccatcccagctttgcttctgtgcctcccgcttctgttcctgctgttcggctggtcccgggctaggcgagacgaccctcactctctttgctatgacatcaccgtcatccctaagttcagacctggaccacggtggtgtgcggttcaaggccaggtggatgaaaagacttttcttcactatgactgtggcaacaagacagtcacacccgtcagtcccctggggaagaaactaaatgtcacaatggcctggaaagcacagaacccagtactgagagaggtggtggacatacttacagagcaactgcttgacattcagctggagaattacacacccaaggaacccctcaccctgcaggcaaggatgtcttgtgagcagaaagctgaaggacacagcagtggatcttggcagttcagtatcgatggacagaccttcctactctttgactcagagaagagaatgtggacaacggttcatcctggagccagaaagatgaaagaaaagtgggagaatgacaaggatgtggccatgtccttccattacatctcaatgggagactgcataggatggcttgaggacttcttgatgggcatggacagcaccctggagccaagtgcaggagcaccactcgccatgtcctcaggcacaacccaactcagggccacagccaccaccctcatcctttgctgcctcctcatcatcctcccctgcttcatcctccctggcatctgaggagagtcctttagagtgacaggttaaagatgataccaaaaagcccctgtgagcacggtcttgatcaacctcgcccttctgtctggccagctgcccaccacctacggtgtatgtccagcagcctccagcagatgatgatgacaccatggacccaatagctcattcactgccttgattccttttgccaacaatttaaccagtgattattcctaacatattatgcaattttctcttggtgctacctgatggaattcctgcacttaaagttctggctgactaaacaagatatgtcaacattttctttcttctctttttgtttggaaaatcaagtacttctttgaatgatgatttctttctttcattactgacatgattgtcagtaaaacaatcatgttagacttcagacctccagggattctttccatgtcctgaaagagaattgtttaattatttaataagaaaaaaatttatattaatgattgtttcctttagtaatttattgctgtgtactgatatttaaataaagagttatatttcccaaaaa

SEQ ID NO: 45275 - DNA, 1907 bp, Homo Sapiens
gagactcgcccggctcaaccccgacgtccgcgccccggccgcctgttggccatggcgggcctgggcctgggctccgccgttcccgtgtggctggccgaggacgacctcggctgcatcatctgccaggggctgctggactggcccgccacgctgccctgcggccacagcttctgccgccactgcctggaggccctgtggggcgcccgcgacgcccgccgctgggcctgccccacttgccgccagggcgccgcgcagcagccgcacctgcggaagaacacgctactgcaggacctggccgacaagtaccgccgcgccgcacgcgagatacaggcgggctccgaccctgcccactgcccctgcccgggctccagttccctctccagcgcggccgcgaggccccggcgccgcccggaactgcagcgggtggcagtagagaagagcatcacagaagttgctcaggagctgacagagctggtggaacatcttgtagacattgtcagaagcctgcagaatcagaggcccctatcagaatctggaccagacaacgaactgagcatcctgggcaaggagaactcctggaagccccgtcttcctcctcatgcccattgcctgaccagagccaccctgcactcaggagagcttctcggtttgctcagtgggccatccatccaacctttaacttgaagagcctttcctgcagcctggaggtgtccaaggattcccgtacagtgactgtgtctcaccgcccacaaccctatcgctggagctgtgagaggttttctaccagccaggtcttatgttcccaggccctgtcttctggaaagcattactgggaagtggacactaggaattgcagccactgggcagttggggtggcttcctgggagatgagccgcgaccaggtcctgggaaggactatggactcttgttgtgtggaatggaaggggactagccagctctctgcatggcacatggtcaaggaaactgtccttggctcagacagacctggggtggtgggcatctggctgaaccttgaggagggaaagcttgccttctattcagtggacaatcaggagaagcttctgtatgagtgtaccatctctgcctcctctcctttgtaccctgccttctggctgtatggcttacatcctggaaattacctgataataaagcaagtaaaggtgtaaggtttcctaagggattacaacacagtggtttcctggtctctctccctgtcatcaatcagggtagtaacttgacttaagaataccactttttagaaaaattacgatagagatgggatctcactaggttgcccaggctggtgtcgaattcctggtctcaagcagtcctcccacctcagcctcccaaggtgctgggattacaggtgtgagccaccacacctggccaagaataccacttttgaagttaatccttttgtgtgatacaggatgaacttgggatgtttgaaccctggacattccaaataaagaataggcccctgcctggctcctgggagataacctctaagccattagaatatcttgcctgataagagtgtttttgtttacctgtgggccttgggccatgcagtatcagcttgaccttgcaaggtcaagctgaggagactaagttagccatgtgggcagtgaagcatgccaatgtgatcaatccctagtaaaagccctggacacctaggcatgggtgagctactctggttggtaatactctgtgcacacatcattgtagccacacatcattgctgggagaattaagcattatcctgaagactctgccaggagaggataattggaagttctcttggaccttaccttatgtgcctttcttcattgctgattttaatctgtatcctttcactgtaataaactgtaactatgagtgcaaca

SEQ ID NO: 45276 - DNA, 948 bp, Homo Sapiens
atgatgtgggaaaactggacaattgtcagtgaatttgttctcgtgagcttctcagccctgtccactgagcttcaggctctactgtttctccttttcttgaccatttacttggttactttaatgggcaatgtcctcatcatcctggtcactatagctgactctgcactacaaagtcctatgtacttcttcctcagaaacttgtccttcctggagataggtttcaacttggtcattgtgcccaagatgctggggaccctgatcattcaagacacaaccatctccttccttggatgtgccactcagatgtatttcttcttcttttttggggctgctgagtgctgcctcctggccaccatggcatatgaccgctacgtggccatctgtgaccccttgcactacccagtcatcatgggccacatatcctgtgcccagctggcagctgcctcttggttctcagggttttcagtggccactgtgcaaaccacatggattttcagtttccctttttgtggccccaacagggtgaaccacttcttctgtgacagccctcctgttattgcactggtctgtgctgacacctctgtgtttgaactggaggctctgacagccactgtcctattcattctctttcctttcttgctgatcctgggatcctatgtccgcatcctctccactatcttcaggatgccgtcagctgaggggaaacatcaggcattctccacctgttccgcccacctcttggttgtctctctcttctatagcactgccatcctcacgtatttccgaccccaatccagtgcctcttctgagagcaagaagctgctgtcactctcttccacagtggtgactcccatgttgaaccccatcatctacagctcaaggaataaagaagtgaaggctgcactgaagcggcttatccacaggaccctgggctctcagaaactatga

SEQ ID NO: 45277 - DNA, 4162 bp, Homo Sapiens
aaggtgttcagaagacaatggagaaaaaatggaaatactgtgctgtctattacatcatccagatacattttgtcaagggagtttgggaaaaaacagtcaacacagaagaaaatgtttatgctacacttggctctgatgtcaacctgacctgccaaacacagacagtaggcttcttcgtgcagatgcaatggtccaaggtcaccaataagatagacctgattgctgtctatcatccccaatacggcttctactgtgcctatgggagaccctgtgagtcacttgtgactttcacagaaactcctgagaatgggtcaaaatggactctgcacttaaggaatatgtcttgttcagtcagtggaaggtacgagtgtatgcttgttctgtatccagagggcattcagactaaaatctacaaccttctcattcagacacacgttacagcagatgaatggaacagcaaccatacgatagaaatagagataaatcagactctggaaataccatgctttcaaaatagctcctcaaaaatttcatctgagttcacctatgcatggtcggtggaggataatggaactcaggaaacacttatctcccaaaatcacctcatcagcaattccacattacttaaagatagagtcaagcttggtacagactacagactccacctctctccagtccaaatcttcgatgatgggcggaagttctcttgccacattagagtcggtcctaacaaaatcttgaggagctccaccacagtcaaggtttttgctaaaccagaaatccctgtgattgtggaaaataactccacggatgtcttggtagagagaagatttacctgcttactaaagaatgtatttcccaaagcaaatatcacatggtttatagatggaagttttcttcatgatgaaaaagaaggaatatatattactaatgaagagagaaaaggcaaagatggatttttggaactgaagtctgttttaacaagggtacatagtaataaaccagcccaatcagacaacttgaccatttggtgtatggctctgtctccagtcccaggaaataaagtgtggaacatctcatcagaaaagatcacttttctcttaggttctgaaatttcctcaacagaccctccactgagtgttacagaatctacccttgacacccaaccttctccagccagcagtgtatctcctgcaagatatccagctacatcttcagtgacccttgtagatgtgagtgccttgaggccaaacaccactcctcaacccagcaattccagtatgactacccgaggcttcaactatccctggacctccagtgggacagataccaaaaaatcagtttcacggatacctagtgaaacatacagttcatccccgtcaggtgcaggctcaacacttcatgacaatgtctttaccagcacagccagagcattttcagaagtccccacaactgccaatggatctacgaaaactaatcacgtccatatcactggtattgtggtcaataagcccaaagatggaatgtcctggccagtgattgtagcagctttactcttttgctgcatgatattgtttggtcttggagtgagaaaatggtgtcagtaccaaaaagaaataatggaaagacctccacctttcaagccaccaccacctcccatcaagtacacttgcattcaagagcccaacgaaagtgatctgccttatcatgagatggagaccctctagtctcgtgagactttgccccatggcagaactctgctggaatcctattgagaaggtagacattgtgctttattaatatagtcgctcttcagccatgcctttgctgcagctgaaatggaagtcagaagtgagtgacctgttttcccagcaactcaccctcttccatctccaaacgcctgaagcttaaccaagagtgagaggatatgtcatgttcacactcaatgcaattcgtagtggttttcttgcttatgtaagaagtacatattagtctgccatctttaaaaaaaaatacagtattttcatttaaattctctgatggagggacaacaatggtttcaactgtatgcccatgcctgatcctcttatttgaacatctatcaacattgtaaactctttgccaaaatcctggggctttgctgcattccctaagataattacaggaaaaagaaaatgtaaaagtgctaacaaggctgccaagtaatggagaagtatggttagtcttcatattgaaattctgttgcttattttcatggaaggaaacagaatactttgcacaggaaccacattttcaatcctccttcactgtcttcctaccatgttcagcccagactcctgccacatggaccaggatgaagagggatcaaagagataattagccaaaaacccagtagcctagaagatacaaaactccactggcctctaaaattatattagccaagagtggtttcatttgagtgccttcgtgtgtatgtccatcaaactggaaccaaactgttttgtaagtaaacaggcagcctaagcccaaccctactttctaattccagttattctctttttcatctggggatttacctgttcatttaatctgcctgttttgatctgttttgaaaaagataaagagcctcaaatcagaccagcactgattaattaaccctgctcctaccaatcttttttaaagcagttgaagcagaatgtataggtgtcagagaagaaacctagtcagccagacgtgctctgtattcagcaatagtttgtgaatgaataaattactaatcctccttgtcgcttgaaaccttcccacactccctgctccaggagggaaaaacagatgttgttgacagatagagtgataggcaaattctgtgtggactttagtcccaaaaggaaactttagttcacttgcagtatgcttatccttgactgcacatgagaatgccttgtgcagagttatttggagattatgtctttttcttaaacaccatggctgtcacacttcagttcaattaaatcagaatgtctgaggagtgagacacaggcatcaacactctcaaatgattcacatgttcagccaaagttgagaaccatcgagcctgtggaagttctttctcatggctcagaatcttaggtaggtgcttaactcttgtggtggccagcctccaagatgagccccagtgttcttgcctcctactattcacatctttatgtggtcccctccaatgctgaatacagatgatttgtgtaacctgaggccaggattaaggggaggcaatcaatgcacctagggaaaaaatttaaggaggtattcacactcagggtcatgcacttgcacaatgttgagaatgagtaccactctcaccattggtatagccaaaaaagcttggaagtgaccaaggctaggtcacaaaatacactgtggcttcttctttgatctctctttgaccatactgacactgggaaaagcccattcccatgccatgaagacaccaaggcagccctattgagaaatctacctgtcgtggccgggcgcagtggctcacgcctgtaatcccagcactttgggaggccgaggtgggtggatcacgaggtcaggagatcgagaccatcctggctaacacagtgaaaccccgtctctactaaaaatacaaaaaattagccgggtgtggtgtcgggcacctgtagtcccagctactcaggaggctgaggcaggagaagggtgggaacccgggaggcagagcttgcagtgagccgagattgtgccactgcacactccaatctgggtgaaagaccgagactccgcctcaaaaaaaaaaaaaaaagaaagaaagaaagaaagaaagaaatctacctgtcaaggaactaaggtattttgctaacaagcaccaacttgccagccatgtaagggagccatcttggaagcagatcctccagcctccagtcaagtcttcagataattgcaacttcagttgatcttttgaccaagacctcaagagagccagaactacccagctaagccttttactaaatttctgaacttctaacactattagataataagtgcttattgtttaacaccattaattttgagtataatttgttacatagcgacagataactatacagctcaacaactagaaaaataaactgtttacctgccttaa

SEQ ID NO: 45278 - DNA, 2245 bp, Homo Sapiens
aatgtgccacgtcttctaagaagggggagtcctgaacttgtctgaagcccttgtccgtaagccttgaactacgttcttaaatctatgaagtcgagggacctttcgctgcttttgtagggacttctttccttgcttcagcaacatgaggcttttcttgtggaacgcggtcttgactctgttcgtcacttctttgattggggctttgatccctgaaccagaagtgaaaattgaagttctccagaagccattcatctgccatcgcaagaccaaaggaggggatttgatgttggtccactatgaaggctacttagaaaaggacggctccttatttcactccactcacaaacataacaatggtcagcccatttggtttaccctgggcatcctggaggctctcaaaggttgggaccagggcttgaaaggaatgtgtgtaggagagaagagaaagctcatcattcctcctgctctgggctatggaaaagaaggaaaaggtaaaattcccccagaaagtacactgatatttaatattgatctcctggagattcgaaatggaccaagatcccatgaatcattccaagaaatggatcttaatgatgactggaaactctctaaagatgaggttaaagcatatttaaagaaggagtttgaaaaacatggtgcggtggtgaatgaaagtcatcatgatgctttggtggaggatatttttgataaagaagatgaagacaaagatgggtttatatctgccagagaatttacatataaacacgatgagttatagagatacatctacccttttaatatagcactcatctttcaagagagggcagtcatctttaaagaacattttatttttatacaatgttctttcttgctttgttttttatttttatatattttttctgactcctatttaaagaaccccttaggtttctaagtacccatttctttctgataagttattgggaagaaaaagctaattggtctttgaatagaagacttctggacaatttttcactttcacagatatgaagctttgttttactttctcacttataaatttaaaatgttgcaactgggaatataccacgacatgagaccaggttatagcacaaattagcaccctatatttctgcttccctctattttctccaagttagaggtcaacatttgaaaagccttttgcaatagcccaaggcttgctattttcatgttataatgaaatagtttatgtgtaactggctctgagtctctgcttgaggaccagaggaaaatggttgttggacctgacttgttaatggctactgctttactaaggagatgtgcaatgctgaagttagaaacaaggttaatagccaggcatggtggctcatgcctgtaatcccagcactttgggaggctgaggcgggcggatcacctgaggttgggagttcgagaccagcctgaccaacacggagaaaccctatctctactaaaaatacaaaagtagccgggcgtggtgatgcgtgcctgtaatcccagctacccaggaaggctgaggcggcagaatcacttgaacccggaggcggaggttgcggtaagccgagatcacctccagcctggacactctgtctcgaaaaaaagaaaagaaacacggttaataacatataaatatgtatgcattgagacatgctacctaggacttaagctgatgaagcttggctcctagtgattggtggcctattatgataaataggacaaatcatttatgtgtgagtttctttgtaataaaatgtatcaatatgttatagatgaggtagaaagttatatttatattcaatatttacttcttaaggctagcggaatatccttcctggttctttaatgggtagtctatagtatattatactacaataacattgtatcataagataaagtagtaaaccagtctacattttcccatttctgtctcatcaaaaactgaagttagctgggtgtggtggctcatgcctgtaatcccagcactttgggggccaaggagggtggatcacttgagatcaggagttcaagaccagcctggccaacatggtgaaaccttgtctctactaaaaatacaaaaattagccaggcgtggtggtgcacacctgtagtcccagctactcgggaggctgagacaggagatttgcttgaacccgggaggcggaggttgcagtgagccaagattgtgccactgcactccagcctgggtgacagagcaagactccatctc

SEQ ID NO: 45279 - DNA, 165 bp, Homo Sapiens
tcctttagtctgatgaagctctgtagaaatagtgaccgaaaacaagcagctgccaaattttatagctttcttgtcctaaagaaacagctggctattgagctgagccagagtgctccctatgcagatattatagctacgatgggaccaatgttttataacatatga

SEQ ID NO: 45280 - DNA, 375 bp, Homo Sapiens
atgtccctaatggtctcggctggccggggcctgggggccgtgtggtccccaacccacgtgcaggtgacggtgctgcaggcgcggggcctgcgggccaagggccccgggggcacgagcgacgcgtacgcggtgatccaggtgggcaaggagaagtacgccacctccgtgtcggagcgcagcctgggcgcgcccgtgtggcgcgaggaggccaccttcgagctgccatcgctgctgtcctccggacccgcggccgccgccaccctgcagctcaccgtgctgcaccgcgcgctgctcggcctcgacaagttcctgggccgcgccgaggtggacctgcgggatctgcaccgcgaccagggccgcaggaagacgcagtga

SEQ ID NO: 45281 - DNA, 3386 bp, Homo Sapiens
aaagtggtcgagtgtcgggaggaaggactgcttgtgtgcggggtgggggggggtggtggagagcgggggcggggattcagcgcgtgtatgtaaaggtgcagcccgtgtgctaggcgctgggtgcgcgcgcggtgtctgctcgggtgcgcgcgcgcgccgctgcccgcctgcccgccggcccgcctgctcgcctgctggggctgctccgtgggtttgacgggcgagcgggcgcggaggagctctgtccggaatcacatagataccatcgtggaaacagcagcgcaggtcacggcgccgcgggccctgcaccagacgctgggctctagagattatttctctttattcagaagcatacagttgtttgctgattgcaagaagatgtttctgtggctgtttctgattttgtcagccctgatttcttcgacaaatgcagattctgacatatcggtggaaatttgcaatgtgtgttcctgcgtgtcagttgagaatgtgctctatgtcaactgtgagaaggtttcagtctacagaccaaatcagctgaaaccaccttggtctaatttttatcacctcaatttccaaaataattttttaaatattctgtatccaaatacattcttgaatttttcacatgcagtctccctgcatctggggaataataaactgcagaacattgagggaggagcctttcttgggctcagtgcattaaagcagttgcacttgaacaacaatgaattaaagattctccgagctgacactttccttggcatagagaacttggagtatctccaggctgactacaatttaatcaagtatattgaacgaggagccttcaataagctccacaaactgaaagttctcattcttaatgacaatctgatttcattccttcctgataatattttccgattcgcatctttgacccatctggatatacgagggaacagaatccagaagctcccttatatcggggttctggaacacattggccgtgtcgttgaattgcaactggaagataacccttggaactgtagctgtgatttattgcccttaaaagcttggctggagaacatgccatataacatttacataggagaagctatctgtgaaactcccagtgacttatatggaaggcttttaaaagaaaccaacaaacaagagctatgtcccatgggcaccggcagtgattttgacgtgcgcatcctgcctccatctcagctggaaaatggctacaccactcccaatggtcacactacccaaacatctttacacagattagtaactaaaccaccaaaaacaacaaatccttccaagatctctggaatcgttgcaggcaaagccctctccaaccgcaatctcagtcagattgtgtcttaccaaacaagggtgcctcctctaacaccttgcccggcaccttgcttctgcaaaacacacccttcagatttgggactaagtgtgaactgccaagagaaaaatatacagtctatgtctgaactgataccgaaacctttaaatgcgaagaagctgcacgtcaatggcaatagcatcaaggatgtggacgtatcagacttcactgactttgaaggactggatttgcttcatttaggcagcaatcaaattacagtgattaagggagacgtatttcacaatctcactaatttacgcaggctatatctcaatggcaatcaaattgagagactctatcctgaaatattttcaggtcttcataacctgcagtatctgtatttggaatacaatttgattaaggaaatctcagcaggcacctttgactccatgccaaatttgcagttactgtacttaaacaataatctcctaaagagcctgcctgtttacatcttttccggagcacccttagctagactgaacctgaggaacaacaaattcatgtacctgcctgtcagtggggtccttgatcagttgcaatctcttacacagattgacttggagggcaacccatgggactgtacttgtgacttggtggcattaaagctgtgggtggagaagttgagcgacgggattgttgtgaaagaactgaaatgtgagacgcctgttcagtttgccaacattgaactgaagtccctcaaaaatgaaatcttatgtcccaaacttttaaataagccgtctgcaccattcacaagccctgcacctgccattacattcaccactcctttgggtcccattcgaagtcctcctggtgggccagtgcctctgtctattttaatcttaagtatcttagtggtcctcattttaacggtgtttgttgctttttgccttcttgtttttgtcctgcgacgcaacaagaaacccacagtgaagcacgaaggcctggggaatcctgactgtggctccatgcagctgcagctaaggaagcatgaccacaaaaccaataaaaaagatggactgagcacagaagctttcattccacaaactatagaacagatgagcaagagccacacttgtggcttgaaagagtcagaaactgggttcatgttttcagatcctccaggacagaaagttgttatgagaaatgtggccgacaaggagaaagatttattacatgtagataccaggaagagactgagcacaattgatgagctggatgaattattccctagcagggattccaatgtgtttattcagaattttcttgaaagcaaaaaggagtataatagcataggtgtcagtggctttgagatccgctatccagaaaaacaaccagacaaaaaaagtaagaagtcactgataggtggcaaccacagtaaaattgttgtggaacaaaggaagagtgagtattttgaactgaaggcgaaactgcagagttcccctgactacctacaggtccttgaggagcaaacagctttgaacaagatctaggtcatgtaatcttacttcatacagaggacatttatttaatgatgaaagtgccttttgttgacttctaacttccaaatactatattatcaataggcatggaggcaggtgtttccaagggtgtctcattaactgtagctgcaaagatgtgtcaagtagaagagaatttgtttaatagattttactacataaaacctatactgtggagtcctgtggggatactgcaaactctattgccaaagggatgctttatacacataatactgaatttaacctcaagaggcaaatctgttttgtaccccaatgcaaaaccttcgtctctttgtgctttgtaaagcaaactcaagaaaactggtacacctgtaccagctgggtcctttatcttgcacgtagattaagttggtggaactggaataatccttttgatttgtggcattgtaacaactccgtgtaaagattatctgaaaagtaaaaaaaaaaaaaaaaaaaaaaaaaaa

SEQ ID NO: 45282 - DNA, 3035 bp, Homo Sapiens
ctacagcatccactgcagctctgggctccatttccctttgaaatgggatgggagaaaggggcaggtaacagactggagtgaggagactgaggagaaactgtagagaataatacttaggagtacacgtgctggattctctcattaaggaaatattcatgagtcaactatccagaatcatagttattattcaagcggtgtgggtttaaaaggagatttgatgccatggcaaacctcactgacttagactgttcttcaagttaaagagcaggatgatgtctgaagtggctgaaacacatatggcttcagtgtgtcaagaagacctgaaagatcccacatggaagtgaaattcattactggcaagcacggtggcaggagaccccagagggctgagccgcaaagaatttgcagagccttatggctaactccatggcctagtttgatcttgaagttactgtcttggataatcctctcaaatctgttcctgcacttaagagccactcatcacatgacggagctccctctcaggttcctttacatcgccctgtcagaaatgactttcagggaacagacatcacatcaaatcatccaacagatgtccctttcaaataagttggagcagaaccaactatatggagaagtcataaacaaagaaacagacaacccagtgatttccagcggattgacattactctttgcacagaaacctcagtctcctgggtggaagaacatgagttcaacaaagcgtgtgtgcactatattggctgactcttgccgtgctcaggctcatgctgctgacaggggagagaggggacattttggagtccaaatcttgcatcatttcattgaagtgttcaatgtcatggctgtaagaagtaacccattttaataactggcatcaaaggatttaggagagagaaacccagtatccagacccatttccgtcagtgacactctcctcgtattgggaggattggccagaatcgtctgattcctgtttctgatttccttcctcactggcatcagagtatttcactataggaaaactaatatctaactgagctccaagtgctaaataacagcatctcatgttcattccgggtcaccaagaggttcagggtgaccaagtcacaaactataaatttgaacatttgatgatttttgcaggagactgggtgaacaaaggaaaacccgagagatacataaaggtggaaactaggatttctcatttgaattatttaacatgcctcactctaatggttataaatgtaaaggaaatgcaggttcttcaagaaggtgaaacgaagttactgaatttaagtttttttttttttaaacctactttagaataggaaacatgcttactaatatttacaaggcactacaaggcaccagccaaaaagcctgatttattggcaggatattcttgttgttgttgtttctattgtccatataggcaggcaattaatactttttagaaaattaagttgccaactcaacactgcctacttttgaatttttattctagcaacagccgataatttattggaaattccttatgtgctgggcactacgctagacattgggagtacgaaaattaatatggtaaagatcctggctttaaagagtctttaacattatttcagcagttttattacaggtgtatatgttggaattgacagaacacttagctcaaagcaagggttcaagcatgactttgcagagtagatttcagctgagcttaaaggatgtgagaataagtatacacattttttaaattacccagaatgtagtgcctacagaagtgcttgagcctcagttgcttctaagagtccaacttcagaacttgtatcttctagattgagctcattgcttaatttctagccaacatagcccatctctctcagctgaatactaagctcatcaacttctcctttgatctaggtcttgattagaatgttgaacatgacaaggctgaaggcagaaaccatagaaacttctatccagagttacactcgtctcttaatagctgcctactgttgcaatcagaataaactcacttcttgcccaattatgacagttcattcaccttctactcaagggagactttaagaattgttgaagttgaacttctcaggttcttatacttagtgacactgttcatgcaatggctcagtatttcttgatttctcagaaccagcaaaagtcacaaactgaatcctcaaattggaattcgtaagtgactaacttgtagcataactttattatactaggaaagatggggcaagggacagaaaaaatatctgtaacatcttatatgttcaaatataagcgctttatgtatatttagtcattcaaactccaaatacacattaagaagtagtcatcaatattccactctctaattctacaatttctacctttttagattccacatataagtgagatcatatggtatttgtcgctctgtgcctgacttatcttacttaacataatgtccttaggttcatccctgtttgaaaatggcagaattgcctgtttttttttttaaggctaaatagtatcctattttgtatattcagcacattttaaaaaatctgttcatcagctgacggacacttaggttgattccttatcttggctcttgtgaataatgctgcaatgaacacaggagctcaaacatccctttgaaatactgatttaaatatctttgggtataaacccggaattggctgtggggagttagacagggaaaatgtccacattgctctacggatacaaagtttcagttaggaggaataattctggtgttctattgcacagcacagtgtctatagttaatagtaatgtattatatatttcaaaatagctaaacaaagagaattttaatgttcttaccgcaacgaaataattgtttcagaaaataaatatgctaattagcctgatttgctcattccacagtgtatatacatgtatcaaaaagtcacattgtaccccataaatatacaaaattatttgtcaattacaataaaactttt

SEQ ID NO: 45283 - DNA, 369 bp, Homo Sapiens
atggccacctacatcttgaagctccgtgcctgcccttgggagacactaaatggagtcttgctctgtcgtcaggctggagtgcactggcgtaatctgggcttactgcaacctccgcctcccggattcaagcgattctcctgcctcagcctcccgagtggctgggactacaggcatgcgccaccatgccggcctaatgttttgtattttagtagagacggggtttcactatgttggccaggatggtctcaatctcccgacctcatgatccacctgcctcggcctcccaaagtgctgggattacaggtggccatgcccagcctcatgagggttattaagcacataattatagaatgtgttttcttcttttaa

SEQ ID NO: 45284 - DNA, 942 bp, Homo Sapiens
atgagcgggacaaaccagtcgagtgtctccgagttcctcctcctgggactctccaggcagccccagcagcagcatctcctctttgtgttcttcctcagcatgtacctggccactgtcctggggaacctgctcatcatcctgtccgtaagcatagactcctgcctgcacacccccatgtacttcttcctcagcaacctgtcttttgtggacatctgcttctccttcaccaccgtccccaagatgctggccaatcacatactcgagactcagaccatctccttctgtggctgtctcacacagatgtatttcgttttcatgttcgtggacatggacaatttcctcctagctgtgatggcctatgaccactttgtcgccgtgtgccaccccttacattacacagcaaagatgacccatcagctctgtgccctgctggttgctggattatgggtggttgccaacctgaatgtccttctgcacaccctgctgatggctccactctcattctgtgcagacaatgccatcactcacttcttctgcgatgtgactcccctactgaaactctcctgctcagacacacacctcaatgaggtcataatccttagtgagggtgccctggtcatgatcaccccatttctttgcatcctggcttcttatatgcacatcacctgcactgtcctgaaggtcccatccacaaagggaaggtggaaagccttctccacctgtggttctcacctggctgtggttctcctcttctacagcaccatcattgctgtgtattttaaccctctgtcctcccactcagctgagaaagacactatggctactgtgttgtatacagtagtgactcccatgctaaaccctttcatctacagcctgaggaacaggtacttgaaaggggctctgaaaaaagtagttggcagggtggtgttttctgtctgatga

SEQ ID NO: 45285 - DNA, 2334 bp, Homo Sapiens
atggatcgagatttagaacaggctctggatcgcacagagaatatcactgaaattgcccaacagagacgtcctagaaggagatactcacctagggcgggaaaaactctgcaggaaaaactttatgacatttatgttgaagaatgtggaaaagagcctgaggatcctcaggaattgagaagcaatgtaaacttgttagaaaagcttgttaggagagagtccttgccatgtttactggtcaatctatacccaggcaatcaggggtattctgtgatgctccagagagaagatgggtcctttgcagagaccattcggctgccttatgaagaaagggcattgctggactacttggatgcagaagaattaccccctgctttgggtgatgtcctggataaagcttcggttaacatttttcatagtgggtgtgtcatagtagaagttcgtgactacaggcagtccagtaatatgcaacctcctggttaccaaagcaggcatattcttctacgtccaaccatgcagactttagcccctgaggtgaagacgatgacaagagatggcgagaaatggagccaggaagacaaatttcctcttgagagtcaactgatcttagcgacagctgaaccactgtgtcttgatccttctgtagcagttgcctgcactgcaaacaggctgctgtacaacaagcaaaagatgaataccgacccgatggaacagtgcctccagaggtattcgtggccctctgtaaagccacagcaggagcagtctgactgtccacctcctcctgagctgagagtgtcgacttctggccaaaaagaagaaagaaaagtaggtcagccttgtgagctgaacattactaaagcgggaagttgtgtagacacgtggaaaggcagaccctgtgatttggccgtgccttcagaagtggatgtggagaaacttgctaaagggtatcagtccgtcacagctgctgacccacagctcccagtctggccagcccaggaggtagaagaccctttcagacatgcatgggaagctggctgtcaggcctgggacaccaagccaaacatcatgcagtcgtttaatgatccgcttctctgtggtaaaatacggccacgtaaaaaagccaggcagaagagccagaagtctccctggcagcccttcccagatgaccattcagcttgtctcaggcctgggtcagagactgatgctgggagggcagtgagtcaggcccaggaatcggtgcagagcaaagtcaaaggtccaggcaagatgtcacacagctccagtggcccagccagtgtcagtcagctctcttcatggaaaacaccagaacagcctgatcctgtgtgggtccagtcttcagtatccgggaagggagagaaacatccacctccccgcacccaacttccctcaagctcaggaaagatttcctcaggtaacagttttcccccacaacaggcaggcagccctcttaagcgggcggcaccaagccattctcagaagccctctgtgcctcttattaaagctagcaggcgccgtccagctgccgggcgccccaccagattcgtaaaaatagccccagccattcaggtccggacaggctccactggcctaaaggccaccaacgtggagggcccagtccggggagcccaggttttggggtgcagtttcaagcctgtgcaggcccctggctcgggtgcccccgctcctgcaggaatcagtggcagtggccttcagtcctcaggaggtccactaccagatgcaaggcccggtgcagtgcaggcatcttctccagcaccccttcagtttttcctaaatactccggaaggtctcaggcctctgacactccaggttccgcagggctgggcggttctgaccggcccgcagcagcagtcccatcagctggtttccctgcagcagctccagcagcccacagctgctcaccctcctcagccagggccacagggttccacactaggtttgagcacgcaagggcaggccttccctgctcagcaacttcttaatgtgaacctcactggagcaggtagtggtctgcagccccagccccaggctgctgtgttgagtctgcttggctctgcccaggttcctcagcagggtgtccagctcccctttgtcttggggcagcagccacagccgctgctgctgctgcagccacaaccacagccacagcagatccagctccagacacagcctttgagagtcctgcagcagccagtgtttttggcaacaggcgctgttcagatagtgcagccacatccaggtgtgcaagcagggagccagttggtaggtcagaggaagggaggcaagccaacccctcca

SEQ ID NO: 45286 - DNA, 794 bp, Homo Sapiens
gaggcggcacctgctcccgtcccaggccggagtttgcaagctgctcgccgcccgcgcccctccctgggagcagcccgggaccgcggttggaaaggagaaagcggaaagaaagaaagaaaagaaaaagagagagggagagtgaatctgggagaaagcgcagagggaagagcagccagcgagtgtccggagcgaggaggaggaggaggagaaggagagggggaagaagaggaggaggaggaaggctcggcgccccctccctcgccgccaacctgccgcggggcgtgcggtgcttgggaccatgtgcccgcgctcgctccgggccgccacccagcgcctccggtggctgcgcgggcgccccaagtgttcgtgtgtctgcggcgggtgggcgtccggctcgcgctgccaagcgccccaagttgccgccgcgccccgcagcggggacgcgaagccggcgcggggcgggtgtatttacctgccgccaagaccttcattatgggctgcacttcagagggccttggaggaaacctcagatgccggcagttttcagaggttcatgctcaaatggggaatttgcctgatttatatactggagcctgtgttgtaagacagaaacagctatatttagccgggatccccagtccaggaagttgtttgaggtgcatcataggaaattatgaatggaagaaagtgagagtgaaggggggggacgagtgaggggggagggtggggagaacagactttttccctcttctaagaatttgattgataaaattataatgaagccttcgacaaaa

SEQ ID NO: 45287 - DNA, 1694 bp, Homo Sapiens
ctgcagtggatttccttcctgtgatggtgcaccggctcccagttttcaaaaggtacatgggaaatactcctcagaaaaaagccgtctttgggcagtgtcggggtctgccatgtgttgcaccgctgctgaccacagtggaagaggctccacggggcatctctgctcgagtctggggacattttcctaagtggctcaatggctctctacttcgaattggacctgggaaattcgagtttgggaaggataagtacaatcattggtttgatgggatggcgctgcttcaccagttcagaatggcaaagggcacagtgacatacaggagcaagtttctacagagtgatacatataaggccaacagtgctaaaaaccgaattgtgatctcagaatttggcacactggctctcccggatccatgcaagaatgtttttgaacgtttcatgtccaggtttgagctgcctggtaaagctgcagccatgactgacaatactaatgtcaactatgtgcggtacaagggtgattactacctctgcactgagaccaactttatgaataaagtggacattgaaactctggaaaaaacagaaaaggtagattggagcaaatttattgctgtgaatggagcaactgcacatcctcattatgacctggatggaacagcatacaatatggggaactcctttgggccatatggtttctcctataaggttattcgggttcctccagagaaggtggaccttggggagacaatccatggagtccaggtgatatgttctattgcttctacagagaaagggaaaccttcttactaccatagctttggaatgacaaggaactatataattttcattgaacaacctctaaagatgaacctgtggaaaattgccacttctaaaattcggggaaaggccttttcagatgggataagctgggaaccccagtgtaatacgcggtttcatgtggtggaaaaacgcactggacagctccttccagggagatactacagcaaaccttttgttacatttcatcaaatcaatgcctttgaggaccagggctgtgttataattgatttgtgctgtcaagataatggaagaaccctagaagtttaccagttacagaatctcaggaaggctggggaagggcttgatcaggtccataattcagcagccaaatctttccctcgaaggtttgttttgcctttaaatgtcagtttgaatgcccctgagggagacaacctgagtccattgtcctatacttcagccagtgctgtgaaacaggctgatggaacgatctggtgctctcatgaaaatctacatcaggaggacctagaaaaggaaggaggcattgaatttcctcagatctactatgatcgattcagtggcaaaaagtatcatttcttttatggctgtggctttcggcatttagtgggggattctctgatcaaggttgatgtggtgaataagacactgaaggtttggagagaagatggcttttatccctcagaacctgtttttgttccagcaccaggaaccaatgaagaagatggtggggttattctttctgtggtgatcactcccaaccagaatgaaagcaattttatcctagttttggatgccaagaactttgaagagctgggccgagcagaggtacctgtgcagatgccttatgggttccatggtaccttcatacccatctga

SEQ ID NO: 45288 - DNA, 2511 bp, Homo Sapiens
caatgaatggggagtaaatacacagataatccaaaattgatgtaagcattggaaggggaaagagggaacgcttctttccctctgggcttggtcatttcctcccaagcaaaccccgcgacgttcagccgtcttcctcctatgccacgtgctctcaccagaactgcagcaaaactgcattttatgtcctgtgtctaaagctaaacacatgttcctgtctacttttgctttgttcctgtttcccttctgtgaggaccttcccctcctcagatgtggggagttgccgcctccacttgcattacatgtatttcagagtaggtcctaggctccccttacacctctggtcacgttgccattattcctatggtagataaaggggatgagaaagaacagagctccaggcctttttcaaacaaactggttttctcagtatagccctatgctcaaaaggagtgaggacaggtatgtgactgccataaggagctgtttgctttgcacagagaaatctaatctttctcctgctgggcagctcagtacagatgtcccctcactgctggaagaaacacctgcccttgcttgttctcctgatggcccctcacagtcaggtgtgggatggcacatttctaggtgctcctcgccgagctgtcatgggcttcagtcttgggcctctgcagctggctgtgaccaggtggaaactgtagccttggctgacccagagaaggaaaggaggcagtctgccgcttggctgatttaggagttgtgctgaattcctgcccatctgttctcccagctgagccaaggccaaagctgtctaccttttgccaacctaaggaatgacacagagcatggagcaccatcactgaaacatctgccccagtgccctgccaccttcgtcctcactgacctctgcagcctctctcatctgccagttttgattccgcaaggagaggtggccctgggctcacagctggtgtttgtccacagatgttcatgggtttctttgtgttctctcattttttcaaagctgggtgttgggaccaacatcaccactgacattctgtggctctaaacaagtcctcacgaccacttctcagttttctcatctttatgaagtatggagtaatccccactagccttatagagggactgtgtgagaagggaagagactgctattgtttgccctatatccacctacttccctagttccagaacgctggactttaatgagataacaaagtacctagtaaaaacactgcatcattttccatcccccaccccttgcagtaaaatgtggcccatgagacagaagcactaactactgagcaggacttctaggggagttctttaaaactcagaggagcaccacttttaccttctgctcttccctttttcctgcctggaacgcagaagtgatggctgaagctcctgaggctataagctctgtacgtaggagagtggtgaagaaaggagcttggttctgcaaggatgttgtagagctgccataccagtcctgcatggtattcctgtgcactactgttacgtgaacacacaaacacctaatttgtttaagccattaggccaggcctctattagccattcctgactgatacagaagacaaaaatggcatcacagactcctgaactccaaagacactgcctattctttcgtctgttcttggcaagcaccaacattgagactgtacttcagggttgatgctggccatttggtggcgtgaggagtgggcactcacatgtctctgctagcagttctgacgtgtccattccacactggatccatagaacgagggaacacaagtgtcttctcataagatttatagaaacagtgatcgttgcagaaaaataattagcaagagaacagacttcagctctctgaaggctgatgaccacctgtttctcatctcttctagtgtatgtcaaagctaaattaggtcaaataggaaataagtcagaatccccaattcgatagaaacttacaggtcttgtgatctaatctgccacttgatccgtgaattacctataggtcatccctaagaggtggcctccagcttctgcttgaattccttcaaggatggggtgctcattgtggcttttctaatcatctctgattgttagaaacactgtgaaacttttatccatcagtcctgtttctgaagctgtacggtacaaattttttttttccccacttaaggctcaactattggaatacatctaccatgtctcctatgaaacttgcttctccaggccaatcatccttacttccttaaacttttttttttcctgaaaagttattcttttaatcttattaaaaaagcaacccatgcccattccacaaatacaagtgaaatagtgaaaaacaaaaatcaaactacatctatttggtgatcattattaatgtcttatgtttcctcccagattgttttctgcatgaataataaccaacaatgtgtgtgtatgtatatatatgcttttgcattaaaaggtggttttgaaggt

SEQ ID NO: 45289 - DNA, 1952 bp, Homo Sapiens
ccaaccgcgccccccctcccggatggggaaaaaaaaagatgtcagctcctccgctgtagtattgctccttaaaaacccctctctctgaaaatgacatgccctcgcaatgtaactccgaactcgtacgcggagcccttggctgcgcccggcggaggagagcgctatagccggagcgcaggcatgtatatgcagtctgggagtgacttcaattgcggggtgatgaggggctgcgggctcgcgccctcgctctccaagagggacgagggcagcagccccagcctcgccctcaacacctatccgtcctacctctcgcagctggactcctggggcgaccccaaagccgcctatcgcctggaacaacctgttggcaggccgctgtcctcctgctcctacccacctagtgtcaaggaggagaatgtctgctgcatgtacagcgcagagaagcgggcgaaaagtggccccgaggcagctctctactcccaccccttgccggagtcctgccttggggagcacgaggtacccgtgcccagctactaccgcgccagcccgagctactccgcgctggacaagacgccccactgttctggggccaacgacttcgaagcccctttcgagcagcgggccagtctcaacccgcgcgccgaacatctggaatcgcctcagctggggggcaaagtgagtttccctgagacccccaagtccgacagccagacccccagccccaatgaaatcaagacggagcagagcctggcgggccctaaagggagcccctcggagagcgaaaaggagagggccaaagctgccgactccagcccagacacctcggataacgaagcgaaagaggagataaaggcagaaaacaccacaggaaattggctgacagcaaagagcggaaggaagaagaggtgcccctatactaaacaccagacgctggaattggagaaagaatttctgttcaatatgtatttgacgcgagagcgccgcctggagattagcaagaccattaaccttacagacagacaagtcaaaatctggtttcaaaatcgcagaatgaaactcaagaaaatgaaccgagagaatcggatccgggaactgacctccaattttaatttcacctgagagcgcggcctctcctcctcccttcccgctccttcctctccccgcccctcctccctttgtgcctggtgatatatttttttttcctccctgagtataaatgcaatgcgactgcaaaaaaggcaaagacctcagactctccttccaagggacctgtggttcgtgctgcgaagatgcttccacttaaagcatgagaaatggggtgccgggatgtggggtgtggtgtgtgccctcatagatgggggtgggagtgtggctggtgtgtgtgtcaagccctcactcacccacgcactcacacacagcattctgttctccatgcaaagttaagatcgaatccatccgcttgtaggggaaaaaaaggaaaaaaattaaccagagagggtctgtaatctcgcagagcacaggcagaatcgttccttccttgctgcatttcctccttagactaatagacgttttggaaagttcggctagtgttcgtgtgtttgtcgtagcacccagagcctccaccaaaccctctccatgtctttacctcccagtcgctctaagaatctgcttgaagtctcgtatttgtactgctttctgcttttctcccacccctcctagcacccccacatcccccatctagtaacatctcagaaatttcatccagaggaacaaaaaaattaaaaatagaacatagcaaagcaaagacagaatgcccccccccccaaatattgtcctgtccctgtctgggagttgtgttatttaaagatattctgtatgttgtatcttttgcatgtagcttccttaatggagaaaaaaaaacctaataaatttccagaatcataatcctcaaa

SEQ ID NO: 45290 - DNA, 4422 bp, Homo Sapiens
atgtcttcaatgtggtctgaatatacaattggtggggtgaagatttactttccttataaagcttacccgtcacagcttgctatgatgaattctattctcagaggattaaacagcaagcaacattgtttgttggagagtcccacaggaagtggaaaaagcttagccttactttgttctgctttagcatggcaacaatctcttagtgggaaaccagcagatgagggcgtaagtgaaaaagctgaagtacaattgtcatgttgttgtgcatgccattcaaaggattttacaaacaatgacatgaaccaaggaacttcacgtcatttcaactatccaagcacaccaccttctgaaagaaatggcacttcatcaacttgtcaagactcccctgaaaaaaccactctggctgcaaagttatctgctaagaaacaggcatccatatacagagatgaaaatgatgattttcaagtagagaagaaaagaattcgacccttagaaactacacagcagattagaaaacgtcattgctttggaacagaagtacacaatttggatgcaaaagttgattcaggaaagactgtaaaactcaactctccactggaaaagataaactccttttcgccacagaaaccccctggccactgttctaggtgctgttgttctactaaacaaggaaacagtcaagagtcatcgaataccattaagaaggatcatacagggaaatccaagatacccaaaatatattttgggacacgcacacacaagcagattgctcagattactagagagctccggaggacggcatattcaggggttccaatgactattctttccagcagggatcatacttgtgtccatcctgaggtagtcggtaacttcaacagaaatgagaagtgcatggaattgctagatgggaaaaacggaaaatcctgctatttttatcatggagttcataaaattagtgatcagcacacattacagactttccaagggatgtgcaaagcctgggatatagaagaacttgtcagcctggggaagaaactaaaggcctgtccatattacacagcccgagaactaatacaagatgctgacatcatattttgtccctacaactatcttctagatgcacaaataagggaaagtatggatttaaatctgaaagaacaggttgtcattttagatgaagctcataacatcgaggactgtgctcgggaatcagcaagttacagtgtaacagaagttcagcttcggtttgctcgggatgaactagatagtatggtcaacaataatataaggaagaaagatcatgaacccctacgagctgtgtgctgtagcctcattaattggttagaagcaaacgctgaatatcttgtagaaagagattatgaatcagcttgtaaaatatggagtggaaatgaaatgctcttaactttacacaaaatgggtatcaccactgctacttttcccattttgcagggacatttttctgctgttcttcaaaaagaggaaaaaatctcaccaatttatggtaaagaggaggcaagagaagtacctgttattagtgcatcaactcaaataatgcttaaaggactttttatggtacttgactatctttttaggcaaaatagcagatttgcagatgattataaaattgcgattcaacagacttactcctggacaaatcagattgatatttcagacaaaaatgggttgttggttctaccaaaaaataagaaacgttcacgacagaaaactgcagttcatgtgctaaacttttggtgcttaaatccagctgtggccttttcagatattaatggcaaagttcagaccattgttttgacatctggtacattatcaccaatgaaatccttttcgtcagaacttggtgttacatttactatccagctggaggctaatcatatcattaaaaattcacaggtttgggttggtaccattgggtcaggccccaagggtcggaatctctgtgctaccttccagaatactgaaacatttgagttccaagatgaagtgggagcacttttgttatctgtgtgccagactgtgagccaaggaattttgtgtttcttgccatcttacaagttattagaaaaattaaaagaacgttggctctctactggtttatggcataatctggagttggtgaagacagtcattgtagaaccacagggaggagaaaaaacaaattttgatgaattactgcaggtgtactatgacgcaatcaaatacaaaggagagaaagatggagctctcctggtagcagtttgtcgtggtaaagtgagtgagggtctggatttctcagatgacaatgcccgtgctgtcataacaataggaattccttttccaaatgtgaaagatctacaggttgaactaaaacgacaatacaatgaccaccattcaaaattgagaggtcttctacctggccgtcagtggtatgaaattcaagcatacagggccttaaaccaggcccttggtagatgtattagacacagaaatgattggggagctcttattctagtggatgatcgctttaggaataacccaagtcgctatatatctggactttctaaatgggtacggcagcagattcagcaccattcaacctttgaaagtgcactggaatccttggctgaattttccaaaaagcatcaaaaagttcttaatgtatccataaaggacagaaccaatatacaggacaatgagtctacacttgaagtgacctctttaaagtacagtacctcaccttatttactggaagcagcaagtcatctatcaccagaaaattttgtggaagatgaagcaaagatatgtgtccaggaactacagtgtcctaaaattattaccaaaaattcacctctaccaagtagcattatctccagaaaggagaaaaatgatccagtattcctggaagaagcagggaaagcagaaaaaattgtgatttccagatccacaagcccaactttcaacaaacaaacaaagagagttagctggtcaagctttaattctttgggacagtattttactggtaaaataccgaaggcaacacctgagctcgggtcatcagagaatagtgcctctagtcctccccgtttcaaaacagagaagatggaaagtaaaactgttttgcccttcactgataaatgtgaatcctcaaatctgacagtaaacacatcgtttggatcatgccctcaatcagaaaccattatttcatcattaaagattgatgccacccttactagaaaaaatcattctgaacatccgctctgttctgaagaagccctggatccagacattgaattgtctctagtaagtgaagaagataaacagtccacttcaaatagagattttgaaacagaagcagaagatgaatctatctattttacacctgaactttatgatcctgaagatacagatgaagaaaaaaatgacctagctgaaactgatagaggaaatagattggctaacaattcagattgcattttagctaaagacctttttgaaattagaactataaaagaagtagattcagccagagaagtgaaagctgaggattgcatagatacaaagttgaatggaattctgcatattgaagaaagtaaaattgatgacattgatggtaatgtaaaaacaacttggataaatgaactggaactgggaaaaactcatgaaatagaaataaagaactttaaaccatctccttccaaaaataaaggcatgtttcctggttttaagtaataatacttaactctcaagctaagtaaaaatatgtcatcatgcttatgttaaactctgttgtaagtaataatttgtaaattgaataagtggcatactttttaaaaaactattttatgttcagaaatgtaaatgttattattcttgagtttttgggtttttttttttgagacagagtcttggtctgttgcccaggctggaatgcagtggtgtgctctgggctcactgcaaccttcacctccaggttcaagtgattctcctgcctcagccttctgagtagctgggactacaggtgtgcaccaccatgcccagctagtttttgtatttttagtagagatggggtttcaccatgttggccaggctggtctcgaactcctggcctcgtgatctgcccttctctgcctccctaagttgctgggattacaggtgtgagccacagtgcctggcccattcttgagttttgataaagtaattcatacaaagtactgtcctcaaataagtcttccttagctaaatgcaatttaaaattattcaaagatcctagggcacttctagtttcacgtaaatattcatattaggtggttctcttcatccatttgttttcacactgatacataaaaattaacagcagtctaatctagtgacacctcagtcatatttcgctatagattttac

SEQ ID NO: 45291 - DNA, 1380 bp, Homo Sapiens
gggaattctgaaagccgctggcggaccgcgcgcagcggccagagaccgagccctaaggagagtgcggcgcttcccgaggcgtgcagctgggaactgcaactcatctgggttgtgcgcagaaggctggggcaagcgagtagagaagtggagcgtaagccaggggcgttgggggccgtgcgggtcgggcgcgtgccacgcccgcggggtgaagtcggagcgcggggcctgctggagagaggagcgctgcggaccgagtaatggcaatgcagatgcagcttgaagcaaatgcagatacttcagtggaagaagaaagctttggcccacaacccatttcacggttagagcagtgtggcataaatgccaacgatgtgaagaaattggaagaagctggattccatactgtggaggctgttgcctatgcgccaaagaaggagctaataaatattaagggaattagtgaagccaaagctgataaaatttatggtctctctggcagtgatgtcctggataatgtagcatatgctcgagcgttcaacacagaccaccagacccagctcctttatcaagcatcagccatgatggtagaatctaggtatgcactgcttattgtagacagtgccaccgccctttacagaacagactactcgggtcgaggtgagctttcagccaggcagatgcacttggccaggtttctgcggatgcttctgcgactcgctgatgagtttggtgtagcagtggtaatcactaatcaggtggtagctcaagtggatggagcagcgatgtttgctgctgatcccaaaaaacctattggaggaaatatcatcgcccatgcatcaacaaccagattgtatctgaggaaaggaagaggggaaaccagaatctgcaaaatctacgactctccctgtcttcctgaagctgaagctatgttcgccattaatgcagatggagtgggagatgccaaagactgaatcattgggtttttcctctgttaaaaaccttaagtgctgcagcctaatgagagtgcactgctccctggggttctctacaggcctcttcctgttgtgactgccaggataaagcttccgggaaaacagctattatatcagcttttctgatggtataaacaggagacaggtcagtagtcacaaactgatctaaaatgtttattccttctgtagtgtattaatctctgtgtgttttctttggttttggaggaggggtatgaagtatctttgacatggtgccttaggaatgacttgggtttaacaagctgtctactggacaatcttatgtttccaagagaactaaagctggagagacctgacccttctctcacttctaaattaatggtaaaataaaatgcctcagctatgtagcaaa

SEQ ID NO: 45292 - DNA, 948 bp, Homo Sapiens
atgttctccccaaaccacaccatagtgacagaattcattctcttgggactgacagacgacccagtgctagagaagatcctgtttggggtattccttgcgatctacctaatcacactggcaggcaacctgtgcatgatcctgctgatcaggaccaattcccacctgcaaacacccatgtatttcttccttggccacctctcctttgtagacatttgctattcttccaatgttactccaaatatgctgcacaatttcctctcagaacagaagaccatctcctacgctggatgcttcacacagtgtcttctcttcatcgccctggtgatcactgagttttacatccttgcttcaatggcattggatcgctatgtagccatttgcagccctttgcattacagttccaggatgtccaagaacatctgtgtctgtctggtcactatcccttacatgtatgggtttcttagtgggttctctcagtcactgctaacctttcacttatccttctgtggctcccttgaaatcaatcatttctactgcgctgatcctcctcttatcatgctggcctgctctgacacccgtgtcaaaaagatggcaatgtttgtagttgcaggctttaatctctcaagctctctcttcatcattcttctgtcctatcttttcatttttgcagcgatcttcaggatccgttctgctgaaggcaggcacaaagccttttctacgtgtgcttcccacctgacaatagtcactttgttttatggaaccctcttctgcatgtacgtaaggcctccatcagagaagtctgtagaggagtccaaaataactgcagtcttttatacttttttgagcccaatgctgaacccattgatctatagcctacggaacacagatgtaatccttgccatgcaacaaatgattaggggaaaatcctttcataaaattgcagtttag

SEQ ID NO: 45293 - DNA, 4305 bp, Homo Sapiens
gaatcactccgacccccccacctccgcccagatcccgagaaaaagaaagccctagggtggcagccagggtagtggtcccagtgcgatccagagagagggtccttacctcgatggggctgaccggcgtggaaggcaggggctgcaggtactcggggtgcaaaatgtggccagttcgtgccgtcagcatcttcagcaccttgattggcaggcggttggcctggcgcagggggtcagaggggggcacggcgtgcacaaaaggcttggtgctgccggccggggacgagcctgggccggggccggagctatttccagagagcgcgctggtccaggcagggtctgcaccgccgcctccgcctccgccgccgccgccgccgctgtgcttactgcttcttagggcagaaagcgagggcgctgtgctcatgacccacccgcgcgcatgggagcagcgggggggagggctccgggaggcgcggggcgggctcggggctgcgcgctcgccccgggagcaggagcagcgggaggaggaggagctggcgcggcggccacgggcgcccagcgcgccttctcggcgcctggagccagacgcgagtaatcctgggtggcccgcagcggagccgtggccgggctagaggagccggctggactgcgggagtgccgggcggctcgcggtgtccgcctcgggctgctcccctgcgctgcgttctcgcggccccgcgccggcgctgcgctctgcgatgcgagccgctgcgtgtccagccggggctctggcgaggaaactcacttcaaaagcagctgcaccaagggggagattaaagcctttgccgccttccaatcaaatgggagcccgaggtgattggagggtcaaggggatgtgacgcgtcccgcgccgccgccgccgccgctgccaggactctcagtgccggttttaatgggcagctccctcttcgccgcccccctgtgtgtcccctccctcgatttcgctgggaggacgagatggacatttattctacgtttgccatccgccgcctccctcttttttcctcctcgtcgttcttcctttccccagctcgaaaataaactgaaaccttcttttgaaggggggtgcgcgtgaggaacagactgcggggggtgtccagaaggagcaccggtgggagtgtggacaccggccggactgtcaactccaggggcgaagggaacctgcacacccagtgttttttccttcgcagtaatcgagatcccgcgcggcgcagcgcagccaccagggtaagaaggcaaggtggggagccggagctggaagaagcccgcccgcccgctctaatttcctcagattccgcggcggagaaaccagaagctagatgggcagtcgcagcggcggcggctcaacaccgcgaggagcgctgggctctccgcccttcccggccacgtgacgcccggggacgcgtagattggggcagcagcgggggtcacatgtttcctctgtttcaccctcagtctgtcccccaaccccccattcttactctcccaccctgttttcctccctcccccccttctttgggcatctccacccctccatcaattgtcaatgttcctcgaccgcaatcaatcagttatttgtcagctcttgtcaatcctcccgtgatttatgtcagcttttgttgctgattacaaggcgggtgcgacttgaagggaaaaagagagagggagagagagacggagaggaaggaggagattgagagggaactggaggaggggaaaagaggagcggcctcctgggatgggggtggggtgggggctctaagaaaaagaatgaaagaggcgcacggtgtcaggaaaatgaatagcgagagtaaagtgcgcaggtgcgcccagggcgccgagaggggcgcgcaggcctggagtgtgcgcctgccctctcggtgtcggagagacgcccttccacctctgggagcctcggtctgttggggtcgcggagttcgggcgcggctccgggtacccgagaccagcggcggcaacttctaacacgggagatttcccgccaccccaccccgccgccgcgagtcctcgcggggcgtgttgcgtgcggaggtcaggctgccaccctctgtagttccctaaccccaaactcggagacttctaagagccacaccaccaaggaacttctagtcctggaggtcaatggtggggcaaacctcgcctcaattctttgaccccctcgggtcgtaagcagggctaagaggctgcgaagaagaggcctggccatgggtgtatgggggaagaaacatctcaggctcactcatgccccctccccgaccttctcccacctgccgccatccccgcaggctggggagccagggtaactcggggctgctctctcgaatttattggaacgccgagtcggaatgagctgcgctaggagagccgagggaaggagcgagagagggagggggcggctgcctgtgggaacgcgggttcttccagggaagcggagcgggactgccgcgttcccctcgatttgcaccgtcactcgggttgtttgggaagaaaaggggaggcgctgtgcgtgccaccgggtacctggacctggatgcccagtgtgtatgcatgcctgtggcgctgcgtgagttatcggggctctgatagcgtccggagcgggttcgagggtctcctccaggaactcgcagaaattagagggggtggggaggaggacacacccccttcctcggaacgacttagaagactttgaatctcccctcctccgcttttccgccccggctcttcttttgttgtcaagtccttttgataaatggtggggctgggagctctgggagtcgggagccagtctgtgcccgcgtggggggcgggggccgagcctggagacccggtttcgaccggcgcgcacctggggctgagccgggtgcgcgcgggggtcgggtctggaactgcccttggtatgctcgccctctcctcttggcccatctcactcccctcccccacctgactcccctccccggcttctttctctgtctcccactccgcacgggtaccgagaactttccggggtgagttttagaatttgctcctaggcattctttttctgcgtttggattttatcccttgattctttgggttggtaaactttatgaaatggtaacttgactgaagctcatttggagagaagaggggagtgaggcggtgtgtgcttggggctggtgtttgtcagtgtgagcgtgtaagagcacacctgcattcaagggggtttgtagtgtccgtgcgacatctgagggaggtgagtcggcgagcgggtggcgaggccccacgctgagggaggcggttgtctggtctccggggagcaagtcccaggtgcgcgtttcggagggcgggacagtcctacgctgtctctgcggggcagcgcgtctgtgaagcactcttatccttcgggtgtgtccatgtgtgcctggttactgagtgcgcggccgtctaggtgtcgacccaaccaatggtagtgctcctaacgccgcgagcccacctttgggccgctatcgccgcggcctccccgcgaggcccgggcactgaaattctggggcctgcgacagggccgggggggacgcagccaagggcgtccctccccagcctccagactcagctcttccccctctcctctaattccagcagcttattacgccggcggctcaggggaggcagcctcagcacctgaagcctgggggggccgtggagtggctcctgcgtcccccggtgtggccacacacgctcgtggggctgcgctgtgctgcgtgggtgcgggtcgtggtcagcgtgcgttcgcttttctcaaaactccactccgagggtccgagcgcatgggggcgcctgggggcctgcgcgcccggggcttttgggaggcgccagcgtccgagcctgcgcacctcgcgcaggaggccaaacccccgaaggccggcgcgggcccgggagtgggggccattaattactctgcgccaggcctaaagcctccaacccccagcagcagttggcgtggatgtcctgcggattttatttgcaaacaatggaaatgatttgttttctctaaaaaaggagtgggcaaggcagatattggaggagggggtgggaggaggagaaggaaggggaaagagctgaggaaaaaagtttgaaaatgccttgaactattcactgtcgagatggctaatcagtattgaggccggagggcaggcgggccgcctttcaccgccgcttccctttcatctcgggctcggcggaggcgctcaattaaaagcctatcagtttgtaagt

SEQ ID NO: 45294 - DNA, 6093 bp, Homo Sapiens
gcctgccagctagccggagccgcgggtgagcgcggcgagcggcgaccctggtgaggagcgcggcgcgggaggcacgttccttagctccgccgcggccgtcctccgcggctcgaggactccgcttccttccctcccctcccctgcgctccggcctggggtctcggcgcggggagcggagggaagggacgaaggaggagtaggtgaaagcggggtgaggggcggaagggtcccggcgcggggtgaggcgagggctgcctcttgttctcccgccgctgccgccgtctcctggtcgggtgccgcggccagaggcgcgcggggctgccgaggcacccgcactatgcaggcagactgccggccgccgcgatggcgagccgggcggtggtgagagccaggcgctgcccgcagtgtccccaagtccgggccgcggccgccgcccccgcctgggccgcgctccccctctcccgctccctccctccctgctccaactcctcctccttctccatgcctctgttcctcctgctcttacttgtcctgctcctgctgctcgaggacgctggagcccagcaaggtgatggatgtggacacactgtactaggccctgagagtggaacccttacatccataaactacccacagacctatcccaacagcactgtttgtgaatgggagatccgtgtaaagatgggagagagagttcgcatcaaatttggtgactttgacattgaagattctgattcttgtcactttaattacttgagaatttataatggaattggagtcagcagaactgaaataggcaaatactgtggtctggggttgcaaatgaaccattcaattgaatcaaaaggcaatgaaatcacattgctgttcatgagtggaatccatgtttctggacgcggatttttggcctcatactctgttatagataaacaagatctaattacttgtttggacactgcatccaattttttggaacctgagttcagtaagtactgcccagctggttgtctgcttccttttgctgagatatctggaacaattcctcatggatatagagattcctcgccattgtgcatggctggtgtgcatgcaggagtagtgtcaaacacgttgggcggccaaatcagtgttgtaattagtaaaggtatcccctattatgaaagttctttggctaacaacgtcacatctgtggtgggacacttatctacaagtctttttacatttaagacaagtggatgttatggaacactggggatggagtctggtgtgatcgcggatcctcaaataacagcatcatctgtgctggagtggactgaccacacagggcaagagaacagttggaaacccaaaaaagccaggctgaaaaaacctggaccgccttgggctgcttttgccactgatgaataccagtggttacaaatagatttgaataaggaaaagaaaataacaggcattataaccactggatccaccatggtggagcacaattactatgtgtctgcctacagaatcctgtacagtgatgatgggcagaaatggactgtgtacagagagcctggtgtggagcaagataagatatttcaaggaaacaaagattatcaccaggatgtgcgtaataactttttgccaccaattattgcacgttttattagagtgaatcctacccaatggcagcagaaaattgccatgaaaatggagctgctcggatgtcagtttattcctaaaggtcgtcctccaaaacttactcaacctccacctcctcggaacagcaatgacctcaaaaacactacagcccctccaaaaatagccaaaggtcgtgccccaaaatttacgcaaccactacaacctcgcagtagcaatgaatttcctgcacagacagaacaaacaactgccagtcctgatatcagaaatactaccgtaactccaaatgtaaccaaagatgtagcgctggctgcagttcttgtccctgtgctggtcatggtcctcactactctcattctcatattagtgtgtgcttggcactggagaaacagaaagaaaaaaactgaaggcacctatgacttaccttactgggaccgggcaggttggtggaaaggaatgaagcagtttcttcctgcaaaagcagtggaccatgaggaaaccccagttcgctatagcagcagcgaagttaatcacctgagtccaagagaagtcaccacagtgctgcaggctgactctgcagagtatgctcagccactggtaggaggaattgttggtacacttcatcaaagatctacctttaaaccagaagaaggaaaagaagcaggctatgcagacctagatccttacaactcaccagggcaggaagtttatcatgcctatgctgaaccactcccaattacggggcctgagtatgcaaccccaatcatcatggacatgtcagggcaccccacaacttcagttggtcagccctccacatccactttcaaggctacggggaaccaacctcccccactagtgggaacttacaatacacttctctccaggactgacagctgctcctcagcccaggcccagtatgataccccgaaagctgggaagccaggtctacctgccccagacgaattggtgtaccaggtgccacagagcacacaagaagtatcaggagcaggaagggatggggaatgtgatgtttttaaagaaatcctttgaagatgatgctgctttttacaaagcatcgttttaaagcacatggccttttttttttaattattagtggtagtaatatatagaatgtattacataactgtcactgaagtggttggggaaaatgtggtgactgaggtacaggaaactactaatcttgccatcttgctttaaggtgttatggtggcacagttactgctcgcctgttaaatttcaaatgtcctgtttgatactactgtagaacactatttttaatacagaaaaagctccctataatgcacttcagagaaattaaaaatcacagagtatttattaccaatgctgcaggtacattaatgaactcgagatggctctgtaagcctgactggcaataacgcacggtactgttcttgaaatacctaatggcttgaaattctagtctgtttgtgaaagatgggtactatcatgatttcctcttctattcctatattcttttctggattttttttaataattagtgatataagcattgtttttattgcagccatatccacttatccatcttaagatctgtagctgggattttctgacttgtaatgagcagggggattgctttttcactttgtgacactctttagagctttaatgcttcacagtatatggcctggtctcatccttgcgtgttccacttgaggccctttggtgtcttgccccattcttgtgtttataaaatgtttgagtatttctgatgagtgatgcttgccttagtctcatgaattcagatcccttcatgtcctttaagtatgctcctcaatgtgtaaacaggaacaactttatgatttgaaagctttaaaggagattcttctcccacccccaactttatttgcaatgggatttttcctaggagagttatgaaaagttgaaggcttctaagggaatactgtaaacatgacccacttatatttatcacagtgaaaggcaaaattattcactcagaagtaatataaattacctctttaaaaagtaaccagaatttgtcctttttggttttatacattcacaaacatatacatttttcttgagtctcaaggtattttatatttttagtcagaaaaaataatttttcatttcagttttccataaactgttacacaaaatataaacctaacgtgtatttttcaggactgcgtgatcgtgcactttgtgtggtaagaggtttgagtagtcctatatgtcacctagggaacagacattatagcttactagcaaatgaatattcatgccttgtttttgatacctcctggcagcttccatgtcaccacttgttcatacctgcccagagctagttttagacatggcaaaatagaaatcatctgtaatttattagctaacaatgtaaaaccatcttttaaagccttcagactgtcaagacgacatgagcagctcaccatatgataaaaatacataaatttgacattccctcttccataaacctttgtttgtagatttaatgttgaacagtacttttccataaagttctagtcacttctgttggcctgagccaccagattatgatgttgccagaattcactcaatttgaataaagatgaacagtatttgttttcttgtttccatgaattatatcagtattctaaaacatcgcttcagaaagagaactgtttatttctgcaggcttcctgtccttttgtggtatggttttttggccttattttcactggcttttccttctccaaactttgaggcgtgatttcattcattgaagaatcaatacatattttgtttcaaaatgtttgaaacaaaagacatagatggtagacttttattaaaacatatatggatgtggaaagcacatatattaatgcagtcatcccttttcaggtgggaagagagcaaaccagttgattttttaattcatccttagtacacagagaatatacttttcctcaagtaatatacctgtttgaagctttaagagagatgtttttggtaactatttcattttcccaaagaagtttgctattcttgtgttaattgtgtatacctgattgttttttcctggaggtttttgttgttgttgtttagttttgggtttttttttttttaagaggggcaagtgttttctgaaatgatgcatattttaagactcgattcatattgccactgtgctatccttgaactaccaataatttttataaaatatctagtttttactacttttatataaactttactttccagatgaagagctgagcctgattcaaatggtttttctgctttatacttctttttagttcattggtttttatagtagaggttttctattttttttttttttttttttactacatttatatgtctgatacatatacggctttggagacaatcaagtaacaactgaaaatgtgaaagtaaccatatctgacaaaattcccttgaatttttatcctttgcttgcaacatttaagactcaaagtcactggtatattggattaagttttttcctgttaatgcaattatagaaatacatcggagacacaacaaatgtggccattacaggtttcataaaattacactgacttggctgttacttgatcttaggaaacagcacagtttaagatattgtgaattctgacttatactttattaaatgctgtaaatctaaatagatcctgttggatgtgatgggtctagtccagtttatttaagttcatgtttcactgtttgcactttgcattgaacaatgggtttattcgctgatgtaaacggttcgagtgaagaattaatgcagtaagtatgacaacacatacacacttgcctctccccatctccagaagaggggagcagagtccgagcttatctaaatatgaatgtggccacaaagctgtggaaggtgacaaagcttaaacacctttgccctggctctgcattgtcacctagagagcaagaggtctatagaaacatcatgtcacatgaaacgattctctgctttttggttctgaacttgaagtccctaaactgcaaaatctaagagttgggtggttattaaaatgcttttaaagtcaactgtggcaccaattctaatgtaatccaacttgtgactgtttttttttgttttgttttgtttttgtgtgtgtgtgtgtggcactgggaaaagtggaaacaaacatgtattgaaatacatattggaaataaaaatggtttgagcgtcagtgatattctcccagaatgtacttatcttacctcggcatgtactgtagtcactcagtatttgtatatgttgctagaatttagattgtaaaatagtgaaattttaatgtgttcatttgtttttaatgtatatatgtcttgctcagattatttggtttaaataaaacaaccttgaggtttgtagcttttccttatactata

SEQ ID NO: 45295 - DNA, 336 bp, Homo Sapiens
aatctaatagactgcagtcagggtatcagccaggactgggttctcattagagactcatctcgaacaggatctgctttcaagctccctcaggttgctggcaggattcattttgttgtagctgcaggattcgtggctgcttgcttctgcacatccagaaatgggtggagagagagacagagacagagagggagagagatccagcaagagagttgctataatcttatgcaatcacttaggttgatttcctctctttgcaattgtgaattgtgctgcattaagcatgcacatgcaggtgtgtttttttatacagtgacttgtattcctttgggtagataa

SEQ ID NO: 45296 - DNA, 713 bp, Homo Sapiens
ggatactggtttttctggtctatttttattctgagtttagctaggatcctgactgcctactcttcattgctgttgttacttggatttttgttgctttgggaaaggattgaactatacctgcacttgtgtcataagatcctgattctgctagtgattcttctgtgtgtcattttaatgttcattatatgcaaattctggaaagaaaggtggctggtagctgggctgtcaatgcagatctttgctccctacgtgcacctggtcagcataactgtgatggttatccttttctggcctgtggccttctacgtggcatgtttggaaagagaaggtctacaagtgcctgttggattaccctttcttcttatccttttaggtctctatttgatgccactggggatttattctccctgcattcaggagaaggagaatttggggcccaagccaaccatctttggacatagaggtgcacccatgttggggcctgagaataccatgatgtcctttgagaaagctgttgaacatggagcccatggattggagactgatatacacttaagttatgatcatgtgcctttcctcatgcatgactttgacctgaaaagaacaaccaatattggggaagttcagccagaatctgcctgcgagaaccctgccttcttcaactgggatttcctatcgactctgaatgcaggcaaatggtttgtaaaacagag

SEQ ID NO: 45297 - DNA, 412 bp, Homo Sapiens
gcaagagagcgggaagccgagctgggcgagaagtaggggagggcggtgctccgccgcggtggcggttgctatcgcttcgcagaacctactcaggcagccagctgagaagagttgagggaaagtgctgctgctgggtctgcagacgcgatggataacgtgcagccgaaaataaaacatcgccccttctgcttcagtgtgaaaggccacgtgaagatgctgcggctggtgtttgcacttgtgacagcagtatgctgtcttgccgacggggcccttatttaccggaagcttctgttcaatcccagcggtccttaccagaaaaagcctgtgcatgaaaaaaaagaagttttgtaattttatattactttttagtttgatactaagtattaaacatatttctgtattcttccacata

SEQ ID NO: 45298 - DNA, 701 bp, Homo Sapiens
gtggtatgcttaataacgccatagcctctatagggaacgtatgtattagtctgctggcagtaattgttttgggactttttgttcgatattttccaagtgaagaccagaaaaaacttacattgaagagaggattccttgttttgactacgtgtgtttctgctgtcttaggcagccaacatattggtttacatggatctggaggattatgcacactagtgttgagtttcattgcagggacaaaatggtcccaagaaaagatgaaagtccgaaagattattacaaatgtatgggatatttttcaaccacttctttttggtttagttggagcagaagtatctgtttcactgcttgaatcaaatattgttggcatatctgttgccactctgagtttggcattatgtgttcgaattttaaccacatatctattgatgtgctttgctggttttagttttaaggagaaaatatttattgctttagcatggatgcccaaatatgtacagactgtgttaggtcctctggctctagaaacagcaagagtctccacaccccacttggaaccatatgcgaaggatgagatgacagtagcatttttagccatctcgatcgcagctccaaatggagctctacttatgggcattctggggcctaaaatgcttacacaccattatgatccaagtaaaataaaactgcaattgtcaaca

SEQ ID NO: 45299 - DNA, 1068 bp, Homo Sapiens
cgaggatgtgcgtgggggctcggcggctgggccgcgggccgtgtgcggctctgctcctcctgggcctggggctgagcaccgtgacggggctccactgtgtcggggacacctaccccagcaacgaccggtgctgccacgagtgcaggccaggcaacgggatggtgagccgctgcagccgctcccagaacacggtgtgccgtccgtgcgggccgggcttctacaacgacgtggtcagctccaagccgtgcaagccctgcacgtggtgtaacctcagaagtgggagtgagcggaagcagctgtgcacggccacacaggacacagtctgccgctgccgggcgggcacccagcccctggacagctacaagcctggagttgactgtgccccctgccctccagggcacttctccccaggcgacaaccaggcctgcaagccctggaccaactgcaccttggctgggaagcacaccctgcagccggccagcaatagctcggacgcaatctgtgaggacagggaccccccagccacgcagccccaggagacccagggccccccggccaggcccatcactgtccagcccactgaagcctggcccagaacctcacagggaccctccacccggcccgtggaggtccccgggggccgtgcggttgccgccatcctgggcctgggcctggtgctggggctgctgggccccctggccatcctgctggccctgtacctgctccggagggaccagaggctgccccccgatgcccacaagccccctgggggaggcagtttccggacccccatccaagaggagcaggccgacgcccactccaccctggccaagatctgacctgggcccaccaaggtggacgctgggccccgccaggctggagcccggagggtctgctgggcgagcagggcaggtgcaggccgcctgccccgccacgctcctgggccaactctgcaccgttctaggtgccgatggctgcctccggctctctgcttacgtatgccatgcatacctcctgccccgcgggaccacaataaaaaccttggcagacgggagtctccgaccggca

SEQ ID NO: 45300 - DNA, 1205 bp, Homo Sapiens
gaaaatccctaagcagagattttctgttggatgctaaaagcaaggaataaaagttgaaaatttggaaaatgtctcaacaccgtcaccagcgccactcgagagtcatttctagttcaccagttgacactacatcggtgggattttgcccaacattcaagaaatttaagaggaacgatgatgaatgtcgggcatttgtgaagagagtcataatgagccgtttctttaagataattatgattagcactgtcacatcgaatgcgttttttatggccttgtggaccagttatgacataaggtaccgcttgttcagacttcttgagttgtccatgaaggtctatgtggaccccatcaactactggaagaacggctacaacctgctggatgtgatcattatcatcgttatgtttttaccctatgccctccgccagctcatgggcaaacagttcacttacctgtatatcgctgatggcatgcagtccctgcgcatcctcaagcttatcggctatagccagggcatccggacgctgatcaccgccgtggggcagacagtctacaccgtggcctctgtgctcctcctgctcttcctcctcatgtacatcttcgctatcttgggcttctgcctgtttggatctccagacaatggtgaccatgataactgggggaacctggctgcagcttttttcaccctcttcagcttggccacggttgatggctggacagacctgcagaagcagttggacaatcgggaatttgctttgagccgggcattcaccatcatcttcatcttgctcgcctctttcatcttcctcaacatgttcgtgggtgtgatgatcatgcacacagaggactccatcagaaagtttgagcgagagctgatgttggagcagcaggagatgctcatgggagagaagcaggtgattctgcagcggcagcaggaggagatcagcaggctgatgcacatacagaaaaatgctgactgcacaagtttcagtgagctggtggagaactttaagaagaccttgagccacactgacccaatggtcttggatgattttggcactagcttacccttcatcgatatctacttttccactctggactaccaggacacaactgtccacaagcttcaagagctgtactatgagatcgtgcatgtgctgagcctaatgctggaagacttgccccaggagaagccccagtccttg

SEQ ID NO: 45301 - DNA, 3383 bp, Homo Sapiens
gatcaacaactgtcagctcccagtcagagagaaagggcctcttcagtctgtctcaggagactgggagaaacagcataaaggaccccacaaggaagggagaggtaccctgggtcaggcgcttgtggagagagggcttcgcatgtaaagtgacgtcagggaaaatagaacagaaaaaaagccagggccagcccagaggcacctgagaagaatcagacccacagctcagcccagccctggcacagagaagagacaggcctggcagcacccagggaccccctttcctcagcctccacctgcaggacagcaggagcactgatgcgctgaaggtacgttctggagtctggaagcagcagaactgaaggaagtaaacacgggtgtctgggaagacccctcaagctgcagtaaagcccaggactgaattggccacctgaggccaagggtggcactccaacctcctcctaaaggctggctagagccacaggaaagggccagaagccagagaaagggcaaaggtggacccctgcctccaaacctcctctggagactgacctcctctttcctgtgccttattgtttctccctcttctctttgttcgccactgggcggtgacctcagggatcctggcctaacctggtgattgtgcaggcaactgtgtccgagaagacccttctctggaagattgaaccccaattcagccatggtgactcctttgatgtcaaactggtaagggctgagccgtgggcacaggataccactccttccagctcttctgctgtgacctgcccatggaagtccctgtggacacgaaatcctgtttggatcatctaactggaggctctctgttcttcacctccacgcgccctcttgaccccaggaggttcaggggaggaagtacgccactctccactggcaccctccttggcctacacagagtcacccctgagcccctcaatgtgtgctgaggtgggccctgctctctgcaggggtatggagagaaatagcttggggtgctgtgaggccccgaagaagctgagcctgtccttctccattgaggcgatcctaaagaggcctgccaggaggagtgatatggacagaccagaagggccaggtgaagagggccccggagaagctgcggcctcaggctctgggctagaaaagcctccaaaggaccagccccaggaaggaaggaagagcaagcggagggttcgtaccaccttcaccactgagcagctgcatgagctggagaagatcttccactttacccactacccagacgttcacatccgcagccagctggcagccaggatcaacctcccagaagctcgggtgcagatctggttccagaatcagcgagccaagtggcggaagcaggagaagattggcaacctgggggctccacagcagctgagtgaagccagtgtggccctgcccacaaatctggatgtggctgggcccacgtggacatccactgctctgcgcaggctggctcctcccacgagctgttgtccatcggctcaagatcagctggcctctgcctggttccctgcctggatcaccctcctcccagcgcacccatgggaaacacagcctgtcccaggtcttcccatccatcaaacttgcatccctgtgctatgcatccttccacctccacaccccaaatggggcagcatctgtgctacttcaacatagagattggacatgctctccccaaatgagccactttcctctccaggtgaaggcaggtagcagatgtgccctgggcctctggggaaatcgatttcacaatccaaaaatggcccacagcccaggaagctaccctgaacatgccagttggaaggctgcaccagactcaaaagcaaactaaacaataaaggacagctctcttctctcctggctaaagctgctctcctggttcagaagacaggctggatgagatctcaggccgagctctgaaatagggaggtaatcctccagcacctgtgtttcctctaacttgctgtgtgacctccagccggtcactcaccctctctggacctcatctgtaagaggagccagctggataagatgatttctgaagacgcttccatggtgggcactgaggcacagaggaggccaaggagaggttgtttgttcatgcatgcattcatccgtgacacatgagtacctactgaggactccataaacagaacgggatacagagataaacaatttgggttctgtccacgtttgtcaaaaggtggtgctggcccacctctgaaagcagaacacttgctcaacaaccttgctgttggcccaagtctaacacattctttatgactgtgagcatctcagagtgagagaaaaatgtagaaagttttttaaattctaaacaggatttagtgtctttagttatcttgctggatgggaaagggatgttgtcatttctggcacaaatgaaaagtaggacggaaagctcctttcattcagtttatctttccaggatatatgaaaagggaccagctggaagactagcctcactctgtcctcgaaagcctgagctttcattcaactccctatttccatgcaaagacgctgggcaaaccacatgttctgtctgagcctcagttttcctatccataaaatgaaggtagccaggcctgcctcaaagagcattcaggaggctctgagaggacatgagagtattttgcaaagtgagggcaaggcccagtgtggagtgatattgttattccaagattccactgcaaaagtggctgctttggatgccagcccaggatgagtagttcctgttctcagggaggtcatccgctgagcatcccttctgcacagatgtctctgattcttgtccttgcaggtggaggacagggcctgctcccctaagctgggaagcctggaatgacctcttgcacaagcctaaattccaggaatcttccccaaatcccagatcctctgcaatctacctgcacccctgacccacccaggagttggaccgggagttgggaagcctaggtcttagtcctacactccttctaatttgctgtgtaaccttaccattaatctctctgggtctcagttttctcatctgtattggaggtagcagtgctagctctgccttcaggcatgcaatatgccagaactacagacaacagcccacaggatgcaaaagtgctttgccatcttaaaaatgccagatcactcagagcctatgaatgtggatatcaacaccaggtctctagcaccgctggatgaaaggagaaggctagaggctgagggaggaaagagcagttaacaaacaaaggcagtagctcatcacttgggtagcaggtacccattttaggaccctacactcaaatgtgcaaaataaaatttctatcattttgctataa

SEQ ID NO: 45302 - DNA, 318 bp, Homo Sapiens
atggtgaatgttcctaaaacccgccggactttctgtaagaagtgtggcaagcgccaaccccacaaagtgacacagtacaagaaagtggctatggtgcctgcccagggaaagcggtgttatgacaggaagcagagtggctatggtgggcagactaagccgattttctggaaaaaggctaaaactacaaagaagattgtgctaaggcttgagtgtgttgagcccaactgcagatctaagcgaacactggctattaaaagatgcaagcattttgagctgggaggagataagaagagaaagggccaagtgatccagttctaa

SEQ ID NO: 45303 - DNA, 272 bp, Homo Sapiens
gttcaacagttttttgaaaaatccttcttcttacagcttttgaaagctcatgaaaatgctttagaaaaacagtacagtgaaattacaaaccataggaatatgcttcttcaaacctttgaggctataaagaaacaaatgatagaggaggaagacaaatttattaaggaaattacagactttaataatgattatgaaataacaaagaaaagagagcttttgatgaaagaaaatgtcaagattgaaatatctgacttagaaaaccaagcaaacat

SEQ ID NO: 45304 - DNA, 2481 bp, Homo Sapiens
atggccaagcgcagctcgctgtacatccgcatcgtggaggggaagaaccttcccgccaaggacatcactggcagcagcgacccctactgcatcgtgaaggtggacaatgagcccatcatcaggtaccgcccccacccccaggaccgaggggcgctcagcctctcatcggcccgcgctctccccgcaaaggggacagccacagtgtggaagaccctgtgccccttctggggtgaggagtaccaagtgcacctgccgcccaccttccacgctgtggctttctatgtcatggatgaggatgccctcagccgggacgacgttatcggaaaggtctgccttacaagggacaccatagcctctcaccctaagggtttcagcgggtgggcccacctgacggaggtcgaccccgatgaggaggtgcagggcgagatccacctgcggctggaagtgtggccaggggcccgggcctgccggctacgctgctctgtgctggaggccagggatctggccccaaaggaccgcaatggcacatctgaccccttcgtccgagtgcgctacaagggccggacacgggagacctcgatcgtgaagaagtcatgctacccacgctggaatgagacgtttgaatttgagctgcaggagggggccatggaggcgctgtgcgtggaggcctgggactgggaccttgtcagccgaaacgacttcctgggcaaagtggtgattgatgtccagagactgcgggtggtgcagcaggaggagggctggttccggctgcagcccgaccagtccaagagccggcggcatgacgagggcaacctgggctccttgcagctggaggtgcggctgcgggacgagacggtgctgccctccagctactaccagccactggtgcacctgctgtgccacgaggtcaagctgggcatgcagggcccagggcagctgatcccactcatcgaggagacaaccagcaccgagtgtcgccaggacgtggccacgaacctgctcaagctcttcctggggcaggggctggccaaggacttcctggacctgctcttccagctggagctgagtcgcaccagtgagaccaacaccctgttccggagcaactctctggcctcaaagtccatggagtcttttctgaaggtggccgggatgcagtacctgcacggcgtcctgggccccatcatcaacaaggtgtttgaggagaagaagtacgtggagctggaccccagcaaagtggaagttaaggatgtagggtgctccgggctgcaccgcccgcagaccgaggccgaggtgctggagcagagcgcgcagacgctgcgcgcccacctgggggccctgctgagcgcgctcagccgctcggttcgcgcgtgccccgccgtggtgcgcgccaccttccgccagctcttccggcgcgtgcgcgagcgcttccccggcgcccagcacgagaatgtaccgttcatcgccgtcaccagcttcctgtgcctgcgcttcttctctcccgccatcatgtcgcccaagctcttccacctgcgggagcgccacgcggacgcccgcaccagccgcaccctgctcctgttggccaaggcagtccagaacgtgggcaacatggacacgccggcttccagggccaaggaggcttggatggagccgctgcagcccaccgtgcgccagggcgtggcgcagctgaaggacttcatcaccaagctcgtggacatcgaggagaaggacgagctggacctgcagcggacgctgagtttgcaggcgccacctgtgaaggaggggccactcttcatccacaggaccaagggcaagggccccctcatgtcctcctccttcaagaagctctacttctccctcactaccgaggccctcagcttcgcgaagacgcccagctccaagaaaagcgccctcatcaagttagccaacatccgggcagcggaaaaggttgaggaaaagagctttggcggctcgcacgtcatgcaggtcatctacacggacgacgccggcaggccccagactgcctacctgcagtgcaagtgtgtgaatgagcttaaccagtggctgtctgcgctgcggaaggtgagcatcaacaacaccggactgctgggctcctaccaccctggcgtcttccgtggggacaagtggagctgctgccaccaaaaagagaagacaggtcagggctgcgataagacccggtcacgggtgaccctgcaggagtggaatgaccctcttgaccatgaccttgaggcccagctcatctgccggcacctgctgggcgtggaggccatgctgtgggagaggcaccgggagctgagcgggggcgcagaggcaggcacggtgcccacgagccctggcaaagtccccgaggactcattggcccggctgctccgggtgctgcaggacctccgcgaggcccatagctccagcccggccggctccccaccctcagagcccaactgcctcctggagctgcagacgtga

SEQ ID NO: 45305 - DNA, 1638 bp, Homo Sapiens
aatcaatcactaacacctatcaatatccaaaatatctttcttgatcactgtgtacaagaaagagtgactgcaatttcatcaccccagaaatctactaagcatgtccgtgagcagattccagatactgctactggttccatattttttccacattgtaattcagcttctactcgaatttttgggaaacaaacaaacaaaatggaaagttcaagaaagtttaaaactatgaaagatgtttatactgaaaaaaggctagaaaacattttaattctttcttccaagttttccaaacctaaaagtactcctggctcagttatcgctcaaaaacttgagaaaatgcaccctaagcatcaacctttaccagagagtccaggctatacttatcagcacatctcgagagacttaagtgcaacagtgccaagccctccacctatgactgtatctatgaaaccagaaggacagtggcctgaacattttaaatcaactgctacattgacactaagagttactgaatttccaggttttgtttccttgccaacaccagttttaccaagaaaacctcacaggcagtctgtgataggtaaacaatctgaacacggtataattatagagtcaagtagagcaaaggggagagaaggcatgcaagctaatggtacccctcccgctttgggtttgcagaatgggaggatggaatcaccttttatatatacatgtctcaccaaaactgaaaaaatagaatcagagatacacgttgtacgtggtgaaggttttaagactgttgcagcaacacgatatgaaacaataacagccatgaccaacctggccatagtaaactgtcaagtatatgggagaaatgcacttaatctgaagggcttttttatcctaaattgtccagacttaacacctttggctttccagttgatatatcttaatttatcatttaatgatcttcattactttcccacagaaatattatgtcttaaaaatttacaaatactgaaattgagaaataatcctatcaaagaaattccttctgaaattcaacaacttgagttccttagaattttcaccattgcttttaatttaattactgttcttccaattgggttattttccttgtcttatcttgaagaacttgatgtttcctataatgaacttacttttattccaaatgaaattcagaaactcagatcacttgaaaaactgactgttgatgggaatgaactgagttttttcccccatggaattttgaagcttaacctgacaaaaattcagtttgagaataatttcactcatccttgtttttggagagataattatttgaataatccacaacaacttactcaaattatttctttgttcattgtccaaaataaactacataaattttatgataagatcccagtagaagttcagaagttactaaaatgcacatccaggtgtgaatggtgtcatggtcccaagtttggtgaaggttttcgtgtcatccgatcctgtgatatttttggagcatcacagcttccagttatgttttatgtctgttctccttcttgctatagaagaataaaggaaagcagttttgttttagatggtagtcctagtagaagaatagctctagatgtggagttgtcaaaagaa

SEQ ID NO: 45306 - DNA, 2829 bp, Homo Sapiens
tatcttctagctgctctgttaaaagcgaaaatgaaacaattgcctgcggcaacagttcgactcctttcaagttctcagatcatcacttcggtggtcagtgttgtaaaagagcttattgaaaactccttggatgctggtgccacaagcgtagatgttaaactggagaactatggatttgataaaattgaggtgcgagataacggggagggtatcaaggctgttgatgcacctgtaatggcaatgaagtactacacctcaaaaataaatagtcatgaagatcttgaaaatttgacaacttacggttttcgtggagaagccttggggtcaatttgttgtatagctgaggttttaattacaacaagaacggctgctgataattttagcacccagtatgttttagatggcagtggccacatactttctcagaaaccttcacatcttggtcaaggtacaactgtaactgctttaagattatttaagaatctacctgtaagaaagcagttttactcaactgcaaaaaaatgtaaagatgaaataaaaaagatccaagatctcctcatgagctttggtatccttaaacctgacttaaggattgtctttgtacataacaaggcagttatttggcagaaaagcagagtatcagatcacaagatggctctcatgtcagttctggggactgctgttatgaacaatatggaatcctttcagtaccactctgaagaatctcagatttatctcagtggatttcttccaaagtgtgatgcagaccactctttcactagtctttcaacaccagaaagaagtttcatcttcataaacagtcgaccagtacatcaaaaagatatcttaaagttaatccgacatcattacaatctgaaatgcctaaaggaatctactcgtttgtatcctgttttctttctgaaaatcgatgttcctacagctgatgttgatgtaaatttaacaccagataaaagccaagtattattacaaaataaggaatctgttttaattgctcttgaaaatctgatgacgacttgttatggaccattacctagtacaaattcttatgaaaataataaaacagatgtttccgcagctgacatcgttcttagtaaaacagcagaaacagatgtgctttttaataaagtggaatcatctggaaagaattattcaaatgttgatacttcagtcattccattccaaaatgatatgcataatgatgaatctggaaaaaacactgatgattgtttaaatcaccagataagtattggtgactttggttatggtcattgtagtagtgaaatttctaacattgataaaaacactaagaatgcatttcaggacatttcaatgagtaatgtatcatgggagaactctcagacggaatatagtaaaacttgttttataagttccgttaagcacacccagtcagaaaatggcaataaagaccatatagatgagagtggggaaaatgaggaagaagcaggtcttgaaaactcttcggaaatttctgcagatgagtggagcaggggaaatatacttaaaaattcagtgggagagaatattgaacctgtgaaaattttagtgcctgaaaaaagtttaccatgtaaagtaagtaataataattatccaatccctgaacaaatgaatcttaatgaagattcatgtaacaaaaaatcaaatgtaatagataataaatctggaaaagttacagcttatgatttacttagcaatcgagtaatcaagaaacccatgtcagcaagtgctctttttgttcaagatcatcgtcctcagtttctcatagaaaatcctaagactagtttagaggatgcaacactacaaattgaagaactgtggaagacattgagtgaagaggaaaaactgaaatatgaagagaaggctactaaagacttggaacgatacaatagtcaaatgaagagagccattgaacaggagtcacaaatgtcactaaaagatggcagaaaaaagataaaacccaccagcgcatggaatttggcccagaagcacaagttaaaaacctcattatctaatcaaccaaaacttgatgaactccttcagtcccaaattgaaaaaagaaggagtcaaaatattaaaatggtacagatccccttttctatgaaaaacttaaaaataaattttaagaaacaaaacaaagttgacttagaagagaaggatgaaccttgcttgatccacaatctcaggtttcctgatgcatggctaatgacatccaaaacagaggtaatgttattaaatccatatagagtagaagaagccctgctatttaaaagacttcttgagaatcataaacttcctgcagagccactggaaaagccaattatgttaacagagagtctttttaatggatctcattatttagacgttttatataaaatgacagcagatgaccaaagatacagtggatcaacttacctgtctgatcctcgtcttacagcgaatggtttcaagataaaattgataccaggagtttcaattactgaaaattacttggaaatagaaggaatggctaattgtctcccattctatggagtagcagatttaaaagaaattcttaatgctatattaaacagaaatgcaaaggaagtttatgaatgtagacctcgcaaagtgataagttatttagagggagaagcagtgcgtctatccagacaattacccatgtacttatcaaaagaggacatccaagacattatctacagaatgaagcaccagtttggaaatgaaattaaagagtgtgttcatggtcgcccattttttcatcatttaacctatcttccagaaactacatga

SEQ ID NO: 45307 - DNA, 1446 bp, Homo Sapiens
ccggggcaccggcggtgggcggggccagcagcgcaaactgcctgcagcggggaccggacctgcacaggccgcctatggcgggcggcgggtgggaccgcgagttacagccggccaactggggccagccaggagcctgagggtcggaagcccccaacacaagatgctgagctccttcctgagcccccagaatggcacctgggcagacaccttctctctgctcttggctcttgccgttgccctctacttgggctactactgggcatgtgtgcttcagaggcctcggctggtggctgggccgcagtttctggccttcctggagccacactgttccatcaccaccgagactttctacccaacgctgtggtgttttgaggggcgactacaaagcatcttccaagtcctcctgcagtctcagcccctagtcctttatcagagtgacatcctccaaacaccagatggaggccagctcctgctagactgggccaagcagcctgacagcagccaagaccctgatcctactacccagcccattgtgctgctgcttcctggcatcactggcagtagccaggatacatacgtcttgcacctagttaaccaagctctgagggatggctaccaggctgtcgtgtttaacaaccggggctgccgtggggaggaactgcggacccacagggctttttgtgccagcaatactgaagatctagagacagtcgtgaaccacataaagcatcgttatccccaagctccactgctggccgtgggcatctcttttggagggatactggtgctgaatcacctggcacaggccaggcaggctgcagggctggtggcagcactgactctgtctgcatgctgggattcctttgagaccactcgctccctggaaaccccactcaactcactgctcttcaatcagcccctcactgctgggctctgccaacttgtggaacgaaacagaaaggtgattgaaaaggtggtggacatagactttgtactacaggcccgtacaatccgccagtttgatgagcgctacacatctgtggcctttggatatcaagactgtgttacctactacaaagcagcaagccctagaaccaagatagatgccatccggatccctgtgctctatctcagtgcagcagatgaccccttctcccccgtctgtgcccttcccatacaggccgcccaacactccccctacgttgcgctgctcatcacagcccggggtggccacatcggcttcctggaagggctgctcccgtggcagcactggtacatgagccgcctcttgcatcagtacgccaaagccatcttccaggacccagaggggctgcctgacctcagggctctcttaccttctgaggacagaaacagctgacaagagtaccatttggggtctcagttcactctttccttgtttattaaatatcaacttttcctgcctaa

SEQ ID NO: 45308 - DNA, 1885 bp, Homo Sapiens
ggagatattatgaggctgttgtcattagggcgattgcggtggaatcgctgaatcttgactcggcggtggttggctctccctctcctctctccctctccctctccctctctgtctcgggttctctctctgcgcgcgcgcaccgggccgctctcctacctccctctctatgtggctgcgcgggtgtgtgtgtgtgtggatgtgtgtggggtgtgggtgtcccttacgcccttcctcctctccctcctcctcctgctcccccctcctttccttctcctcctcccccctctcctctccctcctcctggtcctcatcgcccctctcctcctcttcctcccctctctcttcctctccctgaattttctcctctcctctcaggtcagtccatggtattccgctcccccctagacctctattcctcccacttcttgttgccaaacttcgccgattctcaccaccgctccatacttctggcgagtagcggcggcgggaacggtgcgggaggcggcggcggcgcgggaggcggcagcggcggcgggaacggtgcgggaggcggcggtgctggcggagcaggcggcggcggcggcggcggctccagggcccccccggaagagttgtccatgttccagctgcccaccctcaacttctcgccggagcaggtggccagcgtctgtgagacgctggaggagacgggcgacatcgagcggctgggccgcttcctctggtcgctgcccgtggcccccggggcgtgcgaggccatcaacaaacacgagtcgatcctgcgcgcgcgcgccgtggtcgccttccacacgggcaacttccgcgacctctaccacatccttgagaaccacaagttcaccaaggagtctcacggcaagctgcaggccatgtggctcgaggcgcactaccaggaggccgagaagctgcgcggccgcccactcggcccggtggacaagtaccgcgtgcgcaagaagttcccgctgccacgcaccatctgggacggcgagcagaagacgcattgcttcaaggagcggactcggagcctgttgcgggagtggtacctacaggacccctaccccaaccccagcaagaaacgcgaactggcgcaggccaccggcctcactcccacacaagtaggcaactggtttaagaaccggcggcagcgcgaccgcgccgcggcggccaagaacaggctccagcaccaggccattggaccgagcggcatgcgctcgctggccgagcccggctgccccacgcacggctcggcagagtcgccgtccacggcggccagcccgaccaccagcgtgtccagcctgacggagcgcgcagacaccggcacctccatcctctcggtaacctccagcgactcggaatgtgatgtatgatagccaaggccgccctcctccctctccttcccctcctcccccactccttcccctccgcctcctagccctcctcctcttcctcctcttccttctcctcctccatccccagaacaaaccgaaatcaggatacccaaccatacacacatacaagtccacacacactcccaccccagccaaaaatatataaaaaacaagaaaataacaaattaaccgcaaactatcaacaacccccaaccaccatctaccactacggccaccccaaaggaccccgacgccaacagacagtcaaacgctgatgttgcgggcagaaaacataaaagaggtgacaattgtatactttctaggacaagcacggcttctcctttcggttcccatggacccggcaccccacctgcatgacgatttatttgtatctgggaaaatattctctctagttaaaaatgatttaaagagtcgactatacaaaaatcaatcaccaccacgaggacaagagggcaaaagca

SEQ ID NO: 45309 - DNA, 605 bp, Homo Sapiens
agcttcttctgagagagtctctagaagacatgatgctacactcagctttgggtctctgcctcttactcgtcacagtttcttccaaccttgccattgcaataaaaaaggaaaagaggcctcctcagacactctcaagaggatggggagatgacatcacttgggtacaaacttatgaagaaggtctcttttatgctcaaaaaagtaagaagccattaatggttattcatcacctggaggattgtcaatactctcaagcactaaagaaagtatttgcccaaaatgaagaaatacaagaaatggctcagaataagttcatcatgctaaaccttatgcatgaaaccactgataagaatttatcacctgatgggcaatatgtgcctagaatcatgtttgtagacccttctttaacagttagagctgacatagctggaagatactctaacagattgtacacatatgagcctcgggatttacccctattgatagaaaacatgaagaaagcattaagacttattcagtcagagctataagagatgatggaaaaaagccttcacttcaaagaagtcaaatttcatgaagaaaacctctggcacattgacaaatac

SEQ ID NO: 45310 - DNA, 379 bp, Homo Sapiens
gggtgagactcctcttgctcgtcatgtctggccgcggcaaaggcgggaagggtcttggcaaaggcggcgctaagcgccaccgtaaagtactgcgcgacaatatccagggcatcaccaagccggccatccggcgccttgctcgccgcggcggcgtgaagcgcatctccggcctcatctacgaggagactcgcggggtgctgaaggtgttcctggagaacgtgatccgggacgccgtgacctatacagagcacgccaagcgcaagacggtcaccgccatggatgtggtctacgcgctcaagcgccagggccgcaccctctacggtttcggtggttgagcgtccctttctatcaataaaaggcccttttcagggccacccta

SEQ ID NO: 45311 - DNA, 2991 bp, Homo Sapiens
atgggcgcggcggccgtgcgctggcacttgtgcgtgctgctggccctgggcacacgcgggcggctggccgggggcagcgggctcccagggtcagtcgacgtggatgagtgctcagagggcacagatgactgccacatcgatgccatctgtcagaacacgcccaagtcctacaaatgcctctgcaagccaggctacaagggggaaggcaagcagtgtgaagacattgacgagtgtgagaatgactactacaatgggggctgtgtccacgagtgcatcaacatcccggggaactacaggtgtacctgctttgatggcttcatgctggcacacgatggacacaactgcctggatgtggacgagtgtcaggacaataatggtggctgccagcagatctgcgtcaatgccatgggcagctacgagtgtcagtgccacagtggcttcttccttagtgacaaccagcatacctgcatccaccgctccaatgagggtatgaactgcatgaacaaagaccatggctgtgcccacatctgccgggagacgcccaaaggtggggtggcctgcgactgcaggcccggctttgaccttgcccaaaaccagaaggactgcacactaacctgtaattatggaaacggaggctgccagcacagctgtgaggacacagacacaggccccacgtgtggttgccaccagaagtacgccctccactcagacggtcgcacgtgcatcgagacgtgcgcagtcaataacggaggctgcgaccggacatgcaaggacacagccactggcgtgcgatgcagctgccccgttggattcacactgcagccggacgggaagacatgcaaagacatcaacgagtgcctggtcaacaacggaggctgcgaccacttctgccgcaacaccgtgggcagcttcgagtgcggctgccggaagggctacaagctgctcaccgacgagcgcacctgccaggacatcgacgagtgctccttcgagcggacctgtgaccacatctgcatcaactccccgggcagcttccagtgcctgtgtcaccgcggctacatcctctacgggacaacccactgcggagatgtggacgagtgcagcatgagcaacgggagctgtgaccagggctgcgtcaacaccaagggcagctacgagtgcgtctgtcccccggggaggcggctccactggaacgggaaggattgcgtggagacaggcaagtgtctttctcgcgccaagacctccccccgggcccagctgtcctgcagcaaggcaggcggtgtggagagctgcttcctttcctgcccggctcacacactcttcgtgccagactcggaaaatagctacgtcctgagctgcggagttccagggccgcagggcaaggcgctgcagaaacgcaacggcaccagctctggcctcgggcccagctgctcagatgcccccaccacccccatcaaacagaaggcccgcttcaagatccgagatgccaagtgccacctccggccccacagccaggcacgagcaaaggagaccgccaggcagccgctgctggaccactgccatgtgactttcgtgaccctcaagtgtgactcctccaagaagaggcgccgtggccgcaagtccccatccaaggaggtgtcccacatcacagcagagtttgagatcgagacaaagatggaagaggcctcagacacatgcgaagcggactgcttgcggaagcgagcagaacagagcctgcaggccgccatcaagaccctgcgcaagtccatcggccggcagcagttctatgtccaggtctcaggcactgagtacgaggtagcccagaggccagccaaggcgctggaggggcagggggcatgtggcgcaggccaggtgctacaggacagcaaatgcgttgcctgtgggcctggcacccacttcggtggtgagctcggccagtgtgtgtcatgtatgccaggaacataccaggacatggaaggccagctcagttgcacaccgtgccccagcagcgacgggcttggtctgcctggtgcccgcaacgtgtcggaatgtggaggcaagtgcgggcctagaaggagaggccagtgttctccaggcttcttctcggccgatggcttcaagccctgccaggcctgccccgtgggcacgtaccagcctgagcccgggcgcaccggctgcttcccctgtggagggggtttgctcaccaaacacgaaggcaccacctccttccaggactgcgaggctaaagtgcactgctcccccggccaccactacaacaccaccacccaccgctgcatccgctgccccgtcggcacctaccagcccgagtttggccagaaccactgcatcacctgtccgggcaacaccagcacagacttcgatggctccaccaacgtcacacactgcaaaaaccagcactgcggcggcgagcttggtgactacaccggctacatcgagtcccccaactaccctggcgactacccagccaacgctgaatgcgtctggcacatcgcgcctcccccaaagcgcaggatcctcatcgtggtccctgagatcttcctgcccatcgaggatgagtgcggcgatgttctggtcatgaggaagagtgcctctcccacgtccatcaccacctatgagacctgccagacctacgagaggcccatcgccttcacctcccgctcccgcaagctctggatccagttcaaatccaatgaaggcaacagcggcaaaggcttccaagtgccctatgtcacctacgatgaggactaccagcaactcatagaggacatcgtgcgcgatgggcgcctgtacgcctcggagaaccaccaggaaattttgaaagacaagaagctgatcaaggccctcttcgacgtgctggcgcatccccagaactacttcaagtacacagcccaggaatccaaggagatgttcccacggtccttcatcaaactgctgcgctccaaagtgtctcggttcctgcggccctacaaataa

SEQ ID NO: 45312 - DNA, 1129 bp, Homo Sapiens
cttctttaaatttctttctaggatgttcacttctccacaatgaatgagtgtcactatgacaagcacatggactttttttataataggagcaacactgatactgtcgatgactggacaggaacaaagcttgtgattgttttgtgtgttgggacgtttttctgcctgtttatttttttttctaattctctggtcatcgcggcagtgatcaaaaacagaaaatttcatttccccttctactacctgttggctaatttagctgctgccgatttcttcgctggaattgcctatgtattcctgatgtttaacacaggcccagtttcaaaaactttgactgtcaaccgctggtttctccgtcaggggcttctggacagtagcttgactgcttccctcaccaacttgctggttatcgccgtggagaggcacatgtcaatcatgaggatgcgggtccatagcaacctgaccaaaaagagggtgacactgctcattttgcttgtctgggccatcgccatttttatgggggcggtccccacactgggctggaattgcctctgcaacatctctgcctgctcttccctggcccccatttacagcaggagttaccttgttttctggacagtgtccaacctcatggccttcctcatcatggttgtggtgtacctgcggatctacgtgtacgtcaagaggaaaaccaacgtcttgtctccgcatacaagtgggtccatcagccgccggaggacacccatgaagctaatgaagacggtgatgactgtcttaggggcgtttgtggtatgctggaccccgggcctggtggttctgctcctcgacggcctgaactgcaggcagtgtggcgtgcagcatgtgaaaaggtggttcctgctgctggcgctgctcaactccgtcgtgaaccccatcatctactcctacaaggacgaggacatgtatggcaccatgaagaagatgatctgctgcttctctcaggagaacccagagaggcgtccctctcgcatcccctccacagtcctcagcaggagtgacacaggcagccagtacatagaggatagtattagccaaggtgcagtctgcaataaaagcacttcctaaactctggatgcctctcggcccacccagg

SEQ ID NO: 45313 - DNA, 528 bp, Homo Sapiens
gcccctgaccggctcttcaagattgtgttcgtgggcaattccgcggtggggaagacatccttcctgaggagattctgtgaggaccggttctccccaggcatggcggccactgtgggcattgattaccgtgtgaagacgttgaatgtggacaactctcaggtggccctgcagctgtgggacacggctgggcaggagaggtaccggtgcatcacccagcagttcttcagaaaggcagatggtgtcatcgtcatgtacgatctcacagacaagcagtcgttcctgtcggtccggcggtggctgagcagcgtggaggaagctgtgggagaccgggtgcctgttcttctgctgggtaataagcttgacaacgagaaggagcgggaagtcccccggggcctcggagagcagcttgccacggtaaagagcaagcatttccatctctctggacagagtgtgaccccgagggaagttgggcaagtgcccaagagccttggtggggactttctctggaagtgccatgggaaggaagca

SEQ ID NO: 45314 - DNA, 1677 bp, Homo Sapiens
atggcgaagctgctgagctgcgtcctaggcccccggctctacaaaatctaccgggagagggactctgaaagggccccggccagcgtccctgagacgccaacggcagtcactgccccccattccagctcctgggatacgtactatcagccccgtgccctggagaaacatgctgacagcatcctggcactggcttcagtattctggtccatctcttattactcctctcccttcgccttcttctacttgtacaggaaaggttacttgagtttgtccaaagtggtgccgttttctcactatgctgggacattgctgctacttctggcaggtgtggcctgcctccgaggcattggccgctggaccaacccccagtaccggcagttcatcaccatcttggaagcaacacatcggaaccagtcttcagaaaacaagaggcagcttgccaactacaactttgacttccggagctggccagtcgacttccactgggaagaacccagcagccggaaggagtctcgagggggcccttcccgccggggtgtggccctgcttcgcccagagcccctgcaccgggggacagcagacaccctcctcaaccgggttaagaagctgccttgtcagatcaccagctacctggtggcgcacaccctagggcgccggatgctgtatccaggctctgtgtacctgctgcagaaggccctcatgcctgtgctgctgcagggccaggcccgactggtggaagagtgtaatgggcgccgggcaaagctgctggcctgtgatggcaatgagattgacaccatgtttgtggaccggcgggggacagctgagccccagggacagaagctggtgatctgctgtgaggggaatgctgggttttatgaggtgggctgcgtctccacgcccctggaagctggatattcagtcctgggctggaatcatccaggctttgctggaagcacgggggtgccattcccgcagaatgaggctaatgccatggatgtggtggtccagtttgccatccaccgcctgggcttccagccccaggacatcatcatctacgcctggtccatcggcggcttcactgccacgtgggcagccatgtcctacccagatgttagtgccatgatcctggatgcctcctttgatgacctggtgcccttggccttgaaggtcatgccagacagctggaggggcctggtgaccaggaccgtgaggcagcatctcaatctaaacaacgcggagcagctgtgcagataccagggtcctgtactgctgatccggagaaccaaggatgagatcatcaccaccacggttcctgaggacatcatgtccaaccgaggcaatgacctcctgctgaagctcctgcagcatcggtatccccgggtgatggcagaggagggtcttcgagtggtgaggcagtggttggaggcctcctcacagctggaggaagcctcaatttatagccgatgggaggtggaagaggactggtgtctgtctgtcctccgctcctaccaggcagaacacgggcccgacttcccctggagcgtgggggaggacatgagtgcagatggacggcggcagctggctttgtttctggctcggaagcatctgcacaactttgaggccactcactgcaccccactcccagcccagaacttccagatgccctggcacctctag

SEQ ID NO: 45315 - DNA, 1333 bp, Homo Sapiens
ctctttcagtctcacatggcaacgaaaacaacttgtatgtcttcacaaggatcagatgatgaacagataaaaagagaaaacattcgttcgttgactatgtctggccatgttggttttgagagtttgcctgatcagctggtgaacagatccattcagcaaggtttctgctttaatattctctgtgtgggggaaactggaattggaaaatcaacactgattgacacattgtttaatactaattttgaagactatgaatcctcacatttttgcccaaatgttaaacttaaagctcagacatatgaactccaggaaagtaatgttcaattgaaattgaccattgtgaatacagtgggatttggtgaccaaataaataaagaagagagctaccaaccaatagttgactacatagatgctcagtttgaggcctatctccaagaagaactgaagattaagcgttctctctttacctaccatgattctcgcatccatgtgtgtctctacttcatttcaccgacaggccactctctgaagacacttgatctcttaaccatgaagaaccttgacagcaaggtaaacattataccagtgattgccaaagcagatacggtttctaaaactgaattacagaagtttaagatcaagctcatgagtgaattggtcagcaatggcgtccagatataccagttcccaacggatgatgacactattgctaaggtcaacgctgcaatgaatggacagttgccgtttgctgttgtgggaagtatggatgaggtaaaagtcggaaacaagatggtcaaagctcgccagtacccttggggtgttgtacaagtggaaaatgaaaaccactgtgactttgtaaagctgcgggaaatgctcatttgtacaaatatggaggacctgcgagagcagacccataccaggcactatgagctttacaggcgctgcaaactggaggaaatgggctttacagatgtgggcccagaaaacaagccagtcagtgttcaagagacctatgaagccaaaagacatgagttccatggtgaacgtcagaggaaggaagaagaaatgaaacagatgtttgtgcagcgagtaaaggagaaagaagccatattgaaagaagctgagagagaggcaagtatgctgctacaggccaaatttgagcaccttaagagacttcaccaagaagagagaatgaagcttgaagaaaagagaagacttttggaagaagaaataattgctttctctaaaaagaaagctacctccgagatatttcacagccagtcctttctggcaacaggcagcaacctgaggaaggacaaggaccgtaagaagt

SEQ ID NO: 45316 - DNA, 960 bp, Homo Sapiens
ttgcggtttgggagggaggctgcgaggaggggcgcggtgcccgccgccgccaccgcagcaccgcacagcgtctctcctgggggtgcgacctacgccggggacccagcgctcgggcaccggaggccggcctcgcaccggtgcggaggccggctctcgcgagaaagcataaaggatgttattggcagaaagataaaaatttcagtgaagaagaaagtaaagttggaagttaagggagacaaagttgaaaacaaagtgctggtccttacatcatgccgagccttccttgtaacagcgcgaatccccaccaagctcgagttaaccttcagctacttggagattcatggcgtcgtttgcagcaagtcagctcagatgattgtggaaactgagaagtgcagcatttccatgaagatggcgtcacccgaggacgtgagtgaggtgctggctcacataggcacctgcctgaggaagatatttcctggcctctctccagtgagaatcatgaaaaaagtctccatggagccatctgagcgcctggctagtctccaggcgctgtgggacagccagaccgtggctgagcagggcccctgtggtggattttctcagatgtatgcctgtgtttgtgactggcttggattttcatacagggaagaagtacaatgggatgtggatacaatttatcttacccaagacaccagggaattgaatttacaagattttagtcatcttgaccacaggaaatccagaattgcagtgtggtccctgaagagctctagccaactgaatcggccagggaaaaagtatactagctggatatacctcctctttgcacagcctgggactacggaagatggtgaagcaggctcagctgtgtctgtagttgtggctgatgggcctaaagcctccagttctcaggcaattttttttttttcctgcttagagcagttctccttcttcctataa

SEQ ID NO: 45317 - DNA, 918 bp, Homo Sapiens
acctccggaaaccgtagattccgggcggtcggagccgccgggagctgtagttctcccgcggctcagagaagtaggcagagagcggacctggcggccgggcagcatggcggggctggagctcttgtcggaccagggctaccgggtggacgggcggcgcgccggggagctgcgcaagatccaggcgcggatgggcgtgttcgcgcaggctgacggctcggcctacattgagcagggcaacaccaaggcactggctgtggtctacggcccgcacgaggcgatgggcctggctcatgtgtctgtcctcttccagatccggggctcccgggctcgagccctgccggacagggccctagtgaactgtcaatatagttcagcgaccttcagcacaggtgagcgcaagcgacggccacatggggaccgtaagtcctgtgagatgggcctgcagctccgccagactttcgaagcagccatcctcacacagctgcacccacgctcccagattgatatctatgtgcaggtgctacaggcagatggtgggacctatgcagcttgtgtgaatgcagccacgctggcagtgctggatgccgggatacccatgagagactttgtgtgtgcgtgctcagctggcttcgtggacggcacagccctggcggacctcagccatgtggaggaagcagctggtggcccccagctggccctggccctgctgccagcctcaggacagattgcgctgcttgagatggatgcccggctgcacgaggaccacctggagcgggtgttggaggctgctgcccaggctgcccgagatgtgcacaccctcttagatcgagtggtccggcagcatgtgcgtgaggcctctatcttgctgggggactgaccacccagccacccatgtccagaataaaaccctcctctgcc

SEQ ID NO: 45318 - DNA, 940 bp, Homo Sapiens
ggccggaccggggccatggcgcccgcgcagcgcccgctgctcccgctgctgctcctgctgttaccgctgccgccgccgcccttcgcgcgcgccgaggacgccgcccgcgccaactcggaccgctacgccgtctactggaaccgcagcaaccccaggttccacgcaggcgcgggggacgacggcgggggctacacggtggaggtgagcatcaatgactacctggacatctactgcccgcactatggggcgccgctgccgccggccgagcgcatggagcactacgtgctgtacatggtcaacggcgagggccacgcctcctgcgaccaccgccagcgcggcttcaagcgctgggagtgcaaccggcccgcggcgcccggggggccgctcaagttctcggagaagttccagctcttcacgcccttctccctgggcttcgagttccggcccggccacgagtattactacatctctgccacgcctcccaatgctgtggaccggccctgcctgcgactgaaggtgtacgtgcggccgaccaacgagaccctgtacgaggctcctgagcccatcttcaccagcaataactcgtgtagcagcccgggcggctgccgcctcttcctcagcaccatccccgtgctctggaccctcctgggttcctagtcccagccccgcaggacgccgaccctgcctggacggccccgcctggaccgcctgacctcggccctccggacccggctgcggcccccgcctccgagaccaaatagagacgctgcttctccctcgcctggtgccgcccccgccgggcaggggccatccacccgccccaggaccagccctcagggaggggaaacggccgagagcccccccccggaggcccgaggggccggggtgtggatgcggaccgtggccaggccatctcctctggggcgtcggagaacccggg

SEQ ID NO: 45319 - DNA, 1964 bp, Homo Sapiens
aaaagccagctcgcccggggcggcggcgcagagccgggccggcgcacgaggcagccagcgcggccatgacggcggagaaggcgctgcccctgggcaatgggaaggctgctgaggaggcgcgggagtccgaggcgccgggtggcggctgcagcagcgggggcgcggcgcccgcgcgccacccgcgcgtcaagcgcgacaaggcggtccacgagcgcggccactggaacaacaaggtggagttcgtgctgagcgtggccggggagatcattgggctgggcaacgtgtggcgcttcccctacctgtgctacaagaacggaggaggggcattcctgattccctacgtggtgttttttatttgctgtggaattcctgtttttttcctggagacagctctggggcagttcacaagtgaaggtggcattacgtgttggaggaaagtttgccctttatttgaaggcattggctatgcaacacaggtgattgaggcccatctgaatgtgtactacatcatcatcctggcatgggccattttttacctgagcaactgcttcactactgagctaccctgggctacctgtgggcatgagtggaacacagagaattgtgtggagttccagaaactgaatgtgagcaactacagccatgtgtctctgcagaatgccacctcccctgtcatggagttttgggagcaccgggtcctggccatctctgacgggatcgagcacatcgggaaccttcgctgggagctggccttgtgtctcttggcagcctggaccatctgttacttctgtatctggaaggggaccaagtctacaggaaaggttgtatacgtgactgcgacattcccctacatcatgctgctgatcctcctgatacgaggggtcacgttgcccggggcctcagagggcatcaagttctacttgtaccctgacctctcccggctctccgacccccaggtctgggtagatgctggaacgcagatctttttctcctatgccatttgcctgggctgtctgaccgctctgggaagttataacaattataacaacaactgctacagggactgcatcatgctctgttgcctgaacagcggcaccagcttcgtggctgggtttgccatcttctcagtcctgggttttatggcgtacgagcagggggtacccattgctgaggtggcagagtcaggccccggcctggcctttattgcgtaccccaaggcggtcaccatgatgcctctctccccgctgtgggccaccttgttcttcatgatgctcatcttcctgggcctggacagccagtttgtgtgtgtggaaagcctggtgaccgccgtggtggacatgtaccccaaggttttccggaggggttaccggcgggagctgctcatcctagccttgtctgttatctcctattttctgggcctcgtgatgttaacagagggtggcatgtacatcttccagctctttgactcctatgccgccagtgggatgtgccttctcttcgtggccatctttgagtgcatctgcatcggctgggtgtatggaagcaaccggttctatgataacattgaagacatgattggctaccggccaccgtcgctcattaagtggtgctggatgatcatgacccctgggatctgcgcggggatcttcatcttcttcttgatcaagtacaagccactcaagtacaacaacatctacacctacccagcctggggctatggcattggctggctcatggccctgtcctccatgctctgcatcccgctctggatctgcatcacagtgtggaagacggaggggacactgcccgagaaactccagaagttgacgacccccagcacagatctgaaaatgcggggcaagcttggggtgagcccacggatggtgacagttaatgactgtgatgccaaactcaagagtgacgggaccatcgcagccatcacagagaaggagacgcacttctga

SEQ ID NO: 45320 - DNA, 894 bp, Homo Sapiens
ttcatcttactgggtttctcaggcagacccaggctggagcatgtcctctttgtgtttgtcctcatcttctaccttgtgaccttagtgggcaacatcatcattatcttgatctcccacctggacccctgcctccacatgcccatgtacttcttcctcactaacttgtctttcctagatctctgcttcaccaccagttctatcccccagctgcttttcaatctaggcagcccaggcaagactatcagccacacgggctgtgccatccagctcttcatgttcctgggcctgggtggcaagatggagtgtgtcttattgtctgccatggcctatgaccgctatgcagccgtctgccgcccactccactacatggtgagcatgcatccccaactttgcttgcagttggttgtaaccacttggctcacagggtttggcaattctgtgatacagacagcattgaccatgactctccccctctgtgataaaaaccaagtggatcatttcttctgtgaagttccagtgatgctgaaactgtcctgcaccaacacctccatcaacgaggctgaaatctttgctgtcagtgtcttcttcttggtggtgcctctctcactcatcttagcatcctatggtcacattactcatgcagtcctgaagataaagtcagctcaagggaggcagaaggcttttggaacctgtggttctcacctcctggtagtgatcattttctttgggacactcatctccatgtacctccagcctccctccagttattcacaggatgtgaacaaaagcattgcactcttctatactctggtgactcctctactgaatcccctaatttacactctgaggaacaaggaagtcaaaggggcaactaagaagactagtggggaggac

SEQ ID NO: 45321 - DNA, 471 bp, Homo Sapiens
atgttcctgactgaggatctcataacatttaacttgaggaacttcctccttttccagctttgggagtcaagcttctcacctggggcgggtgggttctgcaccaccctcccaccctccttcctccgtgtggacgatagagccacatccagcaccacggacagctcccgggcgccttcatctcctcgtcctccaggcagcacaagccattgtggaatctccaccaggtgtacagaacggtgcctctgcgtcctgccactcaggacctctcaagtccccgatgtgatggctcctcagcatgatcaggagaaattccatgatcttgcttattcctgtcttgggaagtccttctccatgtctaaccaagatctatatggctatagcaccagctctttggctcttggcttggcatggctaagttgggagaccaaaaagaagaatgtacttcatctggttgggctggattccctctga

SEQ ID NO: 45322 - DNA, 249 bp, Homo Sapiens
atgtgtgtctattatatatttaaactggagagacatgtatttgcaccaaaggtaggttatatgatctacttacgcaatgtgcaagtggaaaatggatggcagaaggattgttcttccttccttgtttgtttgtaccagaactcttcattgtttacatacattttagccttggtgccattttcagaagctttatttgtctcacttacttttttggtttggataagacttaaatataaaatccatctgtga

SEQ ID NO: 45323 - DNA, 2063 bp, Homo Sapiens
ctcccgccgccgtcacccaggaaaccggccgcaatcgccggccgacctgaagctggtttcatggcagcctcaaagaaggcagttttggggccattggtgggggcggtggaccagggcaccagttcgacgcgctttttggttttcaattcaaaaacagctgaactacttagtcatcatcaagtagaaataaaacaagagttcccaagagaaggatgggtggaacaggaccctaaggaaattctacattctgtctatgagtgtatagagaaaacatgtgagaaacttggacagctcaatattgatatttccaacataaaagctattggtgtcagcaaccagagggaaaccactgtagtctgggacaagataactggagagcctctctacaatgctgtggtgtggcttgatctaagaacccagtctaccgttgagagtcttagtaaaagaattccaggaaataataactttgtcaagtccaagacaggccttccacttagcacttacttcagtgcagtgaaacttcgttggctccttgacaatgtgagaaaagttcaaaaggccgttgaagaaaaacgagctctttttgggactattgattcatggcttatttggagtttgacaggaggagtcaatggaggtgtccactgtacagatgtaacaaatgcaagtaggactatgcttttcaacattcattctttggaatgggataaacaactctgcgaattttttggaattccaatggaaattcttccaaatgtccggagttcttctgagatctatggcctaatgaaagctggggccttggaaggtgtgccaatatctgggtgtttaggggaccagtctgctgcattggtgggacaaatgtgcttccagattggacaagccaaaaatacgtatggaacaggatgtttcttactatgtaatacaggccataagtgtgtattttctgatcatggccttctcaccacagtggcttacaaacttggcagagacaaaccagtatattatgctttggaaggttctgtagctatagctggtgctgttattcgctggctaagagacaatcttggaattataaagacctcagaagaaattgaaaaacttgctaaagaagtaggtacttcttatggctgctacttcgtcccagcattttcggggttatatgcaccttattgggagcccagcgcaagagggataatctgtggactcactcagttcaccaataaatgccatattgcttttgctgcattagaagctgtttgtttccaaactcgagagattttggatgccatgaatcgagactgtggaattccactcagtcatttgcaggtagatggaggaatgaccagcaacaaaattcttatgcagctacaagcagacattctgtatataccagtagtgaagccctcaatgcccgaaaccactgcactgggtgcggctatggcggcaggggctgcagaaggagtcggcgtatggagtctcgaacccgaggatttgtctgccgtcacgatggagcggtttgaacctcagattaatgcggaggaaagtgaaattcgttattctacatggaagaaagctgtgatgaagtcaatgggttgggttacaactcaatctccagaaagtggtattccataaaacctaccaactcatggattcccaagatgtgagctttttacataatgaaagaacccagcaattctgtctcttaatgcaatgacactattcatagactttgattttatttataagccacttgctgcatgaccctccaagtagacctgtggcttaaaataaagaaaatgcagcaaaaagaatgctatagaaatatttggtggttttttttttttttaaacatccacagttaaggttgggccagctacctttggggctgaccccctccattgccataacatcctgctccattccctctaagatgtaggaagaattcggatccttaccattggaatcttccatcgaacatactcaaacacttttggaccaggatttgagtctctgcatgacatatacttgattaaaaggttattactaacctgttaaaaatc

SEQ ID NO: 45324 - DNA, 1595 bp, Homo Sapiens
cagcagaaaacagctgaaacggaagaggggacagtgcagattcaggaaggtgcagtggctactggggaagacccaaccagtgtggctattgccagcatccagtcagctgccaccttccctgaccccaacgtcaagtacgtcttccgaactgagaatgggggccaggtgatgtacagggtgatccaggtgtctgaggggcagctggatggccaaactgagggaactggcgccatcagtggctaccctgccactcaatccatgacccaggcggtgatccagggtgctttcaccagtgatgatgcagttgacacggaggggacagctgctgagacgcactatacttacttccccagcacggcagtgggagatggggcagggggtaccacatcggggagtacagctgctgttgttactacccagggctcagaggcactgctggggcaggcgacccctcctggcactggtcaattctttgtgatgatgtcaccacaagaagtactgcagggaggaagccagcgctcaattgcccctaggactcacccttattccccgaagtcagaagctccccggacgactcgggatgagaaacgcagggctcagcataatgaagtggagcgtcgccgccgagacaagatcaacaactggatcgtgcagctctccaagataatcccagactgctctatggagagcaccaagtctggccagagtaaaggtgggattctatccaaagcttgtgattatatccaggagcttcggcagagtaaccaccgcttgtctgaagaactgcagggacttgaccaactgcagctggacaatgacgtgcttcgacaacaggtggaagatcttaaaaacaagaatctgctgcttcgagctcagttgcggcaccacggattagaggtcgtcatcaagaatgacagcaactaactatggggattcaggggctttgggcccaagaactgcagatagcccaggagcaacagcctaatcccgtgcccctttccttcactgccccacttctggcatgggacagggggaagttcagaaggtgtgtccttgaactgaggccctgtgatatggcggcctgcagtggtgtgaaacacacaatgtggacgtgcactgacagccttgcccacccccaccatgcagcccctgggcccttgtgctcctctcgcacaatgcatgtgctgtctccatgctggatactggacacactaaactctggggcttgtcctgtgcttgcttagagtgcccagcagaggtttgctgacaggtgatgctctggcttgccccaggactctggcacttccattggttcttcctttccctggagctgaggtttagatgtgcaacctgtggctcaggggagcaagcttacacaagaagtgagggaaggatgtttagcagtggctggtgcccatgaagaggagattggccagtgagaagctgaggcctatgcagacatctctggagccagagagaacaacaggcaggggcccacttggggccttcccccttgtgggggtcgttttttttttttcttttcttttttttttttttttttttttttttttaagataaaattgttcaaagccaca

SEQ ID NO: 45325 - DNA, 5536 bp, Homo Sapiens
cactccagcctgggcaacagagtgagaccctgtctaaaaacaaacaaacaaaaaaaaatgtggtaagatacccatcatatgaaattcaccattaaaaaatagcagggagcatcgtgaatgcgaagtattgatgaggatgatggtgatgttccagaaccttctctgacaccagcctggcgcccccccccccccccagccttacctttcctggcttcatggtgctcatcatactgtactgcaaatgctggtttcctccttctcgccagctagacccgtggtaccccacagggagggaatggcgactcacccaccaggcgcttaataagtgtttgttggccagtggacctcctacgctccctggggagagggactgggactgggactgggactgggacgtgtgtacacacctgcagctacaagactcggtggggagggtgcacagagcctcgaccctgtaagagaggcgatcgggctgaggaagacggggcactggggctggatggatgggacggacatgtggagagggtgggttcgtggatttgttcacccgttcatttattggtttctatgcatccatccatctttcacgccttgagcgtgcgttctgggcagggcctgtaatgggcaccgaatgagtaacatatcgtctctcccttcaaggtacacgcagcctgggtgggtgaggggagagacggtagggtgacatgggaacagtttggggtttgggaagcgctcttgttaaaaattcaaactttgggtcccctctcagatttataaacctaaacgtttgctggtggacctaggactccgcgtatccaggcaggatcctccgctgattggggtgcacgatgacgtcagaacacgtggataacgtgataacttgtgggccaggggctttggaacctcaaagaatgtgataacttttgggtcaggggctttggaacctcaaagacctccgcctgggagatcggggacagctcccggaggaggtgacatctgagtgttaaacacatccgtgacaggcaatgagaaaataaggtgggtccgctgtgctgatcggccctaggggccgcggcggctgtcccggccgggcagcgtcgccttccgaggtgtcttggcctgcggggcactcgtagcccgccgctttcccaggtgaggcacgtcgtcgcccagcgacccaggttggagtccccgcttcagccgccgcggcggatgcggcggccaggcttctccgggccagggcagcgttgcacgtgtggccccgctgggccccgagcagctgcggcaggtcctgaagcgggtgacgaaggcgcagctgctgccgccgcggcccatcaggccgccctccagcgggaccctggcgccgagcccccgtgcccgccacgcctgctgccgccccaggtgaggctccgggagcgacgtggggaaactgaggcccggagggggccgaggccccgcggcggggttagctgcttggccggggtggccagtatccggccccagtcaagactcagggtgtcccgaagctgagccccttagggacggcgttcggcccccacctgccaccaccctggcgttttcaccccaggagcctcacttgaggagccgatgctcacgctgggccctctgcctgggacgccgtcgtgccctctctgcctccacagccctgcccggggctcccctgtgctgcctagctcgtctgacacgcctttgaccactcgttcagcctctgtggggcactcagagacggggttgcccgcactcccacctaagtgcaggaggtgcggccttcaacacactcgaagaacgaacatcaggcaggttctgggagggacagggggccgctttagagtgggtgggcccgtaggccagacgctgcccctgagacctgaatgaattaaaaggaaccaactgagcttttcaggtctcaggcacagcaagtgccacggcccagcattttcttctcttcattgctgcttctcagcattttctttctctctctctctctgtctctgtcactgtttttgcatacagatactatgcttttggggtgggtactctcattgtccttccaggggtcctacacggcgtctgtaaaattccatctcatttcattgctggcgctgtaaataaaattagtcttaacccaaaattgccaaaagaagagggctttttccactagaagagatgcgttagagaatagaatcagcgatcttcactcctgagttttttcgacttcactcgtgattttagctgcctggggttgttgtatccagttcatcatcaagagtggagagttgtcttgctaaggtttaggaaggcaagtatgattctgcccaaatgccacactatctagaggtgtgaccttgggcaactcgacctttttggactgtggtctgggtccgaaggctgcaagacgccatcccgggacagccatctgctgagcctctgctctgtgccgggcagtgttctgggttgcttagctcgcagtagtgtttttgtaccagcattttgcagggaggttgagtggctttgtccaagatccctcaggtgtggctgctctccagagcccttgttctccccagcacaccctgctgtatgtggccacagctttttgggtttggaatggagtaaaaaatgacatacttttcataaagtaaaagcaaacttagtcaagatcaggcagcatgatgggacttattctgtagctaatctgatggagacgtataaattctacctccaataatgtacctttgtagcacattctgctaatactttttcagccccagctgtgtcgtggaagccacgaagtcaaaccggatgtgtactttgcccctcagtagctgatgaactaacaggagataaaacatgacccagatacctgctaatcaaggcctgaaagctagtgatgaagaactaaatgtagttagagaaagggagattgtttctggccgaggaaatcacaagcagctttgttgaagaagtggtatctgaactagatttgaaagggtgagtctgagttgaaaatgcagaagaggagaggcaggttctggagcaggtggcggggtgcatttcaacaaccacagcagactgcccagtggttcgctgtgggggatggtgtggatcagaagcacagaccagtggacacacttgggtcagatggaggcccctgtctctccgcatcttccctcttcccaccccccagaaatgtccagttccatccaacatgccaaccccttttcatgcatccatgcatgtacacatttttctttgtactcagaatgccctacctggcaaaaattcccagccttcaaaacgcccctcagagatcactgcttctggtctgttctgcctctttattgcacctgttgtaccatgatgacatttttcccgtctgcctcacctgtctgcattccttagggaaacttgtctgccttcgaaatcgtcagcggagcttttgaaagggcagatcgggtctccgacccaggagatcgattcagcaggtctgcggggactgaggcatggcagggaaactgcccaccatctcaagggtgaggctaggagttggctagtgtgtatgtattccatccagaaatatttagtaaatgttcaccaaacaaaataaaaacacacaagaaagcatgaggcgtaatacccacggggtaagccagtcaggatagaggatgaatacattattaggccggctttgctgctgtggttatcctaaaacaatagggtttaggttgtgtgtctgtgtgtatatgtattttgttgttgttttggggttttgttgagacaaggtgttgcattctcacccaggctggactgatcacggctcactacagcctcaaactcccagactcaaacgatccttccccctcagcctcccgagtatctggggctacaggcatgtaccatcaagcctaattttaaaatgttttgtaggcggggctcggtggctcacccctggaatcccagcactttgggaggcggcggcgggtggatcacctgagatcaggagtttgaggccagtctggccaatgtgatgaaaccccgtctctactaaaaatacaaaaattagccagtcacggtggcgcatgcctgcaatcctagctactagcgaggccaagtcaggaaaatcgcttgaactcgggaggcagaggtttcagggagccaagaatgcaccactgcagtccagcctaggcaacagtgagactctttgttttgggtttttgtgtttttttttaacattttgtagggacagggtcttgctctgttgcccaggctggccctgaactcctggcctcaagcaatcctcccacctcagcatcccaaagcactgctactgcaggtgtgatttgtgtttggcccttagagagagattctgtgtgattggtagtaaaatgaaacagacatcgttcttgaaggatatgcacagccaatctagttgtcatttgatttgcacgtagcccaggaatggggactcccagggttgtggtgccacctcggtacacttgacctctgttatttgtactagtgtataacaagagccagacgagagacacactccagcctgatctcagtgagggtctttattctgtcctgtttgacatttttattgactttctactgtttgagggtcacaccagaaggttgagtccaaagagggccagttggtggtcccaaataagtggttctcaaccgaggacagttttgccccacaaggggcacttggcaatatcttgtcaggactcgggatcactactagcatctagtgggtagaggcagagatgctgctgggcatcctccagccacccatgtcaaaggattatgttctgaaatgttggttgtgaaatcatgctctggatgacgaggtttgcctctttttctccctggaggaaaatgctcattatttctgctctgtgagggcaggagccttgtttcttttgcttcctgaccttctcccctaagctgtatgagaactgtttctctgacacctgtagcagtgtctcatgcacatggtcagtactcaataaatatttgtgggatgttgtcgaaggtagctctcccctttggtaggtgttttgctattacagacagtgctgccttgaacctcatagaacataacatctttatggccatctaagtttttttaattttggaatccaggaagtagaattactgggtcaaaaagcacatgtatttgaaattttgttagatatatttgtaaaaagttgttgaggatattcagcccggccgggcacggtggctcacgcctgtaattccagcacttcgagaggctgagtggggcagatcacttgaggtcaggagtttgagaccagcctggacaacatggtgaaaccctatctctactaaaaatacaaaaattaaccaggcgtagtagcacgtgtctgtaatcccagctacccgggaggctgaggcaggagaatcacttgtacctgggaagcgcaggttgcagtgagctgagatcatgccattgcactccagcctggacaacagagcaagaccttctctc

SEQ ID NO: 45326 - DNA, 3305 bp, Homo Sapiens
tgcattttccagggtccacacttgtgattctcaatggagagtgaaaacgcagattcataatgaaaactagcccccgtcggccactgattctcaaaagacggaggctgccccttcctgttcaaaatgccccaagtgaaacatcagaggaggaacctaagagatcccctgcccaacaggagtctaatcaagcagaggcctccaaggaagtggcagagtccaactcttgcaagtttccagctgggatcaagattattaaccaccccaccatgcccaacacgcaagtagtggccatccccaacaatgctaatattcacagcatcatcacagcactgactgccaagggaaaagagagtggcagtagtgggcccaacaaattcatcctcatcagctgtgggggagccccaactcagcctccaggactccggcctcaaacccaaaccagctatgatgccaaaaggacagaagtgaccctggagaccttgggaccaaaacctgcagctagggatgtgaatcttcctagaccacctggagccctttgcgagcagaaacgggagacctgtgcagatggtgaggcagcaggctgcactatcaacaatagcctatccaacatccagtggcttcgaaagatgagttctgatggactgggctcccgcagcatcaagcaagagatggaggaaaaggagaattgtcacctggagcagcgacaggttaaggttgaggagccttcgagaccatcagcgtcctggcagaactctgtgtctgagcggccaccctactcttacatggccatgatacaattcgccatcaacagcactgagaggaagcgcatgactttgaaagacatctatacgtggattgaggaccactttccctactttaagcacattgccaagccaggctggaagaactccatccgccacaacctttccctgcacgacatgtttgtccgggagacgtctgccaatggcaaggtctccttctggaccattcaccccagtgccaaccgctacttgacattggaccaggtgtttaagccactggacccagggtctccacaattgcccgagcacttggaatcacagcagaaacgaccgaatccagagctccgccggaacatgaccatcaaaaccgaactccccctgggcgcacggcggaagatgaagccactgctaccacgggtcagctcatacctggtacctatccagttcccggtgaaccagtcactggtgttgcagccctcggtgaaggtgccattgcccctggcggcttccctcatgagctcagagcttgcccgccatagcaagcgagtccgcattgcccccaaggtgctgctagctgaggaggggatagctcctctttcttctgcaggaccagggaaagaggagaaactcctgtttggagaagggttttctcctttgcttccagttcagactatcaaggaggaagaaatccagcctggggaggaaatgccacacttagcgagacccatcaaagtggagagccctcccttggaagagtggccctccccggccccatctttcaaagaggaatcatctcactcctgggaggattcgtcccaatctcccaccccaagacccaagaagtcctacagtgggcttaggtccccaacccggtgtgtctcggaaatgcttgtgattcaacacagggagaggagggagaggagccggtctcggagaaaacagcatctactgcctccctgtgtggatgagccggagctgctcttctcagaggggcccagtacttcccgctgggccgcagagctcccgttcccagcagactcctctgaccctgcctcccagctcagctactcccaggaagtgggaggaccttttaagacacccattaaggaaacgctgcccatctcctccaccccgagcaaatctgtcctccccagaacccctgaatcctggaggctcacgcccccagccaaagtagggggactggatttcagcccagtacaaacctcccagggtgcctctgaccccttgcctgaccccctggggctgatggatctcagcaccactcccttgcaaagtgctcccccccttgaatcaccgcaaaggctcctcagttcagaacccttagacctcatctccgtcccctttggcaactcttctccctcagatatagacgtccccaagccaggctccccggagccacaggtttctggccttgcagccaatcgttctctgacagaaggcctggtcctggacacaatgaatgacagcctcagcaagatcctgctggacatcagctttcctggcctggacgaggacccactgggccctgacaacatcaactggtcccagtttattcctgagctacagtagagccctgcccttgcccctgtgctcaagctgtccaccatcccgggcactccaaggctcagtgcaccccaagcctctgagtgaggacagcaggcagggactgttctgctcctcatagctccctgctgcctgattatgcaaaagtagcagtcacaccctagccactgctgggaccttgtgttccccaagagtatctgattcctctgctgtccctgccaggagctgaagggtgggaacaacaaaggcaatggtgaaaagagattaggaaccccccagcctgtttccattctctgcccagcagtctcttaccttccctgatctttgcagggtggtccgtgtaaatagtataaattctccaaattatcctctaattataaatgtaagcttatttccttagatcattatccagagactgccagaaggtgggtaggatgacctggggtttcaattgacttctgttccttgcttttagttttgatagaagggaagacctgcagtgcacggtttcttccaggctgaggtacctggatcttgggttcttcactgcagggacccagacaagtggatctgcttgccagagtcctttttgcccctccctgccacctccccgtgtttccaagtcagctttcctgcaagaagaaatcctggttaaaaaagtcttttgtattgggtcaggagttgaatttggggtgggaggatggatgcaactgaagcagagtgtgggtgcccagatgtgcgctattagatgtttctctgataatgtccccaatcataccagggagactggcattgacgagaactcaggtggaggcttgagaaggccgaaagggcccctgacctgcctggcttccttagcttgcccctcagctttgcaaagagccaccctaggccccagctgaccgcatgggtgtgagccagcttgagaacactaactactcaataaaagcgaaggtggac

SEQ ID NO: 45327 - DNA, 384 bp, Homo Sapiens
atggcgccgaaagcgaagaaggaagctcctgccccttctaaagccgaagacaaagcgaaggctttaaaggccaaaaaggcaatgttgaaaggtgtccacagccacaaaaaaaagaagatccgcacgtcacccaccttccggcggcccaagacactgcgactccggaggcagcccaaatatcctcggaagagcgcccccaggagaaacaaacttgaccactatgctatcatcaagtttccgctgaccactgagtctgccatgaagaagatagaagacaacaatacacttgtgttcattgtggatgttaaagccaacaagcaccagattaaacaggctgtgaagaagctctatgacaccaatgtggccaaggtcaacaccctgatt

SEQ ID NO: 45328 - DNA, 366 bp, Homo Sapiens
atggtagtttatgcctataatcccatcactgtgggaggcaggaagatcggccaggagttccaaaatattctgtatcttgattgtggtggtagttacacaactgtaaaatttgtcaaaattcaaagaactatacacctaaagggaagacttctactgtacgaagtatacctcataaataaccaaccaaaaaacctctgttctcattttagttttcctaccacttatattaaaaaagagaggctttggctgggcccagtggctcacacctataatcccagcactctgggaggccgaggtgggtggatcacccgaggtcaggagttcaagaccagcctggccaacatggtggaaccctgtctctactaa

SEQ ID NO: 45329 - DNA, 1051 bp, Homo Sapiens
ccgccccgcgctctggcggctcctcccgggcgatgcctccgctctgggccctgctggccctcggctgcctgcggttcggctcggctgtgaacctgcagccccaactggccagtgtgactttcgccaccaacaaccccacacttaccactgtggccttggaaaagcctctctgcatgtttgacagcaaagaggccctcactggcacccacgaggtctacctgtatgtcctggtcgactcagccatttccaggaatgcctcagtgcaagacagcaccaacaccccactgggctcaacgttcctacaaacagagggtgggaggacaggtccctacaaagctgtggcctttgacctgatcccctgcagtgacctgcccagcctggatgccattggggatgtgtccaaggcctcacagatcctgaatgcctacctggtcagggtgggtgccaacgggacctgcctgtgggatcccaacttccagggcctctgtaacgcacccctgtcggcagccacggagtacaggttcaagtatgtcctggtcaatatgtccacgggcttggtagaggaccagaccctgtggtcagaccccatccgcaccaaccagctcaccccatactcgacgatcgacacgtggccaggccggcggagcggaggcatgatcgtcatcacttccatcctgggctccctgcccttctttctacttgtgggttttgctggcgccattgccctcagcctcgtggacatggggagttctgatggggaaacgactcacgactcccaaatcactcaggaggctgttcccaagtcgctgggggcctcggagtcttcctacacgtccgtgaaccgggggccgccactggacagggctgaggtgtattccagcaagctccaagactgagcccagcaccacccctgggcagcagcatcctcctctctggccttgccccaggccctgcagcggtggttgtcacaccctgacttcagggaaggtgaaacagggcttgtccctccaactgcaggaaaacccttaataaaatcttctgatgagttcta

SEQ ID NO: 45330 - DNA, 1556 bp, Homo Sapiens
accattagccccgctgcgcgcttgcgctctacgcccaagggagccgggctgcagagctggagaaacttccgcggctacgggtgcagttgccttcggttcccggttccgggccgacacccgcgcagggctgagacaggtgtctgcgctccccgcaatgggctgctccagcagcgccctcaacaaggccggcgacagcagcaggttccccagcgtaacttcaaatgagcatttttcaactgcagaagaaagtgagtcctgctttgcccaaccaaagccacatgcactgggaagagaatctactgttgatggcaatgtacaaagggaaagccgtcctcccttacaaaagctcaaggtttcagcagagcctacagctaatggtgttaaacccctccaagaacagcccctggccaaggacgtagcccctggaagggatgccacagaccaatcagggtccacagaaaagactcagcctggagagggactggaggaatctgggccgcctcaaccaggtggcaaagaggatgccccagcagcagaaggaaagaagaaagatgcaggagcagggacagaggccgagtctctaaaaggaaatgctgaagctcagcctttaggaccagaagccaagggtcagcctttgcaggcagcagtagagaaggactctctcagagcagtggaggtcactgagaatccacaaactgctgcagagatgaagcctctaggaacaactgagaacgttctgactctgcaaatagctggagagctacaacctcagggcacagtgggaaaggatgagcaggccccgcttctagaaacaatttccaaagagaatgaatctccagaaatattggaaggaagtcagtttgtggaaacagctgaagagcagcaacttcaggcaacattgggaaaagaggagcagccccagcttctagaaagaattcccaaagagaatgtaacaccagaagtattggacagaagtcagcttgtggaaaagcctgttatgaatgatccattccataaaactcctgaaggtccaggaaacatggagcagattcaacctgaaggaatagttggaagcatggagcatccagcacgaaatgtagaggcaggagcatatgtggaaatgatcaggaacatccatactaatgaagaggaccaacgcattgaaggtgagacaggggaaaaggtggaaacagacatggagaatgagaaagtgagtgaaggggctgaaaccaaagaagaagaaacaggagaagtggtggacctttcagcagccacatagatagaagagtgaaccgacacagtgtgttatcatagaggagacaaaaatggtagtgaagcttgtggttatgtatcttatctttctacatttacatgttttctgtaaggagtgtggttatagagagactgttggaaccatgagaaggatgtttctgtgttcttgattatattgttctgcaaaactgctaagccatgaacagttttcttagctacttagaatggttatacatttaaaagtataaaaaccaaagccaataaaaatgatgtgattatttaag

SEQ ID NO: 45331 - DNA, 936 bp, Homo Sapiens
atggagacaaagaattatagcagcagcacctcaggcttcatcctcctgggcctctcttccaaccctaagctgcagaaacctctctttgccatcttcctcatcatgtacctactcactgcggtggggaatgtgctcatcatcctggccatctactctgaccccaggctccacacccctatgtacttttttctcagcaacttgtctttcatggatatctgcttcacaacagtcatagtgcctaagatgctggtgaattttctatcagagacaaagattatctcttatgtgggctgcctgatccagatgtacttcttcatggcatttgggaacactgacagctacctgctggcctctatggccatcgaccggctggtggccatctgcaaccccttacactatgatgtggttatgaaaccatggcattgcctactcatgctattgggttcttgcagcatctcccacctacattccctgttccgcgtgctacttatgtctcgcttgtctttctgtgcctctcacatcattaagcactttttctgtgacacccagcctgtgctaaagctctcctgctctgacacatcctccagccagatggtggtgatgactgagaccttagctgtcattgtgacccccttcctgtgtaccatcttctcctacctgcaaatcatcgtcactgtgctcagaatcccctctgcagccgggaagtggaaggccttctctacctgtggctcccacctcactgtagtggtcctgttctatgggagtgtcatctatgtctattttaggcctctgtccatgtactcagtgatgaagggccgggtagccacagttatgtacacagtagtgacacccatgctgaaccctttcatctacagcctgaggaacaaagatatgaaaaggggtttgaagaaattaagacacagaatttactcatag

SEQ ID NO: 45332 - DNA, 267 bp, Homo Sapiens
ttaagaggctgagagaaggctgtagagacactgtaataagtgcttgggcatgagaaattaggaagaccacagttacgagtaatgaaatgcggaagccgatgcaaagctactgcccccatttgtttagcagaaggcaagataggaggcctctgacaatctggggtctctggcagcacaagcgtgttcgtaaatatctgggtaacgtcacacattccccatgcattggttttcatgagtggtttcagtgagtttttgggcaagtctgat

SEQ ID NO: 45333 - DNA, 921 bp, Homo Sapiens
gacgaaaatgcaacattgctgacagagtttgttctcacaggacttacatatcaatcagagtggaaaatacccctgttcctggcattcttggtaatatatctcatcaccatcatggcaaatcttggtctgattgctgtcatctggaaagactcacaccttcacattccaatgtacttattccttgggagtttagcctttgtggatgcttggttatcatcctcagtgacccctaagatgctgatcagctttttagctaagagtatgattatttctgtctctgaatgcaagatacaatttttttcctttggaatcagtggaaccacagaatgttttctcttggcaacaatggcatatgatcgctatgtagccatatgcaaacctttactttatccagtcattatgaccaatggactgtgtatctggctattagtcttgtcatttataggtggctttcttcatgccttaattcatgaaggtattttattcagattaaccttctgtaattccaacataatacatcacttttactgtgacattatcccattgttaaagatttcctgtactgacccttctattaattttttaatgctttttattttgtctggttcaatacaggtattcactattttgactgttcttgtctcttatacatttgtcctctttacaatcttaaaaaaaaaagccaaagacataaggaaagccttttccacctgtggagcccatctcttatctgtttctttatactatggcccccttctcttcatgtatgtgcaccctgcatctccacaagcagatgatcaagatatggtggagtctctattttacactgtcataattcctttcttaaatcccattatctacagcctgagaaataagcaagtcatagattcactgacaaaaacattaaaaggaaatgtttag

SEQ ID NO: 45334 - DNA, 504 bp, Homo Sapiens
atggagcgatttgtagtaacagcaccacctgctcgaaaccgttctaagactgctttgtatgtgactcccctggatcgagtcactgagtttggaggtgagctgcatgaagatggaggaaaactcttctgcacttcttgcaatgtggttctgaatcatgttcgcaagtctgccattagtgaccacctcaagtcaaagactcataccaagaggaaggcagaatttgaagagcagaatgtgagaaagaagcagaggcccctaactgcatctcttcagtgcaacagtactgcgcaaacagagaaagtcagtgttatccaggactttgtgaaaatgtgcctggaagccaacatcccacttgagaaggctgatcacccagcagtccgtgctttcctatctcgccatgtgaagaatggaggctccatacctaagtcagaccagctacggcatatcttcctgatggatatgagaatgagaatcaactcctcaactcacaagattgttgactag

SEQ ID NO: 45335 - DNA, 1462 bp, Homo Sapiens
cccagcaggcgactagtgctcagccccgcccggcgggggcggggtctgcggcgtccgtgggcgccccccagtggcggcgggtggcgccgcacggagttcgccgcttgcaccgggaccgatgccatctgagacgcacgcgatgctggcgacgctggcgagggtggcagctctgcgcagaacctgcctcttctccggccggggcggcgggagggggctgtggactggccgcccgcagtcagatatgaacaatataaagccattggaaggggtaaaaattctggatctaacaagagtcctggcgggaccttttgctactatgaatttaggagatcttggagcagaagttataaaagtggagagaccaggagctggtgatgatacacgaacttgggggccaccttttgttgggacagaaagtacatattatctcagtgttaaccgaaataaaaaaagtattgctgttaatatcaaggatccaaaaggggtgaaaatcatcaaagaggtacacacaccctgtgtggtgctgaatatgtttatttttgttgttttagggtatggtcagacaggtccaatttctcagcgagctggttatgatgctgttgcctcggctgtttctggtctgatgcacatcacagggcctgagaatggagatccagttcgcccaggagtagctatgactgatcttgccactggcctgtatgcatatggagctattatggctggattgatacaaaaatacaaaactgggaaaggactgttcattgattgtaacctactgtcatcccaggtggcgtgtttgtctcacatagctgcaaattatcttattggtcaaaaggaagcaaaacgttggggtacagctcatggcagtatcgttccttaccaggcttttaaaaccaaggatggctatattgtagttggagcaggaaataaccagcagtttgccaccgtctgcaagatcttggatttgcctgagttgattgataattccaagtataaaactaaccaccttcgggtacacaatagaaaagagcttattaaaatattatctgaacggtttgaagaagaactgaccagcaagtggttatatctttttgaaggcagtggagtcccgtatggcccaatcaacaacatgaagaatgtatttgcagaacctcagaacgctgtctctggcttccaaagcctgctgcattccttggcccatggccccttccttcatcttcaaggatcagcaagggtattacacaatggcctcgttatggagatggagcatccaactgtggggaagatttccgtcccaggcccagctgtgagatacagtaagttcaagatgtcagaggccaggccgcccccgctgctcgggcagcacacaacgcacatcctgaaggaggtcctgagatacgatgacagggccatcggggagctgctcagcgctggagtggtggaccaacatgaaactcactga

SEQ ID NO: 45336 - DNA, 2633 bp, Homo Sapiens
gctgagctgcgcgggatgctgagctgcgcgggatgctgagctgcggggggatgctgagctgcgggggatgctgagctgcgggggatgctgagctgcgggggatgctgagctgcgggggatgctgagctgcgggggatgctgagctgcgggggatgagcagcgtgagtgagcggtcccccagggagggatgctccgagggcgagtgcaggaggtcccttgcattcctccttcggaatggcctccccagccccagcaggactgcgggttggaggggagagcaaggggcctcttggacagtggaagcgctttcagcaacagaatggctggacagaggctgcgtccccccaccagctgccggtcctgggatccctgcccgcctgggcagcgctggggcagagccacacggagccttgggccaggaacaaccccttgccggtggggcctgtgggactgcagggcctggggtctgggaggcggccttgtccctgccgctgcagccacgagctgaggtctgtgttgggagggtgagccccagctgaggtctgtggggggagggtgagccccagcacctgcgaacggccaccgttctctgctcggctccttttcctgcccgtctctttctccctctgagcaaggaccaccatcccgtcagccgaccggtcctctggccccaccgggccttggcgtttgctcctccctcgccgggagctgctgcctctgctcctccaggcccaggcagtgcatccgttctggcaggagactgtggtgggactcacctgagctgcaagttctgcttcccaagggagggctgtccccggcctgccagctgccctccccagaagctgagctcaggaagacgggtaccagcgtgtgaggaaggggccccagaaggagcgcgtgtctgcggggagagggagcgctaagccaccacaccaggtgggcagcagtgctgaaggggcacccggcttcccctgatcgtttcttttccctgtggcccaatctcccacccccatctcaccctgtcctggagccagccttcggggaggctgggcagggagcggggtcagaaggcgtctgccccaggcctgggtcctagggcctgtccttggagggaccacacatgcctggagagaggctccagtggccggctccaggtgggcgctgatgcagaaggcccaaggaggaccctgccacatgttgcagggacccgtgggtgctgtgcacaacctgcctcatccatccccgccgaagaagagggggtgctcatggctggctgatttgtgagggggccacgtaagcagctcttgcagggcgtggcttgtgggtttgggagacagacaaatgggcagtcagacagaggcgtggacaggatgccctctctgctgtctgccgcccaggcctctggaggtgttctgggatgggtctaaggaaaactcaacaattcttgagcgaataatgcccgggcaaccagctccctgcatttcataagggccggaattgccatccaaaaggttattttgggtgactgtggtcagtcatcattccaaagcttttccctaaactcagagccaggtgtggcctccagggctgaggagcctgagaggtgggactggcaggcagggctgtggccccagcgtggcacggaagcagccaggaaacactggctctggggggctgtggtgggaggaggtcctctgcagggacccctgtggaccgaggcttttggaggcaagtggacagtaggtgtctcttagacccctgcgggggcacacgaccaggaccacaaggggcccacacacgcacagtggcccggagccaaccagcaaaccccaggaccttagatacagcccggcgagtgagttaggattgctccggctagctgtgtgatcatccacagtgccagagaacagtgcctcgagaccacagtggcagctggcttacttctcgtgtgaacaggaaacccagaggtgggcgaccctccagtggtgtgacgactccatctgtcaccacagccccgggctcccgccttcctgctccttgggctcacagctctgtgcttgaggcaggtctaagacaggctggagtgcggccatcatcccagcactgatggatagaagaaaatgaagctgggatgagaaacgcggggctttccctggcagtctggccctgtatggaggccccttcccagagtgcgtcccactggcttcctcttctatcttgcagtcacacctagctgcaaggcgggaagatgtcacaggtttgaaagggccgaaaagaaggttcagaaatgaaaactatgacaaggcgcttgccagcattagctgcagagtcgacagagacgaggagataatgtgtgaagtggtagaaaaatgagaagagattgttcagtgtgcagggcagagagatggcgagatgggagctgtgaggagagccgggtggccgggagcctcccgggggcagatctgtgctgaggttttgcagggatcagctggctgtctccgcccctgcacgtcccggctccttctcagctcaccctttcttgttgtgccatgacaggtggctgccacgcacagcaatgctctgtgcctgtgtgctccagcctcttcctatgtgtgtaacttcaataaaaccaa

SEQ ID NO: 45337 - DNA, 896 bp, Homo Sapiens
ccgtgggggagtcgtgcgcaggcgcggacagcgctgcttccgcggcggttggggtggtggggccccgggcggcgttgaccatgacccagcagggcgcggcgctgcagaactacaacaacgagctggtcaagtgcatagaggagctgtgccagaagcgggaggagctgtgccggcagatccaggaggaggaggacgagaagcagcggctgcagaatgaggtgaggcagctgacagagaagctggcccgcgtcaacgagaacctggcacgcaagattgcctctcgcaacgagttcgaccggaccatcgcggagacggaggccgcctacctcaagatcctggagagctcccagactttgctcagcgttctcaagagggaagctgggaacctgaccaaggctacagccccagaccagaaaagtagcggcggcagggacagctgaccagaccacgggcagggcctgcctccgtgtgcccctcagctcagccccagcaagtgtgtgctcagagcatctttgttcttcacggcagcagctaccttccctcactgtctcaggtgccgagaggggcaggtgccagcctccactggcatcagtgacaagcccagggcacagcccacccgggggtcctcgcttcatgctcacacaggctatggggatggtgggctccaggtcagctctgcaaggggcttgtctctgtggcacccacactcctgccctgccagggaggctctggttgtctgagcaccatgggggccccctcaccttgtccctcctcagccagcagaggcccagggcaagggacaggaggacaggggttctccttcaccacagaacccaaacctcaggtctcacccctgtggcctgtgattatgaataaagattatctttgtaaagatc

SEQ ID NO: 45338 - DNA, 1365 bp, Homo Sapiens
caaaaatttgagtccttcgccaatccggttactgttgggtaggccttcagcatacttttgtccaatcagcttcagactctcactataaataagcggctagctttctctttctcctgaagtgaatctagctctgaaggcatggcgcgtacgaagcagactgctcgcaagtccaccggcggcaaggctccgcgcaagcagctggccaccaaggcggctcggaagagcgctccggccaccggcggtgtcaagaagccccatcgctatcggcctggtacagtggctctccgcgagattcgccgctaccagaagtccaccgagctgctgatcagaaagctgccttttcagcgtctggtgcgtgagatcgcgcaggacttcaagaccgacttgcgcttccagagctccgcggtgatggcgctgcaagaggcatgcgaggcctacctggtggggctctttgaggacaccaacctgtgcgccatccacgccaagcgggtgactatcatgcccaaggacatccagctcgcacgtcgtatccgcggcgagagggcttgagtctcaaggactcactgattacatacccaaaggctcttttcagagccacccacatgcgcgctgaaaagatctgtttctctcaggaattcttcctggtacttgttttgcctgtagtagatagggcccatttccagacgttatacaatctgtttcgtaagactcagcctatccctttttgaatgctaattttgggagtcttaacatctaataatgtccggcatttttccgtaagcattgagtgtagccaaaagttccttcgtgtattgctctcccatctccgcagcccggttttgaccggatggtgcttctaattttctgctaacctgtactgtggtgtgtgtatatttcttgccaacacgccagaaataaaactaaggttgtactgaagttggaaaaattcaggttaatgtagctcatgctggctaaagtgaaacgttctctccccgccccccgttcctaagcagtgttaagttttctttgaattttttcaagccggattttgggcctgcttaaaccacttaaatgtagttaatgacagatggtttgaggtttaaaagtcttctggagaaagcccgccagagaacattccctttgaagccccatgtaaaaatacgtgtgggagagaaagtgttttctctgacttctgctgacagtggctaaaactctgaactgtcaggagtattcaaaataagactgccttgtaggtaagcctgtggtagtttttttgagcacaggataaaatacttgagtctttgcttaaatgttactttctcaatgaggctttgtatgactaaataaaatctgtataatccccac

SEQ ID NO: 45339 - DNA, 480 bp, Homo Sapiens
ctgccagatcaaattgaaaagcttaccaagcatcttccaccaagaacaattggctatccacggactcttgtttatggtactggaaaacatggcacaagcttgaaaactctttatcgaacaatgacaggtttagacaccccagtgctgatggtaattaaagacagtgatggacaggtttttggtgcgttagcagctgagccatttaaagtgagtgatggcttttatggtactggagagacctttgtttttacattctgtccagagtttgaggtctttaagtggacaggagataacatgttttttatcaaaggagacatggattcactagctttcggtggtggaggaggagaatttgccctttggcttgatggagatctctaccatgcaagaagccattcttgtaaaacgtttgggaatcgtacactttctaagaaggaagatttctttatccaagatattgaaatctgggcttttgaataa

SEQ ID NO: 45340 - DNA, 333 bp, Homo Sapiens
tcagaggcaagcactccccaggacaacccatccagtgcccagcaggcaacagctcaccaacctaacactttaacattggatcgcccctctaaaaaagcacctgtacaatggatacccccaccagacaaacgcagaaacagtgaactctttcagaccctcatcagcaagtcccgggaaacaaatctgtccaaaaagaaagtctgtgagaagctaagtgtggaagaagaaatgaaaaagtgtattcaggattttaaaaaaatccacattccagattattttccagagcgcaaacgccaatggcaatctgaactgttgcagaagtatgggttatag

SEQ ID NO: 45341 - DNA, 504 bp, Homo Sapiens
gcagagctgggatataaacacccaggtctatccaattctctaagcccgtttttcttgctggggatgggggcacagataggaaggggaaaattaatcttttgttcactttttgaaaggatgcatttgcatagtccaaaactcagaaggtacagaagggaagtatctcccggccatcttctctctcctgaattttttatgaacccttgcagacatgttttatgtatattatcacagtatgcacacacacacacacacaacacacacgtttcctctttctacagaaatggtaacatactaaaggtactcttctgtaccttcacagtacaagtacccaataccccacctaggactaggacttgcccaagaccacagccaggtaagggcggggcaggcacttggcctccaagctctgcgtccagtgctcactccccacagtaccccccaactcacccacagcagctgactcggccccaggctgccactaaaaaccatacaaaaaagtag

SEQ ID NO: 45342 - DNA, 1003 bp, Homo Sapiens
cgggaagcgccgggcgagcccactgtgcggccgtcgtgggggaagcgaaggttcctgattccacctacctcctaagtgaaggcttccgtccctggagaggaggcggcgccctgtatcggccttcgtcctccgcgggtgtgctagcgttgggacggtcctttgttgccgcgaggggtaggagtgggcgtggcggagccagctccgttcggaacactcccgggccgacccgactcgctcatcctgcaggagctgcggcgccaagatgagtggagaggagaacccagccagcaagcccacgccggtgcaggacgtacagggcgacgggcgctggatgtccctgcaccatcggttcgtggctgacagcaaagataaggaacccgaagtcgtcttcatcggggactccttggtccagctcatgcaccagtgcgagatctggcgcgagctcttctctcctctgcatgcacttaactttggcattggtggtgacggcacacagcatgtactgtggcggctggagaatggggagctggaacacatccggcccaagattgtggtggtctgggtgggcaccaacaaccacggacacacagcagagcaggtgactggtggcatcaaggccattgtgcaactggtgaatgagcgacagccccaggcccgggttgtggtgctgggcctgcttccgcgaggccaacatcccaacccacttcgggagaagaaccgacaggtgaacgagctggtacgggcggcactggctggccaccctcgggcccacttcctagatgccgaccctggctttgtgcactcagatggcaccatcagccatcatgacatgtatgattacctgcatctgagccgcctgggctacacacctgtttgccgggctctgcactccctgcttctgcgtctgctggcccaagaccagggccaaggtgctcccctgctggagcccgcaccctaagcatcctgctgccttcccacaacattaaactctccttcctcagtg

SEQ ID NO: 45343 - DNA, 955 bp, Homo Sapiens
ttctcgtccctgtgctcagagctctcaagcacccacgatggccttctcaggccgagcgcgcccctgcattatcccagagaacgaagaaatcccccgagcagcccttaacactgtccacgaggccaatgggaccgaggacgagagggctgtttccaaactgcagcgcaggcacagtgacgtgaaagtctacaaggagttctgtgacttttatgcgaaattcaacatggccaacgccctggccagcgccacttgcgagcgctgcaagggcggctttgcgcccgctgagaagatcgtgaacagtaatggggagctgtaccatgagcagtgtttcgtgtgcgctcagtgcttccagcagttcccagaaggactcttctatgaggaacgaacatgatggttaagctaccttcattaagcagcatgaccgcttcctgagctcctgctgccgcatttaggccctgtcagctgtgaggccactggtgctgagtcagagggaaaagctcagaacagccttgagcagtgaagaataaagtgtgactcatctcgtcctgcccacccctcacactggactataaataccctccctgggtctgtgtgctgttattccaaaagatgcgatgaatacccagaactaggctattcatgggctgttgcccagttcaagatctgttgggtcctgaggaagattactattttggctaaattgtttatcattaaaaccagcccagggatgtgtaaacctgcatctggagaataagacatttctttttggttaaatgatattagagaaaaaaactatccaagactgctaacaaataatcttcactttcagttatatccagcaataagttgttttccagaaaagaaagcttggaaacttacccagtttgccttccatttgggacatgactgatgtgcttcagtctttgtataataaatgcatcttcgccactctata

SEQ ID NO: 45344 - DNA, 544 bp, Homo Sapiens
gcaagaattctatcactgaactaccaatgcctttggaagtatccaatattttggttgttttgctacctatgggatcatgcatatcagtacttggaaataaatgatgaaagcagcagctcagccacctgtcctcaatgatgggagggcattcacctctacaggaaagaagacagatggtcaacctgatctatgctgcttgtaagcatggtaatggcacacttcctgtcaaacaagttggtgacattgactaggcatggcttctgggaaaatgtcatgtaagctttgttaccatctgagcaaaatggagatgttccttgactgaaatatttagcatgtgtgtgtgtgtgtgtgtttaatttatgtggccacagttattacatggaagacacatattttaattttggccataaaatatactcaacatcataaggaagcacctggagagctgtgttccttttcctgaggcttccctgttccttgtgataacttacatacttggaattatagagacttaattttggttaaaatctctaatttgtgtgaa

SEQ ID NO: 45345 - DNA, 2255 bp, Homo Sapiens
aaaggcagagaggaaaggcgaggggtgttgacgccaggaaggttccatcttggttaagggcaggagtcccttacggacttgtctgaggaaagacaggaaagcgccagcatctccaccttccccggaagcctccctttgccaggcagaaagggtttcccatggggccgcccctggcgccgcgcccggcccacgtacccggggaggccgggccccggaggacgagggaaagcaggccgggcgccgtgagcttcgcggacgtggccgtgtacttctctcccgaggagtgggaatgcctgcggccagcgcagagggccctgtaccgggacgtgatgcgggagaccttcggccacctgggcgcgctgggattttcagttcccaaacccgcttttatctcgtgggtggaaggagaagtggaggcgtggagcccggaggcccaggatcccgacggatccagggatgggaatgaggagaaggaaaggctgaagaagtgtccaaaacaaaaagaggtggcgcatgaagtggctgtcaaggagtggtggcccagcgtcgcctgcccagagttctgcaaccctaggcagagccccatgaatccctggctcaaggacactctgacccgaagactgccccactcttgcccagactgtggccgcaacttcagctacccttccctcctggccagccaccagcgggtccactccggggagcggcccttctcctgcggccagtgtcaggcgcgtttctcccagcgcaggtacctgctccagcatcagttcatccacaccggcgagaagccctacccctgccccgactgcgggcgccgcttccgccagaggggttccctggctatccacaggcgggctcacaccggggagaagccttacgcgtgctcagactgcaagagtcgcttcacttacccctacctgctggccatccaccagcgcaagcacacgggcgagaagccctacagctgccccgattgcagcctccgtttcgcctacacctccctgctggccatccacaggcgcatacacaccggcgagaagccctacccctgtcctgactgcggccgccgcttcacctattcttccctcctcctcagtcaccggcgcattcactccgacagccggcccttcccctgcgtggagtgtgggaaaggcttcaagcgcaagaccgccctggaagcccatcggtggatccaccgctcctgcagcgagaggcgcgcgtggcagcaggccgtggtggggcgttcagagcccatccctgttttgggaggcaaggatcccccagttcacttccggcactttccagatatatttcaagagtgtgggtgatggcgttcacacaaactggtcagcgtttccctggagaggaagaggcaagatctgctagccctacttttgaagaggaaacttttgaaggaatgaacaaaagaggtaggtgggactaagcatttctgcattccaggactggtggtcagtgactcaaatatctctttgaaaagactgcttctttgaatccttgggttccaagataattaatgggaactggtgccgggcacggtggctcacacctgtgatcccagcactgtgggaggctgaggctggttaatcacttgaggtcaggagtttgagaccagctgggcaatatagtgaaaccccatctctaccaaaaaattagccaggcgtggtggcacatgcctgtagtcccagctactcaggaggctaaggcaagaggatcacttgagcctgggagacagaggttgcagtaagctgagatggctccattgcactccagcctgggctacaaagcaggactctgtctcaaaacaaaaacagatacaaaaactgggaacggggtgttatctttacttcaccacatagcctctcctgaattggtggacctggattcctagcttggctcagtccccactggctgtgtggcctttagcatcacctagattctacaaataacatttttctctatttgttttacacatgtcaatctgcctatccatccctctatccattcatttatccattttattaatgtatttcaaagtaagttgcagacatcattacatttcacttctaaacacttcagcatacagctgagttttatgcaagaaacttaagctctcagctgggtacagtggctcacacctgtaatcccagcactttgggaggctgaggcaggaggattgcatgagattgggagtttgagacgagcctggaaaacagcaagacctcatttctact

SEQ ID NO: 45346 - DNA, 999 bp, Homo Sapiens
gactctccatttcaagtgacaaaactgtactggcttaatgaaaagtgggactttattgcctcagcttctgacatggcagcagaacaaggacagattctcgtgatagccaccgccgctgttggcggattcactctcctcgtcatcctcactttattcttcttgatcactgggagatgtcagtggtacataaaagccaagatgaagtcagaagagaagagaagaaaccacttacagaatgggcatttgcgcttcccgggaattaaaacttacattgatccagatacatatgaagacccatccctagcagtccatgaatttgcaaaggagattgatccctcaagaattcgtattgagagagtcattggggcaggtgaatttggagaagtctgtagtgggcgtttgaagacaccagggaaaagagagatcccagttgccattaaaactttgaaaggtggccacatggatcggcaaagaagagattttctaagagaagctagtatcatgggccagtttgaccatccaaacatcattcgcctagaaggggttgtcaccaaaagatccttcccggccattggggtggaggcgttttgccccagcttcctgagggcagggtttttaaatagcatccaggccccgcatccagtgccagggggaggatctttgccccccaggattcctgctggcagaccagtaatgattgtggtggaatatatggagaatggatccctagactcctttttgcggaagcatgatggccacttcacagtcatccagttggtcggaatgctccgaggcattgcatcaggcatgaagtatctttctgatatgggttatgttcatcgagacctagcggctcggaatatactggtcaatagcaacttagtatgcaaagtttctgattttggtctctccagagtgctggaagatgatccagaagctgcttatacaacaactgacctcttccaaactctaacacttaacctctgctattctgcataa

SEQ ID NO: 45347 - DNA, 402 bp, Homo Sapiens
atggccgaggaaggtattgctgctggaagcgtaatggacgttaatactgctttacaggaggtgctgaagactgccctcatccacgattgcctagcacgtggaattcatgaagctaccaaaggcttagacaagcaccaagcccacctttgtgtgcttgcatccaactgtgatgagcctgtgatgtatgtcaagttggtggaggccctttgtgctgaacaccaaatcaacctaattaaggttgatgacaacaagaaactaggggaaagggtaggcctctgtaaaactgacagagaggggaagcctcataaagtggttggttgcagttgtgcagtagttaaggactatggcaaggagtctcaggccaaggatgtcatcgaagagtacttcaaatgcaagaaatga

SEQ ID NO: 45348 - DNA, 690 bp, Homo Sapiens
atgaaaggagggaaagcgcatcaaacctgtccatttcacaatagaacgtctgtcctcaccggcttagtgatcacgaatgatcctgtctctgattccctgtttgtaaaaggttgttttgaactccaggaaaggtgcctccagaaccccttggagaacttggaattaacttatggctacctattggaagaagacatgaagtgtctctcccagtacccaagcctcggttacctaaagcatctgaatctcagctacgtgctgctgttccgcatcagtcttgaacccctcggagctctgctggagaaaattgctgcctctctcaaaaccctcatcttggagggctgtcagatccactactcccaactcagtgccatcctgcctggcctgagccgctgctcccagctcaccaccttctactttggcagcaattgcatgtctattgacgccctgaaggacctgctgcgccacaccagtgggctgagcaagttaagcctggagacgtatcctgcccctgaggagagtttgaattccttggttcgtgtcaattgggagatcttcaccccacttcgggctgagctgatgtgtacactgagggaagtcaggcagcccaagaggatcttcattggccccaccccctgcccttcctgtggctcatcaccgtctgaggaactggagctccatctttgctgctag

SEQ ID NO: 45349 - DNA, 1719 bp, Homo Sapiens
atggacgcacagacctggcccgtgggctttcgctgcctcctccttctggccctggttgggtccgcccgcagcgagggcgtgcagacctgcgaagaagttcggaaacttttccagtggcggctgctgggagctgtcagggggctgccggattcgccgcgggcaggacctgatcttcaggtttgcatatccaaaaagcctacatgttgcaccaggaagatggaggagagatatcagattgcggctcgccaggatatgcagcagtttcttcaaacgtccagctctacattaaagtttctaatatctcgaaatgcggctgcttttcaagaaacccttgaaactctcatcaaacaagcagaaaattacaccagtatacttttttgcagtacctacaggaacatggccttggaggctgctgcttcggttcaggagttcttcactgatgtggggctgtatttatttggtgcggatgttaatcctgaagaatttgtaaacagattttttgacagtctttttcctctggtctacaaccacctcattaaccctggtgtgactgacagttccctggaatactcagaatgcatccggatggctcgccgggatgtgagtccatttggtaatattccccaaagagtaatgggacagatggggaggtccctgctgcccagccgcacttttctgcaggcactcaatctgggcattgaagtcatcaacaccacagactatctgcacttctccaaagagtgcagcagagccctcctgaagatgcaatactgcccgcactgccaaggcctggcgctcactaagccttgtatgggatactgcctcaatgtcatgcgaggctgcctggcgcacatggcggagcttaatccacactggcatgcatatatccggtcgttggaagaactctcggatgcaatgcatggaacatacgacattggacacgtgctgctgaactttcacttgcttgttaatgatgctgtgttacaggctcacctcaatggacaaaaattattggaacaggtaaataggatttgtggccgccctgtaagaacacccacacaaagcccccgttgttcttttgatcagagcaaagagaagcatggaatgaagaccaccacaaggaacagtgaagagacgcttgccaacagaagaaaagaatttatcaacagccttcgactgtacaggtcattctatggaggtctagctgatcagctttgtgctaatgaattagctgctgcagatggacttccctgctggaatggagaagatatagtaaaaagttatactcagcgtgtggttggaaatggaatcaaagcccagtctggaaatcctgaagtcaaagtcaaaggaattgatcctgtgataaatcagattattgataaactgaagcatgttgttcagttgttacagggtagatcacccaaacctgacaagtgggaacttcttcagctgggcagtggtggaggcatggttgaacaagtcagtggggactgtgatgatgaagatggttgcgggggatcaggaagtggagaagtcaagaggacactgaagatcacagactggatgccagatgatatgaacttcagtgatgtaaagcaaatccatcaaacagacactggcagtactttagacacaacaggagcaggatgtgcagtggcgactgaatctatgacattcactctgataagtgtggtgatgttacttcccgggatttggtaa

SEQ ID NO: 45350 - DNA, 2293 bp, Homo Sapiens
cctaccggtccatagtgtcagagtggtgaacccctgcagccagcaggcctcctgaaaaaaaagtccatgggtgacagaagattcattgacttccaattccaagattcaaattcaagcctcagacccaggttgggcaatgctactgccaataatacttgcattgttgatgattccttcaagtataatctcaatggtgctgtctacagtgttgtattcatcttgggtctgataaccaacagtgtctctctgtttgtcttctgtttccgcatgaaaatgagaagtgagactgctatttttatcaccaatctagctgtctctgatttgctttttgtctgtacactaccttttaaaatattttacaacttcaaccgccactggccttttggtgacaccctctgcaagatctctggaactgcattccttaccaacatctatgggagcatgctctttctcacctgtattagtgtggatcgtttcctggccattgtctatccttttcgatctcgtactattaggactaggaggaattctgccattgtgtgtgctggtgtctggatcctagtcctcagtggcggtatttcagcctctttgttttccaccactaatgtcaacaatgcaaccaccacctgctttgaaggcttctccaaacgtgtctggaagacttatttatccaagatcacaatatttattgaagttgttgggtttatcattcctctaatattgaatgtctcttgctcttctgtggtgctgagaactcttcgcaagcctgctactctgtctcaaattgggaccaataagaaaaaagtactgaaaatgatcacagtacatatggcagtctttgtggtatgctttgtaccctacaactctgtcctcttcttgtatgccctggtgcgctcccaagctattactaattgctttttggaaagatttgcaaagatcatgtacccaatcaccttgtgccttgcaactctgaactgttgttttgaccctttcatctattacttcacccttgaatcctttcagaagtccttctacatcaatgcccacatcagaatggagtccctgtttaagactgaaacacctttgaccacaaagccttcccttccagctattcaagaggaagtgagtgatcaaacaacaaataatggtggtgaattaatgctagaatccaccttttaggtatgagaaatgtgttcaggtccagatatggtttctcctataatttttcctatgctataaactaaagatttgaagctaatgatactgagaataatgcaccaaatccagtcagatacatttgtttgaaggtatactgtagagtttttattgctgttttgttcagtaattataggtcaaatctaattacaacaaccaagatggattgccaaactcttctgcttggttggaatttcattgtatcgcattatccaggtggctagtggcatttgataatatagagatgactttgaaactttcaaaaaggtatttctattccaatgatatttggtaattaggttgggcctataaatatagaacaaattcagggatttttaaaaaattgtgttactactgatatatgctagttttattttatttttttgaactgtcattgagtttattttagcacaagaatatttttagcctaacattattaataagaaatgtgtcaaatttttaacattggtaaaatatgttatgtgcattttgaaaacagaaaacaaattgcgttggcatgtacgtgggtgggaagaaaaagaaaattaacaggatttacacaattataatcaccagcagtgtgagtttaaaaaacttcgttgtttttacaccaaattaaaattttcatgtcaaacttcaaagccagaaagctgctaaatacgtgtctggcaggtaaaagctggaaaattacttaaaacaggaaagtgtcaataaaaaaacttgagcaacaccaacatattttttcttaaaatgtcacgttatcttcattttgggaaactaggttctataaaatatttatcctccctgttatactttggagcacagcacagccagaaaggggctgcatttgtgcccaggtcaggagcaaattgaaaaaaaaaataaagtaatacaaaaaaatcaaactataaagcaaaaacatttattaaaacctgaattaatcctttttggagggaggagtagagatatataacctgaaaatacttattctttcttatcgaattttggagcctaatatagccaggagctgctgaatttgtgcccctggattggaagcaaataaaaaaaaaaaacaaca

SEQ ID NO: 45351 - DNA, 1240 bp, Homo Sapiens
cagcttaatagcaggacgctggcaacaggcactccctgctccagtccagcctgcgcgctccaccgccgctatggtctccgtgcctaccacctggtgctccgttgcgctagccctgctcgtggccctgcatgaagggaagggccaggctgctgccaccctggagcagccagcgtcctcatctcatgcccaaggcacccaccttcggcttcgccgttgctcctgcagctcctggctcgacaaggagtgcgtctacttctgccacttggacatcatctgggtgaacactcctgaacagacagctccttacggcctgggaaacccgccaagacgccggcgccgctccctgccaaggcgctgtcagtgctccagtgccagggaccccgcctgtgccaccttctgccttcgaaggccctggactgaagccggggcagtcccaagccggaagtcccctgcagacgtgttccagactggcaagacaggggccactacaggagagcttctccaaaggctgagggacatttccacagtcaagagcctctttgccaagcgacaacaggaggccatgcgggagcctcggtccacacattccaggtggaggaagagatagtgtcgtgagctggaggaacattgggaaggaagcccgcggggagagaggaggagagaagtggccagggcttgtggactctctgcctgcttcctggaccggggccttggtcccagacagctggacccatttgccaggattggcacaagctccctggtgagggagcctcgtccaaggcagttctgtgtcctcgcactgcccagggaagccctcggcctccagactgcggagcagcctccagtgctggctgctggcccacagctctgctggaagaactgcatggggagtacattcatctggaggctgcgtcctgaggagtgtcctgtctgctgggctacaaaccaggagcaaccgtgcagccacgaacacgcatgcctcagccagccctggaggctggatggctcccctgaggctggcatcctggctggctgtgtcctctccagctttccctccccagagttcttgcaccctcattccctcgggaccctcccagtgagaagggcctgctctgcttttcctgtctgtatataacttatttgccctaagaactttgagaatcccaattatttattttaatgtattttttagaccctctatttacctgcgaacttgtgtttataataaatgaggaaacat

SEQ ID NO: 45352 - DNA, 3331 bp, Homo Sapiens
acgcagccccatcccacacacacaggcccggtgactcaggggcccacgtgtgcaggacaccgggagctcacagggacagcgccccgggggatggaaggaactttgcctctctgtccctctctgtagggatggaaagaggagagcgatttctgggatggaagccatctgcctcctctcaactctcgctgcccaaccagaaagggaagaaaaacaggaagatgcgggacaggtgaggagctgggtgagcgccaccagcctgcagcccagcagagcagggcttggccaagcctggcgccagggacttcccccctacccccaccacaggcccctcgccaggtgagaggcaccgacagaatcccagacagatgccccagacaggatgcccggggcaacccccgccccttcccctgctaggggcccccaggacgcggggctccccctctccttttggccagccacagagtccagcggatctcccggccagggatgtcgtgggagaatcaggaagtcgaagccacacagccgagaaggggcagctggcgtctcggaggccgtcacgagctgtcactccgcgcccgccggacttgccgctcaattaccaacttcaacccagggccggccccggagcctcccgccgcccctaccccgcgcccctggcacccctggacctccgcgcccgcgtcacttactcctctgccgtcgccacctgtctgggtcccggtctcctccctgcctggccgcggcacgtcctccccgtcctcgcagtcctcaggttctgcgcttcccccctccagcaacagccgcagcctcttctcttcgggagggacgtcgtcctcttccctcctgggccggccatccctgcctcggggcttgccagtggcttcggagctgccggaagggctggccatgactccgggggctctgcctgcacctggggaagaggaaggacccggcgcgagcggcctctcggcggagctggggcgtctgagcgagggctcggtgggtcagcgcggcgcggggctgggcatcccggcgggcgcgggctcctccgcgggccgctcctgctgcgccctctgccggccgcttgcgcgcaccgcggacacgccgggtactggcctgcccggctctcacctgcccaggcccaagcagtcgctgtcccctgcctgtggccaggcccgctctggccaggccctgcacctcctccccgccccagccaggttgcacccgatggtctccctgcccaaggaggagagaagagaaaggacgccccgagatggtggacatcggccacaaccaccttgtctttgctcttaccctgtgtcttccatgatttggaggtggtgggaaacccgaggctgctcaaaactcgtggagaattccgcctgcaggatgacatgaatgcaccttcccattgcctaccaacagatcttttttgagcatcactgtggaccaggcgtggtgatgggggaggggatattgtggagaacatgacaggcattgccttcacccagtggggctcagcgctgggtgggaaggcattgagaatggacattgtcaattgggcaaaaggaggccaagaagaagtgctgggggcatgggaactgaaaaagacaggaggctcagcaggtcttggagctgggagagggacagcagcagcggctgttccaaaggaagcaacagctgagagaggcctcagagagttgttctcagcccagtggagggtgttcaggcagagggaacagcctgtgcaaaagcccagaggctgggaaagaagcagaaagaggactgtggggctggagcgtggtgggcaagaggagaaaggtgtggtgggcagacagattgcctgggaccgagccgtgcaggggcagaggagataggggatccttgcaggcctccagctggggctgaggcacagagacaatgcaggtgggcaaagggaggagacgtggagaagtattttggaggcatgccctgatgaatgagcccaggatgcacccttagtgtcagtgtggagctccttcctaggttgtgtgatgggctgaactggggggtattttctggacatcgaagtgctacacccagagtccaggacaggctaagtgagcaccagcagctcctggcccacctcaaaagcaggagagacaggggagactggggaggccagggcggaaggggaagccaggaaggcaggagaggccagggaagcagaggaggccagggaggcaggggaggcaggagaggctggggcggctgtgtcctttccatgtttctgcccaggatcctaggccgctgtactccctgagcttccccaccccaagtgctggaaccatgttgcacaacggtctccccactaagctcctgatggcagcccctaccctgctgtgctccctatttcaaccctaacagctctcacagtgggcagcacatagtaggtgctcaggaaacactggtgggagagcacgtgggtctgctcagcaccttcctctctcctccagctctccccatcatgaaataattctgataacgacacatggactttgagatcctcttctattacttgccatatgctaatccatctatacctcacagcagtcctgggggtgggtgctattaggatgcccattttacagaggaggagactgaggtataaagagggtaagtgacatacgcacactacaggggctggggccaagtgatcagagcactcaatccccaaaggcaaggtggatgcagttaccataaaagacagcagagtcaaagctgcaaccagcatagcctgactctcagagacctacggtgccagctgatcgtggctttcctagaagtgaaatagataagaagcctgccacatttttactggatctgtgtttgcagaagagttctagatcaggtgagcagaagtctaatctgaatcataaaaacagagtcacagtccccagtcaattcccagacataagccagttcacagacccggattcccttgtctgaatgggaagccaggtcccctgcagaaaggacactgctccactgccacaaattaatactgtcaatctttctcccagcctgcctccaagggaatacacagccttttaccaggatgactgaacaggagaaaaggaactaatggacctgtgcaggatcactggacacaggctgtgaactggcactaggatgagactagggtctaccagtcagaataggcattttggaggtcaggtgaatgttggtgcaagttcatgtcatggtagatccattaggtcccccaatccatcctctggttatatacaaagcggcaatgctgagattcaaattcagggcatccaacatagag

SEQ ID NO: 45353 - DNA, 684 bp, Homo Sapiens
atgcccgtcaccaagctgggccacctggtcaaggacatgaagatcaagtacctggaggatctcttctccctgcccatcaaggaatctgagaccattgacttttttctggggtcctctctcaaggaagagggtttgaagattatgccggtgcagaagcagacccgcgcgggccagcgcaccaggttcaaggcgtttgttgccaccggggactacaatggccacgtcggtctgtgcgttaagtgctccaaggaggtggctactgccatccgcgggtccgtcatcctgaccaagcactccattgtccccgtgcgcagaggctacgggggaacaagaggacaagcccacaccgtcccttgcaaggtgacaggccgctgcggctctgtgctggtgcacctcatccctgcacccaggggcactggcatcgtctccgcacctgtgcccaagaagctcctcatgatggctggtattgatgactgccacacctcagccaggggctgcactgccaccggcaacttcgccaaggccacctttgacaccatctctaagacctacagctacctgaccctcgacctctggaaggagactatattcaccaagtctccctatcaggaattcactgaccacctcgtcaagacccacaccagagtctccatgcagaggacccaggctccagctgtggctaca

SEQ ID NO: 45354 - DNA, 1215 bp, Homo Sapiens
ccatgcctcctacgcagctccaccgcgacctcccgcagcctcctccgcctgcctggggccttcggctgcggggagcgggctccgctggggagccgaaagcatcttgaccacgcagccgccaccgcagcagcagcaccacgagaggccgggggccgctgccatcggcagcgccaggggacagagcacaggaaagggacctccgcagtcacctgtgtttgaaggcgtctacaacaattccagaatgctgcacttccttacagctgttgtgggctccacttgtgatgtaaaggtgaaaaatggcaccacctatgaaggtatcttcaagacgctgagctcacattttgaactagcagaggatattgtacaccagaaagcatctgagccagcagctggccctcgtcgggaggacactgtagacaccatggtgtttaagccaagtgatgtcatgcttgttcacttccgaaatgctgacttcaactacgctactaaagacaagttcaccgattcagccatcgccatgaactcgaagggaatggggaacacaaagagaaggtgcttcagcgctgggagcggggtgacagcaacagcgacaactacgacctcgagtccaacatgtccaatggatgggaccccaatgaaatgttcaagttcaatgaagagaactacggtgtgaagaccacctatgacagcagtctttctccttatacggtgcccttagaaaaggacaactcgaaagagtttcagctgtgagagctgcgtgcagcccagttggctccagagattgaatcaagcccccagtaccacctgcggatcgccatggagagcgacgatgggcgcactgaagaggagaagcacagggcggtccagcggcagggctcggggcgggagagccccagcttggcatccaggaaggggaagtatatcatccctctgcctcaacgagagggcagcgccagggtccagcggggttgaggggttcctgctctgcccctgcctgtccccacccagtactgccctcccatcctctcatctatttccctgctggacacagaagatcttttattttctattatttataacctgagacttaggccccctgttctttatttcccattaacttgagtgacctgtgtgagagacagacagatgccccatgaggatggctggacaagaacttttactttttattacataaaaatattaaaagtaaataaa

SEQ ID NO: 45355 - DNA, 4527 bp, Homo Sapiens
ttacaggatgacacttctgtggtgtgtagtgagtctctacttttatggaatcctgcaaagtgatgcctcagaacgctgcgatgactggggactagacaccatgaggcaaatccaagtgtttgaagatgagccagctcgcatcaagtgcccactctttgaacacttcttgaaattcaactacagcacagcccattcagctggccttactctgatctggtattggactaggcaggaccgggaccttgaggagccaattaacttccgcctccccgagaaccgcattagtaaggagaaagatgtgctgtggttccggcccactctcctcaatgacactggcaactatacctgcatgttaaggaacactacatattgcagcaaagttgcatttcccttggaagttgttcaaaaagacagctgtttcaattcccccatgaaactcccagtgcataaactgtatatagaatatggcattcagaggatcacttgtccaaatgtagatggatattttccttccagtgtcaaaccgactatcacttggtatatgggctgttataaaatacagaattttaataatgtaatacccgaaggtatgaacttgagtttcctcattgccttaatttcaaataatggaaattacacatgtgttgttacatatccagaaaatggacgtacgtttcatctcaccaggactctgactgtaaaggtagtaggctctccaaaaaatgcagtgccccctgtgatccattcacctaatgatcatgtggtctatgagaaagaaccaggagaggagctactcattccctgtacggtctattttagttttctgatggattctcgcaatgaggtttggtggaccattgatggaaaaaaacctgatgacatcactattgatgtcaccattaacgaaagtataagtcatagtagaacagaagatgaaacaagaactcagattttgagcatcaagaaagttacctctgaggatctcaagcgcagctatgtctgtcatgctagaagtgccaaaggcgaagttgccaaagcagccaaggtgaagcagaaagtgccagctccaagatacacagtggaactggcttgtggttttggagccacagtcctgctagtggtgattctcattgttgtttaccatgtttactggctagagatggtcctattttaccgggctcattttggaacagatgaaaccattttagatggaaaagagtatgatatttatgtatcctatgcaaggaatgcggaagaagaagaatttgtattactgaccctccgtggagttttggagaatgaatttggatacaagctgtgcatctttgaccgagacagtctgcctgggggaattgtcacagatgagactttgagcttcattcagaaaagcagacgcctcctggttgttctaagccccaactacgtgctccagggaacccaagccctcctggagctcaaggctggcctagaaaatatggcctctcggggcaacatcaacgtcattttagtacagtacaaagctgtgaaggaaacgaaggtgaaagagctgaagagggctaagacggtgctcacggtcattaaatggaaaggggaaaaatccaagtatccacagggcaggttctggaagcagctgcaggtggccatgccagtgaagaaaagtcccaggcggtctagcagtgatgagcagggcctctcgtattcatctttgaaaaatgtatgaaaggaataatgaaaagggtaaaaagaacaaggggtgctccaggaagaaagagtccccccagtcttcattcgcagtttatggtttcataggcaaaaataatggtctaagcctcccaatagggataaatttagggtgactgtgtggctgactattctgcttcctcaggcaacactaaagtttagaaagatatcatcaacgttctgtcaccagtctctgatgccactatgttctttgcaggcaaagacttgttcaatgcgaatttccccttctacattgtctatccctgtttttatatgtctccattctttttaaaatcttaacatatggagcagcctttcctatgaatttaaatatgcctttaaaataagtcactgttgacagggtcatgagtttccgagtatagttttctttttatcttatttttactcgtccgttgaaaagataatcaaggcctacattttagctgaggataatgaacttttttcctcattcggctgtataatacataaccacagcaagactgacatccacttaggatgatacaaagcagtgtaactgaaaatgtttcttttaattgatttaaaggacttgtcttctataccacccttgtcctcatctcaggtaatttatgaaatctatgtaaacttgaaaaatatttcttaatttttgtttttgctccagtcaattcctgattatccacaggtcaacccacattttttcattccttctccctatctgcttatatcgcattgctcatttagagtttgcaggaggctccatactaggttcagtctgaaagaaatctcctaatggtgctatagagagggaggtaacagaaagactcttttagggcatttttctgactcatgaaaagagcacagaaaaggatgtttggcaatttgtcttttaagtcttaaccttgctaatgtgaatactgggaaagtgattttttctcactcgtttttgttgctccattgtaaagggcggaggtcagtcttagtggccttgagagttgcttttggcattaatattctaagagaattaactgtatttcctgtcacctattcactagtgcaggaaatatacttgctccaaataagtcagtatgagaagtcactgtcaatgaaagttgttttgtttgttttcagtaatattttgctgtttttaagacttggaaaactaagtgcagagtttacagagtggtaaatatctatgttacatgtagattatacatatatatacacacgtgtatatgagatatatatcttatatctccacaaacacaaattatatatatacatatccacacacatacattacatatatctgtgtatataaatccacatgcacatgaaatatatatatatatataatttgtgtgtgtgtatgtgtatgtatatgactttaaatagctatgggtacaatattaaaaaccactggaactcttgtccagtttttaaattatgtttttactggaatgtttttgtgtcagtgttttctgtacatattatttgttaattcacagctcacagagtgatagttgtcatagttcttgccttccctaagtttatataaataacttaagtattgctacagtttatctaggttgcagtggcatctgctgtgcacagagcttccatggtcactgctaagcagtagccagccatcgggcattaattgatttcctactatattcccagcagacacatttagaaactaagctatgttaacctcagtgctcaactatttgaactgttgagtgataaaggaaacaaatataactgtaaatgaatcttggtatcctgtgaaacagaataattcgtaatttaagaaagcccttatcccggtaacatgaatgttgatgaacaaatgtaaaattatatcctatatttaagtacccataataaatcatttccctctataagtgttattgattattttaaattgaaaaaagtttcacttggatgaaaaaagtagaaaagtaggtcattcttggatctacttttttttagccttattaatatttttccctattagaaaccacaattactccctctattaacccttcacttactagaccagaaaagaacttattccagataagctttgaatatcaattcttacataaactttaggcaaacagggaatagtctagtcaccaaaggaccattctcttgccaatgctgcattccttttgcacttttggattccatatttatcccaaatgctgttgggcacccctagaaataccttgatgttttttctatttatatgcctgcctttggtacttaattttacaaatgctgtaatataaagcatatcaagtttatgtgatacgtatcattgcaagagaatttgtttcaagatttttttttaatgttccagaagatggccaatagagaacattcaagggaaatggggaaacataatttagagaacaagaacaaaccatgtctcaaatttttttaaaaaaaattaatggttttaaatatatgctatagggacgttccatgcccaggttaacaaagaactgtgatatatagagtgtctaattacaaaatcatatacgatttatttaattctcttctgtattgtaacttagatgattcccaaggactctaataaaaaatcacttcattgtatttggaaacaaaaacatcattcattaattacttattttctttccataggttttaatattttgagagtgtcttttttatttcattcatgaacttttgtatttttcatttttcatttgatttgtaaatttacttatgttaaaaataaaccatttattttcagctttg

SEQ ID NO: 45356 - DNA, 3021 bp, Homo Sapiens
cagtttttggcattgggcacacattatggcaaggtttatttacttgatgtccaggggaacatcactcagaagtttgatgtagtgcaggtatttggactgtattctggagaagaatttcacgagacttttgactgtcccattaaaattattgctgtgcacccacatttcgtgagatccagttgcaagcagtttgtgaccggagggaagaagctgctactgtttgaacggtcttggatgaacagatggaagtctgctgttctgcatgaaggggaagggaacataaggagtgtgaagtggagaggccatctgattgcttgggccaataatatgggtgtgaagatttttgacatcatctcaaagcaaagaatcaccaatgtgccccgggatgatataagtcttcgcccagacatgtatccctgcagcctctgctggaaggacaatgtgacactgattattggctgggggacttctgtcaaggtgtgctcagtgaaggaacggcatgccagtgaaatgagggatttgccaagtcgatatgttgaaatagtgtctcagtttgaaactgaattctacatcagtggacttgcacctctctgtgatcagcttgttgtactttcgtatgtaaaggagatttcagaaaaaacggaaagagaatactgtgccaggcctagactggacatcatccagccactttctgagacttgtgaagagatctcttctgatgctttgacagtcagaggctttcaggagaatgaatgtagagattatcatttagaatactctgaaggggaatcacttttttacatcgtgagtccgagagatgttgtagtggccaaggaacgagaccaagatgatcacattgactggctccttgaaaagaagaaatatgaagaagcattgatggcagctgaaattagccaaaaaaatattaaaagacataagattctggatattggcttggcatatataaatcacctggtggagagaggagactatgacatagcagcacgcaaatgccagaaaattcttgggaaaaatgcagcactctgggaatatgaagtttataaatttaaagaaattggacagcttaaggctattagtccttatttgccaagaggtgatccagttctgaaaccactcatctatgaaatgatcttacatgaatttttggagagtgattatgagggttttgccacattgatccgagaatggcctggagatctgtataataattcagtcatagttcaagcagttcgggatcatttgaagaaagatagtcagaacaagactttacttaaaaccctggcagaattgtacacctatgacaagaactatggcaatgctctggaaatatacttaacattaagacataaagacgtttttcagttgatccacaagcataatcttttcagttctatcaaggataaaattgttttattaatggattttgattcagagaaagctgttgacatgcttttggacaatgaagataaaatttcaattaaaaaggtagtggaagaattggaagacagaccagagctacagcatgtgtatttgcataagcttttcaagagagaccaccataaggggcagcgttaccatgaaaaacagatcagtctttatgctgaatatgatcgaccaaacttacttccctttctccgagacagtacccattgcccacttgaaaaggctcttgagatctgtcaacagagaaactttgtagaagagacagtttatcttctgagccgaatgggtaatagccgaagtgccctgaagatgattatggaggaattacatgatgttgataaagcaatcgaatttgccaaggagcaagatgatggagagctgtgggaagatttgattttatattccattgacaaaccaccatttattactggcttgttaaacaacattggcacacatgttgacccaattctactgattcaccgtattaaggaaggaatggagatccccaatttgagagattccttggttaaaattctgcaagactacaatttgcaaattctgcttcgtgaaggctgcaagaagattctcgtagctgactctttgtccttactgaagaaaatgcaccgaactcaaatgaaaggtgttcttgttgatgaggagaacatctgtgagtcgtgcctttcccctattcttccatcagatgcagctaagcccttcagcgtggtggtcttccattgccggcacatgttccacaaggagtgcctgcccatgcccagcatgaactctgctgcacagttctgcaacatctgcagtgctaagaaccgtggaccaggaagtgcaattttggagatgaaaaaatagctcatttctccttgtcagtctccttgtcaccactctttttgagactgtttttgcaacaacaaaagcatttgttgacactcgtgctgttaagagatttgtttatgtttatattatactcaaaaacaatttcttcatctattcctgtactaatggtttctctttgcagttcacagagaatttggggctctcttcatgccttgaaattttggggtccatagtgaatattttgttatttatttgtttggctcattctttatatagtaatggaaacataagtctaggagttagaaatgaattttttagaccttagtaaaaccatttaaccataaaatggacaactgagaattctcccagctgcctgaaagcgtcgccaactgtggttatcctgcaagctgctacctgcaacttggacgttgtttccacgtgctctgctggctacgattcttgcattctgggtttggcttttttctgtgtcatcaactatggttatcctctaaataggcatttaatgaaacattgtacaaattgtcactcatttgatgacacctgggaataacattagcaggctgatgtcctgcaccattatgtttactaatcacatgttctgtgtgctgtgacgactgtcaaagagtatctggccatggcggacactcagcatttgttgattgaataaatgttagctcttctcattgtgaa

SEQ ID NO: 45357 - DNA, 437 bp, Homo Sapiens
atgcctgaaccagctaagtcagctcccgccccgaagaagggctccaagaaggcggtgaccaaggcacagaagaaggatggcaagaagcgcaagcgcagccgcaaggagagctattccgtgtacgtgtacaaggtgctgaagcaggtccaccccgacaccggcatctcgtccaaggctatggggattatgaactccttcgtcaacgacattttcgagcgcattgcaggcgaggcttcccgcctggcgcattataacaagcgctcgaccatcacttccagggagatccaaacggctgtgcgcctgctgctacccggggagctggccaaacacgcggtgtcggagggcaccaaggcggtcaccaagtacaccagctccaagtaaactagttacctgggtaaaagcgctaacgacccaaaggctcttctaagagccaccca

SEQ ID NO: 45358 - DNA, 1247 bp, Homo Sapiens
gggaagactacgcagcctggagccgggctggggaggccggcgggggctgcgccagcatgaggcggggttaggggctaggcgggggcgaagccgagactggagttcacggctgggccgagggctcggccgggctgaggctcagggttggacttcacgcaagagtcctgtagagacgaagacctgggcggagagcgatgtgggtcaggacgacgctcacaattgaaagatggactaaggaaaagaccgagcccaaggcccgctcgtgggatgagagcagatgccgcggtgactgcaaggagcctgacaagtgctgctggagacacaagcagtgcactgggcacatcatctaccctttcgcctctgactgtgtccgccacagcctgcacctacactctgtcaaccactgcaactgtaattctaggctgaaggactcttcagaggatagcagcagctcccggggcgcgggcccaacctgctcccatgtcatcgagtccccttgctttgagctcacaccggaggaggagcatgtggagcgattccggtatggctggtgcaaaagctacagacctgtctctgtggcagtgatccaccatccactctaccatgagtgtggggcagatgatctaaatgaagaagaggaagaggaggaggaggaaagcaagccccccatcccgacacaggtggggcccgccaccgcctcccctgacctaggcaccagcatggccactggtacccctgactccacagcgcccatcaccatctggcgctctgagagccccacagggaagggtcagggcagcaaggtgatcaagaaggtaaagaagaaaaaggaaaaagagaaagacaaggaggagatggatgagaaggcaaagctgaagaaaaaagccaagaaaggccagttgactaagaagaaaagcccggttaaattggagccttccccgccagacgtgagccgatcattaagcgcaagacagctggccaggatgtccgagtccagcccagaaagccgggaagagctggagagcgaggacagttacaatggccgggggcagggagaactgtccagcgaggatattgtggaatcatcatcgcccaggaagagagagaacacagtccaggccaaaaagacaggggcaaagccctcacaagccaggaaggtaaacaagagaaaatctcccccaggatcaaaccccaacctcagttgaggccagggtggtcagggtgcagaataaatgccatcgagcctg

SEQ ID NO: 45359 - DNA, 579 bp, Homo Sapiens
atgcaggccatcaagtttgtggtggtgggagacggagctgtaggtaaaacttgcctactgatcagttacacaaccaatgcatttcctggagaatatatccctactgtctttgacaattattctgccaatgttatggtagatggaaaaccggtgaatctgggcttatgggatacagctggacaagaagattatgacagattacgccccctatcctatccgcaaacagatgtgttcttaatttgcttttcccttgtgagtcctgcatcatttgaaaatgtccgtgcaaagtggtatcctgaggtgcggcaccactgtcccaacactcccatcatcctagtgggaactaaacttgatcttagggatgataaagacccgatcgagaaactgaaggagaagaagctgactcccatcacctatccgcagggtctagccatggctaaggagattggtgctgtaaaatacctggagcgctcggcgctcacacagcgaggcatcaagacagtgtttgacgaagcgatccgagcagtcctctgcccgcctcccgtgaagaagaggaagagaaaatgcctgctgttgtaa

SEQ ID NO: 45360 - DNA, 288 bp, Homo Sapiens
atttatatcaatatcatattagcatataccatatcacttctggggatattaacctatcgatcccacctgatagcatccctaatatgcctagaaggaataatattatcattattcatcataaatacccttataactttaaatatacatttcaccctagcattcataatacccattaccctcccagtatttgctgcctgcaaagctgcagtgggcctcgccttactagtttcaatctccaacacgtatggcctagattatgtacataacctaaatttacttcaatgctaa

SEQ ID NO: 45361 - DNA, 735 bp, Homo Sapiens
atgaatgcttccagatgcctgtctgaggaagtggggtccctccgccctctaaccatggctgtcctgtctgcctcctttgtcgtcggagtgctgggcaatgggctggtgccgtgggtgactgtcttccgcatggcccgcacagtctccaccgtctgcttcttccacctggcccttgccgatttcatgctctcactgtctctgcccatcctcgtgtactatattgtctccaggcagtggctccttggagagtgggcctgcaaactctacaccggttttgtgttcctcaccttctccaccagtaactgcctcctggtcctcatctctgtggaccgttgcatctctgtcctctaccccgtctgggccctgaaccaccgcactgagcagagggcgagctggctggccttcggggtgtggctcctggccgccgccttgtgctctgcgcacctgaaattccggacaaccagaaaatggaatggctgtatgcagtgctacttacagttcaacttggagaatgagactgcccagatgtggactcaggaggtctttgggagacaaatggcggtgatcatggcccacttcctgctgggcttcctggggcccttagcaatcataggcacctgcgcccacctcatccgggccaagctcttgcgggagggctgggtccatgccaaccggcccaagaggctgctgctggtgctggtgagcgctttatctgctggttcccatttaacgtga

SEQ ID NO: 45362 - DNA, 1640 bp, Homo Sapiens
ctctcctcgcccgctgggtgctgaagttgggcggatggcagcaaaccggctccgctagaggaccgagccgcccagccccgctcccccggacccatcggcgcgctgcccacacctccaggcgaccggccaactgggtcctgaagtagctgaaatgcgaaaaaggcagcagtcccaaaatgaaggaacacctgccgtgtctcaagctcctggaaaccagaggcccaacaacacctgttgcttttgttggtgctgttgttgcagctgctcctgcctcactgtgaggaatgaagaaagaggggaaaatgcgggaagacccacacacactacaaaaatggagagtatccaggtcctagaggaatgccaaaaccccactgcagaggaagtcttgtcctggtctcaaaattttgacaagatgatgaaggccccagcaggaagaaaccttttcagagagttcctccgaacagaatacagtgaagagaacctacttttctggcttgcttgtgaagacttaaagaaggagcagaacaaaaaagtaattgaagaaaaggctaggatgatatatgaagattacatttctatactatcaccaaaagaggtcagtcttgattctcgagttagagaggtgatcaatagaaatctgttggatcccaatcctcacatgtatgaagatgcccaacttcagatatatactttaatgcacagagattcttttccaaggtttttgaactctcaaatttataagtcatttgttgaaagtactgctggctcttcttctgaatcttaatgttcatttaaaaacaatcattttggagggctgagatgggaaataaaagtagttaaataacatcagaaactgagttcctggagaactacagtttagcattcctcaggctactgtgaaaacacaaccgttatggtctttgtctccatttttatcaaggttttccatggttaagtttggagaaaataccacacaaaacaatgaattgccaaattgtttgttttattcaagactcattctacttgcaagcaaagtgtatttgtagtcctatgaacagtctcctcgtgtatctccagagactgcatgtgcaaagtaaaatgcttcatttgccacatagttgttgtaatatttaatccagtagcataacttatatctgtatttaaggacttttgtgcaatatggtcttaagaaataattgccaaaaaaatcggccatggtttgcattttttaacataatctaagacagaaaaaaagcaatttttactatgtaacaatggtattcaacattctatatactgtgtttagtacactaattttgaagccaatatttctgtacatgaaaaagagctatttatctctgtttgttggaaaatcctaatggggattcctctggttgttcactgccaaaactgtggcattttcattacaggagagtttactatgctaaaagcaaaaaacaaaaaaaaaaaaaaagggaagaaggaaaaaagcacaaaacaatttgaagatatcctatctcaatgacaaatcaaaagagtgatattgcttttaactgtaatagaagaaaatgaatttatgtatatatcagatgtccaatactgtaattaatttattaaagactggctctccagttttaaaa

SEQ ID NO: 45363 - DNA, 729 bp, Homo Sapiens
ccgtctgcaaaaaaaaaaaaaaaaagagacaacacagagacagaggagaagcccacgtgaggctggagtgatgtggccacaaaccaaggaacacctggagccaccaggagctagaaggctggctggaagaggcaggaaggtacttccctagagcctctggagggagtggagccctgcccacaccttgattgcagacttctggcctccggagctgggagagaatatatttctgttgttttaagcaaccccagatcagggtacttgctgtggtagccccagaaagcaaatacgagggagactgagagcctcagtctttgagatcctgtcatcactgcctctcgagtcgccatgggcatgtggcctcaggccgtcagcatctcagggtgttggctctgctcaaagccatccgtcctcgtccacattgcaccttgtccaggccttcttcgagttggtcacctgagcctattattgacggtttggctgtcctccccgttgcaagcatggggatggtgcgatgctgccatttgtcaaacaagagccccggaaagccagaggtacaaccaaagacagaaaaataagaaccatgagcagtcgcggtgcctctattattttcccaggacgattgctcttttcctccaatgggcctggggaagaagcaattctcacagatcctcctcaacatgaagggtgtcagggtccctgcagatttggctggagctccagacctcc

SEQ ID NO: 45364 - DNA, 988 bp, Homo Sapiens
tggaactctacagtatgcacgagtactattacatatattggtatctctctgaattcctttacgcatggttgatgtcaacattgagtcgtgccgatggctctcaaatggcagaggaaaggataatggaagagcagcagaaaggccgtagtagtaaaaaaacaaagaaaaaaaagaaagttcgcccattgagccgagagatcacaatgagccaagcatatcagaacatgtgtgctggaatgtttaaaaccatggtagcatttgacatggacggcaaagtacgtaaaccgaagtttgagcttgatagtgaacaagttcggtatgaacacaggtttgctccattcaacagtgtgatgaccccgccgccagtgcactacttacagttcaaggaaatgtctgacctcaataaatatagccctcctcctcagtctcctgaactgtatgtggcagctagtaagcactttcaacaggcaaaaatgatattggaaaatattcctaacccggaccatgaggttaatagaattttaaaggttgccaaacccaactttgtggttatgaagttattggcaggaggacacaaaaaggaatctaaagttcctcctgaatttgatttctctgctcataaatattttcctgttgtgaaacttgtttgagagagactggggaggtggccataaaggggcagagtcttctttcagacccaactcttagagggcacatcaccaggctccacatcacgggaagtgagatggatttcttgggtaacaactcattataaggaatacttttagtttgacagccttatatgacatgaatgaaaactgctgttttaaagtggtttattatgttccatggaagaaactggtcttattgaatgcattgatgaacgttatatggttttattacagatttaatcacaaatcattttttatgaatgattgagtgaaaatagtgtttataaaggttaataaatttcttgacaaaaaaaaaa

SEQ ID NO: 45365 - DNA, 300 bp, Homo Sapiens
atggctgccttggacgtggatagcggcggcggcggtggcggcggcggcggccacggcgagtatctgcagcagcagcaacagcacggaaacggtgcggtggcggcggcagcggcggcccaggacactcagccgtcaccgctcgctctgctggccgctacctgcagcaagatagggccgccatcgccgggcgacgacgaggaggaggcggccgccgcagccggggcccccgccgccgccggagcgacaggtgatttggcttctgcacagttaggaggagcaccaaaccgatgggaggttttg

SEQ ID NO: 45366 - DNA, 1488 bp, Homo Sapiens
atgaggcactgcattaattgctgcatacagctgttacccgacggcgcacacaagcagcaggtcaactgccaagggggcccccatcacggtcaccaggcgtgccccacgtgcaaaggagaaaacaaaattctgtttcgtgtggacagtaagcagatgaacttgcttgctgttctcgaagtgaggactgaagggaacgaaaactggggtgggtttttgcgcttcaaaaaggggaagcgatgtagcctcgtttttggactgataataatgaccttggtaatggcttcttacatcctttctggggcccaccaagagcttctgatctcatcacctttccattacggaggcttccccagcaaccccagcttgatggacagcgaaaacccaagtgacacaaaggagcatcaccaccaatcctctgtaaataatatttcatacatgaaggactatccaagcattaaattaattatcaacagcatcacaactaggattgagttcacgaccagacagctcccagacttagaagaccttaagaagcagtgcatatgttttcagtcatccccaacaaattccttccaaacagtaagagcccctgttggtacgaggagttctcggggcagaacaccaccgacccctacctcaccaactcctacgtgctctactccacgcttccgctccaccttcgacgccctgcgcaaggccttctggggccacctggcgcacgcgcacgggaagcacttccgcctgcgctgcctgccgcacttctacatcatagggcagcccaagtgcgggaccacagacctctatgaccgcctgcggctgcaccctgaggtcaagttctccgccatcaaggagccacactggtggacccggaagcgctttggaatcgtccgcctaagagatgggctgcgagaccgctatcccgtggaagattatctggacctctttgacctggccgcacaccagatccatcaaggactgcaggccagctctgcaaaggagcagagcaagatgaatacaatcattatcggggaggccagtgcctccacgatgtgggataataatgcctggacgttcttctacgacaacagcacggatggcgagccaccgtttctgacgcaggacttcatccacgcctttcagccaaatgccagactgattgtcatgctcagggaccctgtggagaggttgtactcagactatctctactttgcaagttcgaataaatccgcggacgacttccatgagaaagtgacagaagcactgcagctgtttgaaaattgcatgcttgattattcactgcgcgcctgcgtctacaacaacaccctcaacaacgccatgcctgtgaggctccaggttgggctctatgctgtgtaccttctggactggctcagcgtttttgacaagcaacagtttctcattcttcgcctggaagatcatgcatccaacgtcaagtacaccgcacaaggtcttccagtttctgaacctagg

SEQ ID NO: 45367 - DNA, 1528 bp, Homo Sapiens
gggatcagagagaagcgaggttctcgttctgagggacaggcttgagatcggctgaagagagcgggcccaggctctgtgaggaggcaagggaggtgagaaccttgctctcagagggtgactcaagtcaacacagggaacccctcttttctacagacacagtgggtcgcaggatctgacaagagtccaggttctcaggggacagggagagcaagaggtcaagagctgtgggacaccacagagcagcactgaaggagaagacctgcctgtgggtccccatcgcccaagtcctgcccacactcccacctgctaccctgatcagagtcatcatgcctcgagctccaaagcgtcagcgctgcatgcctgaagaagatcttcaatcccaaagtgagacacagggcctcgagggtgcacaggctcccctggctgtggaggaggatgcttcatcatccacttccaccagctcctcttttccatcctcttttccctcctcctcctcttcctcctcctcctcctgctatcctctaataccaagcaccccagaggaggtttctgctgatgatgagacaccaaatcctccccagagtgctcagatagcctgctcctccccctcggtcgttgcttcccttccattagatcaatctgatgagggctccagcagccaaaaggaggagagtccaagcaccctacaggtcctgccagacagtgagtctttacccagaagtgagatagatgaaaaggtgactgatttggtgcagtttctgctcttcaagtatcaaatgaaggagccgatcacaaaggcagaaatactggagagtgtcataagaaattatgaagaccacttccctttgttgtttagtgaagcctccgagtgcatgctgctggtctttggcattgatgtaaaggaagtggatcccactggccactcctttgtccttgtcacctccctgggcctcacctatgatgggatgctgagtgatgtccagagcatgcccaagactggcattctcatacttatcctaagcatagtcttcatagagggctactgcacccctgaggaggtcatctgggaagcactgaatatgatggggctgtatgatgggatggagcacctcatttatggggagcccaggaagctgctcacccaagattgggtgcaggaaaactacctggagtaccggcaggtgcctggcagtgatcctgcacggtatgagtttctgtggggtccaagggctcatgctgaaattaggaagatgagtctcctgaaatttttggccaaggtaaatgggagtgatccaagatccttcccactgtggtatgaggaggctttgaaagatgaggaagagagagcccaggacagaattgccaccacagatgatactactgccatggccagtgcaagttctagcgctacaggtagcttctcctaccctgaataaagtaagacagattcttcactgtgttttaaaaggcaagtcaaataccacatgattttactcatatgtggaatctaaaaaaaaaaaaaaaaaaa

SEQ ID NO: 45368 - DNA, 615 bp, Homo Sapiens
atgaaacattttagcaccaaagatatactcagtcagcacgagagactgctccctacagaagaaccttctgtgtggtgtgaatgtgggaaatcctctagcaaatatgacagcttcagtaatcatcaaggagttcacactagagaaaaaccttatacgtgtgggatatgtgggaaattatttaacagtaagtcccacctccttgtacaccagagaattcacactggagagaagccatatgagtgtgaggtttgtcagaaattttttaggcacaagtaccacctcattgcacaccagagagttcacactggagaaaggccatatgaatgcagtgattgtgggaagtcatttacccacagctctacattccgtgttcataagagagttcacactggtcagaagccttatgagtgcagtgaatgtgggaaatcttttgccgaaagctccagtctcactaaacacaggagagttcacactggagaaaagccttacgggtgcagtgaatgtgaaaatttaggcaaatctcttcacttcgtcatcatcagagagttcacaaaagaaagggcttatgagtgcagtgagtccagtctcattaaatattggagaatacacacctga

SEQ ID NO: 45369 - DNA, 2247 bp, Homo Sapiens
cacaagagagacgaggtcactggaggataaacatccgtgactgcacctcatgatccatcacgcacgacggccgcagcatctcctgccagctgccggcacagacaagagcacgggatggacgaccgcggtagcaacgtggggctcatctgcctctctctgagcaggaagcccctcaggctcacacggggagccaccaggctggactgggtgcagcttacggacgtggcgcgtgctgtgggcgtcgggccgcggctcctccatgcagtacttacactgctgtctgcagatcgcacccaatcaggagggaatggtccaggcaggtgggcaaggccacggtttggccagggtggtcctgcgggcagtactgagcccgccctgctgggcaccccacagcccctgtggctctccagctgccactgaggccggacgcctcatgaggaggctcccatctgtgggtggcagaatgacggccccgaagaccccccgcttcctcacccgaagaccccccgcttcctcacccgaagaccccccgcttcctcacccgaagaccccccgcttcctcacccaaagaccccccgcttccttgccccgaagaccccgcttcctcaccctgggacctgtgagttcacacagcagcggggacctgcgactgtggacggcacatcagctccctcaacagggaggctgccctgggtgacccgcgagggcacagggtacctccgtcctgctgagtggaagagggaggccatggcggaggcgggcgtgagggggactggcctgccactactggcttcgtgaggggcccccagccaaggagaggcctcccgaagccggaagaggcggaaaatggattctcccaggagcctccagaaggaaccttggtgttggtggaatgggatgtgagaggacacgcgggtgatgtgtcttgggtcacaccagttcccggtccccgcaccagcccgccctgggcgggaagcctaagaggaatggaggggccatcgtggggctctcccggaaactggccccgggtgcctcggtccctgcgtcagtgcggggtttcggtggccgccctgctggctccgggcactccctccgtcttcctgccacgcggctggtccttcctgggctgggctgagtcaccctccatgcccacccgtcatacccggcaagagctgggggcgtgaagccaggcccaggtgggctgtggcggcatccaggtggaaggacgtggaggactcggaggcggaggggtctccagggcagggcagggccagttgcctggggccatctgctgtgtccaggagcccggcgctgccactggccttgccccaaggcccagctctgcccttcatcccttcagcacctccccgtaccttccttccatgggtcttaagctgtggcaagtccttaagctgggacggccagcgccagccctgcccccaacaggtcactcagcggctcggagcccacgtcctcctcggtgacacaggaaaatggtgcagttgtgcaagggcatgagagggtcccgtggaaggcacattccagaaggttctgtcccatggaaggcacgttccggaaggttccatcccatggaagccacgttccagaagtttccatgctgtggaaggcatgttccggaagtttccgtcccgtggaaggcacgttctggaaggttctgtccggtggaaggcacgtcactctgtgcggtgtgcactgaccccagccagtggatgttccccgtccaagagcaaagctacagtcggctgcaggtgcagtgacttttgcacagtggaagaatttctccagaagatattcctgcaggtggaatcactggatcgtaggcccagatgtcttccacttacttgattttgcctgatgccttccaaggaggctgtgcacagcaggtgtgagatgccccatctcaccaaccggccaacatcccgatgggagatgttgagttttcaccacgctgctgagtgtgacgtggaatcttcttattttagcttgcatttccctgattacaagtcaggtggaacatctcgaatatgtttctgggccatttgattttcctgcaagtcacctgttccagttctttgcccatttcctgttgggttggtcaatattttttgtgattacacgttggatacgtggctggcctttggcttgcctttgacttcgtttgttctatcgaagcatgtgcagaattgttaaattttaatgtattcaaatgcattaatctcatttctt

SEQ ID NO: 45370 - DNA, 849 bp, Homo Sapiens
agcttccacttccggacagagggaggagcagcaaaaggaaacacagaggctgcctttccggcctcggccgccgagaccaaacctcccatggccccctcgtcccctccggtccctcctgtcaccacggccacggtgtcctctctggaggggcccgctcccagcccggcctccgtgccctccacccccaccctgctcgcctggaagcagctggcttccaccataccccagatgcctcagatcccagcgtcagtgcctcacctgcccgcctcgcccttggcaacgacttctctagagaacgccaagccccaggtcaaacccggattcctccagttccaggagaacgatccttgcctcgccacggactgcaagtacgccaacaagttccacttccactgtctctttgggaactgcaagtacgtctgcaaaacgtctggcaaggccgaatcccactgcctggaccacatcaaccccaacaacaacctggtgaacgtgcgagaccagtttgcatactactctctgcagtgtctctgtcccaaccagcactgcgagttccgaatgcgtgggcactaccactgcctccgcaccggctgctattttgtgaccaacatcaccaccaagctcccctggcacatcaagaagcatgagaaggcggagcggcgggcagccaatggcttcaaatacttcaccaagcgcgaggagtgtggcaggctaggttgcaagtacaaccaggtgaacagccacttccactgcatccgggagggctgccagttctccttcctcctcaagcaccagatgacctcccacgcgcggaagcacatgcggaggatgctggggaagaacttcgaccgc

SEQ ID NO: 45371 - DNA, 2115 bp, Homo Sapiens
gaaatgaacctctcttattgatttttattggcctagagccaggagtactgcattcagttgactttcagggtaaaaagaaaacagtcctggttgttgtcatcataaacatatggaccagtgtgatggtgaaatgagatgaggctccgcaatggaactgtagccactgctttagcatttatcacttccttccttactttgtcttggtatactacatggcaaaatgggaaagaaaaactgattgcttatcaacgagaattccttgctttgaaagaacgtcttcgaatagctgaacacagaatctcacagcgctcttctgaattaaatacgattgtgcaacagttcaagcgtgtaggagcagaaacaaatggaagtaaggatgcgttgaataagttttcagataataccctaaagctgttaaaggagttaacaagcaaaaaatctcttcaagtgccaagtatttattatcatttgcctcatttattgaaaaatgaaggaagtcttcaacctgctgtacagattggcaacggaagaacaggagtttcaatagtcatgggcattcccacagtgaagagagaagttaaatcttacctcatagaaactcttcattcccttattgataacctgtatcctgaagagaagttggactgtgttatagtagtcttcataggagagacagatattgattatgtacatggtgttgtagccaacctggagaaagaattttctaaagaaatcagttctggcttggtggaagtcatatcaccccctgaaagctattatcctgacttgacaaacctaaaggagacatttggagactccaaagaaagagtaagatggagaacaaagcaaaacctagattactgttttctaatgatgtatgctcaagaaaagggcatatattacattcagcttgaagatgatattattgtcaaacaaaattattttaataccataaaaaattttgcacttcaactttcttctgaggaatggatgattctagagttttcccagctgggcttcattggtaaaatgtttcaagcgccggatcttactctgattgtagaattcatattcatgttttacaaggagaaacccattgattggctcctggaccatattctctgggtgaaagtctgcaaccctgaaaaagatgcaaaacattgtgatagacagaaagcaaatctgcgaattcgcttcagaccttcccttttccaacatgttggtctgcactcatcactatcaggaaaaatccaaaaactcacggataaagattatatgaaaccattacttcttaaaatccatgtaaacccacctgcggaggtatctacttccttgaaggtctaccaagggcatacgctggagaaaacttacatgggagaggatttcttctgggctatcacaccgatagctggagactacatcttgtttaaatttgataaaccagtcaatgtagaaagttatttgttccatagcggcaaccaagaacatcctggagatattctgctaaacacaactgtggaagttttgccttttaagagtgaaggtttggaaataagcaaagaaaccaaagacaaacgattagaagatggctatttcagaataggaaaatttgagaatggtgttgcagaaggaatggtggatccaagtctcaatcccatttcagcctttcgactttcagttattcagaattctgctgtttgggccattcttaatgagattcatattaaaaaagccaccaactgatcatctgagaaaccaacacattttttcctgtgaatttgttaattaaagatagttaagcatgtatcttttttttatttctacttgaacactacctcttgtgaagtctactgtagataagacgattgtcatttccacttggaaagtgaatctcccataataattgtatttgtttgaaactaagctgtcctcagattttaacttgactcaaacatttttcaattatgacagcctgttaatatgacttgtactattttggtattatactaatacataagagttgtacatattgttacattctttaaatttgagaaaaactaatgttacatacattttatgaagggggtacttttgaggttcacttattttactatt

SEQ ID NO: 45372 - DNA, 923 bp, Homo Sapiens
catctctatttaagaaagaaaaagaccactggtcctcccagtgtttacaagatttttccattaaaacaggagggatcataatgagcggcctaacaaagacatttaaagacacgccaagaaggggcgcagacaggagtcctgagatgcagtcatgggaacccgcacctgttttcccgccctgggcacccagcgtggacaggctggccggtgccaggggcagggacctgggctgctccactttcacactcctggggtttccccgggagccttctctgtggcaagaagcctgtcctggaaagtcccggaccacaagtcaacaaggaaagtttctcgtgtactgaaaggtggcgtggatcctacagtttctcgtgtactgaaaagcggtgtggatcctacagcttctctactgaaaggtggcgtggatcctacagcttctcgtgtacggaaaggcggcgtggatcctacagcttctcgtgtacggaaaggcggtgtggatcctacagcttctctactgaaaggtggcgtggatcctacagcttctcgtgtacggaaaggcggcgtggatcctacagcttctcgtgtacggaaaggcggtgtggatcctacagcttctctactgaaaggtggcgtggatcctacagtttctcatgtacggaaaggcggcgtggatcctcagcttctcgtgtaccgaaaggcggcgtggagcagcacaaggagcttgagcgttgcaatgagaagtcatggctgtgaatcccaccccatcacgttttgaatgttgggcaaattaattaatcgttttatccacttactaggcgatgtatagtttgtatacttcatgccagtcattgttttagactcttaagatgcaaagataaataagaaagttgctttgggcaaagagtgagacctttttcttaaaaaaa

SEQ ID NO: 45373 - DNA, 357 bp, Homo Sapiens
atggagtttgggcttagctgggttttccttgttgctattttaaaaggtgtccaatgtgaggtgcagctggtggagtctgggggaggcttggtacagccagggcggtccctgagactctcctgtacagcttctggattcacctttggtgattatgctatgagctggttccgccaggctccagggaaggggctggagtgggtaggtttcattagaagcaaagcttatggtgggacaacagaatacgccgcgtctgtgaaaggcagattcaccatctcaagagatgattccaaaagcatcgcctatctgcaaatgaacagcctgaaaaccgaggacacagccgtgtattactgtactaga

SEQ ID NO: 45374 - DNA, 1392 bp, Homo Sapiens
atggctacttcaaagttgcccgtggtgcctggggaggaggaaaacaccatccttatggccaaggaaaggctggaggccctgcgcacagcctttgagtcgggtgacctcccccaggccgcctctcacctccaggagctgctggcctccacggaaagcatccgcctggaggtgggcgtcacgggcgagtcgggcgcgggcaagtcctccctcatcaatgccctgcgtggcctggaggccgaggaccctggcgcggctctcacgggcgtcatggagaccacgatgcaaccgtcgccctatccacacccacagttccctgacgtgaccctctgggacctgccaggagccggctctccaggctgcccggctgacaagtacctaaagcaggtagacttcagccgctatgacttcttcctgctggtctccccccgccgctgcggggccgtcgagacccgcctggccgctgagatcctgtgccagggcaagaagttctactttgtgcgcaccaaggtggacgaggacctggcggccacgcgcacccagcggccgtcgggcttcagagaggccgctgtcctgcaggagatccgagaccactgtgccgagcggctgcgggaggccggcgtggctgaccctcgcatcttcctggtgtccaacctctcgccggcccgctacgactttcccacgctggtgtccacctgggagcacgacctgccctcccaccggcgccacgctggcctgctgtcgctccccgacatctcgctggaggccttgcagaagaagaaggccatgcttcaagagcaagtcctcaagaccgccctggtgttgggcgtcatccaggccctgccggtcccagggctggcggccgcctacgatgatgcgttgctcatccactcactgcgtggctaccaccgcagctttggtctggacgacgactcgctggccaagctggccgagcaggtgggcaaacaggcaggtgacctgcgctcggtcatccgctccccactggccaacgaggtctcgcctgagactgtcctgcggctctattcccagtcgtccgacggcgccatgcgggtggcccgcgcctttgagaggggcatccctgtgtttgggacgctggtggctggcggcatcagctttggcgctgtctacaccatgctccagggctgcctcaacgagatggctgaggacgcccagcgtgtccgcatcaaggccctggaggatgacgagccgcagccggaggtcagcttggaagtggccagtgacaatggcgtggaaaaggggggctccggggagggaggtggggaggaagccccactctcaacctgcaggaagctcggcctccttcttaagtacattctggacagctggaagaaacacgactcagaagagaaataa

SEQ ID NO: 45375 - DNA, 1429 bp, Homo Sapiens
agctaccaatacccacagctgcatcatccacgcaaaagctacccatgcccacagctgcatcatccacgcaaaagtcaccaatacccacagctgcatcgtccacgcaaaagctaccaatacccacagctgcatggtccacgtaaaagctaccaatacccagagccgcatggtccacgcaaaagctaccaatacccacagctgcatcatccacgcaaaagtcaccaatacccacagctgcatcgtccacgcaaaagctaccaatacccacagctgcatggtccacgtaaaagctaccaatacccagagctgcatggtccacgtaaaagctaccaatacccacagctgcatggtccacgcaaaagctaccaatacccacagctgcatcatccacgcaaaagtcaccaatacccacagctgcatcgtccacgcaaaagctacccatgcccacagctgcgtggtccacgcaaaagctaccaatacccacagctgcatggtccacgcaaaagctaccaatacccacagctgcatcgtccacgcaaaagctacccatgcccacagctgcatcgtccacgcaaaagctacccatgcccacagctgcatggtccaccataacaacaatgggggcaacaacccacgcgtccatcaacggacacacaaaacgtggtctttctgcacagtgcagtgcagctcagccacagggaaggaggctccccactaggctccagtgcggggagccacgaaggccccgagctgacaaagccagacacaagggccacacgtggccccgtcaccttcatccgcggtgtccagaacaggcaagtctcctcggcagaagccccttcatgtgccaaggacgagccagaggtggagaagggccgtgggccggccccgtggacgagccagaggtggagaagggccgtgggccggccccgtggatgagccagaggtggagaagggccgtgggccggccccgtggacgagccagaggtggagaagggccgtgggctggccccatggtgcagatgagccctggtgtcacggctcacgctttataaaagctctcaaggggtcacagtgcagaggggatggggaggagggtttggggagggtaagcacttcgccggggcacttatcatttgtggaacattctctgaggctggctgtggggatcccctgtgagtctggacagccaggtcataggtcatgcttcctcctggcccggttttcacaccgtggtaccccacacgcatgcacacgtgtgcacaccatcacacactcagactttacacacatgcacctgcacgtgcgcccctggcaacggcacccgacgcagtgaccttggggctgctgtcgtcgggaagacagcctgccaggtggcccctcacacggcccctgcttccccctcacacggcccccgcttccccctcac

SEQ ID NO: 45376 - DNA, 1525 bp, Homo Sapiens
gctttttcctgtagacccggcacccgactgcgcggaaagactgtctaagccgccactcgattcactttcaaagagacatattatgcaaggaagcaactcggaagaggaaagaaaggaagtcaggaatggcccttactcaggggcaattgtcattcagcgatgtggccatagaattctctcaggaggagtggaaatgcctggaccctgggcagaaagctttatacagggacgtgatgttagagaactacaggaacctggtctccctaggaatctgtcttcctgacctgagtgttacctccatgttggagcaaaagagagatccctggactctgcagagtgaagtgaaaataataaacaatccagatggcagggagtgcatcaaaggtgtgaacacagatttttcacttctggcctgggacgcgcgcgtcttcagggtggaagcctggcgcgcgtccggaggtgctgaggagccaaccggcccaaactttgtgggaaatgactcccctctgccctcgcccctcgctctgctaccatttccttccgtttctgcttcgcttggcgatgcaaaacgcgcgaggctcacggcagagggccgaggccacgggactctcagggccgggcccgcccctcggccgcgcagtgcggcgccgcacgccccggacgctgtccagcgttggccgcctgagcagaggctgccgcggagctaagacacccgccgtttcacccagccagcgggcccagcccgcggaggagggcggcatgcagctccgcgttgcctggctctccgggcacgcgggctacgatctgtacagtgcctgtgattacacaccaccacctatggagaaggctcttgtgaaaacggacattcagacagcgcttccttctggatgttatggagagtagctccaaggtctggcttggctgcaaaacactttgttgatgtaggagctggtatcacagatgaagattatagaggaaatgttggtgttgtactctttaatttttgcaaagaaaagtttgaagtcaaaaaaaggtgatcgaattgcacagctcatttgtgaacggattttttaatccagaaatagaagaagttcaagctttggatgacaccaaaaggggatcaggaggttttggctctaccggaaagaattaaaatttatgccaagaacagaaaacgagaagtcatacctttttcttaaaaacaaagagtttttgcttaaagtgttttggtgttttacacttctgtaaacttactagctttaccttctaaaagtactgcattttttttttatgatcaaagaagagatcatttaaaaaaagcatttctttgtgtttggatcacaaagaaactttgtttttctgcagttgatggttatttgtaaatctactttgtggtgacctgatgtaaacagtgtcttcttaaatgtacatcaattacagattaaaaaaaaaatcctgtattatttaactcaagaaatgataccccttcagcaacttaaaaaaaaaagtttgtttttgttttgtg

SEQ ID NO: 45377 - DNA, 507 bp, Homo Sapiens
atgaaggggaacaccaactcagctgtcacccccgcccccaagtgtcactggctagaagatcttcccccggttcgccggcagcaccggtgggtcttgtcacctctgcgccccgcagccctccggaggctgcagttgctgtctgctgacaggcgtcccctcaggagaacgggagctcctccagcgcagggccctgctcagcacccctggtcccgggggcccccacggaggccgccgcgctcagtgaaactttgccgcgcgcagcagtggccggagacccgcgcggaccctctccccgcggggacccgccagggcgagtcgcccctcccccgcggcagacgacccgacctgggccaaggtcggccaagtgctcgccgcctgcccagcggcccttggacccacaggacccggacccgagtgcgcggaagcctccgagccgcggccaggtctcagaatgcgcggcggggcagcccggcccgtcaagcagcgaagccgaaactagaagcctga

SEQ ID NO: 45378 - DNA, 1188 bp, Homo Sapiens
cttcagaggcccggcgacctccagggctgggaagtcaaccgagctcccttccaggtcaatccaaactggagctcaactttcagaagagaaagacgccccagcaagcctctttcggggagtcctctagctcctcacctccatgggccagacagctctggcagggggcagcagcagcacccccacgccacaggccctgtaccctgacctctcctgtcccgagggcttggaagagctgctgtctgcaccccctcctgacctgggggcccagcggcgccacggttggaaccccaaagactgttcagagaacatcgaggtcaaggaaggagggttgtactttgagcggcggcccgtggcccagagcactgatggggcccggggtaagaggggctattcaaggggcctgcacgcctgggagatcagctggcccctagagcagaggggcacgcatgccgtggtgggcgtggccacggccctcgccccgctgcagactgaccactacgcggcgctgctgggcagcaacagcgagtcgtggggctgggacatcgggcgggggaagctgtaccatcagagcaaggggcccggagccccccagtatccagcgggaactcagggtgagcagctggaggtgccagagagactgctggtggttctggacatggaggagggaactctgggctacgctattgggggcacctacctggggccagcattccgcggactgaagggcaggaccctctatccggcagtaagcgctgtctggggccagtgccaggtccgcatccgctacctgggcgaaaggagagcggagccacactcccttctgcacctgagccgcctgtgtgtgcgccacaacctgggggatacccggctcggccaggtgtctgccctgcccttgccccctgccatgaagcgctacctgctctaccagtgagccctgtgataccacagactgtgctgaggtcttgccaccacccctccccttggggaggtggggaggcactgctggcctagaccagctgctgaaagctggtgaggctgagcccctaccccaacccaagctctgcggaaatcaacagccccagagccacttggagggaggaagaaagggagccggcgttcaaggctatgacagtctgctacgcaaaacattttttcaagtaaaaatagtaagagatgttgttatagaaa

SEQ ID NO: 45379 - DNA, 186 bp, Homo Sapiens
ggctgcaaattcagaggatcctcccagaagataagatggagcaggtcaccaccttcttccctgcttcacaccctcaggccccgactcttgtctgctgagatcactctccaaaccaatcttcccttacaaagcccttgttgcaggctatgctttctgaggggaacccaggccaagacactaaaatga

SEQ ID NO: 45380 - DNA, 3177 bp, Homo Sapiens
gtggagatgctttcagtggtggagaatggactggacccccaggctgccatcccggtcatcaagaagaagctggtgggatccgtgaaggccttgcagaagcagtacgtgtccctggacacggtggtcactagtgaagacggagatgccaacaccatgtgcagcgccctggaggccgtatttatccatggcctgcacgccaagcacatccgagctgaggccggaggaaaaaggaagaaaagtgcccaccagaagcctctgccccagcctgtcttctggcccctcctgaaagctgtcacccacaaacacatcatctcagagttggagcacctgacgtttgtcaacacggatgtgggccgctgccgggcatggctgcggctggccctgaacgatggcctgatggagtgctacctgaagctgctgctgcaggagcaggcccgcttgcatgagtactaccagcccaccgccctgctccgggatgctgaggagggcgagttcctccttagcttcctgcagggcctcacgtccttgtccttcgaactctcctacaagtctgccatcttaaatgagtggacgctcaccccattggccctgtctgggctttgcccgctttctgagctggaccctctctctacctctggtgcagaactacagcggaaggaatctctggattccatttcccattcttcaggctctgaagacatcgaagtccatcactcgggccataagatacggaggaaccagaagctgactgcctcctccctcagcctggacacggccagttcatcccagctgtcctgcagcctaaactctgatagctgcttactccaagagaatggctccaagagtccagaccattgcgaggagcccatgtcctgtgactcagacctgggcacagcaaatgctgaggactcagaccggtctctgcaagaggtattgttggaattcagcaaagcccaggtaaactctgtgccaaccaacggactgagccaagaaacagagatccccacaccacaggcctcgctctccctccatggcctcaacaccagcacatacctgcactgtgaggcacctgcagagccccttcctgcccaggcagcctctggaactcaagatggtgtccacgtgcaggagccgcgtccccaggcgcccagccccctggacttacagcagcctgtagagagcacctcaggccagcagccttctagtactgtcagcgagacagccagagaagtgggccaagggaatggcctgcagaaggcccaggctcatgacggagctggtctgaagctggtagtttcctcacccaccagtccgaaaaacaagagctggatctcagaggatgacttctaccggccttcccgggagcaacccctggagagtgcttcagaccacccaatagcttcttacagggggactccagggtcaaggcctggtctccacaggcatttttctcaagaaccaagaaaaaactgctccctgggggcgttagaccaagcgtgtgtaccttccccaggaagaaggcaagcccaggcagccccatcccaggggcataagagcttccgggtggtacaccggagacagatgggactgtccaacccattccggggtctcatgaagctgggcaccgtggagcggcggggggcaatgggcatctggaaggagctcttctgcgagctctccccgctggagttccgcctctacctgagcaacgaggagcacacctgtgtggagaactgctcgctgcttcgctgtgagtctgtggggccagcccatagtgatgggcgctttgagctggtcttctctggcaagaagctggccctgcgcgcctcctcccaggacgaagctgaggactggctggaccgggtgcgggaggccctgcagaaggtccggcctcagcaggaggatgagtgggtgaacgtgcagtacccagaccagcctgaggaaccccccgaggcgccccagggctgcctctctccctcagacctgctctcggagcccgcggccctccagggcacacagtttgactggtcgtccgcccaggttccagagccagatgccatcaaggagtccctgctgtacttgtacatggacaggacctggatgccctatatattttctctgtccttggaggctctgaaatgtttccgcatcaggaacaatgagaagatgctgagtgacagccacggcgtggagaccatccgggacatcctgccagacaccagccttgggggcccatccttcttcaaaatcatcacggccaaggctgtcctgaagctgcaggccggaaacgccgaggaagccgccctgtggagggatctggtccgcaaagtcctggcatcctacttggagacagccgaggaggcggtgaccctgggcgggagcctggatgaaaactgtcaggaggtgctgaaatttgccacccgggagaatggcttcctgctgcagtacctggtggctatccccatggagaaaggccttgactcccaaggctgcttctgcgcaggctgctcccggcagatcggcttctcctttgtacgacccaagctctgtgccttctctggcctctattactgtgacatctgccaccaagacgatgcctcagtgattccggccaggatcatccacaactgggacctcaccaagcgcccgatctgcaggcaggccctgaagtttctgacacagatccgggcccagcccctcatcaacctgcagatggtgaacgcgtctctgtacgagcatgtggagcggatgcacctcattgggaggagacgggagcagctgaagctcctgggggattacctgggcctgtgccggagtggcgccctgaaggagctcagcaagaggctcaaccacaggaattatctcttggaatctccgcataggttcagtgttgctgacctccaacagatcgcagacggggtgtatgaaggattcctcaaggccctgattgaatttgcctcccagcatgtctaccactgcgacctgtgcacccagcgcggcttcatctgccagatctgccagcaccacgacatcatcttcccctttgagtttgacaccacagtcaggtgtgccgagtgcaagaccgtcttccaccagagctgccaggctgtggtgaagaagggctgcccccgctgtgcccgccggcgcaagtaccaggaacagaacattttcgcctga

SEQ ID NO: 45381 - DNA, 613 bp, Homo Sapiens
gagttgagcacagagggacagaggcacggaacccccagaaatgtccctcctcagaaacaggctccaggccctgcctgccctgtgcctctgcgtgctggtcctggcctgcattggggcatgccagccagaggcccaggaaggaaccctgagccccccaccaaagctaaagatgagtcgctggagcctggtgaggggcaggatgaaggagctgctggagacagtggtgaacaggaccagagacgggtggcaatggttctggagcccgagcaccttccggggcttcatgcagacctactatgacgaccacctgagggacctgggtccgctcaccaaggcctggttcctcgaatccaaagacagcctcttgaagaagacccacagcctgtgccccaggcttgtctgtggggacaaggaccagggttaaaatgttcataaaagccaggtgtggttgtggcgggtgcctgtagtcccagctactcaggaggctgaggtaggatgatggcttgagcccaggagttcgagaccagcctgggcaacacagcgagatctcttgggggtaaaacaaaaagaaaaaaaaaagttcatacttctccaataaataaagtctcacctg

SEQ ID NO: 45382 - DNA, 1209 bp, Homo Sapiens
caggtgtggttcaagaatcgccgcgccaaactagctcgggagcggcggctccagcagcagccccagcgcgtccctgggcagagaggccgaggagcccgcgctgcgcccctagtccctgcagcctctgcctccgcacctcagcggggcccctcgggaatccttccagcggcggaacccacgatctgcagcctccaccaggcctggggtggccctgggtgcagagcccagaagggcatcccagctgccctgagtccaggccctggcccgatccctgccccaatcccaggcccagcccagatcccaggcccactccctggctcaattccaggcccaattccaggcccagctcagatcccaagcccgatcccagccccaatcccaggcccaatttcaggcccagtccagatcccaggcccattccgtggcccaatcccaggcccaatttcaggcccagccccgatcccaggcccaatctcaggcccattctcaggcccaaacccaggcccgatcccaggcccaaacccaggcccgatcccaggcccaatctcaggcccgatcccaggcccaatctcagtcccgatcccaggcccgatcccaggcccaatctcaggcccaatctcaggcccaaacccaggcccgatcccaggcccaatcccaggcccaatctcaggcccgaacccaggcccgatcccaggcccaatctcaggcccgaacccaggcctgatcccaggcccaatcccaggcccaatctcaggcccaggcccaattataggcccgattcccagcccagcccagatcccaggcccaggcagactccaaggcccaggtcccatcttaagtcctggccggatgcgaagccctggctcacttccaggcctagccccgattttaggcccaggctcaggcccaggctcaggctcagtcccagctccaatcccaggcccaggatcactcccagccccagcccccttatggcctcagagccccgatgcctccgacttcttgccagacacccagttattccctcacttcacagagctgctcctacccctagaccccttggagggatcctcagtctccaccatgacctctcagtaccaagaaggggatgactctatgggcaaaaaacactcagggtctcagccccaagaggagggtggctctgtgaatgaaaatcactcaggccccaggttattactggatttatag

SEQ ID NO: 45383 - DNA, 1413 bp, Homo Sapiens
tcacttggtgtgtctatatgtctggcagacattatcagcacattctctgttgttacctgtgattcattttttcttcactctccaggtgaatttcaattgctgaaaatttcccactgaaaatatgcagtaatatattttgtggttcagacatttggggcaaatggttcacattcattttagggttagtggtcatgctgtttatttttctctgctatacaaagttcctcttaggggtctgcctcatgacactaaaaaatgaatagagattctactgtaggttatctcctaggcttgagttcaacatttgtttggatttttgaagaaagtcaaatcaagcaatgctcccaaatgatgtctttgtaaattcataccctctggccctattttttttcatagaccctaactctacctttctgctttaaagcaaagtaaactcggtggcctcttcttctccacccctcaaaatgatagcaatctctgccgtcagcagtgcactcctgttctcccttctctgtgaagcaagtaccgtcgtcctactcaattccactgactcatccccgccaaccaataatttcactgatattgaagcagctctgaaagcacaattagattcagcggatatccccaaagccaggcggaagcgctacatttcgcagaatgacatgatcgccattcttgattatcataatcaagttcggggcaaagtgttcccaccggcagcaaatatggaatatatggtttgggatgaaaatcttgcaaaatcggcagaggcttgggcggctacttgcatttgggaccatggaccttcttacttactgagatttttgggccaaaatctatctgtacgcactggaagatatcgctctattctccagttggtcaagccatggtatgatgaagtgaaagattatgcttttccatatccccaggattgcaaccccagatgtcctatgagatgttttggtcccatgtgcacacattatacgcagatggtttgggccacttccaatcggataggatgcgcaattcatacttgccaaaacatgaatgtttggggatctgtgtggcgacgtgcagtttacttggtatgcaactatgccccaaagggcaattggattggagaagcaccatataaagtaggggtaccatgttcatcttgtcctccaagttatgggggatcttgtactgacaatctgtgttttccaggagttacgtcaaactacctgtactggtttaaataagtttaccttttcctccaggaaatataatgatttctgggaacatgggcatgtatatatatatatggagagagaattttgcacatattatacatattttgtgctaatcttgttttcctcttagtattcctttgtataaattagtgtttgtctagcatgtttgtttaatcctttg

SEQ ID NO: 45384 - DNA, 2097 bp, Homo Sapiens
atgtgtcagaacttcttcattgacagctgtgctgcccatgggccccctacatttgtaaaggacagtgcagtggacaaggggcaccccaaccgttcagccctcagtctgcccccagggctgagaattgggccatcaggcatccctcaggctgggcttggagtatggaatgaggcatctgatctgccgctgggtctgcactttggcccttatgagggccgaattacagaagacgaagaggcagccaacaatggatactcctggctggtaagaagagcctgccatttcccctgttctatcaccaaggggagaaactgctatgagtatgtggatggaaaagataaatcctgggccaactggatgaggtatgtgaactgtgcccgggatgatgaagagcagaacctggtggccttccagtaccacaggcagatcttctatagaacctgccgagtcattaggccaggctgtgaactgctggtctggtatggggatgaatacggccaggaactgggcatcaagtggggcagcaagtggaagaaagagctcatggcagggagagaaccaaagccagagatccatccatgtccctcatgctgtctggccttttcaagtcagaaatttctcagtcaacatgtagaacgcaatcactcctctcagaacttcccaggaccatctgcaagaaaactcctccaaccagagaatccctgcccaggggatcagaatcaggagcagcaatatccagatccacacagccgtaatgacaaaaccaaaggtcaagagatcaaagaaaggtccaaactcttgaataaaaggacatggcagagggagatttcaagggccttttctagcccacccaaaggacaaatggggagctgtagagtgggaaaaagaataatggaagaagagtccagaacaggccagaaagtgaatccagggaacacaggcaaattatttgtgggggtaggaatctcaagaattgcaaaagtcaagtatggagagtgtggacaaggtttcagtgttaaatcagatgttattacacaccaaaggacacatacaggggagaagctctacgtctgcagggagtgtgggcggggctttagctggaagtcacacctcctcattcaccagaggatacacacaggggagaagccctatgtctgcagggagtgtgggcggggctttagctggcagtcagtcctcctcactcaccagaggacacacacaggggagaagccctatgtctgcagggagtgtgggcggggctttagccggcagtcagtcctcctcactcaccagaggagacacacaggggagaagccctatgtctgcagggagtgtgggcggggctttagccggcagtcagtcctcctcactcaccagaggagacacacaggggagaagccctatgtctgcagggagtgtgggcggggctttagctggcagtcagtcctcctcactcaccagaggacacacacaggggagaagccctatgtctgcagggagtgtgggcggggctttagctggcagtcagtcctcctcactcaccagaggacacacacaggggagaagccctatgtctgcagggagtgtgggcggggctttagcaataagtcacacctcctcagacaccagaggacacacacaggggagaagccctatgtctgcagggagtgtgggcggggctttcgcgataagtcacacctcctcagacaccagaggacacacacaggggagaagccctatgtctgcagggagtgtgggcggggctttagagataagtcaaacctcctcagtcaccagaggacacacacaggggagaagccctatgtctgcagggagtgtgggcggggctttagcaataagtcacacctcctcagacaccagaggacacacacaggggagaagccctatgtctgcagggagtgtgggcggggctttcgcaataagtcacacctcctcagacaccagaggacacacacaggggagaagccctacgtctgcagggagtgtgggcggggctttagcgataggtcaagcctctgctatcaccagaggacacacacaggggagaagccctacgtctgcagggaggatgagtaa

SEQ ID NO: 45385 - DNA, 789 bp, Homo Sapiens
attggacgactgattattggacagaatggcatcttgtcaacacctgcggtctcctgcattatcaggaagatcaaggcagctggtggaatcattctaacagccagccactgccctggaggaccagggggagagtttggagtgaagtttaatgttgccaatggaggtcctgcacccgatgttgtctcagacaaaatctaccaaatcagcaaaacgattgaggaatatgctatatgtcctgatctccaaatcgacctatctcgactaggaagacaagaatttgacctagagaacaaattcaaaccattcagagtagagatagtggacccagtggatatctatcttaacctccttcggaccatctttgactttcatgccatcaagagtttgctgactgggcccagccaactgaagattcgcgttgacgcaatgcacggagttatgggaccttatgtgagaaaagttctgtgtgatgagctgggggccccagccaattctgcaataaactgtgttcccctggaagactttggagggcagcaccctgacccaaacctgacatatgcaatgactcttctggaagcaatgaaaggaggagaatatggatttggagctgcatttgatgctgatgggataagacgttatatgatcctaggccaaaatggcttctttgtgagcccttctgactccctggccatcattgctgccaacctctcttgcattccatatttccgtcagatgggggtccgcgggtttgggaggagtatgccaaccagcatggccctggacaggtaa

SEQ ID NO: 45386 - DNA, 1272 bp, Homo Sapiens
tcaaagttggaaaagtatgttgatatagatgctggaaagtataccattggcttgggccaggccaagatgggctcctgcacacatggagaagagatcaactctctttgcatgcctgtggttcagaatcttatggagagaaaaaatctttcctacgattgcactggccgactggaagttggaacagagacaatcaaggacaaatcaaagtcagtgaagactaatttgatgcagctgtttgaggagtctggggatatagatatagaaggaaccgacacaactcatgcatgctatggagccccagctgctgtcttcagtgctgttaactggattgagtccagctcctgggatggacagtttgccctggagtttgtaggagatattgctgtatatcccacaggaaaagttagactgacaggtagagtcagagcagtagctctgctaattgagccaaatgcaactttaatttttgaacgagggcttcgtgggacacatatgcaacgtgcctatggcttttatgagcctgatatgctctctgaatgtcctatagtagatggaaaaccctccacacagtgctgcttcagtgcattagatcactgctattctgtcgactgcaaaacgatccgtgcccagtggcagaaagacggaaatgataaagattttaccttgaataattttggcttcttgatccttcactcaccatattgtaaactggtgagtttatctctagctcggatgttgcggaatgacttccttaatgatcagaacagagataaaaatacctttgggaatgttaaattagaagacatctattttgatacagatgtggagatggcatttatgaaggatagttccgaactctcccatcagaaaacaaaggcatctttgctgtccagtgaaaatggaaatacgtacacatcgtcagtatatggttccccgcaactgtcccagcgcagtactcacctcagcaatgatcagggaagaactggagtgttctcgtacggttctggttcagccgccaccctgtactctcttaaagttccaccagatgccacaccatggtctgctgttgataaaataacagcaagcttatgggatcttaaatcaaggtgtagctcaagaacttgtgtggtaccagatgtctttgttgaaaacatgaagctcagagaggacacccatcacttggtcaactctgttccccggggcccaagagattcactctttgaagaaacatggtacttagctatggtgggtgaaaagcacagaagaagttac

SEQ ID NO: 45387 - DNA, 1664 bp, Homo Sapiens
gatttcaagcagatgcagcctgaccattagggccaaggccaaattgcaaaaaaaaaaagaagtttgcctttattctactccatccacatctaaactttggaggtcaaggctgtggacagatcagaagacatagttccctccttctggggctccacatccttcattcactgatctctgggaaggaggatgggtggcaggatgggtcttccatgatactgaagggagagccacatgttgatgcccaggaccagctgcctccttggtctgaaaggcctgatcgaggccaggattggctatgagagctgggaaatgggaccatctttgaagccatgggagagggtgagagccaccatcactcatgttcttgaatgggaactgcctggagaccctgaagaagaaggagcctgaaggaggaaggaggaggctgagccatcccgggaacatgggctggatgaggccaagccaggagacgacaccaccagatagaagtcaccattcaggatttggacttttctgtggagatcctggccccgagatcgaacccttctccctgtgggtgttcccgcaggagatggtgctggagatccaccagctgttcatggaccatgaatacccatgtcaccacatcacttctcactgcacctgggtggcagcacactggaccacgtctcagagctgcgcagcatggcagggctgcaggcgggcttgctgctccacgtggtggaagagccctgcacaatgcacaaggcccacggtgatgagtgccacatttgagactgctcaggagcctggacccagctgatgcagctccttgtccttcctgagcgtcttcactgacagtggcctgagagacggcaggagcagaaagacttggagatggaccccaccgactgcacaccacccaagtacatcctgctagggaccctggaacagccactgtgtcccctgcaaccccagaacggtgactaaaagcccctgaaagtgctcaccgtgagcggctggtacctgtcccctgggaactgcaagatgcacaggaccttgtgtacctgtttgtgatcacagccgaggaccagcgaggtagcattaccacatccacacagggcttttaccataactgccccagtactggaacgaggagctgcagatgatgagggacctacccaacaagaaccaacctgagcagctgcttcaagaaaaagccatgttcaaggtgcctgaatcccctggtaagtgagtgacagcctcacagcctcaggcccacctggctcctgctggaaggttttcttgtgctcgggagagaagtgagggaagccggcagtcccagccctgtcaggtgccctgaaggcccgtcaggtttgccctgcaaggccttctagcattctgcttcctgggagaccatcccccacctttctccggcctctgagactttgagtccttgggaggagaaggccctccttgctatctgggctgagtggccagggccatccagcttcccaccctccactgactgccatggggccctcccctgagcacatggtgcccaactgtagcccttctagggcaggggctcattggcagcacttgcagcttgctggcacttaaaagtcattagtgcggttactgagagaaatgaggaaaaaataattgttaaaaaaaaaaaaaaa

SEQ ID NO: 45388 - DNA, 639 bp, Homo Sapiens
atggcgaagcagtacgatgtgctgttccggctgctgctgatcggggactccggggtgggcaagacctgcctgctgtgccgcttcaccgacaacgagttccactcctcgcacatctccaccatcggtgttgactttaagatgaagaccatagaggtagacggcatcaaagtgcggatacagatctgggacactgcagggcaggagagataccagaccatcacaaagcagtactatcggcgggcccaggggatatttttggtctatgacattagcagcgagcgctcttaccagcacatcatgaagtgggtcagtgacgtggatgagtacgcaccagaaggcgtccagaagatccttattgggaataaggctgatgaggagcagaaacggcaggtgggaagagagcaagggcagcagctggcgaaggagtatggcatggacttctatgaaacaagtgcctgcaccaacctcaacattaaagagtcattcacgcgtctgacagagctggtgctgcaggcccataggaaggagctggaaggcctccggatgcgtgccagcaatgagttggcactggcagagctggaggaggaggagggcaaacccgagggcccagcgaactcttcgaaaacctgctggtgctga

SEQ ID NO: 45389 - DNA, 930 bp, Homo Sapiens
atggaaaatcaaaacaatgtgactgaattcattcttctgggtctcacagagaacctggagctgtggaaaatattttctgctgtgtttcttgtcatgtatgtagccacagtgctggaaaatctacttattgtggtaactattatcacaagtcagagtctgaggtcacctatgtatttttttcttaccttcttgtcccttttggatgtcatgttctcatctgtcgttgcccccaaggtgattgtagacaccctctccaagagcactaccatctctctcaaaggctgcctcacccagctgtttgtggagcatttctttggtggtgtggggatcatcctcctcactgtgatggcctatgaccgctacgtggccatctgtaagcccctgcactacacgatcatcatgagtccacgggtgtgctgcctaatggtaggaggggcttgggtggggggatttatgcacgcaatgatacaacttctcttcatgtatcaaatacccttctgtggtcctaatatcatagatcactttatatgtgatttgtttcagttgttgacacttgcctgcacggacacccacatcctgggcctcttagttaccctcaacagtgggatgatgtgtgtggccatctttcttatcttaattgcgtcctacacggtcatcctatgctccctgaagtcttacagctctaaagggcggcacaaagccctctctacctgcagctcccacctcacggtggttgtattgttctttgtcccctgtattttcttgtacatgaggcctgtggtcactcaccccatagacaaggcaatggctgtgtcagactcaatcatcacacccatgttaaatcccttgatctatacactgaggaatgcagaggtgaaaagtgccatgaagaaactctggatgaaatgggaggctttggctgggaaataa

SEQ ID NO: 45390 - DNA, 1212 bp, Homo Sapiens
catgaaacagttgatggctatagaagatatttcactcaaattgtagggttctttgtggtagaagatcacattttacatgtgacccaaggattagtaaccagggcatacactgatgaactttggaacatggccctctcaaagataattgctgtccttagagctcattcatcctattgcactgatcctgatcttgttctggagctgaagaatcttactgtaatatttgcagatactttacagggttatggttttccagtgaaccgactttttgaccttttatttgaaataagagaccaatacaatgaaacactgcttaagaaatgggctggagttttcagggacatttttgaagaagataattacagccccatccctgttgtcaatgaagaagaatataaaattgtcatcagcaaatttccctttcaagatccagaccttgaaaagcagtctttcccaaagaaattccccatgtctcagtcagtgcctcatatttacattcaagttaaagaatttatttatgccagccttaaattttcagagtcactacaccggagctcaacagaaatagacgatatgcttagaaaatcaacaaatctgctgctgaccagaactttgagtagctgtttactgaaccttattagaaaacctcatataggtttgacagagctggtacaaatcatcataaacacaacacacctggagcaagcttgtaaatatcttgaggactttataactaacattacaaatatttcccaagaaactgttcatactacaagactttatggactttctactttcaaggatgctcgacatgcagcagaaggagaaatatataccaaactgaatcaaaaaattgatgaatttgttcagcttgctgattatgactggacaatgtctgagccagatggaagagctagtggttatttaatggaccttataaattttttgagaagcatctttcaagtgtttactcatttgcctgggaaagttgctcagacagcttgcatgtcagcctgccagcatctgtcaacatccttaatgcagatgctactggacagtgagttaaaacaaataagcatgggagctgttcagcagtttaacttagatgtcatacagtgtgaatatgaggtgttgctgtgttgcccagactggtctcaaactcctggcctcaagtcatcctcctgccttggcatcccaaaatgctggaattag

SEQ ID NO: 45391 - DNA, 531 bp, Homo Sapiens
atggagcccgagcccgagcccgcggccgtggaggttcccgcggggcgcgtgctcagcgcccgggagctcttcgccgcccgctcgcggtcgcagaagctgccccagcgctcgcatggccccaaggactttctgcccgacggctcggcagctcaggccgagcggctgcgccggtgccgggaagagctctggcagctgctggcagagcagcgcgtggagcgcctgggcagcttggtggctgccgagtggaggccagaagagggcttcgtggagttgaagtctcccgcgggcaaattctggcagaccatgggcttctcagagcagggccggcagcgccttcacccggaagaggccttgtatcttctggagtgtggctccatccacctcttccaccaagacctgccactgtctatccaggaagcttaccagctgctgctgaccgaccacactgtgaccttcctgcagtaccagccacctgaagaggttgggttatgtggttcgacgattccaaccaaggtaaatccccttcctgtt

SEQ ID NO: 45392 - DNA, 516 bp, Homo Sapiens
tacacattttggaactttatacccaagaatttatttgaacaattcagaagagtagccaacttttatttccttatcatatttctggtgcagttgattattgatacacccacaagtccagtgacaagcggacttccactcttctttgtcattactgtgacggctatcaaacagggttatgaagactggcttcgacataaagcagacaatgccatgaaccagtgtcctgttcatttcattcagcacggcaagctcgttcggaaacaaagtcgaaagctgcgagttggggacattgtcatggttaaggaggacgagacctttccctgcgacttgatcttcctttccagcaaccggggagatgggacgtgccacgtcaccaccgccagcttggatggagaatccagccataaaacgcattacgcggtccaggacaccaaaggcttccacacagaggaggatatcggcggacttcacgccaccatcgagtgtgagcagccccagcccgacctctacaagtaa

SEQ ID NO: 45393 - DNA, 525 bp, Homo Sapiens
atggagagctggtggggacttccctgtcttgcgttcctgtgttttctaatgcacgcccgaggtcaaagagactttgatttggcagatgcccttgatgaccctgaacccaccaagaagccaaactcagatatctacccaaagccaaaaccaccttactacccacagcccgagaatcccgacagcggtggaaatatctacccaaggccaaagccacgccctcaaccccagcctggcaattccggcaacagtggaggttacttcaatgatgtggaccgtgatgacggacgctacccgcccaggcccaggccacggccgcctgcaggaggtggcggcggtggctactccagttatggcaactccgacaacacgcacggtggagatcaccattcaacgtatggcaatccagaaggcaatatggtagcaaaaatcgtgtctcccatcgtatccgtggtggtggtgacactgctgggagcagcagccagttatttcaaactaaacaataggagaaattgtttcaggacccat

SEQ ID NO: 45394 - DNA, 3109 bp, Homo Sapiens
attttctgtgtcttctaagttcgcttgttttagctcatctgtccgtcatgttcctggtatgttttctagataaatggcttacttttcacccacaaaagccataatagctgatgcttctgtgtagaaccaagtttcattttgactcaagagctggtacattgcaccccttcatcaaatctctgtgtctacaatctcataaactatcaaattctgggtatttgatgagagaaagcttaatattgaagtatctctcctatgaggtgttagaactatttgcctacaatttattggggaaaaaattgctcatttgtgtacataaacctaggacagagcacatagggaagataacattccaacacaggggaattttgcccaaggctcatgaaagaacccaagccagttttctcaagacttgacctcaggcctactggaatatttctctcaaagtctcctgttctcacactgacaagactgatgtccctgtgttaggattggacagaggaatgtttctgtgtgcaaggaagaactgcttaatgtaagaggccccatctgaatttatttgcaggacatcggtgggatcaagtgaaaaaggaggaccaagaggcaacaggtcccaggctcagcagggagctgctggctgagaaagagcctgaagtcttgcaggactcactggatagatgttattcaactccttcagtttatcttggactgactgactcatgccagccctacagaagtgccttttacgtattggagcaacagcgtgttggcttggctgttgacatggatgaaattgaaaagtaccaagaagtggaagaagaccaagacccatcatgccccaggctcagcagggagctgctggctgagaaagagcctgaagtcttgcaggactcactggatagatgttattcgactccttcaggttatcttgaactgcctgacttaggccagccctacagaagtgctgtttactcattggaggaacagtaccttggcttggctcttgacgtggacagaattaaaaaggaccaagaagaggaagaagaccaaggcccaccatgccccaggctcagcagggagctgctggaggtagtagagcctgaagtcttgcaggactcactggatagatgttattcaactccttccagttgtcttgaacagcctgactcctgccagccctacagaagttccttttatgcattggaggaaaaacatgttggcttttctcttgacgtgggagaaattgaaaagaaggggaaggggaagaaaagaaggggaagaagatcaaagaagaaaagaagaaggggaagaaaagaaggggaagaagatcaaaacccaccatgccccaggctcaacagcgtgctgatggaagtggaagagcctgaagtcttgcaggactcactggatagatgttattcgactccatcaatgtactttgaactacctgactcattccagcactacagaagtgtgttttactcatttgaggaacagcacatcacctttgcccttgacatggacaatagcttttttactttgacggtgacaagtctccacctggtcttccagatgggagtcatattcccacaataagcagcccttactaagccgagaggtgtcattcctgcaggcaggacctataggcacctgaagatttgaatgaaactatagttccatttggaagcccagacataggatgggtcagtgggcatggctctattcctattctcagagcatgccagtggcaacctgtgctcagtctgaagacaatggacccacgttaggtgtgacacgttcacataactgtgcagcacatgccgggagtgatcagccggacattttaatttgaaccatgtatctctgggtagctacaaaattcctcagggatttcattttgcaggcatgtctctgagcttctatacctactcaaggtcagtgtcatctttgtgtttagttcatccaaaggtgttaccctggtttcaatgaacctaacctcattatttgtgtcttcagtgttggcttgttttagctgatccatctgtaacacaggagggatccttggctgaggattgtatttcagaaccaccaactgctcttgacaattgttaacccgctaggctcctttggttagagaagccacagtccttcagcctccaattggtgtcagtacttaggaagaccacagctagatggacaaacagcattgggaggccttagccctgctcctctcaattccatcctgtagagaacaggagtcaggagccgctggcaggagacagcatgtcacccaggactctgccggtgcagaatatgagcaatgccatgttcttgcagaaaacgcttagcctgagtttcataggaggtaatcaccagacaactgcagaatgtagaacactgagcaggacaactgacctgtctccttcacatagtccatatcaccacaaatcacacaacaaaaaggagaagagatattttgggttgaaaaaaagtaaaaagataattagctgcatttctttagttattttgaaccccaaatatttcctcatctttttgttgttgtcattgatggtggtgacatggacttgtttatagaggacaggtcagctctctggctcaatgatctacattctgaagttgtctgaaaatgtcttcatgattaaattcagcctaaactttttgctgggaacactgcagagacaatgctgtgagtttccaacctcagcccatctgcgggcagagaaggtctagtttgtccatcaccattatgatatcaggactggttacttggttaaggaggggtctaggagatctgtcccttttagagacaccttacttataatgaagtacttgggaaagcggttttcaagagtataaatatcctgtattctaatgatcatcctctaaacattttatcatttattaatcctccctgcctgtgtctattattatatacatatctctacgctgcaaattttgggtctcaatttttactgtgcctttgtttttactagtgtctgctgttgcaaaaagaagaaaacattctctgcctgagttttaatttttgtccaaagttaattttaatctatacaattaaaaccttttgcctatc

SEQ ID NO: 45395 - DNA, 2219 bp, Homo Sapiens
attttaggatgatgacttggaaacagacgtgaacaagctgagttccaaacctggtcttgaccgacctgaagaggaactgatgcaatatgaggtgatgtgtcttgagctctcctatagctttgaggaactgcagtccaaacttggagatgatttgaactctgaaaagactcagtatgccaatcaccaccacattccagccgctgcctcctcaaaacagcattgctacagcaaggaccaaagctcctgtgggcaagaaagagaatatgctgtccagacttcccttctgtgcagggtgaagacgggaaggtccactgtgcatctaggctccaaaaaaaatcctggagtgaacctgtaccaaaatgtgcaatccaatagtctcaggagagattcttctgaaagtgaaatccctgacattcaggcttccccgaaagcagatgcctgggacgtagatgcaattttctgcccaaggatgagtgcctccttttctaattccactaggactagagaagttgtcaaagtaatagataagcttctgcagacacatctgaagcgtgtccctttccacgatccctatctttatatggccaaagccagaagaaccagctctgtggtggacttcaagatgatggcatttcctgatgtctggggacactgtccccctcccaccacccagcctatgttggaacgaaaatgtggagtccaaaggatcaggatatttgaggatattcggaggctcatccagccaagtgatgttataaataaagttgtcttcagtttagatgagccttggcctttgcaagacaatgcttccaattgtttacggttcttctccaaatttgagtcaggaaatcttcgcaaagccatccaagtgcgtgagttcgagtatgacttgctggtcaacgcagatgtgaatagcacccagcaccagcagtggttctatttcaaagtgagcggtatgcaggcggccatcccttaccacttcaacatcatcaactgtgagaagcccaacagccagtttaattatgggatgcagcccaccctatattctgtgaaggaggctcttcttggcaaacccacctggataaggacaggccatgaaatatgttattacaaaaatcattatcgccagagtacagctgttgcaggcggagcatctgggaagtgctactataccctcacctttgctgtcaccttcccacacagtgaggatgtctgctacctggcctaccactatccctatacctacacagccctcatgactcatcttgacatcctggaaaagagtgtcaacctcaaagaggtctacttccggcaagatgttctctgccagacgctgggagggaatccgtgtcccttggtgaccatcacggccatgcctgagtccaacagtgatgagcatctagagcagttccgtgagtaaaatgggatcctcttcgtagaagatttgactaagggtgtcctttatagtcttggaagcattctgtctcttttagatcaaaagctccataaagggttggagactgtctgtctttgtagaaatacacccccagcttttcttggtgtgacacaaaggttaaacattaatgttgctttgttgttaaagggagagaaaatgaaatgaattcaaactgtccggcagatgaaatgacagtttgctaatgatggtcacttcctctcttaaaacagaaccaggaccctgaatcatattttccaacttctaatccagggacttttctcactgtgctcactgctgttatgtgactctcagtcagtcaaggtttggaaagaaagaaagttgagtttttaagccctggctaaagaatccccttgataacctgaataccatttgtgtctgaagggctgaagatgtggacaggctctagctaagaactttgaaacaaagtcaaagccaaactcatgcacacacacgcagacacacacaaatatacgcatatggacatatagacaaacacatagacacatgtagacacaaacatatacacagacgtgtagacacaaacatatacgcctagacgtgtatacatgtgtagacacaaacatatacacagatgtgtatacacgtatacagacacgtacacacaaacatctttaaatgttgggcttctgtgcctaagtgcatatgtgcgactgacctgttgacctgttacgaactagcttttgaaaatggcttctgacatcatttcagaccttaggtaggc

SEQ ID NO: 45396 - DNA, 438 bp, Homo Sapiens
ttgttaaaaaatgctatgcatgtacaaaatgtgaaaaagccttcacttattccaactcccttcagaaacacgaaactcatactggagagaaaccctttagatgtaagaagtgtggtcatggtttcagttattcctcttacctttgatatcatgagagaactcacactggagaaaaaccctatgaatgtaaaaaatgtggtaaagccttcggatatagtagttccctatgaaaacatgacagaactcatactggagagaaaccctatgagtgtaaggattataggaaaatgtttagttatgccaatcatcttcgtagccatcaaagaactcacaccagagagaaaccctatcagtaaagactgtgggaaagccttcagatcttccagtttttgtcaacaacataaaagcactcacactggagaaaaaccctatgaatgt

SEQ ID NO: 45397 - DNA, 2193 bp, Homo Sapiens
atgtctaagaactcagagttcatcaatctgtcatttttattagatcatgagaaggaaatgatcctgggcgtcctaaagagagatgaatatttgaaaaaagtggaggacaagagaataaggaagctgaaaaatgaactcttagaagcaaaacgtagaagtgggaaaactcaacaagaggccagcagagtttgtgttcactgtcacagaaacctgggcctaatctttgaccggggagacccttgtcaggcttgctcactgagggtatgcagggagtgtcgagttgcaggccccaatggcagctggaagtgcactgtctgtgacaaaatcgcgcagctaaggattataactggtgagtggttttttgaagaaaaggcaaaacgtttcaagcaagtcaatgttctcggcactgatgttgtccgacagtccattttaagaagaagtccaggagctgaagaagtacagagccaagagcaaacccgccaggatgcagaaaagtcagacacttcacctgttgctgggaagaaggccagccatgatgggcccaagagaaagggatttcttcttagcaagttcagatcggcaaccagaggagaaatcataactcccaaaactgacactgggcggagctatagcttggacttagacggtcaacattttcggagtttaaaatcacctcctggttcagacaggggaagcactggctcatcagatctcaatgaccaggaacctggtcctaggaccccgaagagcagtcggagcaatggtgtgaccccaggcactcagagttcaccagccccaagcacacgaactgtgacctcagtcatcagtagagagtatggttttgaaaattccatggatttggctgctattgaaggtacctctcaggagctcacaaagagtcaccgcagaaacacttctggcacaccttccatagcagtgtctggaacctctctctcctcagatcagagtcgatctgagttagatttgagtgagtcatttacagaagactcagaggatactgtaagcataagaagcaagtctgtccctggggctttagacaaggactccttggaagagactgaagaaagcattgatgccttagtgtcctcgcagttatctacaaacactcaccgtctggcaagtggcctatcaactaccagccttaacagcatgatgagcgtttacagtgaaacgggagactatggcaacgtgaaagtcagtggtgaaatccttctccatatcagctactgctacaaaactggtgggctgtacatttttgtcaagaattgcagaaatctggccataggagatgaaaagaaacagaggacagatgcttatgtcaagtcatatcttcttcctgacaagtcccggaacaacaagcgtaagaccaaaatcagaacaggcaccaatccagaattcaatgaaacactaaagtacactatcagccatacccagctggaaacaagaactctgcagctctcagtctggcactatgatcgatttggacgtaatagcttcctcggggaagtagagattccttttgactcatggaactttgaaaatccaactgatgagtggtttgtgcttcaacccaaggtggagtttgctcctgatattggccttcaatacaaaggagagctgacagttgttttacgttacattcccccagaagagaacctgatgcttccaccagaacaactccaaggaaataagacttttaaaaagggaaagaagaaggagtcacctgtaatctctggaggaatactagaagtgttcatcaaagaggcaaagaatttgacagcagtgaagtcaggaggcacttctgatagctttgtgaagggctacctgctccctgatgatagcaaagccaccaagcacaaaactctggtaataaaaaagagtgttaaccctcagtggaatcatacattcatgttcagtggcatccatccccaggatataaagaatgtttgcctagaacttactatctgggacaaggaggccttttccagcaacatctttctgggaggagttcgtttgaattctggaagtggtgtgagccatgggaagaacgtggattggatggactctcagggggaagagcagcgcctttggcagaagatggccaacaaccctggaactccctttgagggtgtactcatgcttcgttccagcatgggaaaatgtaggctctaa

SEQ ID NO: 45398 - DNA, 453 bp, Homo Sapiens
gccaagtccaagaaccacaccacacacaaccagtcccgaaaatggcacaatggcatcaagaaaccccgattgcaaagatatgaatctcttaagggggtggaccccaagttcctgaggaacatgggctttgccaagaagtgcaacaagaagggcctaaagaagatgcaggccaacaatgccaaggccatgagtgcacgtactgaggctatcaaggtcctcataaagccaaaggaggttaagcccagaccaaagggtgtcagcctcaagctcaatcaatttgcctacattacccaccccaagcttgggaagtgtgcttgtgcccgcattgccaagggtctcaggttgtgtgggccaaaggccaaagccaaggatcaaaccaaggcccaggctgcagctccagcttcagtttcagctcaggctcccaaagatgcccaggcccctacaaagacttca

SEQ ID NO: 45399 - DNA, 345 bp, Homo Sapiens
atggtgtccccgttgcaattcctgcggcttctgctcctctgggttccagcctccaggggtgatgttgtgatgacacagtctccagctttcctctctgtgactccaggggagaaagtcaccatcacctgccaggccagtgaaggcattggcaactacttatactggtaccagcagaaaccagatcaagccccaaagctcctcatcaagtatgcttcccagtccatctcaggggtcccctcgaggttcagtggcagtggatctgggacagatttcacctttaccatcagtagcctggaagctgaagatgctgcaacatattactgtcagcagggcaataagcaccct

SEQ ID NO: 45400 - DNA, 1298 bp, Homo Sapiens
gactgaagcacctgctccgccatgaacctgccaagagctgagcgccctcgctccacaccgcagcgcagcctccgggactccgatggggaagacggtaaaatcgatgtcctgggagaggaggaagatgaagacgaggtggaagacgaggaggaggaggcgagccagaagttcctagagcagtcgctccagccggggctgcaggtggcccggtggggcggggttgcgcttccccgagagcacatcgagggcggcggcccgagcgacccctcagagtttggcaccgagttcagggcaccgccaaggtctgcggcggcctctgaagatgcccggcagccggcaaagcccccctactcgtacatcgcgctcatcaccatggccatcctgcaaagcccgcacaagcgcctcacgctcagcggcatctgcgccttcattagtggccgcttcccctactaccgccgcaagttccccgcctggcagaacagcatccgccacaacctctcgctgaacgactgcttcgtcaagatcccccgcgagccgggccacccaggcaagggcacctactggagcctggaccccgcctcccaggacatgttcgacaatggcagctttctccggcgtaggaagcgtttcaagcgccaccaactgaccccgggagcccacctgccccaccccttccctctacctgctgcacacgccgccctgcacaacccccgcccaggccctctgcttggggcccctgccctgccgcagccagtcccgggggcctaccccaacaccgcccccgggagacgcccttacgctctgctgcacccgcatcctcctcgctacctactgctctcggcccccgcctatgccggggcaccgaagaaagcagaaggcgcggacctggcgacccccggcacccttcccgtgctgcagccctcacttggtcctcagccttgggaggagggcaagggtctggcgtcgccaccgggaggcggatgcatctctttcagcattgagagtatcatgcaaggggtcaggggagcgggtacaggggctgcgcagagtttgtccccgaccgcgtggagctactgccccctgctccagcgaccgtcaagcctgtcggacaattttgcagcaacagcagcagcatcaggaggaggactgcgccaacggctgcgctcccaccaagggcgcggtgctgggcgggcacctgtcggccgcgtcggcgctgctgcggtatcaggcggtggcagagggctctaggctgacatcgctggctgcccctttgggcggagaggggacctcaccagttt

SEQ ID NO: 45401 - DNA, 342 bp, Homo Sapiens
atgggcagctgtgtcctctgctatgtgaccctgtgtctcctgggagcaggctgttttcatgccaaagtcacacagactccaggatatttggtcaaaggaaaaggaaggaaaacaaagatgtattgtacccccaaaaacggacatacttttgtttgttggtatcagcagaatcagaataaagagtttatgtttttgatttcctttcagaatgaacaagttcttcaagaaatggagatgcacaagaagcgattctcatctcaatgccccaagaacccaccctgcagcctggcaatcctgtcctcggaaccgggagacaccgcactgtatctctgtgccaccagt

SEQ ID NO: 45402 - DNA, 231 bp, Homo Sapiens
atgtatctggcccaatcgctgagcgtccgcgctgcatttctccaaactgcccagcagggggcggtgctacctcggctccgcgcagccacggcttcccgctggcgaaccaagggcgcggaatctggagagggcgaggaacatctttcctcccacctgtcccccgccaagcctgccagacccgtctcatccgtgctgctgcttctgaaaatcagaagagtgaggatgaaataa

SEQ ID NO: 45403 - DNA, 576 bp, Homo Sapiens
ctggaggagctgctggctgttcaggtggagctggagccggttaatgcccgagctaagaaggcgttttctcagcagagggaaaagatggaggagaggtgcaagtcccacctgggccggagaggcgacatcattcagagcatccctggcttctgggccaatggtgattccttttcagtggaaataattcattcctgtaagcaacagtgggcacctcacccaaaaaggtatttaagcttcctccacattgtcctgacaggtggaagaagtgaagcatcctgttcatctctgcaagatcatgttgttctttctgacgccccctacttccagaataaagtgattaccgaggaatatctcgtgaacgtcacaggtacaggtggctcccaagatagggcttctcattccactccaattcagtggtatgaggattatgaagtggaggcctgtggccacagacactacaacagcggccttaacttattcaactggttttctgaccacaacttcacaggatctaataggattgctgagatcctatgtaaggaactgtggtgcaatcccctgcaatactacataagg

SEQ ID NO: 45404 - DNA, 1200 bp, Homo Sapiens
cttaggggaatttcaaactttggtgctaaagcttccaaataatcagcatcaccattcaccaaggagcagaggagttcggtcttgctgactgccagttaagggctctgaaaaaagacagtctccttggcagccgttccaacctggctcctgccccctgtgaaccaaggaaaagtggaaatctaattccatgtagcctggaagaaaccttacaggtccagggctgtggagaggtcgggtgaggaacaggagttcccaccatgccactagggttctggaagccctgggaagctgccagtggcactgcagcaccaggaactggttcctagagaactgcctcaaatcagacacacataaggaagtcaggcagtgatggcgctgcatgggaatacaagcagaacaatctcctcagaactacttcgagggtactgtctctcagccatcttccaggttttccacaacccacaaaggtctttcaggtgggtataatttggggttacttgttaagatggagttacagcacagcttcattggcaaagacaatgggatctcatatctagaaacaaaactttctgggtttcaccatttgcccgttatcccctgagaaacatcagcatcacctgttaacttgcttgggaatgcaaattctcagacccaaccgagacctatgaatctgaaactctggaggggggcggcagggaggagggcaggaatttgtgtcttagcccctcattgttaagattctgatgcacactaaaatttgagaaccattgagcattctagagcaacacaatttcatgaaaaaatagctttggaaacagcatctggatattaggcaaaaatatgtgcctgaatagaagaaacacactccgttcatagtagggttctattccccaattttttaatttagtagttctttgtgaaaaatgtcctctcacatgcagcattttaaaatgagaaatctggggccttctcaaccaacttcacacccgctttccagggcagctcaaaacaaattactgataaatcaacatggggcactctgaatcatcagtccgtctttagaactccccacatggtcagctgaggcattccattgagaatgcatcatgtcttgacttctctctctggccaatcctgccgtcattgcatttcttaataaacctcctgcatgctaaaaaaaaaataaaaaataaaatcaaa

SEQ ID NO: 45405 - DNA, 216 bp, Homo Sapiens
atggtgcccgaggtgcccggcgcggtcctgaccctctgcctctggctggaggcctcggagggctgcctggcggccggccccggagcagctgctgctcagctgctggacgagtcgctgtctgccgggagcgtcctgcgcgcccgctgcgcctccaggtgcctaagcttgccaatcatacgcatctctgccttcttccagcacttccaggttagtgga

SEQ ID NO: 45406 - DNA, 561 bp, Homo Sapiens
cagcgaggggtgcctgcagccgggaccccttcctctccgcgtctcctcgtctcccgcgcccgcgtcaggccccgctccctcggcggggccgtggggagcgtggcgtcgggggcccgcgcggcgcagtcccccttcagcatcccgaacagcagcagcggcccgtacggctcgcaggactcggtgcacagcagccctgaggacggcggcggcggccgggaccggccggtgggcgggagccccggcgggccgcgcctggtgatcggctccttaccagctcacctctcgccgcacatgtttggaggatttaagtgccctgtatgctcaaaatttgtatcctcagatgaaatggatttgcatcttgtaatgtgtttaacaaagccacgaataacctataatgaggatgtactgagtaaagatgctggggaatgtgcaatatgccttgaagaattgcagcagggagatactatagcacgactgccttgtctatgcatatatcataaaggctgcatagatgaatggtttgaagtaaatagatcttgccctgagcacccttcagattaa

SEQ ID NO: 45407 - DNA, 853 bp, Homo Sapiens
gagtctgcagacggccgtggctcctctgttcttcccgaggctacagcaacagccagaggtgttcctggggagatggcggaacagcacggagcacccgaacaggctgcagctggcaagagccatggagaccttgggggcagctacaaggtgatcttgtacgaactagagaacttccaaggcaaacgctgcgagctctcggccgagtgccccagcctgaccgacagcctgctggagaaggtgggctccatccaagtggagtccgggccgtggctggcatttgagtccagggccttccgcggggagcagtttgttctggagaagggggattatcctcgctgggatgcctggtccaacagccgtgatagtgacagccttctgtccctccggcctctgaatattgatagtccacatcacaagctgcatctgtttgagaacccagctttcagtggccgcaagatggagatagtggatgatgacgtgcccagcctgtgggctcatggcttccaggaccgtgtggcgagtgtccgtgccatcaacgggacgtgggttggctatgagttccccggctaccgtgggcgccagtacgtgtttgagcggggcgagtaccgccactggaatgagtgggacgccagccagccgcagctgcagtctgtgcgccgcatccgtgaccagaagtggcacaagcggggccgcttccccagcagctgaaaggcacccagacttcaaggacccagacccaccctggggggctgcaagggcaagaagaggaggctccagggttggggcgagggccgacctgtccacccttccctggaatctgctcaataaagcctggggttggtcccccacccgc

SEQ ID NO: 45408 - DNA, 1034 bp, Homo Sapiens
actgagccgcgccagctgagccaggtggagccctactttcctctcctgctttctgcctgtgactagcgccgtcccctaccgcccgtcgaccccacttccatgtctggcggacacagctccccggaacctccacgcccatggccactagacagagggagtcttccttcacctcctgcttttccacctggaattgcgacgcgggcgacgagggcgtgggctgcacctgcgaagatgcttccttgtgcaagaagcgcctgtcgggcgcgggattcggggctggcatctgggacgcgggctgaggtgggaggcgggcctgcatctgaagaatacgctcggaggctggcaggttgctgcccccgcctcgcacgaccctcgcttcccacctgtgaaatgcacagaacagggcttcatttatttaacgaatcgtttctgagctcctgctgtgagccaggcttggagcaagcctgggtactgtggatgggagcaggcccctgaaccaggcggacggggtcttggcgttctcggagctaaacgctgctagaaagacaaacatgatgcacctaactactgtctccgtagattatgaggatgagaggtggaggttctctctcttttaggtatgatccccgttgtgcacctgaaactcaggcgatgactttcagtgaaggaaatgacctgtctagggccacataatacctgtttgaaaagccagtaccacactaagtctccactattaagggtgtgatggtgagggtggggtcgtagggagcacaggtatgtgtcagaaagagaaaacatgaggcttgagtgtcctccatttattcactcattcattctacaaaaatggagagcttactttgtgccagggccttatttgggctggttggtggggattcagtaatgggaatacaccaagaacaagacagacgtgctgccagacatactggaactcacggtttagttgggaaagactgacaggaaataattatccatgagatacataattaaaatttggtgttgtgcactgagaaata

SEQ ID NO: 45409 - DNA, 465 bp, Homo Sapiens
tgccgccgccgctgctgctgccggcaaccaccccatgccctgaggccgttgctgttgctgcccctcgcagctgcagcgggcccaaaccgatgtgacaccatataccagggcttcgccgagtgtctcatccgcttgggggacagcatgggccgcggaggcgagctggagaccatctgcaggtcttggaatgacttccatgcctgtgcctctcaggtcctgtcaggctgtccggaggaggcagctgcagtgtgggaatcactacagcaagaagctcgccaggccccccgtccgaataacttgcacactctgtgcggtgccccggtgcatgttcgggagcgcggcacaggctccgaaaccaaccaggagacgctgcgggctacagcgcctgcactccccatggcccctgcgcccccactgctggcggctgctctggctctggcctacctcctgaggcctctggcctag

SEQ ID NO: 45410 - DNA, 708 bp, Homo Sapiens
aagaagaaggttcctgctgtgccagaaacccttaagaaaaagagaaggaatttcgcagagccgaagatcaagcacctgagaaagaagtttgcccaaaagatgcttcaaaaggcaaggaggaagcttatctatgaaaaagcaaagcactatcacaaggaatataggcagttgtacagaactgaaattcaaatgccaaggatagcaagaaaagctggcaacttctatgtacctgcaaaacccaaattggcgtttgtcatcaggatcagaggtgtcaatggtgtaagcccaaagatccgaaaggtgttgcagcttcttcgcctttgtcaaatcttcaatgaaacctttgtgaagctcaacaaggcttcaattaacatgctgaggattgtagagccatacattgcatgggggtgcccaaatctgaagtcagtaaatgaactaatttacaagcgtggttatggcaaaatcaataagaagggagttgcttcgacagataacactttgattgctcgatctcttggtaaatatagcatcaactgcatggaggatcttattcatgagatctatactgttggaaaatgcttcaaagaagcaaataacttcctgtggcccttcaaattatcttctacaaggcagaatgaagaaaaaaaccacccattttgtagatggagatgctggcaacagggaggaccagatcaacaggcttactag

SEQ ID NO: 45411 - DNA, 1842 bp, Homo Sapiens
gggtagtagaacaatgggattatgctgtcacaaaaaccaaagaaaaaacataatttcttaaatcatggtctgtcactgaatctggttataaaaccttatcttgcactagaaggatctgtagcttttccagctgagaatggggttcaggataccgaatcaacacaagaaaagagagaaactggggatgaagaaaactcagctaaatttcctgtaggaaggagagattttgacacactcagctgtatgctgggaagagtctaccaatcttgctggcaagtctgattctttttttgatatggacctgttggtctatgtcatcttttcagaagaaaagcatttaattgccaatgggaggagaagcccataatgttactgtaacttgggtattatgttaaatgtctgttttaaaagaaagtagcgttaagatagatcagtaaccaaaatcataggctttttctgtgcatttaactttgtgaaaattctgtataattatgacttactagtatttttgaacaatgcttaacatactaaccttacatacactctagaccaaaataaggcatcataatttacaccttaatctcaaaaattaagcatgtctttggtgaatggttttatatatacataaacctaaagcatataagacaaaaatttatgtttggagcctgtgttctgtaaagagaaggttgatttgtcttttagctatcgtatttggagtggaactataatacaaatgtataatattcctttttttttttttttttttgagatggagtctcactctgttgcccaggctggagtgcaatggcacgatctcggctcactgaaacctctgcctcccgggttcaagcaatttcttgcctcagcctcatgaatagctgggattacaggtgcccaccaccatgcctggctagtttttgtatttttagtagaggcaaggtttcaccatcttggtcaagttggtctggaactcctgacctcgtgatccacctgcctcggcttcccaaagtgctgggattacaggcgtgcaccactgagtccagcctatattcttgtttatcagttcaaaaatgttctgctctgtttttgactctttaaaaataacttagattcaaatttatagtagaagaaaaaaaatctttcagataagaggtgttctccagaatggaggaactacttggcatgtaagaaatagcgtcagtgtcctaatgcatattgtgactgtttgcatatacttctgtttgtaaaaatatcagttttacttttcagaggatttgtaagaaacatttaaattttcattgaaataaatgacaagtcatactgccacttaaaaaaaaaaagacctttgtcaaggagagtgcagtcaaccagtaaattgcagattctcagaatgtttattgacgtactgattattcattctgttatactctaacatctgtatatttttaccagtattctcagaccacttctaccaaaacataaatctgtgattgtgatctctgaaagtcagtccttttatctactcaataactgatctgataatgtcaacttttgaaaacagatagttatgactcaaggctttgagaatgtaaagagaccaccttcacttgttgagaaatggtacgatttcacgttatcagtgcagttccgttctcgggggaaagaagtgtgaaactgtcaggaagacagatgaaatgatttgcctgaggctgtatcatcaaacaagaaattcatattcacctttctggaattcttaggataatgattacatgtgttcaattgttaaaaattggcagataaaattttatgtatttaccacgtacaacatgaaattttgaaaca

SEQ ID NO: 45412 - DNA, 438 bp, Homo Sapiens
atggcccccggtccctggcctgtgtcctgcctgcgtggtggccccttgggcctcacatatttgtcccttctgctcatccctgctgcagctggaacctactgtgaatgcagccttggcctcagccgcgaggccctcatcgccctccttgtggtgctggcgggcatcagtgccagctgcttctgtgccctcgtcatcgtggcaattggtgtcttgcgggccaagggtgaaacatgcccgagacaagtggacaacaggttggtggagaattttggggtccaggaagatctcatggacctgcacccggtttacgtggagtcccagctaatggacgctgacctggaggtctccctggtgccaccactagaggatcagagccttgtggccatccccatggaggcttcttcagaggagccgccaccacccccgcccctaccacct

SEQ ID NO: 45413 - DNA, 5583 bp, Homo Sapiens
tatgtatgtaactgctctgtggttggaagcctgaatgtgaatcgctgcaaccagaccacagggcagtgtgagtgtcggccaggttatcaggggcttcactgtgaaacctgcaaagagggcttttacctaaattacacttctgggctctgtcagccatgtgactgtagtccacatggagctctcagcataccgtgcaacagttctgggaaatgccagtgcaaagtgggtgtcattggctctatatgtgaccgatgccaagatggatattatggctttagtaagaatggctgcttgccctgccaatgcaataatcggtctgccagttgcgatgccctcacaggtgcttgtttaaactgccaggaaaatagcaaaggaaatcactgtgaagaatgtaaagaaggattttatcagagtcctgatgccactaaagaatgtcttcgctgcccttgttcagcagtgacatctacaggcagctgctctataaaatcgagtgaattggaacctgaatgtgaccagtgtaaagatggttacataggcccgaactgcaataaatgtgaaaatggctattacaattttgacagcatctgtagaaagtgccaatgtcacggccatgtggacccagttaaaactccaaagatttgtaagcccgagagtggtgagtgcatcaactgcctccataacaccactgggttttggtgtgagaactgcctagaaggttatgttcacgacctcgagggaaattgcatcaagaaagaagttattcttccaacacctgaaggttctaccattttggtttccaatgcctctttgaccacatcagtgcccacccctgttataaatagtacttttacccctacaaccctgcagactatcttttcagtaagcacttctgaaaacagcacttcagctttagctgatgtatcatggacccaatttaacatcatcattttgacagtcatcatcattgttgtggtgctgctaatgggatttgtgggggctgtatatatgtaccgcgagtaccaaaaccggaaactcaatgcccccttttggaccatcgagctgaaagaagacaatatcagtttcagcagctaccatgacagcattcccaatgcagatgtttcgggattgttggaagatgatggcaatgaagtggctcccaatgggcagctgaccctgacgacgcccatacataactacaaagcctaaggagctagaactgttctgaattgttaaaccacagtgcttgctaagacagagtcagcccctgggccagacaaagcctggctagagtttgctgagaaagcaaaggcaaatagtgcatctgaaattttcaggtacaaatttgtaatgcgcttagcctatctattgctcttagttttcccatgaagatctgaagcgttcactgtcattaggacttgaagtaaagtatatttttgtaccaaaccacatgggagtatggaaaggctgaaccccatagtgcagcccaaaaccactttgacctccagatagactcctggggaagcattcaccaagccagtggtaacaagatgatgaatgtggagggggaaaagactgctggaagacttcatctccattcctgaaacattttttttaaaacagtgtcagggattatattcgttttactatacaaaaggacatcattgaggaaaagcttgtttctaggctgtatcacagtaaataatcttgattgtttctagaacaggggtagaaaagtcccaagatcttcagaagggcttggttttttcctcccaggattcttgctcagtgatgagttgaaagcacaggataagcttctaagggaggaaggcagcattggggagcaggaggctgatggtcctcctcagggtctcagtgtaaatgataaattgtctaaaaataaggaatattcctgcctctagagaaataaggtgtacatagttaatgtagcatatctggtcgacgttgtatttgtatctatttgtaaaaaaaaaatcatgtcatattttatcatctggaatttatttgtacagcagttaatggtgttgtaaaaagaaaaatatggggattgcttaaaatactgtaaaatagatggcaatattgctagagctgggactctggtgagcatccgtcatttttagtccttcttgaggacattgctgaaatttataagaggtcgaatgtttctttctttcctttctcagtctaaaagtagagttatatgctctttgacttactatgattcaagcaatagattttgaagtcagtaatcgttaagctgggacataggatgcattctccaaaaacattaatctaattagacattagccaccctatatattttacatagattaatataaaacatatcctcattaaaaaatgtttttcttgaatgtaaaagatagtcttccaaaggatagaaatattttagttccaagagaaaagccatcatattacttgggatctgtagttttcatgcctatgaaatatttataatcctccctcaccccaaataaaaaatctcctacatgtgaacatagcctgtcactcatttgccatgaggtatgtgccatctccctgcagtgctatagttctcccattgtcttcctgtctggttaatgagcagctttgtagatgggtgtgtctagttagttcttgctttttgatggagttttttcctagaggccaactactgttgctctcgtttattatgatattgacattttgggttaagcaaggtgggtgggaaaggtggtcagatgttaaatataacttattaggaggaacagtgaactgtgaagtggttagaaaaaaaataaaaacttcttattagattagacctaggaaattcaagctgacccctttgcctaacttccctagagaaaaacctagaacttggtcatccctttataggagacccctaagttgttctcagggtttggagatgatgttctggagggagtacaagcaaataatctacttctggtaatctgagggtgctttgcgtatttggccattgctcagaagaatagaggttacattatattacattatatgaaaattatttagtttttctatagccctttgtagtttgcaaagcacttttccatatgtgtgtcctctcttccacaccatagccccctgaggaagtaattgttgtccccattttatagatgaaaaggctgaggcacagaggagctaaatatcttgttcaaggctatacaatgtgtgtgattattaggcttggaatcagggcctctaactctaaagcacatgttttttcaactatatgcagaaattgcctagccatggacacaagaaagctgggaggaagagttctacttgtggatgtttttaattttttttaaatatcaggagcaatccagggccatacagctatgaagcacttagtgaaaagaacacaagaagatttactaactgaagttagtattagtgattagaaaacaaaactgccagtttgtgcttcattaaggtgaactcatctctccaagcaggaagggaaaatttgctttccctagcagttgctgcatatgtgtgtacagactgcacaattctaagaaattgtgcaaaatggcatacctgtctttctcccagatacaccgccccctgccccccccaaaaaaggtcaggattaaaggtggtgagaagtgaacatttattaaacagaagttaaaccaatagagagaaaggaggtttgttggagtctaagaggattttgaccatgtagaaattccttgaaacagaccttaaaaggtattgaaaaattgaatcacaaagaaagtttacctttaaatacttgttaatggctcctagatcatggttataatttttctcaatgggaaaaaaagtcttaaaatttgttttaaataagatcctctaatgtctcgagctttttgattctggaaataatttgctttaaaatataaatcaatcagaaagtgatctaccactgaaatcattctaggaaactagcatgggatgcactgcacaatgttctttcctctaaaggcatgggccccataaactgtggcatctggcagcaggatgccatcagtcctttagaaagcctaattttgggccgggtgcggtggctcacgcctgtaatcccagcactttgggaggccgaggcgggtggatcacaaggtcaggagttcgagaccagcctggtcaacatggcgaaatcccgtctctactaaaaacacaaaaattagccgggtgtacgtgcctgtagtctcagctacttgggaggctgaggcaggagaatcacttgaacctgggaggcagaggttacagtgagccgagatggcgccatttcactccagcctgggcgacagagcaagactctgtctcaaaaaaaaggaagaaaaagaaagcctaatattgggagaatgtttgtgtaaggattggaaatctgtttatttttaaataagatagcactgatgtgaatcttatttggaaattacagatactgccattaagcgatgcttttatcttcattaattcattttggtaagcgcctatgcatttctgatggttaggtgccctaggtagtgttaagtatgtccgtgtcctcccttactcccctctcgctccctctaccctctatcccctagggttcttttattaatggaatttctccagttatagagaaaaaaatgacatttgaaaactaaagctcatttatattaatactaaggtcctgtgggcctagtgcgttactcttcccagtgatacctagattttaagagtagagaacagaggaaacatgggatgagaggagagaggttttttagacaacatttgtagacacctcaaattatatcactgttctctagcgccaatattcccaggtaaattgaccattaaagcaatactcactgacctactagtttattttggtcagctgagtaccatcaggatatttaaccctttaagtgctgttttgggagtagaaaactaaagcaacaatacttcctcttgacagctttgattggaatggggttattagatcattcaccttggtcctacactttttaggatgcttggtgaacataacaccacttataatgaacatccctggttcctatattttgggctatgtgggtaggaattgttacttgttactgcagcagcagccctagaaagtaagcccagggcttcagatctaagttagtccaaaagctaaatgatttaaagtcaagttgtaatgctaggcataagcactctataatacattaaattataggccgagcaattagggaatgtttctgaaacattaaacttgtatttatgtcactaaaattctaacacaaacttaaaaaatgtgtctcatacatatgctgtactaggcttcatcatgcatttctaaatttgtgtatgatttgaatatatgaaagaatttatacaagagtgttatttaaaattattaaaaataaatgtatataatttgtacctattgtagatttgttgtttacttttttgtgtggtcagagttgtttcatgtcttcaaatacatgccaaggatcatttactttcagcccacttcataaaaatctttgaactctt

SEQ ID NO: 45414 - DNA, 1274 bp, Homo Sapiens
gccggaaggcggcgtccgcgacgcagctgttcacgcttaggtgggcgacgtgggcgcaggtgggcgcaggatggcaaaacagaagagaaaagttcctgaagtgacagagaaaaagaacaaaaagctgaagaaggcgtcagcagaggggccactgctgggccctgaggctgcaccaagtggcgaaggagccggctccaagggcgaagctgtgctcaggcccgggctggacgcagagccagagctgtccccagaggagcagagggtcctggaaaggaagctgaaaaaggaacggaagaaagaggagaggcagcgtctgcgggaggcaggccttgtggcccagcacccgcctgccaggcgctcgggggccgaactggccctggactacctctgcagatgggcccaaaagcacaagaactggaggtttcagaagacgaggcagacgtggctcctgctgcacatgtatgacagtgacaaggttcccgatgagcacttctccaccctgctggcctacctggaggggctgcagggccgggcccgagagctgacggtgcagaaggcggaagccctgatgcgggagctggatgaggagggctctgatccccccctgccggggagggcccagcgcatccgacaggtgctgcagctgctctcctagtgggttcagcgcggggcggggccgctgcccagtgcagggctgcctcagaccacacagggtgcagctcctccggcggtgggggccgggttcaccagcagggcagcggctgagcaagggctttcagctcctccggtggtgggggccgggatcaccagcaccagagcctcgcaagggccccttccctcctccagaccctccttggccggtgacggctgtgacagtgatggcaggttcagtgccttcagcgcagagcgtggatgctctggaatcacccggacccctggccttggagggaccctccagccccaggaatctgctttggagggaaatgtctatttttctaccgggaatattttagagattggggcatgctggctcctcccgccagctgcaaacctgcaccttccgcctgattcccgatccccctgcgtgggccgcattcctggtcccctgcctgcgtccatcgaggggcctggctgtggcctgttttcctttgaccccacacagcgtcattgcgggtcatggggagcccctggtgggagcttgtggagtcggatcacgtacctgtgcagaaaccgcctctgtggctgcatttgaaataaaacccgacccagcagca

SEQ ID NO: 45415 - DNA, 594 bp, Homo Sapiens
gtaattcagaaaaaatcaggcagatggcgcatgctaactgatttaagagccgttaatgcagtaattcaacccatggggcctctccaacctgggctgccctctccagccatgatccccgaagactggcctttaattataattgatctgaagtattgcttttttaccattcctctggcaaaacaggattttgaaaaattggctttcactataccagccataaataataaagaaccagccactagatttcagtggaaagtgttgcctcagggaatgcttaatagtccaactatttgtcagacttttgtagctcaagttcttcaaccagttagagacaagttttcagactgttatatcattcattatgttgatgatattttgtgtgctgcagaaacaagagacaaattaattgactgttacacatttctgcagacagaggttgcaaacgcaggcctgacaatagcatctgataagattcagatctccactccttttcattatttgggaatgcaggtagaggagagaaaaattaaaccacaaaaagtagaaataagaaaagacacattaagaacattaaatgacttcaaaaattgctag

SEQ ID NO: 45416 - DNA, 1593 bp, Homo Sapiens
gcggtcatgccgagccagcacctgggcctggaactgggccgcagcccccagcttcacccaccacctccctaccatggacccctgcaaagtgaacgagcttcgggcctttgtgaaaatgtgtaagcaggatccgagcgttctgcacaccgaggaaatgcgcttcctgagagagtgggtggagagcatgggaggtaaagtaccacctgctactcagaaggctaaatcagaagaaaataccaaggaagaaaaacctgatagtaagaaggtggaggaagacttaaaggcagacgaaccatcaactgaggaaagtgatctagaaattgataaagaaggtgtgattgaaccagacactgatgctcctcaagaaatgggagatgaaaatgtggagataacggaggagatgatggatcaggcaaatgataaaaaagtggctgctattgaagtcctaaatgatggtgaactccagaaagccattgacttattcacagatgccatcaagctgaatcctcgcttggccattttgtatgcaaagagggccagtgtcttcgtcaaattacagaagccaaatgctgccatccaagactgtgacagagccattgaaataaatcctgattcagctcagccttacaagtggcgggggaaagcacacagacttctaggccactgggaagaagcagcccatgatcttgcctttgcctgtaaattggattatgatgaagatgctagtgcaatgctgaaagaagttcaacctagggcacagaaaattgcagaacattggagaaagtatgagcgaaaacatgaagagcgagagatcaaagaaagaatagaacgagttaagaaggctcaagaagagcaggagagagcccagagggaggaagaagccagacgacagtcaggagctcactatggcccttttccaggtggctttcctggtggaatgcctggtaattttcccggaggaatgcctggaatgggaggggacatgcctggaatggccggaatgcctggactcaatgaaattcttagtgatccagaggctcttgcagccatgcaggatccagaagttatggtggccttccaggatgtggctcagaacccagcaaatatgtcaaaataccagagcaacccaaaggttatgaatctcatcagtaaattgtcagccaaatttggaggtcaagcataatgcccttctgataaataaagccctgctgaaggaaaagcaacctagatcaccttatggatgtcgcaataatacaaaccaacgtacctctgaccttctcatcaagagagctggggtgctttgaagataatccctacccctctcccccaaatgcagctgaagcattttacagtggtttgccattagggtattcattcagataatgttttcctactaggaattacaaactttaaacactttttaaatcttcaaatatttaaaacaaatttaaagggtctgttaattcttatatttttctttactaatcattgtggatttttccttaaattattgggcagggaatatacttatttatggaagattactgctctaatttgagtgaaataaaagttattagtgcgaggcaaacataa

SEQ ID NO: 45417 - DNA, 1392 bp, Homo Sapiens
cgccataaacgcttagcacaactgcaaccgtcttccaagaggaatcctcactaccagaccttggagcgggatcttattgaattacaggagcagcagctgtttgaactttttgtggtggtgtctctacagaagaaaccatcaggaataagctatattccccaggtcatacaacaattccctggcaaggatgatcatggctataagcagtccaaagacatggaagagagacttaaagttattccaaaattttgttttcctgattcaaaggactggatgccaacctcagaactcaagagtgaaacattctcctttgtcttgactggtgaagatggaagccggtggtttggttactgtaagaagctcttgccagtaggcaaaggaaagcgactccctgaggtatactgcatggttagtcgcctaggctgcttcaatcttttttcaaagattctggatgaagtagagaagagaagagaaatgtctccagcccttgtttacccattcatgcgaagtgtcatggaagctcctttcccagctcctggacgcaccatcacagttaagagttacctccctggggctggagatgagtccattgaactctgccgaccactagattcccgattggaacatgttgattttaaatgtctctttaagtgcctgagtgtgtgtcatctcatccgggtctgtgcctctctccttttggagcgtagggtaatctttgttgccaacagcctaagcaccctgtcaaaatgtggccatgctgtggtagctacactgtatccgttcacctggcagcatacctatatcccagtcctgccagcatctatgattgacatcgtgtgctcacctacaccattccttattggaatcctgtcttgctccttaccacagctccaggacctacccattgaagaggtgctgatagttgatctctgtgcagacaagttcttacaggaggtatctgatgaggatgaaattctaccaccaaaacttcaagctgccctgatgcagattttggaagaacgaaatgaaatcttgactcaggagcagaatttttcacaagcagatgtgacactcaactctctggtgtccgaagcatttgtcaggttttttgtggagttggtaggacattattctttgaacatgactgtcactgagcgtggggagcgtgttttccaaagggaaccattccgtaagtcccacacctcccgaagtgtacgccacttcctggatctcttcatggaaactcagatgtttgcaggattcatccaggaccgagagcttcggaaaagtggagttaaaggtttgtttgagatccgggccatccagtatttggaaacaattcctgagtcggagcccagtgggatgaatagaattttgcggagtcttggttag

SEQ ID NO: 45418 - DNA, 583 bp, Homo Sapiens
acgaatccttagtactgtggaaaagagcagacagaaatataaaccagcttctctcacagtggaattcgtccctttcttttatcaatgttttcaggaaagtgaacatctcaaggaaagtcttaaatgttgcttattgcatctctttggagccattgtagccggtgggcagaggaatgctttgcaagcaatttctccagccactatggaagttcttatgcgagtattggcagattgtgattcctgggaggatggagatcctgaagaagtgggtaggaaggcagaactaactctgaagtgccttacagaagtggtacatatccttctcagtagcaactctgatcagcgtcaagtggaaaccagtactattctggagaactattttaaattgctaaattcagatcattcagctttacctaatcaaaggaggtccagacagtgggaaaaccgatttattgctctacagatcaaaatgctgaataccatcacagccatgttagattgtacagatagacctgttcttcaggccatttttcttaacagcaattgctttgaacatctcatacgactgctacagaactgcaag

SEQ ID NO: 45419 - DNA, 288 bp, Homo Sapiens
atggggggcccgggctgtggcaaagggacacagtgcaagaatatggcgaccaagtacggcttctgccatgtggggctggaccagctactgagacaggaggctcaaaggagcacgcagcggggccggcagatccgtgacatcacgctgcaggggctcctggtgcccgcggtaggagctcatgggagggatatggtcagtgacaacatgttgtcccgcccggagagccggggcttcctcatcgatggctttccccaggaggtgaagcaggccatggagtttgagcgcatc

SEQ ID NO: 45420 - DNA, 327 bp, Homo Sapiens
atgacaatggattatcttaagtgtaaccaagtggtgactccaattgcagctgctgtaccagatgtggttttattgcttgagcaaattaacacatctcttggtacctggtatgcagccattgatttagcaaatgcctttttctctattcgtgtccataaggcccaccagaagcaatttgcatttggctggcaaggccaggaatataccttcactgtcctatctcaggggtatatcaactctccagctttgtgtcataatcttgttcagagagatcttgatcacttttcacttccacaagatatcacactattccattacattgatgac

SEQ ID NO: 45421 - DNA, 1044 bp, Homo Sapiens
atggaaacacccttctacggcgatgaggcgctgagcggcctgggcggcggcgccagtggcagcggcggcagcttcgcgtccccgggccgcttgttccccggggcgcccccgacggccgcggccggcagcatgatgaagaaggacgcgctgacgctgagcctgagtgagcaggtggcggcagcgctcaagcctgcggccgcgccgcctcctacccccctgcgcgccgacggcgcccccagcgcggcaccccccgacggcctgctcgcctctcccgacctggggctgctgaagctggcctcccccgagctcgagcgcctcatcatccagtccaacgggctggtcaccaccacgccgacgagctcacagttcctctaccccaaggtggcggccagcgaggagcaggagttcgccgagggcttcgtcaaggccctggaggatttacacaagcagaaccagctcggcgcgggcgcggccgctgccgccgccgccgccgccgccggggggccctcgggcacggccacgggctccgcgccccccggcgagctggccccggcggcggccgcgcccgaagcgcctgtctacgcgaacctgagcagctacgcgggcggcgccgggggcgcggggggcgccgcgacggtcgccttcgctgccgaacctgtgcccttcccgccgccgccacccccaggcgcgttggggccgccgcgcctggctgcgctcaaggacgagccacagacggtgcccgacgtgccgagcttcggcgagagcccgccgttgtcgcccatcgacatggacacgcaggagcgcatcaaggcggagcgcaagcggctgcgcaaccgcatcgccgcctccaagtgccgcaagcgcaagctggagcgcatctcgcgcctggaagagaaagtgaagaccctcaagagtcagaacacggagctggcgtccacggcgagcctgctgcgcgagcaggtggcgcagctcaagcagaaagtcctcagccacgtcaacagcggctgccagctgctgccccagcaccaggtgcccgcgtactga

SEQ ID NO: 45422 - DNA, 7248 bp, Homo Sapiens
atggcggcccccgagtcagggccggctttgagtccaggcactgcagagggtgaggaggagacgattctctatgacttgttggtcaacaccgagtggccaccggagactgaagtacagcctagaggcaaccaaaaacatggtgcatcctttatcatcacgaaagcaattcgagatcgtttattatttttacgccaatacatctggtacagcccggcaccttttttgctccctgatggactggttcgcttggttaataaacagataaactggcatttggtacttgcaagcaatggaaagcttttggctgctgttcaagatcagtgtgtggaaatcaggtctgcaaaagatgattttacatccattattgggaaatgtcaagttccgaaagacccgaaaccccagtggagacgggtagcatggagttacgattgtaccctactggcctatgccgaaagcacaggaactgtgagggtgtttgatctcatgggaagtgaactctttgtcatttccccggcatctagttttataggtgacttaagctatgccattgctgggttgatatttttagaatataaagcaagtgcacagtggtctgcagaactcctggtcatcaattaccgaggagaacttagaagttaccttgtaagtgttggaacaaatcagagctaccaagaaagtcactgtttcagcttcagtagtcattatcctcatggaatcaacacagctatttaccaccctggtcacagacttttacttgttggtggatgtgaaactgctgaagtaggcatgtcaaaagcttctagctgtggcctttctgcctggagagttctttcaggatcaccgtattataagcaggttactaatggtggagacggggttactgcagtaccgaagacactgggattattaaggatgttaagtgtcaagttttacagtcgccagggacaagaacaggatggaatttttaagatgagcctttctccagatgggatgctcctggcagccattcacttctcagggaaactgagcatctgggcgattccatctctgaagcaacaaggggaatggggtcaaaatgagcagccaggctatgatgaccttaatcctgattggaggctctctactgagaagagaaaaaaaatcaaagataaagagtccttttacccactgatagatgtcaattggtgggcagacagtgcagtgactttagctcgatgctctggtgctttaactgtttcatctgtgaaaactttgaagaatttactgggaaaatcctgtgaatggtttgaaccatcacctcaagtcactgctacccatgatgggggatttttaagtttggagtgtgagattaaacttgcccccaaacgatctcgtttggagactagagctggagaagaagatgaaggagaagaggattctgattctgattatgaaatatctgccaaggctcgctactttggttatataaaacagggcctttacttggtgactgaaatggagcgatttgcaccaccacggaaacgcccacgaaccattactaaaaactaccgccttgtgagtttgcgctccacgacaccagaggaactttatcagaggaagattgaaagtgaagagtatgaggaagccttgtccttggctcatacctacggcctggatactgaccttgtatatcagaggcagtggaggaagtcagcggtcaacgttgcttcaattcagaattatttgagtaaaataaagaagcgatcctgggttctccatgagtgtttggaaagagttcctgaaaatgtggatgctgcaaaagaactgcttcagtatggattaaaaggcacagacctggaggctcttttagcaatagggaaaggagcagatgatggcagatttacattacctggtgaaatagacattgacagtatctcctatgaagagctttcaccacctgatgaagagcctgccaagaataaaaaggaaaaggagctcaagaagagacaagaactactgaaattagtgaacttttccaagttgacactggaacaaaaggaactttgccgttgtagacggaagttattaacctacttagatcgacttgcaacatatgaggaaatcctaggagtgcctcatgcatctgaacagagatatgatgctgaattctttaagaaattcagaaatcagaatattgttctctcagcaagaacttatgctcaggaaagtaatgtacaagccctggaaattctgtttacttaccatggttccgacctgcttcctcatcgccttgcaattctgtccaactttccagagaccacttctccacatgaatattctgttttgctgcccgaagcttgttttaacggtgactccctgatgatcattccttggcatgaacataaacaccgagctaaagattggtgcgaggagttggcttgcagaatggttgttgagccgaatctccaagatgaaagtgaattcttgtatgctgcacagcctgagttactaaggttcaggatgacccagcttacggtggagaaggttatggactggtatcagaccagagcagaggaaatagagcattatgctcggcaggtggactgtgcattgtcacttattcgacttgggatggagcggaatattcctggtttgctggttctctgtgacaatttggttactctggaaacattggtttatgaagccaggtgtgatgtaactctaaccctgaaagaactccagcagatgaaagacattgaaaaactaagattactgatgaatagttgttctgaggataaatatgtgacaagtgcctaccagtggatggttccctttcttcatcgttgtgagaaacagtcgcctggtgtggctaatgagctattaaaagaatatttagtaactttagctaaaggggacttaaaatttcccctgaagatatttcagcattccaaaccagatctgcagcaaaaaattattcctgatcaggaccaactgatggcaatagcactagagtgcatctatacctgtgaacgaaatgatcaactctgtctttgctatgacctactagaatgtctgccagaaagaggatatggtgataagacagaggcaaccacaaagcttcatgacatggtagaccaactggaacaaattctcagtgtgtcagagcttttggaaaaacatggactcgagaaaccaatttcatttgttaaaaacactcaatctagctcagaagaggcacgcaagctgatggttagattgacgaggcacactggccggaagcagcctcctgtcagtgagtctcattggagaacgttgctgcaagacatgttaactatgcagcagaatgtatacacatgtctagattctgatgcctgctatgagatatttacagaaagccttctgtgctctagtcgccttgaaaacatccacctggctggacagatgatgcactgcagtgcttgttcagaaaatcctccagctggtatagcccataaagggaaaccccactacagggtcagctacgaaaagagtattgacttggttttggctgccagcagagagtacttcaattcttctaccaacctcactgatagctgcatggatctagccaggtgctgcttacaactgataacagacagaccccctgccattcaagaggagctagatcttatccaagccgttggatgtcttgaagaatttggggtaaagatcctgcctttgcaagtgcgattgtgccctgatcggatcagtctcatcaaggagtgtatttcccagtcccccacatgctataaacaatccaccaagcttctgggccttgctgagctgctgagggttgcaggtgagaacccagaagaaaggcggggacaggttctaatccttttagtggagcaggcacttcgcttccatgactacaaagcagccagtatgcattgtcaggagctgatggccacaggttatcctaaaagttgggatgtttgtagccagttaggacaatcagaaggttaccaggacttggccactcgtcaagagctcatggcttttgctttgacacattgccctcctagcagcattgaacttcttttggcagctagcagctctctgcagacagaaattctttatcaaagagtgaatttccagatccatcatgaaggaggggaaaatatcagtgcttcaccattaactagtaaagcagtacaagaggatgaagtaggtgttccaggtagcaattcagctgacctattgcgctggaccactgctaccaccatgaaagtcctttccaacaccacaaccaccaccaaagcggtgctgcaggccgtcagtgatgggcagtggtggaagaagtctttaacttaccttcgaccccttcaggggcaaaaatgtggtggtgcatatcaaatcggaactacagccaatgaagatctagagaaacaagggtgtcatcctttttatgaatctgtcatctcaaatccttttgtcgctgagtctgaagggacctatgacacctatcagcatgttccagtggaaagctttgcagaagtattgctgagaactggaaaattggcagaggctaaaaataaaggagaagtatttccaacaactgaagttctcttgcaactagcaagtgaagccttgccaaatgacatgaccttggctcttgcttaccttcttgccttaccacaagtgttagatgctaaccggtgctttgaaaagcagtccccctctgcattatctctccagctggcagcgtattactatagcctccagatctatgcccgattggccccatgtttcagggacaagtgccatcctctttacagggctgatcccaaagaactaatcaagatggtcaccaggcatgtgactcgacatgagcacgaagcctggcctgaagaccttatttcactgaccaagcagttacactgctacaatgaacgtctcctggatttcactcaggcgcagatccttcagggccttcggaagggtgtggacgtgcagcggtttactgcagatgaccagtataaaagggaaactatccttggtctggcagaaactctagaggaaagcgtctacagcattgctatttctctggcacaacgttacagtgtctcccgctgggaagtttttatgacccatttggagttcctcttcacggacagtggtttgtccacactagaaattgaaaatagagcccaagaccttcatctctttgagactttgaagactgatccagaagcctttcaccagcacatggtcaagtatatttaccctactattggtggctttgatcacgaaaggctgcagtattatttcactcttctggaaaactgtggctgtgcagatttggggaactgtgccattaaaccagaaacccacattcgactgctgaagaagtttaaggttgttgcatcaggtcttaattacaaaaagctgacagatgaaaacatgagtcctcttgaagcattggagccagttctttcaagtcaaaatatcttgtctatttccaaacttgttcccaaaatccctgaaaaggatggacagatgctttccccaagctctctgtacaccatctggttacagaagttgttctggactggagaccctcatctcattaaacaagtcccaggctcttcaccggagtggcttcatgcctatgatgtctgcatgaagtactttgatcgtctccacccaggtgacctcatcactgtggtagatgcagttacattttctccaaaagctgtgaccaagctgtctgtggaagcccgtaaagagatgactagaaaggctattaagacagtcaaacattttattgagaagccaaggaaaagaaactcagaagacgaagctcaagaagctaaggattctaaagttacctatgcagatactttgaatcatctggagaaatcacttgcccacctggaaaccctgagccacagcttcatcctttctctgaagaatagtgagcaggaaacactgcaaaaatacagtcacctctatgatctgtcccgatcagaaaaagagaaacttcatgatgaagctgtggctatttgtttagatggtcagcctctagcaatgattcagcagctgctagaggtggcagttggccctcttgacatctcacccaaggatatagtgcagagtgcaatcatgaaaataatttctgcattgagtggtggcagtgctgaccttggtgggccaagggacccactgaaggtcctggaaggtgttgttgcagcagtccacgccagtgtggacaagggtgaggagctggtttcacctgaggacctgctggagtggctgcggcctttctgtgctgatgacgcctggccggtgcggccccgcattcacgtgctgcagattttggggcaatcatttcacctgactgaggaggacagcaagctcctcgtgttctttagaactgaagccattctcaaagcctcctggccccagagacaggtagacatagctgacattgagaatgaagagaaccgctactgtctattcatggaactcctggaatctagtcaccacgaggctgaatttcagcacttggttttacttttgcaagcttggccacctatgaaaagtgaatatgtcataaccaataatccatgggtgagactagctacagtgatgctaaccagatgtacgatggagaacaaggaaggattggggaatgaagttttgaaaatgtgtcgctctttgtataacaccaagcagatgctgcctgcagagggtgtgaaggagctgtgtctgctgctgcttaaccagtccctcctgcttccatctctgaaacttctcctcgagagccgagatgagcatctgcacgagatggcactggagcaaatcacggcagtcactacggtgaatgattccaattgtgaccaagaacttctttccctgctcctggatgccaagctgctggtgaagtgtgtctccactcccttctatccacgtattgttgaccacctcttggctagcctccagcaagggcgctgggatgcagaggagctgggcagacacctgcgggaggccggccatgaagccgaagccgggtctctccttctggccgtgagggggactcaccaggccttcagaaccttcagtacagccctccgcgcagcacagcactgggtgtgagggccacctgtggccctgctccttagcagaaaaagcatctggagttgaatgctgttcccagaagcaacatgtgtatctgccgattgttctccatggttccaacaaattgcaaataaaactgtatggaaacga

SEQ ID NO: 45423 - DNA, 2667 bp, Homo Sapiens
gttgctgcggagccaggaggggaagcgatggctgggcccgcgtggatctctaaggtctctcggctgctgggggcattccacaacccaaaacaggtgaccagaggttttactggtggtgttcagacagtaactttaattccaggagatggtattggcccagaaatttcagctgcagttatgaagatttttgatgctgccaaagcacctattcagtgggaggagcggaacgtcactgccattcaaggacctggaggaaagtggatgatcccttcagaggctaaagagtccatggataagaacaagatgggcttgaaaggccctttgaagaccccaatagcagccggtcacccatctatgaatttactgctgcgcaaaacatttgacctttacgcgaatgtccgaccatgtgtctctatcgaaggctataaaaccccttacaccgatgtaaatattgtgaccattcgagagaacacagaaggagaatacagtggaattgagcatgtgattgttgatggagtcgtgcagagtatcaagctcatcaccgagggggcgagcaagcgcattgctgagtttgcctttgagtatgcccggaacaaccaccggagcaacgtcacggcggtgcacaaagccaacatcatgcggatgtcagatgggctttttctacaaaaatgcagggaagttgcagaaagctgtaaagatattaaatttaatgagatgtaccttgatacagtatgtttgaatatggtacaagatccttcccaatttgatgttcttgttatgccaaatttgtatggagacatccttagtgacttgtgtgcaggattgatcggaggtctcggtgtgacaccaagtggcaacattggagccaatggggttgcaatttttgagtcggttcatgggacggctccagacattgcaggcaaggacatggcgaatcccacagccctcctgctcagtgccgtgatgatgctgcgccacatgggactttttgaccatgctgcaagaattgaggctgcgtgttttgctacaattaaggacggaaagagcttgacaaaagatttgggaggcaatgcaaaatgctcagacttcacagaggaaatctgtcgccgagtaaaagatttagattaacacttctacaactggcatttacatcagtcactctaaatggacaccacatgaacctctgtttagaatacctacgtatgtatgcattggtttgcttgtttcttgacagtacatttttagatctggccttttcttaacaaaatctgtgcaaaagatgcaggtggatgtccctaggtctgttttcaaagaactttttccaagtgcttgttttatttattaagtgtctacctggtaaatgttttttttgtaaactctgagtggactgtatcatttgctattctaaaccattttacacttaagttaaaatagtttctcttcagctgtaaataacaggatacagaattaacaagagaaaatgtctaactttttaagaaaaaccttattttcttcggtttttgaaaaacataatggaaataaaacaggatattgacataatagcacaaaatgacactcttctaaaactaaatgggcacaagagaattttcctgggaaagttcacatcaaaaagagtgaatgtggtatatttctaaatgatatggaaaatagagacagatttgtcctttacagaaattactgagtgtgaataaaaacttcagatccaagaaatatataatgagagatataatttttgttaataagacaaaggtaatatattggatacaaagacacaaatgtattgtgtgttcaattattttgttgtcttgagatttaatattctttccaagagcttttaatgaagcagagagctagtacttcattttcactggatacattttcagcatcatgagttgtcacagcctctgagcccctgatctgaagccagaagggctgagtgtattgtaaacttattcttgcatgttgctgtctgggaatggaccacactacagcaggtagttctgggggcgatactgccgaaaggcccgaacacatgtattttggctgcaattgaggaacttgggatgctattaattttgtatttcagcaactgccccttctcctatcccaaagcaccaattactgccctctgcctcagcagtaccagtataagatgacattccaaagactggaggcaactcagcctgagttaattcacaaaattatgccatgctggggcttgagcttgagcttgggcttaggcttgggctcagcttttgaccctcaggcatctcctttcccttcctgtcttcctctcccttctcctctgctgcagcatgattttcttaatcttcagacactcactattttcatgaacagttaccctctgtccccacaaccaaagacaactcatggcctcctttggcccttgtgtaacattgcaaacctgtggctttgcaaaatgtacccaggtcacaaggggatttttttttttttagcaatgatatccctgtctgggtcactttttaagcttgtaaccgcccccccagacttataatcttaaatgtattttcctttgtttaagctgctgcttcctctgtttcattggattgtgccagttatcagtggctcttgggttcaaagtaataaagaattccaaaactgaga

SEQ ID NO: 45424 - DNA, 1542 bp, Homo Sapiens
atgaagatcagcatcctgctcatgttcctttggggattatcctgtgctctcccagtaaccaggtatcaaaataatgaatctgaggattctgaagaatggaagggtcatttggctcaggcaccaacaccacccttggagagcagtgagtcatcagaaggcagtaaagttagctcagaggaacaggcaaatgaagaccccagtgacagcactcagtcagaggagggcctgggctctgatgatcatcaatacatttataggctagctggtggcttctccaggagcacaggaaaaggaggagatgataaagatgacgatgaagatgacagtggagatgacacctttggtgacgatgacagtggcccagggcccaaagacagacaagaaggaggaaactccagactgggaagtgatgaggactctgatgacaccatacaagccagtgaagagagtgccccacaagggcaagacagtgcccaagataccaccagtgagagcagggaacttgacaatgaggaccgggtggacagcaagcctgagggaggtgactccactcaagagagtgagagtgaagagcactgggtgggaggtggcagtgatggggagagcagccatggagacggctccgagttggacgatgagggaatgcagagtgatgacccagagagcatcaggagtgaaaggggaaactccagaatgaacagtgcaggcatgaaatcaaaagaatctggagaaaacagtgagcaagcaaacactcaagattcaggtggcagccaattgctggagcatcccagtaggaaaatttttaggaagtctcgcatctcagaggaagatgacagaagcgagcttgatgacaacaacacaatggaagaagtcaagagtgactctacagaaaacagcaactccagagacactggcctcagccaacccaggagagacagcaagggtgactctcaagaagacagcaaggagaatctgtcccaggaagagagccaaaacgtagatggtcccagcagtgagtccagccaagaggccaacctgtcatctcaagagaacagcagtgagtctcaggaagaggtggtgagtgagtccaggggagataaccccgaccccacaactagttatgtagaagaccaggaagacagtgactccagcgaggaggacagctcgcacacactctcccactcaaaaagtgaatccagagaggagcaagcagacagcgaatccagtgagagcctcaacttctcagaggaaagcccggagtcccctgaggatgagaacagctccagccaggagggcctccagtctcacagcagctcagcagagagtcagagcgaggaaagccattctgaggaagacgacagtgactctcaagacagcagcagatccaaagaagatagcaactccacggagagcaaatcaagcagtgaggaagatggccagttgaaaaacattgagatagagagccggaaattaacagttgatgcctatcacaacaaacccattggggaccaagatgacaatgactgccaagacggctattag

SEQ ID NO: 45425 - DNA, 879 bp, Homo Sapiens
atgatcaatgatagttactttggttggcttatgctccttgggttccctgggaagcctcagctggagatgatcatctctggggttgtctttttcttctatgcaatttctttgatgggaaatatggtccttatcctgctgccattactggataaacatctccaaacccccatatatttctttcttagaaatctggctatcttggatctttgttacaccacaaatatagtcccacagatgttggtcaatgcctggggtaaagacaagaaaatcacttttggtggctgtgcttttcaacttttcactaatgtgacgctatgcacggttgaatgtatgcttctggctgtgatgtcatatgacccattcaatgctgtctgcaagcctctggactatatgaccataatgaacccccaactctgtcaaggcctggtggccatgacctggttaattggtgtcactaattgcatgatactttccccctgtcctgtgagtcttcctcgatgcggagaccaccacctggatcactatttttgtgaaatatctgcaatggtcaaaattgcatgtggggctaccacagtcatggaggaaactaaaccttatttgcattgtgttgttgttgttgttttcattttccttgcatcacttcttctcattcttgtgtcatatggcttcattgctgtggctgtactcaagatcaagtctgcagcaggaagacaaaaagcatttgggacctgtttctcccatctcattgtggtatccatcttctatgggactgttagatatatgtatatagagccaggaaacagtccatctcaggatgagggcaaacttctccatatattttactccattgttactcccaccttgaacccatcccactaa

SEQ ID NO: 45426 - DNA, 822 bp, Homo Sapiens
atgacaataaatatgttaaatgtatttggaaatgaagactttgattgccatggagacttaaaaacagatcaactgaaaatggatattctgattaagaagctaaaacagaagtttgatgatcttacggcagagaaggaagctttatcttcaaaatgtgtcaatttggctaaagacaatcaagttcttcaacaggagtttttatctatgaaaaaagtacaacagcaatgtgagaaacttgaggaggataaaaagatgttgaaagaagaaatattaaatcttaagacacatatggaaaacaatagggtagaacttagtaaactacaagaatataaattggagctagatgaaaaggcagtgcaggcagtagaaaaattagaagaaatccatttacaggaacaagcacaatatgaaaaacaattagagcagttaaacaaggataatatggcttcactaaataaaaaggaactcacacttaaagatgtggaatgtaaattctcagaaatgaaaactgcttatgaagaggttacaaccgaattagaagaatataaggaagcctttgcagcagcattgaaagctaacaattccatgtcaaaaaaattaacaaaatcaaataagaaaatagcagtgatcagcatgaagctccttatggagaaagagcagatgaaatattttctcagtgctcttcctacaaggcgagacccagagtcaccttgtgttgaaaatcttactagtataggactcaacagaaaatatattccccaaacacccataagaattcctatttcaagcccacagacttcaaataactgcaagaactcctag

SEQ ID NO: 45427 - DNA, 2815 bp, Homo Sapiens
atgttgcatgacgcaagggacaggcagaagttcttcagcgatgttcagtatctgcgggacatgcagcataaggtggactctgagtatcaggcttgtctgagacgacaggaatatagaagagacccaaatgagaagaaacgcgatcagttttgggggcaagagacaagttttgagagatcccggttttctagcaggtcatcttccaaacagagttctagtgaggaggatgctctaactgaaccaaggtcatctatcaagatatctgcatttaagtgtgactccaaacttccagcaattgaccaaacatcagtcaagcagaaacataaaagtaccatgactgtaaggaaagcagagaaagtggaccccagcgaaccctctccagcagaccaagcaccaatggttttattaagaaagaggaagccaaacctgaggagatttacagtcagcccagaatcgcacagcccgagagcatctggggacagaagcagacagaaacagcagtggcctgcaaaggtgccggttcccaggggagcagatcaagtagttcaacaagaaggcctgatgtgtaacactaagctgaagaggccaaatcaagagagaagaaacttggtcccatcgtcacagccaatgactgagaacgcccctgatagagccaaaaaaggagacccgagtgctccttcccagagtgagctgcatccagccctgtcccaggccttccaaggaaaaaatagtcctcaagtattgagtgagttctcggggccaccactcacacccaccactgtaggagggccaagaaaggcatcatttaggttccgagatgaagacttttattccattttgtcattgaacagcagaagagaaagcgatgacactgaagaggaaacccagtctgaagaatgtctgtgggttggtgtgcgctcaccctgttctccttcccatcacaaaagaagtagatttggggggacatcgacccctcaggccaaaaataaaaattttgaagaaaatgctgaaaattgcagaggtcattcttcaagaagaagtgagcccagtcatggctcattgagaataagcaatgcaatggagccagcaacagagcggccttctgctgggcaaaggttgtcccaagaccccgggctgcctgatagggaatctgctacagagaaggacagaggtggcagtgaaaatgcgaaaaagagccctctttcgtgggacaccaaatccgagcccagacaagaggttggtgtcaatgctgaaaatgtatggagtgattgtatttctgtggaacataggcctggcacccatgattctgaaggatactggaaagactatttaaacagttctcaaaattctcttgactactttatttctggcagaccaatatctccaagatcatcagtgaattcatcctataaccctcctgcatcattcatgcattctgctctgagagatgatattccagtagacttgtcaatgtcatcgacttcagttcacagctcagactcagagggaaactcagggtttcatgtttgccaaccactgtctcccattagaaataggactccatttgccagtgccgaaaaccataattatttcccagtaaacagtgcacacgaatttgctgtcagggaagcagaagatactactttaacaagccagcctcagggggctccactatatacagatctcttactaaatccacagggcaatttgtccttagtggattcttccagctcctctccatcaagaatgaactcagaaggccatttgcatgtgtctgggtctctgcaagaaaatacaccatttactttctttgcagtgtctcatttcccaaatcaaaatgataatgggagcaggatggcagcctctggtttcacagatgaaaaggaaaccagtaagataaaggcagaccctgagaaactcaagaaattgcaagaaagtctcctggaggaggactccgaggaggagggagacttgtgtcgcatctgtcagatagccgggggttccccaagcaaccccctcctggagccttgcggctgtgtgggaagcctgcagtttgttcatcaagagtgcctgaaaaagtggctgaaagtgaaaataacatcaggagcagatcttggtgccgtgaagacctgtgagatgtgtaagcaaggcctgctggttgacctgggtgactttaacatgattgagttctaccagaagcaccagcaatctcaggcacaaaacgagctgatgaattcaggcttgtacctggtgctgctgcttcacctctatgagcagaggtttgcagaactcatgaggctcaaccacaaccaggtggaaagagagaggttgtcaagaaattacccacaacccagaacagaggaaaatgaaaattcggagttgggagatggaaatgaaggcagcatttctcaaagccaggtcgtctagcaaggaagccaactgtggagctcggcggagacctctcctgccagcccttctttctacgtccccaagtgcctccctccctcctcctctttactgaaactgaaaccaaagcgttcacagttagattttcacctcgtgccactctcttttggggtctggcttgagcatctatgggcagccacagcgaccagtctagtcccagacagcacaggtcaagcagcgtgggactgtggagcccctggcaggctggcctggtgctgcccccttagcccagaagccctgccaggtccagtggcctggggtcccactgctgagggcacctgccaggcctcactccaccctgaatggactcgagccatgtattcattcagtaaactgacattattctccc

SEQ ID NO: 45428 - DNA, 2566 bp, Homo Sapiens
atccccaggctggagtcaggctcagctgtggggctgggagcatgggctctcaggctgctgctgagtggaggaactgggcctcctgggaggtgtcctccagcctctctggatgctccatgggtgggggtcgggagtggtgagggaagggtggcgcatctcagagccctcgcaaatttctggccagaaatgtgggggtatgggcgcagcttggccaaggccatgctgcaagggccagggtggccgtccttcctcactcctgtctggcctccctctgcagggtgcttcaaggatgaccgcatcgtcttctggacttggatgttctccacctacttcatggagaaatgggctccccggcaggacgacatgcttttctatgtgcgccggaagctggcgtactccggcagcgaaagcggtgcagacgggaggaaggcagctgagcctgaggtggaggtggaggtgtaccggcgggactccaagaagctgccaggcctgggagaccctgacatcgactgggaggagagcgtctgcctgaatctcatcctgcagaagctggactacatggtgacctgtgcggtgtgcacacgtgctgacggcggggacattcacatccataagaagaaatctcagcaagtgttcgcgtcccccagtaaacaccccatggacagcaagggggaggagtccaagatcagctaccccaacatcttcttcatgattgacagcttcgaggaggtgttcagcgacatgaccgtaggggaaggagagatggtctgtgtggagctggtggctagtgacaaaaccaacacgttccagggggtcatctttcagggctccatccgctacgaggcgctcaagaaggtgtatgacaaccgggtgagcgtggccgcccgcatggcacagaagatgtcgtttggcttctacaagtacagcaacatggagtttgtgcgcatgaagggcccccagggcaagggccacgccgagatggcggtcagccgagtgtctacaggtgacacatccccctgtgggactgaagaggactccagcccagcttcgcccatgcacgagcgggtgacctccttcagcacaccccccaccccagaacggaacaaccggcctgccttcttctccccatccctcaagaggaaggtgccccggaaccggatcgctgagatgaagaagtcgcactcggccaacgacagcgaggagttcttccgggaggacgacggtggagccgatctgcacaatgcaaccaacctgcggtctcggtccctgtcgggcacaggacggtccctggtcgggtcctggctgaagctgaacagagcagatggaaacttccttctctatgcacacttaacctacgtcacgttgccgctgcatcggattttaacagacatcctggaagttcggcagaagcccatcctgatgacctagccgcgtgcggagcctgcgcagagccccggccgggcccagccctcggagtgctgccaagtgcctacctgtccaccgccaccggggtctgcgatggcacgccagtgctggagccgcagccaggcgaggccactcgactcccggggccggggccgactccacgaacaccagcccaaactgaagtgcctcttccctcccctgctggcgctgctccgccctgtgccccccgcccatcgccccccacccatctctggagagccctctgcacccaaagaggactagagatgccgagcggccatgagagagagcggaaggagcagctgatgcccagagcggggccagagcggcgggtctatgttcacgtccccccagcagcaggcggaaccacccagccagggcactcagtgcattggactgtccacatgttcttgaggaaagccggtggaagattctggaatgccgtgcggatgaacttcagcacccgagtcagtcccagctcatcctccccagtttaccactttgttctaataggagatgggaacacgagaagtttgatggctttgccctgggctgggaatacctcacccacgcccagttccagaaaggcctccagctgagcagacggccccgatcccgccagaacggccttttgcttccagccaaagaacaccgccaacacgcacacctccaacctgggacatcccacgctgggcctcgcacggaggaacctgcagaatttggattctgagggtagtcgggaggcctcggtagccaggcagaacaggatatctgccaaagggtgtctgatgtggggtggggctggcatcctcccaggaaggttctaggtgggaccccgtcttctgggggcgggggtgtcttttcatcttccctggtttcctagaactcacttcctttgacggcgtgtgttggtcccatctctcagaccagctcactgaggcagaggagttgctcagaggctcacatgggcacccccattggttcgtgtgagcagctgcccagccccaggcctgccctcggcctggtccagcatgaaggcgtttccatctgcaaggatgcacggtaccctccccgagagcaggcctgtcccctacccaactgggaataaactggaagctgggtc

SEQ ID NO: 45429 - DNA, 678 bp, Homo Sapiens
atgatcatcaattggaatcaagtctcagtcctgtggaatcgaagtcccttcatttgtctcctccaatctgccagttatcaagacaggaggcaatcctggcggcgagcaagtatgaaagaaacgaaccggcggaagtcgctgcatcccattcaccagggcatcacagagctcagccggtctatcagtgtcgatttagcagaaagcaaacggcttggctgtctcctgctttccagtttccagttctctattcagaaacttgaacctttcctaagggacactaagggcttcagtcttgaaagttttagagccaaagcatcttctctttctgaagaattgaaacattttgcagacggactggaaactgatggaactctacaaaaatgttttgaagattcaaatggaaaagcatcagatttttctttggaagcatctgtggctgagatgaaggaatacataacaaagttttctttagaacgtcagacttgggatcagctcttgcttcactaccagcaggaggctaaagagatattgtccagaggatcaactgaggccaaaattactgaggtcaaagtggaacctatgacatatcttgggtcttctcagaatgaagttcttaatacaaaacctgactaccagaaatacagaaccagagcaaagtctttgactgtatggagttgg

SEQ ID NO: 45430 - DNA, 474 bp, Homo Sapiens
atttctcatgttatccggaccttgaagatggactgctctggggcccatgtgcaagtgacctgtgccaagctcatctccaggacaggccacctgatgaagcttctcagtgggcagcaggaagtaaaggcatctgagatagaatgggatacggaccaatggaagactcagaactacattaatgagagcacggaagcccagagtgaacagaaagagaagtcgcttccaggatatggctatactgacaaactcatcttggcattaattgtgactgaaatactaatgatttttattatacttttctgcctcattgtggtaaggacaataattaattcaggttgtcagaatgcagtcctgtttctgtgtggattcagagctcacaaactgaaaaccaaagccactttcccacttgacatacttcttcagtcatttaaggctgagtgctttgttcttttattgcagtgtatatttcaggat

SEQ ID NO: 45431 - DNA, 1008 bp, Homo Sapiens
atggcggtgcaggcggcgctcctcagcacgcaccctttcgtgcccttcggcttcgggggctccccggacgggctagggggcgccttcggagccctggacaagggctgctgtttcgaggacgatgagaccggggctccggcgggtgcgctgctgtcgggagccgaaggaggggacgtgcgcgaggccacccgcgatctactcagcttcattgactcggcgtccagcaacatcaagctggcgctggacaagccgggcaagtcgaagcggaaggtgaaccaccgcaagtacctgcagaagcagatcaagcgctgcagcggcctcatgggcgccgcgccccccggcccgccctccccgagcgccgccgacacgccagccaaacggccgctggccgcccctagcgccccgacagtcgcggccccggcccacggcaaggctgccccccggcgggaggcgtcgcaggccgccgcggccgccagcttgcaaagccgaagtctggccgcgctcttcgactcgctgcgccacgtccccgggggtgccgagccggcggggggtgaggtggctgcgccggcggccgggctaggaggtgcgggcactgggggcgcgggaggggacgtggcaggccccgcgggggccacggcgatcccaggggccaggaaggtcccgctgcgggcacgcaatctgcctccgtccttcttcacggagccgtcccgggcaggcggcggcgggtgtggcccgtcggggccggacgtgagcttgggcgacctggagaagggcgcggaggccgtggagttctttgagctgctggggcccgactacggcgccggcacggaggcggcagtcttgcttgccgccgagcctctcgacgtgttccccgccggagcctccgtactgcggggacccccggagctggagcccggcctctttgagccgccgccgtggtgggaaacctactgtaccccgagccctggagcgtcccgggctgctccccgaccaaaaagagccccctga

SEQ ID NO: 45432 - DNA, 856 bp, Homo Sapiens
tctgaggccttagggtccttcggtgtctttgagtgttttgtgtgtacatattttgctcttaaagtttataaatatacgtatattgagagtgtccacgtctcctcgctgaaccttaggaatcccttggcaccatgtcctgtgtgcattataaattttcctctaaactcaactatgataccgtcacctttgatgggctccacatctccctctgcgacttaaagaagcagattatggggagagagaagctgaaagctgccgactgcgacctgcagatcaccaatgcgcagacgaaagaagaatatactgatgataatgctctgattcctaagaattcttctgtaattgttagaagaattcctattggaggtgttaaatctacaagcaagacatatgttataagtcgaactgaaccagcgatggcaactacaaaagcagtatgtaaaaacacaatctcacactttttctacacattgcttttacctttataatgtagcagtgaagtaaatcattttagaacttaatatccaactgatcatagtacatattgtaaataaaatgtattttgatgacagctcagttgaatatggataatatgtggcatcacttgcacacttattttgtagaaatgggtaatttgtgcccgtaacactgtttcatattaaatatgatagcattatccctgtatgacactgtgttgtacagttaatgtatgatcctttttagatcgtttaggttttacactaaggaacatgatgacatgttctacatttgtctgtctatagttagtattttgtatgtatgtacaggctgttgtgtgctttttgtttcttgcaataaaaaatgtttggagtgtata

SEQ ID NO: 45433 - DNA, 159 bp, Homo Sapiens
atggctatcttcttccatataacttcaatatgtactaaaattcacatgcatttattttataatcagaatgtcattataattaaatgttatgctgtgccatttcatcagtttatcagaccttcttatagtcaatgtcacattaaattagaatccgagtaa

SEQ ID NO: 45434 - DNA, 2106 bp, Homo Sapiens
atgggggacattctggctcatgaatctgaattacttggactagtgaaagagtatttagattttgctgaatttgaagacaccttgaaaacattttcaaaagaatgcaaaataaaaggaaaaccattgtgtaaaacagtaggcggatctttcagagactccaaatcattgacaattcagaaggatcttgtcgctgcatttgacaacggagaccagaaggtgttcttcgatctgtgggaggagcacatttcaagttccatccgagatggggactcctttgcccagaagctggaattctatctccacatccattttgccatctatcttttgaagtactctgtggggagaccggacaaagaggagctggatgaaaagatttcctacttcaaaacctacctggagaccaaaggggcagccttgagccagaccacagagtttcttcctttctatgcccttccttttgttcccaaccctatggtgcacccctcatttaaagaactcttccaggattcctggactccagagttaaagttgaagttgataaagtttctagctttaatatctaaagccagcaacacgccaaagcttttaacaatatataaggagaatggacaaagtaacaaagaaatcttgcagcagctccaccagcagctggttgaagctgaacgtaggtcagtgacatacctcaaacggtacaataagatccaggccgactaccacaatctcattggagtcacagcagagctggtggattctctagaggccacagtcagcggcaagatgatcacccctgagtacctccagagcgtctgtgtccgcctgttcagtaaccagatgcggcagagcctggcgcatagtgtggacttcacgaggcctgggacggcatccaccatgttacgagcctccttggcacccgtgaaattgaaggatgtcccattactgccctccttggattatgagaaactgaagaaggatttgattttggggagtgaccgcttgaaagccttcttgttgcaggctctgcgctggcgcttgaccacatcccatcctggagagcagagggagaccgttctgcaagcctacatcagcaatgacctcttggactgttatagccacaaccagaggagtgtgcttcagttgctgcactccacgagcgacgtggtgcggcagtacatggccaggctcatcaatgcttttgcgtcactggcagaaggtcgcctctaccttgcccagaacacaaaggtgctgcagatgctggagggaaggctgaaggaggaggacaaggatatcatcaccagggagaatgttcttggggccctgcagaagttcagtctcaggcgcccgctgcagacagcgatgattcaagacggcctcatcttctggctggttgatgttctgaaggaccctgactgcctgtctgactacacgctggagtactcggtggctttgctcatgaacctctgcctccgcagcacagggaagaacatgtgtgccaaggtggcaggcctcgtgctcaaagtcctttcggatcttcttggccatgaaaaccatgagatacagccgtatgtgaatggagctctgtacagcatcctttctgttccatccattcgtgaggaagcaagagcaatgggaatggaagacatcctacgctgcttcatcaaagaaggcaatgctgaaatgatccgccagatagaattcatcatcaagcagctaaattccgaagagctaccagatggtgttcttgaatctgatgatgatgaagatgaagatgatgaagaggaccatgacatcatggaagccgatctggacaaagacgaactgatccagccccagctcggagaactctcaggagagaagcttctgaccacggagtacctggggatcatgaccaacacggggaagacaaggcggaaggggctggctaatgtgcagtggagcggggatgagcccctgcaaaggcccgtcacccccggcggccacagaaacgggtacccagtgtaagtcagggctaaaggaagcgggaattgactttcttaagctttgttttgattacagtgtaagatgtatgtatttttaaaattcaaaataaagcattcattttgaaaagca

SEQ ID NO: 45435 - DNA, 876 bp, Homo Sapiens
atggttggggcaaatcactccgtggtgtcagagtttgtgttcctgggactcaccaattcctgggagatccgacttctcctccttgtgttctcctccatgttttacatggccagtatgatgggaaactctctcattttgctcactgtgacttctgaccctcacttgcactcccccatgtattttctgttagccaacctctccttcattgacctgggtgtttcctctgtcacttctcccaaaatgatttatgacctgttcagaaagcacgaagtcatctcctttggaggctgcatcgctcaaatcttcttcatccacgtcattggcggtgtggagatggtgctgctcatagccatggcctttgacagatatgtggccatatgtaagcccctccagtacctgaccattatgagcccaagaatgtgcatgttcttcttagtggctgcctgggtgaccggccttatccactctgtagttcaattggtttttgtagtaaacttgcccttctgtggtcctaatgtatcggacagcttttactgtgaccttcctcggttcatcaaacttgcctgcacagacagctaccgactggagttcatggttacagccaacagtggattcatctctctgggctccttcttcatactgatcatttcctatgtggtcatcattctcactgttctgaaacactcttcagctggtttatccaaggctctgtccaccctttcagctcacgtcagtgtggtagttttgttctttggtcctttgatttttgtctatacgtggccatctccctccacacacctggataagtttctggccatctttgatgcagttctcactcctgttttaaatcctatcatctacacattcaggaattga

SEQ ID NO: 45436 - DNA, 294 bp, Homo Sapiens
atgcagaagccacctgccccacacagggggccactttccctgcatctggcactcaccaggacagtcatagaactggccttgggtgcttggggagagtggagaggtctggggggcatccactggcctcagcctcagagcttctcatcagtaacccaggaggcaaaggcccagctcaagattagcccaggccactgtatctgtgccaagacctacagctgtccctgcagggcgtgcatctgcagcccaggctatcacaatggtgtcccttttggtggggatgtgaggcctgctgct

SEQ ID NO: 45437 - DNA, 2584 bp, Homo Sapiens
acaacggtggtgggagggagagcggcctcctcctccctggtggggcctgtctgggtgaagcccctctgttcccgaggatcgtctgccttattgaaaccatctaattggagatccgcagattaggctaccaagacacagctgcctccagcagaatttgtgtagtggacacttgtacgtgcactttggagacagcaagcatgaggcctgcagctgacagctttgagtggctgtgaacctgactatggaaaagatgtgactccccacccccagccgggtgctccgagccatggccgacaccatcttcggcagcgggaatgatcagtgggtttgccccaatgaccggcagcttgcccttcgagccaagctgcagacgggctggtccgtgcacacctaccagacggagaagcagaggaggaagcagcacctcagcccggcggaggtggaggccatcctgcaggtcatccagagggcagagcggctcgacgtcctggagcagcagagaatcgggcggctggtggagcggctggagaccatgaggcggaatgtgatggggaacggcctgtcccagtgtctgctctgcggggaggtgctgggcttcctgggcagctcgtcggtgttctgcaaagactgcaggaagaaagtctgcaccaaatgtgggatcgaggcctcccctggccagaagcggcccctgtggctgtgtaagatctgcagtgagcaaagagaggtctggaagaggtcgggggcctggttctacaaagggctccccaagtatatcttgcccctgaagacccctggccgagctgatgacccccacttccgacctttgcccacggaaccggcagagcgagagcccagaagctctgagaccagccgcatctacacgtgggcccgaggaagagtggtttccagtgacagtgacagtgactcggatcttagctcctccagcctagaggacagactcccatccactggggtcagggaccggaaaggcgacaaaccctggaaggagtcaggtggcagcgtggaggcccccaggatggggttcacccacccgccgggccacctctctgggtgccagagcagcctggccagtggtgagacggggacaggctctgctgacccgccagggggaccccgccccgggctgacccgaagggccccggtaaaagacacacctggacgagcccccgctgctgacgcagctccagcaggcccctccagctgcctgggctgaggtgtctggtgcctggaacagacttccctgtggaggattcctgccagaccctgcccggctcctccctgaccggtccttgtgccctcaccagacaccctgttggccatgactcaacaaaccagtgttgggagccgtctgcctccccagctcagtgcctttctgcaccccttctctcctggggagctgtctgcatccgccaccccctccaaccactgccctcagcccccgaccttatttattaccctcccctcccacacccccaatctacctggtgatgattttaagtttgcgcgtgtcttgggttgggctggggggtttcccacatgcagtgtcagaggggccgcccggtggggctatctccgttgctatattaatggcaagactaaatgaaacctagggcacggcctccgaagctgcgtgtggccccttagaggtgagcatcagagccagagcagtgagggggagactcacccaccctctccctctcccttcagctctgggaggcaggcgcagtgcccccctcccatgggctggcccaggaccgtgggtgaaacctgggtctgtttagtttctttggtttttgtatgtttgtttgtttttgacacagtctcgctttgttgcccaggctggggtgcagtggcacgatcgcggctcactgcaacctccacctcccgggctcaagcgattctctcacctcagcctcctgagtaggtgggattacagatgcccgccaccacacccagttaatttttgtatttttagaagagatggggtttctccatgttggccaggctggtcttgaactcctggtctcaagtgatctgcccgcctcggcctcccaaagtgctgggattacaggtgtgagccaccgcacccaatcctattaggtttctttgaatcccctcatggcctgcctggtttttgctcagcctgtcttcagcttgaggagctgggaagctctggtggatgctatgaactcacttgctgaagagcagcgttcaggtgcatccccagccagggcacgtggctccctcagccatgaattcacttctcttcaggaggtttggcttggcatgaaaatacttcattcagagtatgggcaaatgcttctggaaaacccttccctgaagagagagaacgtgtgtgtgtgtgtcggtgatcacaccctcccatccttcctgcctcctgccccaaaccccgggttcctgggtctggaagggccttctctccaagctgggagctcctgggcccccaccattcactttttgtccttgctgctggcaaacagtaaagaaactcactttccctgtggcacgttatgcttcagaattaaaacaatgaagattaaaa

SEQ ID NO: 45438 - DNA, 2504 bp, Homo Sapiens
atgccttgcacaacatcagagagttcatactggagagaaccttacacatttcacgagtatggaaagacctttgctcaaaattcagcccttgtaatgcataaggcaattcatactggaaagaaaccttacacatgtaatgaatgtggcaaggtttttagtagaaaagcacaccttgcatgtcatcatagacttcatactgtctaaggtttctaatcaacaatcaaaccttgcacaacatcagagagtttatactggagagaaaccttacaagtgtaatgagtggggcaaagccttaagtgggaagtcgtcacttttttatcatcaagcaatccatggtgtagggaaactttgcaaatgtaatgattgtcacaaagtcttcagtaatgctacaaccattgcaaatcactggagaatccataatgaagacagatcttacaagtgtaataaatgtggtaaaattttcagacatcgatcatatcttgcagtttatcagcgaactcatactggagagaaaccttacaaatatcatgactgtggcaaggtcttcagtcaagcttcatcctatgcaaaacataggagaattcatacaggagagaaacctcacaagtgtgatgattgtggcaaagtcttgacttcacgttcacacctcattagacatcagagaatccatactggacagaaatcttacaaatgtcttaagtgtggcaaggtcttcagtctgtgggcactccatgcagaacatcagaaaattcatttttgagataactgttccaaatacagtgactatagaagatcataaagctttaattgacattagagccaaataggcattgacttgagattgagttgacttaaccttgagtttaagaattaatttacattaaagtgtttatgttaagaagattgggccaggtggggcgcgagccaccgcgcccggcccctaagttaatatttcaaacaatcgaaggtaaaacaacatattgtgttgggccacctgtactgaacgctgaatcgtttttcctcttaagttgaaaatggttttaatgcaaagcgccttttttgagcaggtagagtcacgcatccggcaggcggggcgagctcccctctgtctggggcagggtgggggagaggggcagggacctcggtaaaggggtggagtggcgcgctggttgccgcgggcactggcaattagaagggattattaaactaagcaaggtcctgggttgtttgagtggataatggaaactgaaaggtgacgtgcaaaactgcctattactcccaggagtggaggataatttcatatttcatggaaataaactcagggcccggagcggtggctcacacctgtaatcccagcactttgagaggccaaggagggaggatcgcttaagcccaggaattcgaaatcagcctaggcaacatagtaagacctcatctctactaaaaataaaaaaaaacagccaggtgtgttagtccacacctgtggtcccagctgcttgggcttcccgagtagctgggattacaggtatgaaccactatgcccggctaactttgttttttttttttagaaattaaaccttttttcagcttaatgacccaggggtgtatttttgaaggacttgggagctctctttgaaaggcaaacaacaagggaaacagtacctttatctcagtaggaaattaaataattcaaacatcaaataacttcaatttaaggctatggactttgagataattctgagccttgagaggaatgtggtcaggcaacctgagtccagtggaatgcaggtgcaacttctaagagttttcctgtaagtaattaagaagactaagtagccccagagataagacctcctcggatcattgtcccttcttatgtagtgataaagtaaccttccttgaagtgtatctatccgtaatcaatcaagttgctgcagcctatgcactggcccagaataaaaaacgtggtgattctgctaaagcttctctgtctttccctgtgtgtgaaatcttaacgtctctacttgggaacgctgatcccattcatttagagttgatgtttccacgtggctatttccaagctttgccttcaaataaattctgtacttaatcatatattctaaattttattatttactgctgacatcagtttctgtcggattgtaggagcctcaccagagagggcccctgtcgccatgttgtaaaactcacacttgccaaaagttgtgggttagggtttctccccctccctcaggatgacgctagttagctgacacagatggtcacctccattaccaagtagagtcaggatgaactatgtgtgactgttcaactatgtgtcctcttccctgaggactgattagtgtttatcttgaaaacatgtccttaatgggttgtatagaacactgaagcatctgatttcaaactcttagctcttttcctctatttcccatcacattctggtctaaggcttatttattaataaaatgatttttatttcttta

SEQ ID NO: 45439 - DNA, 321 bp, Homo Sapiens
atggttaacgtccctaaaacccgccggactttctgtaagaagtgtggcaagcaccaaccccataaagtgacacagtacaagaagggcaaggattctctgtacgcccagggaaagcggcgttatgacaggaagcagagtggctatggtgggcaaactaagccgattttccggaaaaaggctaaaactacaaagaagattgtgctaaggcttgagtgcgttgagcccaactgcagatctaagagaatgctggctattaaaagatgcaagcattttgaactgggaggagataagaagagaaagggccaagtgatccagttctaa

SEQ ID NO: 45440 - DNA, 864 bp, Homo Sapiens
atgtctccagcagaacagctcaaacagatggctgcacagcagcaacaaagggccaaactcatgcagcagaaacagcaacagcaacagcagcagcagcagcagcagcagcagcagcagcagcagcagcagcagcagcagcagcaacagcactcaaatcagacttcaaattggtctcccttaggacctccctctagtccatatggagcagcttttactgcagaaaaaccaaatagcccaatgatgtacccccaagcctttaacaaccaaaaccctatagtgcctccaatggcaaacaacctgcagaagacaacaatgaataactacctccctcagaatcacatgaatatgatcaatcagcagccaaataacttgggtacaaactccttaaacaaacagcacaatattctgacttatggcaacactaaacccctgacccacttcaatgcagacctgagtcagaggatgacaccaccagtggccaaccccaacaaaaaccccttgatgccgtatatccagcagcagcaacagcagcagcaacagcaacagcagcagcagcagcagcagcagccgccacctccacagctccaggcccccagggcacacctgagcgaagaccagaaacgcctgcttctcatgaagcagaaaggagtgatgaatcagcccatggcttacgctgcacttccatcccacggtcaggtaagtgtgaaagtgacacactcttcgagcagttcttgtggtgcatttgactgtcgatgtgtgatgttctacaagtccactgtagtggggtctaattgcctgcagaaaacctctttacatcctcaggtagtggccaggtttggagtgttctttttccatttctcctaa

SEQ ID NO: 45441 - DNA, 5571 bp, Homo Sapiens
atggacatgatgctgttggtgcagggtgcttgttgctcgaaccagtggctggcggcggtgctcctcagcctgtgctgcctgctaccctcctgcctcccggctggacagagtgtggacttcccctgggcggccgtggacaacatgatggtcagaaaaggggacacggcggtgcttaggtgttatttggaagatggagcttcaaagggtgcctggctgaaccggtcaagtattatttttgcgggaggtgataagtggtcagtggatcctcgagtttcaatttcaacattgaataaaagggactacagcctccagatacagaatgtagatgtgacagatgatggcccatacacgtgttctgttcagactcaacatacacccagaacaatgcaggtgcatctaactgtgcaagttcctcctaagatatatgacatctcaaatgatatgaccgtcaatgaaggaaccaacgtcactcttacttgtttggccactgggaaaccagagccttccatttcttggcgacacatctccccatcagcaaaaccatttgaaaatggacaatatttggacatttatggaattacaagggaccaggctggggaatatgaatgcagtgcggaaaatgatgtgtcattcccagatgtgaggaaagtaaaagttgttgtcaactttgctcctactattcaggaaattaaatctggcaccgtgacccccggacgcagtggcctgataagatgtgaaggtgcaggtgtgccgcctccagcctttgaatggtacaaaggagagaagaagctcttcaatggccaacaaggaattattattcaaaattttagcacaagatccattctcactgttaccaacgtgacacaggagcacttcggcaattatacctgtgtggctgccaacaagctaggcacaaccaatgcgagcctgcctcttaaccctccaagtacagcccagtatggaattaccgggagcgctgatgttcttttctcctgctggtaccttgtgttgacactgtcctctttcaccagcatattctacctgaagaatgccattctacaataaattcaaagacccataaaaggcttttaaggattctctgaaagtgctgatggctggatccaatctggtacagtttgttaaaagcagcgtgggatataatcagcagtgcttacatggggatgatcgccttctgtagaattgctcattatgtaaatactttaattctactcttttttgattagctacattaccttgtgaagcagtacacattgtcctttttttaagacgtgaaagctctgaaattacttttagaggatattaattgtgatttcatgtttgtaatctacaacttttcaaaagcattcagtcatggtctgctaggttgcaggctgtagtttacaaaaacgaatattgcagtgaatatgtgattctttaaggctgcaatacaagcattcagttccctgtttcaataagagtcaatccacatttacaaagatgcatttttttcttttttgataaaaaagcaaataatattgccttcagattatttcttcaaaatataacacatatctagatttttctgctcgcatgatattcaggtttcaggaatgagccttgtaatataactggctgtgcagctctgcttctctttcctgtaagttcagcatgggtgtgccttcatacaataatatttttctctttgtctccaactaatataaaatgttttgctaaatcttacaatttgaaagtaaaaataaaccagagtgatcaagttaaaccatacactatctctaagtaacgaaggagctattggactgtaaaaatctcttcctgcactgacaatggggtttgagaattttgccccacactaactcagttcttgtgatgagagacaatttaataacagtatagtaaatataccatatgatttctttagttgtagctaaatgttagatccaccgtgggaaatcattccctttaaaatgacagcacagtccactcaaaggattgcctagcaatacagcatcttttcctttcactagtccaagccaaaaattttaagatgatttgtcagaaagggcacaaagtcctatcacctaatattacaagagttggtaagcgctcatcattaattttattttgtggcagctaagttagtatgacagaggcagtgctcctgtggacaggagcattttgcatattttccatctgaaagtatcactcagttgatagtctggaatgcatgttatatattttaaaacttccaaaatatattataacaaacattctatatcggtatgtagcagaccaatctctaaaatagctaattcttcaataaaatctttctatatagccatttcagtgcaaacaagtaaaatcaaaaaagaccatcctttatttttccttacatgatatatgtaagatgcgatcaaataaagacaaaacaccagtgatgagaatatcttaagataagtaattatcaaattattgtgaatgttaaattatttctactataaagaagcaaaactacatttttgaaggaaaatgctgttactctaacattaatttacaggaatagtttgatggtttcactctttactaaagaaaggccatcaccttgaaagccattttacaggtttgatgaagttaccaatttcagtacacctaaatttctacaaatagtccccttttacaagttgtaacaacaaagaccctataataaaattagatacaagaaattttgcagtggttatacatatttgagatatctagtatgttgccctagcagggatggcttaaaaactgtgattttttttcttcaagtaaaacttagtcccaaagtacatcataaatcaattttaattagaaaaatgaatcttaaatgaggggacataagtatactctttccacaaaatggcaataataaggcataaagctagtaaatctactaactgtaataaatgtatgacattattttgattgatacattaaaaaagagtttttagaacaaatatggcatttaactttattatttatttgcttttaagaaatattctttgtggaattgttgaataaactataaaatattattttgtattgcagctttaaagtggcacactccataataatctacttactagaaatagtggtgctaccacaaaaaatgttaaccatcagtaccattgtttgggagaaagaaacagatcaagaatgcatattattcagtgaccgctttcctagagttaaaatacctcctctttgtaaggtttgtaggtaaattgaggtataaactatggatgaaccaaataattagttcaaagtgttgtcatgattccaaatttgtggagtctggtgtttttaccatagaatgtgacagaagtacagtcatagctcagtagctatatgtatttgcctttatgttagaagagactttcttgagtgacatttttaaatagaggaggtattcactatgtttttctgtatcacagcagcattcctagtccttaggccctcggacagagtgaaatcatgagtatttatgagttcaatattgtcaaataaggctacagtatttgcttttttgtgtgaatgtattgcatataatgttcaagtagatgattttacatttatggacatataaaatgtctgattaccccattttatcagtcctgactgtacaagattgttgcaatttcagaatagcagttttataaattgatttatcttttaatctataacaatttgtgttagctgttcatttcaggattatattttctacaagttccacttgtgggactccttttgttgcccctatttttttttaaagaaggaagaaagaaaaataagtagcagtttaaaaatgagaatggagagaaaagaaaaagaatgaaaaggaaaggcagtaaagagggaaaaaaaggaaggatggaaggaatgaaggaaggaagggaggaaggggagaaggtaggaagaaagaaaggatgagagggaaggaagaatcagagtattagggtagttaacttacacatttgcattcttagtttaactgcaagtggtgtaactacgtttttcaatgatcgcatttgaaacataagtcctattataccattaagttcctattatgcagcaattatataataaaaagtactgcccaagttatagtaatgtgggtgtttttgagacactaaaagatttgagagggagaatttcaaacttaaagccacttttggggggtttataacttaactgaaaaattaatgcttcatcataacatttaagctatatctagaaagtagactggagaactgagaaaattacccaggtaattcagggaaaaaaaaaaatatatatatatataaatacccctacatttgaagtcagaaaactctgaaaaactgaattatcaaagtcaatcatctataatgatcaaatttactgaacaattgttaatttatccattgtgcttagctttgtgacacagccaaaagttacctatttaatcttttcaataaaaattgttttttgaaatccagaaatgatttaaaaagaggtcaggtttttaactatttattgaagtatgtggatgtacagtatttcaatagatatgaatatgaataaatggtatgccttaagattctttgaatatgtatttactttaaagactggaaaaagctcttcctgtcttttagtaaaacatccatatttcataacctgatgtaaaatatgttgtactgtttccaataggtgaatataaactcagtttatcaattaaaatatgtatttgactcattttaaaactctattagcttaagagaaagaaggaagaaataataatttgaagatatttctgctattctctttatttcctgtattacactcatctttctgcttactctaaagcagtacagggtaaaaattctagatgctacagtttcaaatgactccacactatattctttcttgctgttgctgattcctaaaaggtttgatgagctgaactacatctaaactaaaaataaattttctggaaacattttattattaattatttagaacctttacctggtaaaatacagcagagttagcaacagagactaaatatcctgttgataaaatcctgatgatcttacaggctaaacaactgaaaactcaaacgcttgtaagagccaggcagagtgtaatttcttaacagctgggtataaaacaacgggcacctgaaggtattcagatacaatttccttaaaaataccttggtttccaagcaaaacacgttatttggctgagaacctttagtttgtaaataccaaaccataatatacaaatgagatctcaagccaaatgaattttttaagccctctttcccatatctgttcatctatgatagtcaactgaataaatgagaacaatgtgatagataaaacaacaaagcataaaaaagattcatgcttggttttataagctattttgaaatataagtatcattgctattctgagaaatctatatacaccaaagccctccctccacaaaaaaactggaaatgttctaataaatgtctgatttcccccaca

SEQ ID NO: 45442 - DNA, 2349 bp, Homo Sapiens
gtggaggccgggcgcagcggcgtcaagatggcggctgcggcagtggcggcggcggcggcggcggccgcggctgcatctcttcaggtactggagatggagagcatggagacggccgccgccggctcggcaggactggccgccgaggtccgaggcagcggcacggtggacttcgggcctgggccggggatctctgcaatggaggcgagcgggggcgatccgggcccagaagccgaggatttcgagtgcagctctcactgctcagagctgtcctggcggcagaacgagcagcggcgccagggcctcttctgcgacattaccctgtgcttcggcggggctggaggccgcgagttccgggcccaccgctcggtactggctgccgccaccgagtacttcacgcccctgctctcgggccagttttccgagtcccgctcgggacgggtggagatgcgcaagtggagctccgagccggggcccgaacccgacacagtggaagccgtaatcgagtacatgtacaccgggcgcatccgcgtcagcacgggcagcgtgcacgaggtgctggagttggccgacaggttcctactcattcgtttaaaagaattttgtggagaatttctcaagaaaaaacttcatctctcaaattgtgtggcaattcatagcttagcacacatgtacaccctgagccaacttgctctgaaggctgctgatatgatacggagaaatttccacaaagtgattcaggatgaagaattttatacgttacctttccatctcattagagactggctttcagatttggaaattacagttgattctgaagaggttctctttgaaaccgttttgaaatgggttcagagaaatgctgaagagagagagagatactttgaagaactttttaaattgctcaggttgtcccagatgaaacctacctaccttactcgacatgtcaaaccagagaggctggtagccaataatgaagtttgtgtcaagttggtcgctgacgcagtggagagacatgctctgagagctgagaatatacaatctggcacatgccagcaccccacttctcatgtgtcactattgcctcgttatgggcaaaacatggatgtgatcatggttattggaggtgtgtcagaaggaggggactatttaagtgaatgtgtgggatactttgttgatgaggacagatgggtaaatctgccacatattcataatcacctcgatggacatgctgttgcagtaacagaatcctacgtgtatgttgctggatcaatggagccagggtttgctaaaactgtagaaaggtataacccaaatttgaatacatgggaacatgtttgtagtctgatgacaagaaagcattcttttggactaacagaagtcaaagggaagctctatagcattggaggacatggcaactttagtcctggttttaaagatgtgactgtttataatcctgagcttgataaatggcacaacttggaatcggcaccaaagattcttcgagatgtcaaagcactagccattgaagaccggtttgtatacattgccgcccgcactcctgtagaccgggacactgaagatggattaaaggctgtaattacttgctatgatacagagactcgacagtggcaagatgtggaatctttgccgcttattgacaattactgctttttccaaatgtctgtggtcaattcaaacttttatcagacagcatcatgttgtcccaagagttattgtttagaaaacgaagaggcagtaagaaaaattgccagccaagtgtctgatgagatccttgaaagcttgcctccagaagtcctaagcatcgaaggagcagccatttgctattacaaagatgatgtcttcattataggaggctggaaaaacagtgatgatattgataaacagtatcggaaagaagcctaccgatattgtgcggagaggaagaggtggatgcttcttcctcctatgccacaacctcgttgtagagccactgcttgtcacgtgaggatcccataccggtacttgcatggcacacagagataccctatgcctcaaaacctgatgtggcagaaggaccgcatcagacagatgcaagagatacatcgtcacgccctgaacatgaggcgagtgccaagctctcagattgaatgctaggttctctcaagcgtgccgattaaaactgttacacccgtttcgtgaagctgaagatacccaggctgttatttaaaaaagtatgtcgataacttattttctacatgaactgattattaccccatataaaggaaatagagttaaaaactaaagaatgggagactcagttcaatacatggtcattttgttagcttgcaa

SEQ ID NO: 45443 - DNA, 899 bp, Homo Sapiens
gcacttgctgataacaacacagaaataacaagggcagactttctgcagtgtctcctgagcaattggttgtcattgtcctaaacagagcagctaggttaaaaagatttatccataatgtaacctcctggccctcagctatgggtggaagcagcactttctggtttgacctcctaataccacaaactccactttgccagaaaagtgacttcttgatgaatagtctgttcagataggccaatttggagtatattcatatttggccacctgctggagcgtcaatgaccaagaggagaccagatgagttttcaaagcagtcctcaaacacccaggacacacctcatcctttacctcgtgctttctgcaatgttgctgttcatgttcatcttcctattaacatttgccataataacccctcattgaccaccatcattcctccatccaccaccaactcagctccttctctaaagtgccctctaatgggcagtggctttggtctctgtttggcaaattatgtccagagggttaacattaatttctctttctcctattcctccctcatgctagattcagtccatcactcagcctcctgtcaggaaaaccatagcaaatcctactttctgctaaaatgaagttacaagacacttttccagagtagtcacactcaatgaagggacccagggtgtatctgagtgtgatgtaattgaaaccacatggaaagactagaaataccttgctcccagtcagatatagtgaaacagcttactcaagactggactaagatttagaatataggggggctagggaggagaaagagaaagatcctcagaagtggattgtccctgaatacaggatgaaatcatctagatttttttctccaattaaatttgcatttcattcaa

SEQ ID NO: 45444 - DNA, 891 bp, Homo Sapiens
atgattctattgaataattccgagcggctgctggccctattcaaatctttagcaaggagcattcctgagtccctgaaggtgtatggctctctgtttcacatcaatcacgggaaccccttcaacatggaagtgttggtggactcctggcccgagtatcagatggttattatccgacctcaaaaacaggagatgactgatgacatggattcatacactaatgtatatcgtgtattctccaaagaccctcaaaaatcacaagaagttttgaaaaattctgagatcataaactggaaacagaaactccaaatccaaggttttcaagaaagtttaggtgaggggataagagcagctgcattttcaaattcagtgaaggtagagcattcgagagcactcctctttgttacggaagatatcctgaagctctatgccaccaataaaagcaagcttggaagctgggctgagacaggccacccagatgacgaattggagagcgagactccgaactttaagtatgcccagctgaatgtgtcttattctgggctggtaaatgacaactggaagctagggatgaataagaggagcctgcgttacatcaagcgctgcctaggagccctgccagcagcctgtatgctgggcccagagggggtcccggtctcatgggtaaccatggacccttcttgtgaaataggaatgggctacagtgtggaaaaataccgaaggagaggcaatgggacacggctgatcatgcgatgcatgaagtatctgtgtcagaagaatattccattttacggctctgtgctggaagaaaatcaaggcgtcatcagaaagactagtgcactaggtttccttgaggcctcctgtcagtggcaccaatggaactgctacccacag

SEQ ID NO: 45445 - DNA, 3756 bp, Homo Sapiens
gtcgggatggaggtgagaagacggccgtgacgcgcgcccgcggggccccctgcacccccagcagcccacagcgctccctgcccccctcccccgcagcagcgggccttgccgtcgagtgacagcggcctgggggggcagggggggcgggggcggccggatcagcgatgccggcgggcatgacgaagcatggctcccgctccaccagctcgctgccgcccgagcccatggagatcgtgcgcagcaaggcgtgctctcggcgggtccgcctcaacgtcggggggctggcgcacgaggtactctggcgtaccctggaccgcctgccccgcacgcggctgggcaagctccgcgactgcaacacgcacgactcgctgctcgaggtgtgcgatgactacagcctcgacgacaacgagtacttctttgaccgccacccgggcgccttcacctccatcctcaacttctaccgcactgggcgactgcacatgatggaggagatgtgcgcgctcagcttcagccaagagctcgactactggggcatcgacgagatctacctggagtcctgctgccaggcccgctaccaccagaagaaagagcagatgaacgaggagctcaagcgtgaggccgagaccctacgggagcgggaaggcgaggagttcgataacacgtgctgcgcagagaagaggaaaaaactctgggacctactggagaagcccaattcctctgtggctgccaagatccttgccataatttccatcatgttcatcgtcctctccaccattgccctgtccctcaacacgctgcctgagctacagagcctcgatgagttcggccagtccacagacaacccccagctggcccacgtggaggccgtgtgcatcgcatggttcaccatggagtacctgctgaggttcctctcctcgcccaagaagtggaagttcttcaagggcccactcaatgccattgacttgttggccattctgccatactatgtcaccattttcctcaccgaatccaacaagagcgtgctgcaattccagaatgtccgccgcgtggtccagatcttccgcatcatgcgaattctccgcatccttaagcttgcacgccactccactggcctccagtctctgggcttcactttgcggaggagctacaatgagttgggcttgctcatcctcttccttgccatgggcattatgatcttctccagccttgtcttctttgctgagaaggatgaggacgacaccaagttcaaaagcatcccagcctctttctggtgggccaccatcaccatgactactgttgggtatggagacatctaccccaagactctcctggggaaaattgttgggggactctgctgcattgcaggagtcctggtgattgctcttcccatccccatcatcgtcaataacttctctgagttctataaggagcagaagagacaggagaaagcaatcaaacggcgagaggctctggagagagccaagaggaatggcagcatcgtatccatgaacatgaaggatgcttttgcccggagcattgagatgatggacattgtggttgagaaaaatggggagaatatgggtaagaaagacaaagtacaagataaccacttgtctcctaacaaatggaaatggacaaagaggacactgtctgaaaccagctcaagtaagtcctttgaaaccaaggaacagggatcccctgaaaaagccagatcgtcttctagtcctcagcacctgaacgttcagcagttggaagacatgtacaataagatggccaagacccaatcccaacccatcctcaataccaaggagtcagcagcacagagcaaaccaaaggaagaacttgaaatggagagtatccccagccccgtagcccctctgcccactcgcacagaaggggtcattgacatgcgaagtatgtcaagcattgatagtttcattagctgtgccacagacttccctgaggccaccagattctcccacagccctttgacatcactccccagcaagactgggggcagcacagccccagaagtgggctggcggggagctctgggtgccagtggtggtaggtttgtggaggccaaccccagccctgatgccagccagcactctagtttcttcatcgagagccccaagagttccatgaaaactaacaaccctttgaagctccgagcacttaaagtcaacttcatggagggtgaccccagtccactcctccccgttctagggatgtaccatgaccctctcaggaaccgggggagtgctgcggctgctgtcgctggactggagtgtgccacgcttttggacaaggctgtgctgagcccagagtcctccatctacaccacagcaagtgctaagacacccccccggtctcctgagaaacacacagcaatagcgttcaactttgaggcgggtgtccaccagtacattgacgcagacacagatgatgagggacagctgctctacagtgtggactccagcccccccaaaagcctccctgggagcaccagtccgaagttcagcacggggacaagatcggagaaaaaccactttgaaagctcccctttacccacctcccctaagttcttaaggcagaactgtatttactccacagaagcattgactggaaaaggccccagtggtcaggaaaagtgcaaacttgagaaccacatctcccctgacgtccgtgtgttgccagggggaggagcccatggaagcacacgagatcagagcatctgaactgccctgccttggaggagagacttttgggtgaggtccaaagaggagagctgttcagcttacctgccacagagcttttctgcatgaactctggaacagaaaggccctgtaaagccctcagagagaagagagactccagagaaggctccctaagaccttgagagccatgacaggtccatcagcatgaagttggccaagccatagggcacagcacctccttgtaacaactctatagccctctttgggagatgacatgagtggaactcacagccaccactaccaccactttagacaggaccgaggccacatactccccattctctcgtggctttccatctcagcctcggagggcaacattgacagtcctcctggcttcagctagagaaggatgctggaacaagcggctggtgttgaaagagtgggttgaccaatttggtattgaatgttgcccagccacccctaggaacacctgtccatcacctcctggatggattccactgttagacagctacagggaatgattggtcatggggaagtctctgcgccataagccacgatcccagcgcaaaacccttactcaaatgtcttcattgacttcggtatttcatagtacctgagattttattttgagataccatcagggtgagttgcaccacttgtactcaattctaattgccccctggcaatctgggaagggttcagaaggtgggcacccagccaacagcatgaactcagagcattgttttagggttggaggaggaacacgctttctttacatcactagtgtagactcaaaagatatgcaagtgtcaaatatgcaaaagaaatagtttattcaaagagactgtgtgttactgaagaacagcataaaaatatgatttttttacttgcaaaaatgaaaggaaaaaaataccacgcattgaaatgcccagttcagactgaataattcctgctgcagcaaggaaagtacctactataatagaaattctgttttgttttctgtggttttcaagtt

SEQ ID NO: 45446 - DNA, 972 bp, Homo Sapiens
tttgttatcccactaagttttatatttaaaaaatattcttaaatctaaaggtattaacagaaattcaacttaaaaattgctgaatatagcttccggttctaggtgcttcaggagccatggcttagggtgcagacatggccaagtccaagaaccacaccacacacaacattcccgaaaatggcacagaaatggtattaagaaactgcgatcaagccaggtgtggtggcttacgcccgtaatcccagcactttgggaggccaaggcgggtggatcacgaggtcaagagatcgagaccaacctggccaacatggtgaaaccccatctctactaaaaatataaaaattagcggggcatgatggcgcgcgtctgtagtcccagctactcgggaggctgcggcaggagaattgcttgaaatcagaaggcggaggctgcagtgagccgagatcgcaccactgcgctccagcctggcaacagagcgagactctgtctcaaaaaaagaaaagaaaagaaaagaaaagaaaagaaaagaaaagaaaagaaaagaaaagaaaagaaaagaaaagaaaccccgatcacaaagatatgactctctcaagggggtggaccccaaattcctgaggaacatgtgcattgccaagaagcaaaacaagaagggcctaaagaagatgcaggctttggcagccatcagtccacgtggtgaggctatgaaggcccttgtaaaggaggttaagcccaagatcccaaagggtgtcagcagcaagctccatcgacttgcctacattgcccaccccaagcttgggaagcgtgcttgtgcccgcattgccaaggggcttgggttgtgccggccaaacgacaaggacaaggatcaaaccaaggcccaggctgcaactccagcttcagttccagctcaggttcgcaaaggtgctcaggctcctacaaaggcttcagagtaggtatctgcctgccaacgtg

SEQ ID NO: 45447 - DNA, 942 bp, Homo Sapiens
atggaaagaatcaacagcacactgttgactgcgtttatcctgacaggaattccgtatccactcaggctaaggacactcttttttgtgttcttttttctaatctacatcctgactcagctgggaaacctgcttattttaatcactgtctgggcagacccaaggctccatgcccgccccatgtacatctttcttggtgttctctcagtcattgatatgagcatctcctccatcattgtccctcgcctcatgatgaacttcactttaggtgtcaaacccatcccatttggtggctgtgttgctcaactctatttctatcacttcctgggcagcacccagtgcttcctctacaccctaatggcctatgacaggtacctggcaatatgtcagcccctgcgctaccctgtgctcatgactgctaagctgagcgccttgcttgtggctggagcctggatggcaggatccatccatggggctctccaggccatcctaaccttccgcctgccctactgtgggcccaatcaggtggattacttcttctgtgacatccctgcagtgttgagactggcctgtgctgacacaacagtcaacgagctggtgacgtttgtagacattggggtggtggttgccagttgcttctccctgatcctcctctcctacatacagatcattcaggccatcctgagaatccacacagctgatgggcggcgccgggctttttcaacttgtggagcccatgtaaccgtggtcaccgtgtactatgtgccctgtgccttcatctacctgaggcctgaaaccaacagccccctggatggggcagctgccctagtccccacggccatcactcctttcctcaacccccttatctacactctgcggaaccaagaggtgaagctggccctgaaaagaatgctcagaagcccaagaactccgagtgaggtttga

SEQ ID NO: 45448 - DNA, 1269 bp, Homo Sapiens
atgagcacctcatacggctgcttctggagaaggttcattcatggcattggacgatccggtgatatttctgctgtgcaaccaaaagctgcaggctctagccttttgaacaaaattaccaattctttggtcctggacattataaagctggctggtgtccatacagtagccaactgctttgtagttcctatggcaactggtatgagtctaactctgtgtttcttaacattacgacacaaaagaccaaaggcaaagtatattatatggccacgaatagaccagaagtcctgctttaaatccatgatcactgcaggttttgagcctgtggtgatagaaaatgttttggaaggtgacgagctgcgtacagacctgaaagcagtggaggctaaagtccaggaacttgggcctgattgcattctgtgtattcattctactacatcctgttttgctccaagggtgcctgatagattagaagaactggctgtgatttgtgctaattatgacattccacatatagttaataatgcttatggagtgcagtcttcaaagtgtatgcatctcattcagcagggggctcgagttggtagaatagatgcttttgttcagagcttggacaaaaattttatggttccagtaggtggtgctataattgctggctttaatgattcattcattcaggaaatcagcaagatgtatccaggaagagcttcagcttcaccttctttagatgtccttattactttattgtcacttggatcaaatggctataagaagctactaaaagaaagaaaggaaatgttttcatatttgtccaaccaaataaagaagttgtcagaagcctacaatgaaagactgttgcatacacctcacaatcccatatctttagctatgacacttaaaacactagatgaacaccgtgacaaagctgtcactcagcttggctcgatgctttttaccagacaggtttctggagccagggttgtgcctcttgggtccatgcaaactgtgagtggctatactttcagaggctttatgtcacatacaaataattacccttgtgcttacctcaatgctgcatcagccatcggaatgaagatgcaggatgtggacctgttcataaagagacttgacaggtgtttaaaggcagtaagaaaagaacgaagtaaagagagtgatgacaattatgacaaaactgaagatgtggatattgaagaaatggctttaaaactagataatgtacttcttgacacataccaggatgcttcttcatga

SEQ ID NO: 45449 - DNA, 1739 bp, Homo Sapiens
tgacgctttgatggtatctgcaagcgtttttgctgatcttatctctgccccctgaatattaattccctaatctggtagcaatccatctccccagtgaaggacctactagaggcaggtggggggagccaccatcagatcataagcataagaataatacaaaggggagggattcttctgcaaccaagaggcaagaggcgagagaaggaaaaaaaaaaaagcgatgagttcgccaaatatatggagcacaggaagctcagtctactcgactcctgtattttcacagaaaatgacggtgtggattctgctcctgctgtcgctctaccctggcttcactagccagaaatctgatgatgactatgaagattatgcttctaacaaaacatgggtcttgactccaaaagttcctgagggtgatgtcactgtcatcttaaacaacctgctggaaggatatgacaataaacttcggcctgatataggagtgaagccaacgttaattcacacagacatgtatgtgaatagcattggtccagtgaacgctatcaatatggaatacactattgatatattttttgcgcaaacgtggtatgacagacgtttgaaatttaacagcaccattaaagtcctccgattgaacagcaacatggtggggaaaatctggattccagacactttcttcagaaattccaaaaaagctgatgcacactggatcaccacccccaacaggatgctgagaatttggaatgatggtcgagtgctctacaccctaaggttgacaattgatgctgagtgccaattacaattgcacaactttccaatggatgaacactcctgccccttggagttctccagttatggctatccacgtgaagaaattgtttatcaatggaagcgaagttctgttgaagtgggcgacacaagatcctggaggctttatcaattctcatttgttggtctaagaaataccaccgaagtagtgaagacaacttccggagattatgtggtcatgtctgtctactttgatctgagcagaagaatgggatactttaccatccagacctatatcccctgcacactcattgtcgtcctatcctgggtgtctttctggatcaataaggatgctgttccagccagaacatctttaggtatcaccactgtcctgacaatgaccaccctcagcaccattgcccggaaatcgctccccaaggtctcctatgtcacagcgatggatctctttgtatctgtttgtttcatctttgtcttctctgctctggtggagtatggcaccttgcattattttgtcagcaaccggaaaccaagcaaggacaaagataaaaagaagaaaaaccctgcccctaccattgatatccgcccaagatcagcaaccattcaaatgaataatgctacacaccttcaagagagagatgaagagtacggctatgagtgtctggacggcaaggactgtgccagttttttctgctgttttgaagattgtcgaacaggagcttggagacatgggaggatacatatccgcattgccaaaatggactcctatgctcggatcttcttccccactgccttctgcctgtttaatctggtctattgggtctcctacctctacctgtgaggaggtatgggttttactgatatggttcttattcactgagtctcatggagagatgtctgttctaagtccacttaaataatcctctatgtggttgataatgatctgaatctgtttc

SEQ ID NO: 45450 - DNA, 1194 bp, Homo Sapiens
acagagatcagcaaacagcttttctgagagaaagaaacatctgcaaatgacatgctgtttctgcagtttctgctgctagctcttcttctcccaggtggtgacaatgcagacgcatcccaggaacacgtctccttccatgtcatccagatcttctcatttgtcaaccaatcctgggcacgaggtcagggctcaggatggctggacgagttgcagactcatggctgggacagtgaatcaggcacaataattttcctgcataactggtccaagggcaacttcagcaatgaagagttgtcagacctagagttgttatttcgtttctacctctttggattaactcgggagattcaagaccatgcaagtcaagattactcgaaatatccctttgaagtacaggtgaaagcgggctgtgagctgcattctggaaagagcccagaaggcttctttcaggtagctttcaacggattagatttactgagtttccagaatacaacatgggtgccatctccaggctgtggaagtttggcccaaagtgtctgtcatctactcaatcatcagtatgaaggcgtcacagaaacagtgtataatctcataagaagcacttgcccccgatttctcttgggtctcctggatgcagggaagatgtatgtacacaggcaagtgaggccagaagcctggctgtccagtcgccccagccttgggtctggccagctgttgctggtttgtcatgcctccggcttctacccaaagcctgtttgggtgacatggatgcggaatgaacaggagcaactgggcactaaacatggtgatattcttcctaatgctgatgggacatggtatcttcaggtgatcctggaggtggcatctgaggagcctgctggcctgtcttgtcgagtgagacacagcagtctaggaggccaggacatcatcctctactggggacaccacttttccatgaattggattgccttggtagtgatagtgcccttggtgattctaatagtccttgtgttatggtttaagaagcactgctcatatcaggacatcctgtgagactcttccccctgactcccccattgtgttaagaacccagcaacccaggagcctagtacaatatagtgatgccatcccgtcgactctccatttaaattgtttctctttctgcataataaacatttgttaataaaaaccaaa

SEQ ID NO: 45451 - DNA, 417 bp, Homo Sapiens
ttcggcgagcatgcagggatgagcgggtccctcggccgagcggcgggctcgggtgcgggcggtggtgtttcaggggagcggctggacgcactggtgaaggacaaagtggttgtcttcaaggggacggcggagcaaccccagtgcggcttcagcaacgccatggtgcagatcctgtgggtgcacggcgtccgcgactatgcggcctacgaagtgctggacgaccccgagctgcgacaaggcattaaagactattccaactggcccaccatcccgcaagtgtacctcaacggcgagtttgtgcggggctgtgacattcttttgcagatgcaccagaatgggggtctggtggaagaactgaaaaagctggggatccactccgcccttttagatgaaaagaaagaccaagactcaaagtga

SEQ ID NO: 45452 - DNA, 1617 bp, Homo Sapiens
atgctgcagatcggggaggacgtcgactatttgctcatcccccgggaggtcaggctggctgggggcgtctggagagtcatctctaagcccgccaccaaggaagcagaatttcgggagcggctgacccagttcctggaagaagagggccgcaccctggaggacgtggcccgcatcatggagaagagcaccccgcacccgccccagccccccaaaaagcccaaggagccccgagtgaggaggagagtgcagcagatggtgactcctccgccccggctggtcgtgggcacgtacgacagcagcaacgccagcgacagcgagttcagcgacttcgagacctccagagacaagagccgccagggcccgcggcggggcaagaaggtgcgcaaaatgcccgtcagctacctgggcagcaagttcctgggaagcgacctggagagtgaggatgatgaggaactggtcgaggccttcctccggcgacaggagaagcagcccagcgcgccgcctgcccgccgccgcgtcaacctgccagtgcccatgtttgaggacaacctggggcctcagctgtccaaagcggacaggtggcgggagtatgtcagccaggtgtcctgggggaagctgaagcggagggtgaagggttgggcgccgagggcgggccccggggtgggcgaggcccggctggcctccaccgcagtggagagcgcaggggtatcatcggcgccagagggcaccagcccgggggatcgcttgggaaacgcgggagatgtttgtgtgccccaggcttcccctaggcgatggaggcccaagatcaactgggcctcctttcggcgccgcaggaaggagcagacagcacccacaggtcagggggcagacatcgaggctgatcaggggggagaggctgcagatagtcaaagggaagaggccatagctgaccagcgggaaggggctgcaggtaatcagagggcaggggccccagctgaccagggggcagaggctgcagataatcagagggaagaggctgcagataatcagagggcaggggccccagctgaggagggggcagaggctgcagataaccagagggaagaggctgcagataatcagagggcagaggccccagctgaccagaggtcacagggcacagataaccacagggaagaggctgcagataatcagagggcggaggccccagctgaccaggggtcagaggttacagataatcaaagggaagaggccgtacatgaccagagggaaagggccccagctgtccagggtgcagataatcagagggcacaggcccgggctggccagagggcagaggctgcacataatcagagggcaggggccccaggtatccaggaagctgaagtctcagctgcccaagggaccacaggaacagctccaggagccagggcccggaaacaggtcaagacagtgaggttccagacccctggacgcttttcgtggttttgcaagcgccggagagccttctggcacactccccggttgccaaccctgcccaagagagtccccagggcaggagaggccaggaacctcagggtgctgagggccgaggccagagcagaagctgagcagggagagcaagaagaccagctgtga

SEQ ID NO: 45453 - DNA, 132 bp, Homo Sapiens
atgtattggcccagttccagctctagattaaatcaattatattctagtgaattttgtatattcctctttactaagaagaggaagagaaaaagaaaacatcattttatcaggctttgcatgttcttttcctag

SEQ ID NO: 45454 - DNA, 318 bp, Homo Sapiens
atggtcaacgtacctaaaacccgaagaaccttctgtaagaagtgtggcaagcatcagcctcacaaagtgacacagtataagagcaaggattccttgtatgcccagggaaagaggcgctatgatcggaagcagagtggctatggtgggcagagaaggccagttttcctgaagaaggctaagaccacaaagaagactgtgctaaggccagaatgtgttgagcctaactgcagatccaagaggatggtggtcattcagagatgtaagcattttgaaccgggaggagataagaagagaaagggccaagagatccagttctaa

SEQ ID NO: 45455 - DNA, 1657 bp, Homo Sapiens
agattgcacaggaggaggcggtagcggaacctttctcctccgcctggttctcgcttccacccgggcccagttggggacggacgcactagaggcgacctaaacatggagacagcgggcgctgcaactgggcagccggcctctgggctggaggctccggggtccacgaatgaccggcttttcctggttaaaggtggaattttccttggtaccgttgctgcagcgggaatgctagctggatttattacaacattatcattggctaaaaagaaaagccctgaatggttcaataagggaagtatggccacggctgcattaccggaaagcgggtcttcccttgccttgcgagctctgggctggggctccctgtatgcatggtgtggggttggtgtgattagcttcgcagtctggaaagctttaggagttcacagtatgaacgactttcgaagtaaaatgcaatcaatatttccaacaattcccaagaactccgaatcggctgttgagtgggaggaaacattgaaatccaaatgagatgagcatggatgaatttcaaaatgcttgttacagaaaggggtggctctggagacaccatgacagcaaaaggactgggactgatttctcccaggaacatgggcagattgctgactgaaccagtgcactggatagcattcagcctcatcacaggagagtatgtgtgtgcgtgctgggggagggtaaagttttcccacagttaagaagactatttaaaaatagtaattacaggaataacttccttatgtggaggggaccccataggaaatgattctgtttgtaacagttgaagcaaatttcatactaaaaaagtttataataaaagtatgataagaaaatatttataaaacagaccccctaatagcaatagtactgcaatgtgtctaattaaaggagtttcaagagcctttcttgtcaatatatgacagaacttggaagtcttattctgattagccagactacaaagtgacagtcacctggtaagtcctgtatggtaggaagtgggtgtggctctcgggtcctaaatgtggtctgtgctttacagccatcacacacatgctagttatttacctgatgcccttgcttgaaggccctataaattcttatacttaaaacaaaaagccagtaatgagttgtgatcaccccaaaaggcacagttgggctaaaataatgatgatatcaggggtaaacatatttttttgagaagttggtctggatctctgaacactgacaatttgtcattttgtctcagttgtcaaagtaaaaaaagcccagttgtcatccgtcttcaatatttttaaccagaaagtcacctgagtacggagtcccaatataaagtatttgggaccacctccctaacaaagctgttagggtaaattctgtgtgcacgcccaactccctcctgtcttccacagtctcctacaaaaaaaacagatggagaataatgtctacatgcaattgtttttactgcaattgtattttaaaatattttcaagaagagaaatactttaatatgtcaatatgtccagagaaaaaacctgtagttaaatatcagttgtgcaatttcttcctacttgcctaggctctaattagtcagcaatcaggtttaataaaggacatttgaaatttc

SEQ ID NO: 45456 - DNA, 348 bp, Homo Sapiens
atgacaaagaaaagaaggaacaacgttcgtgccaaaaagggccgcggccacgtgcagcctattcgctgcactaactgtgcccgatgcgtgcccaaggacaacgccattaagaaattcgtcattcgaaacatagtggaggctgcagcagtcagggacatttctgaagcgagcgtcttcgatgcctatgtgcttcccaagctgtgtgtgaagctacattactgtgtgagttgtgtaattcacagcaaagtagtcaggaatcgatctcgtgaagcccgcaaggaccgaacacccccaccccgatttagacctgcgggtgctgccgcacgtcccccaccaaagcccatgtaa

SEQ ID NO: 45457 - DNA, 1392 bp, Homo Sapiens
ctcttcaaagaccacgacttctcttctgacttgttgaggcagctcaacagcttaaggcaaagcaggatcctgactgatgtgagcatctgtgccggtgcccgggagatcccctgccaccgcaacgtgctggcctccagcagcccctacttcagggctatgttctgcagcagcttccgggagaagagtgaagccaaagtgcagctgaaaggcattgaccccccaaccctggaccagatcgtctcctacgtgtatacgggggaggcacatattgccactgacaatgtcctccccgtgatggaggccgcctccatgctacagttccccaagctgtttgaggcctgctcctcgtacttgcagagccagttggcccccagcaactgcctgggtatgatcagactctcagaaatcttaagctgcgagaccctcaagaagaaagccagggaggtggcactgacgtccttcccagaggtggccgcatcggccgacctgaaggagctctgtgccttggagttgagggactatctcggagatgatgggctctgtggggaggaggaaaaggtgtttgaggccctcatggtttggatcaagcatgacctccaggcccggaagcgatacatgcaggaactgttcaagcaggtcaggctgcagtacatccacccagccttctttcaccacttcatcgccaacgatgccctcctgcagtcctcgcctgcatgccagatcatcttggagaccgccaagagacagatgttctctttgtgtggcaccaccgtcccagactgcaaactcctgttgcatgtccctccaagaaactcttaccaagatttcctcatcctcttgggcggaaggaaggacagccagcagaccaccagggacgtcctactgtacagcaaacagaccggccaatggcagagccttgccaaactcccgacacggctgtacaaggcctctgccatcaccttgcaccgcagcatctatgtgctggggggcatggctgtcagctcagggaggagtctggtcagtcacaatgtctacatcttctccctgaaactcaatcagtggaggctgggggagcccatgctggtggcccgctactcccacagaagcactgcccataagaacttcatcttctccatcggggggattggagaagggcaggagctcatgggctccatggaaaggaggattcttgcttatgaccctcaatccaacaaatttgtcaaatgtgcggacatgaaagaccggaggatgcaccatggggccacagtgatgggaaacaaactctacgtgacgggcgggcggcggctgaccacggactgcaacattgaggactccgcctccttcgattgctacgaccccgagacggacacctggacatcccagggacagctg

SEQ ID NO: 45458 - DNA, 87 bp, Homo Sapiens
atggggcccagatggtttgcaaagcgcacactcgcacaacgcaatacacagaacaagattccgttgttacagcgcgtggtttactag

SEQ ID NO: 45459 - DNA, 465 bp, Homo Sapiens
acacatctgctcctgctctctctcctccagcgaccctagccatgagaaccctcaccatcctcactgctgttctcctcgtggccctccaggccaaggctgagccactccaagctgaggatgatccactgcaggcaaaagcttatgaggctgatgcccaggagcagcgtggggcaaatgaccaggactttgccgtctcctttgcagaggatgcaagctcaagtcttagagctttgggctcaacaagggctttcacttgccattgcagaaggtcctgttattcaacagaatattcctatgggacctgcactgtcatgggtattaaccacagattctgctgcctctgagggatgagaacagagagaaatatattcataatttactttatgacctagaaggaaactgtcgtgtgtcctatacattgccatcaactttgtttcctcatctcaaataaagtcctttcagcaa

SEQ ID NO: 45460 - DNA, 2408 bp, Homo Sapiens
agaacacacagtgggcctcaggagcaccggaatcagcgcgaaaacgcagaatgcaaaccgtactttgcaccattatttgcaacttgacagtgaccgccgccgtcactgcatgtttaagggaacccggagctgtttccaacccaggtctgacgtccttcacagtgctttgtgtgaactggcagggggagaaacgacggctggggaacgaacggggttattcgtcccatcaatggcctcagaagcatccttatcacctgcttccagagctcccgacccaaatttcctcctcaagaccgacgcggccgcgacgctgcaaaagctcgtcccggcctcacctggctcgcggccggcggtcccccttgaaggcggcgcagcaggatcggggtctgcccgcctggggcgtttggcttttgtcccgcgccgaggtccggcccaggagtgcgcttgggagctcccggcgcggcctcggggacaaaggcccgcggagccgacgtgcagcagagttcacccaggcccgtccgaccagaaaacgaagaacgcccggaggcgggaggccggaggcaggctgctggctggagaaccgacggcaacgacggcgcaaagccggcgcggaaagggcaggcgcaggacccaccctgacgccgcctctcccagccggctctcctgaccccccaagccccgcagctacggcggccccacagcctgagcaaaggcctcacctcagccgcggacaatggcggctgcttccccggcgtcgaccggagcgcgccgcggggtctgctgggagctgtagttccaggcgggcacttccggcgtcgggcagcggcgccgccatgacaggttcctgggccgcgccgcctcgccctgcctgggcggggttgggacctttctggcacctgcgtcgaagccggcggcaggatggactttgttgtcccggtcccagaccaccctcctccaccgtcgcctcccactgcaaaaaggcctggataaggaacctaattcgagctacccttctctgtgaagctcgacggctgagaacgtcagggctcgttcccaagtctctttccagaggccaggctttatgggagcatgggttaccagcgacgcaccctgtgaggatgcagtgtccaaggcaccatcttgaactcatcatcgccaaatatgtgagcaccttgatgttggacttcccaacctccagaccgtaaggcagtacatttctttgtaaattacgcagtctcagctattctgttacagcagcacaaatggactaagacaacccccgagataggaaggggtaaggtaaatgcaatgagagttggggttttcgatcttagtccagtaaaggagctggaactgttctgtataaacaaagggcaaggtaattgctacatagattcttttcttattattgctgattcttatcctaaaataaaggacattgccactacacatcctctagaatgaccaaaaataaaaatacagcatcaaatgggacgacatggtgccaactggaattctcataccctgctgatgggagtataatgtggtacagtcactttggaaaaaagtttgacaatttcttataaaattatacataaacctgtactatgacctagagattctactcctgtttgttcaaaagaaaggcaaacatctgtccactaaaagatatgtacaagaatgctcacagtggcattatttatgacggtccaaaccaggagataatccaaatgtctgtaaccaagagaatggataaagaaattttgatacgtcaatttaatggattactacttagcaataaaaataattagccatgctgggcgcggtggcttatgcctgtaatcccagcactttgggaggctgaggcaggtggatcacctgaggttgggagttcaagaccagcctgaccaacatggagaacccccgtctctactaaaatacaaaattagccggggtggtggcgcatgcctgtaatcccagctactcgggaggctgaggcaggagaatcacttgaacccgggaggtggaggttgcattgagccgagattgcgccattgcactccagcatgggcaaaaagagcaaaactccgtctcaaaaaaataaataaataataattagccacatatccacacaacaatattgcattatcacaggtatagtgataaatactgtatgattccatttatatgaagttcaagaacaggcaagtaatccatgatgaaagaagtacttacctctgggggtggcagcattgactaaagaggtacaagggagtcttctggggcctggaaatgttctatatcttgatctgggtggtggttacacaggtatacgcgtgttaagaaatcatcaggctgtatacttagtgtactgtaatggcattacactgtctttcaattaaaatgtg

SEQ ID NO: 45461 - DNA, 1524 bp, Homo Sapiens
atgccttggctgctctcagcccccaagctggttcccgctgtagcaaacgtccgcggcctctcaggatgtatgttgtgttcacagcgaaggtactcccttcagcctgtcccagaaaggaggattccaaaccgatacttaggccagcccagcccctttacacacccacacctcctcagaccaggggaggtaactccaggactatctcaggtggaatatgcacttcgcagacacaaactaatgtctctgatccagaaggaagctcaagggcagagtgggacagaccagacagtggttgtgctctccaaccctacatactacatgagcaacgatattccctatactttccaccaagacaacaatttcctgtacctatgtggattccaagagcctgatagcattcttgtccttcagagcctccctggcaaacaattaccatcacacaaagccatactttttgtgcctcggcgagatcccagtcgagaactttgggatggtccgcgatctggcactgatggagcaatagctctaactggagtagacgaagcctatacgctagaagaatttcaacatcttctaccaaaaatgaaagctgagacgaacatggtttggtatgactggatgaggccctcacatgcacagcttcactctgactatatgcagcccctgactgaggccaaagccaagagcaagaacaaggttcggggtgttcagcagctgatacagcgcctccggctgatcaagtctcctgcagaaattgaacgaatgcagattgctgggaagctgacatcacaggctttcatagaaaccatgttcaccagtaaagcccctgtggaagaagcctttctttatgctaagtttgaatttgaatgccgggctcgtggcgcagacattttagcctatccacctgtggtggctggtggtaatcggtcaaacactttgcactatgtgaaaaataatcaactcatcaaggatggggaaatggtgcttctggatggaggttgtgagtcttcctgctatgtgagtgacatcacacgtacgtggccagtcaatggcaggttcaccgcacctcaggcagaactctatgaagccgttctagagatccaaagagattgtttggccctctgcttccctgggacaagcttggagaacatctacagcatgatgctgaccctgataggacagaagcttaaagacttggggatcatgaagaacattaaggaaaataatgccttcaaggctgctcgaaaatactgtcctcatcatgttggccactacctcgggatggatgtccatgacactccagacatgccccgttccctccctctgcagcctgggatggtaatcacaattgagcccggcatttatattccagaggatgacaaagatgccccagagaagtttcggggtcttggtgtacgaattgaggatgatgtagtggtgactcaggactcacctctcatcctttctgcagactgtcccaaagagatgaatgacattgaacagatatgcagccaggcttcttga

SEQ ID NO: 45462 - DNA, 939 bp, Homo Sapiens
atgaaagcaggaaacttctcagacactccagaattctttctcttgggattgtcaggggatccggagctgcagcccatcctcttcatgctgttcctgtccatgtacctggccacaatgctggggaacctgctcatcatcctggccgtcaactctgactcccacctccacacccccatgtacttcctcctctctatcctgtccttggtcgacatctgtttcacctccaccacgatgcccaagatgctggtgaacatccaggcacaggctcaatccatcaattacacaggctgcctcacccaaatctgctttgtcctggtttttgttggattggaaaatggaattctggtcatgatggcctatgatcgatttgtggccatctgtcacccactgaggtacaatgtcatcatgaaccccaaactctgtgggctgctgcttctgctgtccttcatcgttagtgtcctggatgctctgctgcacacgttgatggtgctacagctgaccttctgcatagacctggaaattccccactttttctgtgaactagctcatattctcaagctcgcctgttctgatgtcctcatcaataacatcctggtgtatttggtgaccagcctgttaggtgttgttcctctctctgggatcattttctcttacacacgaattgtctcctctgtcatgaaaattccatcagctggtggaaagtataaagctttttccatctgcgggtcacatttaatcgttgtttccttgttttatggaacagggtttggggtgtaccttagttctggggctacccactcctccaggaagggtgcaatagcatcagtgatgtataccgtggtcacccccatgctgaacccactcatttacagcctgagaaacaaggacatgttgaaggctttgaggaaactaatatctaggataccatctttccattga

SEQ ID NO: 45463 - DNA, 453 bp, Homo Sapiens
ggaatctggaggaaaactgaccaggtggcttgttaacagtcagtgggaatttgaaagaagaaaaccagatggaacaagaagactgggacttccccatcctgtggatcccattgtaggagagccagaatactgccctatgagactgggaatgacaactggaagacttcagtctggagtgaatattctgcaggggttcaaagaggataaaaggaacaaagtaactccagggttatatttgaattatggaccctggagttcttatgtaccgcattatgactccacatttatgaatatcagcaaggataattcagatttaatctatgcaatctatgggggaagactgatcttccaagcaatttcagcaaccatgagtttctggccccatgccaagattacccatatgttaagacagatagtttgctggatgttttaacaaaaggaggggattccagg

SEQ ID NO: 45464 - DNA, 429 bp, Homo Sapiens
atgccatccagactgaggaagacccagaaacttcggggccatgtgagccatggccatggccgcataggcaagctccaaaagcaccccagaggccacagtaatgctggtggaatgcatcaccacaggatcaacttcaacaaatactacccaggttactttgggaaagttggtatgaggtattacttaaagagaaaccagactgtcagccttgacaaattgtggactttggtcagtgagcagacacaggtgaatgctgctaaaaacaagcctggggctgctcccctcattgatgtggtgcaatcgggctactacaaagttctgggaaaggaaaagctcccaaagcagcctgtcattgtgaaggccaaattcttcagcagaagagctgagaagattaagggtgtcaaggggacctgtgtcctggtggcttga

SEQ ID NO: 45465 - DNA, 272 bp, Homo Sapiens
gggatgttactggctggttttacaattaggaatgttccattcatcaatgaacatgtccatgttcctaacgcatggtcttcaattttaagaagcattgcccttaacattattctaatacgagctgggcttggactcgatccacaggctttgaggcatttgaaggtggtttgtttcagattggctataggtccatgccttatggaggcaagtgcagctgctgttttatcccacttcattatgaaattttcctggcaatgggcaattctattagg

SEQ ID NO: 45466 - DNA, 1104 bp, Homo Sapiens
atggatgacgctgctgtcctcaagcgacgaggctacctcctggggataaatttaggagagggctcctatgcaaaagtaaaatctgcttactctgagcgcctgaagttcaatgtggcgatcaagatcatcgaccgcaagaaggcccccgcagacttcttggagaaattccttccccgggaaattgagattctggccatgttaaaccactgctccatcattaagacctacgagatctttgagacatcacatggcaaggtctacatcgtcatggagctcgcggtccagggcgacctcctcgagttaatcaaaacccggggagccctgcatgaggacgaagctcgcaagaagttccaccagctttccttggccatcaagtactgccacgacctggacgtcgtccaccgggacctcaagtgtgacaaccttctccttgacaaggacttcaacatcaagctgtccgacttcagcttctccaagcgctgcctgcgggatgacagtggtcgaatggcattaagcaagaccttctgtgggtcaccagcgtatgcggccccagaggtgctgcagggcattccctaccagcccaaggtgtacgacatctggagcctaggcgtgatcctctacatcatggtctgcggctccatgccctacgacgactccaacatcaagaagatgctgcgtatccagaaggagcaccgcgtcaacttcccacgctccaagcacctgacaggcgagtgcaaggacctcatctaccacatgctgcagcccgacgtcaaccggcggctccacatcgacgagatcctcagccactgctggatgcagcccaaggcacggggatctccctctgtggccatcaacaaggagggggagagttcccggggaactgaacccttgtggacccccgaacctggctctgacaagaagtctgccaccaagctggagcctgagggagaggcacagccccaggcacagcctgagacaaaacccgaggggacagcaatgcaaatgtccaggcagtcggagatcctgggtttccccagcaagccgtcgactatggagacagaggaagggcccccccaacagcctccagagacgcgggcccagtga

SEQ ID NO: 45467 - DNA, 5693 bp, Homo Sapiens
cggatcagagatagcagagcgccgagttggggccacgaaggcgtgaggggagtcgtcgtccctcctgcacgaaagcgtctaagccttggcgacgccgccctgggggacccacgtcaggcctgggatagggaccgctgtccccgggtccctaccaatgtcgcccgtcgctcccggcccagctctacccgcagagtctgatggcagcggccactctgaggacgccaactcaggtgagtgcggcggcactgtgacctttgaagatgtggccgtacacttctcctgggaggaatggggtctccttgatgaggctcaaagatgcctgtaccgtgatgtgatgctggagaacttggctcttttaacctctgcagatgttcatcatcagaagcagcaccttggagaaaaacatttcagaagcaatgtgggcagagccttgtttgtgaagacctgcacattccatgtgtcaggggagccttccacctgcagagaagttgggaaggacttcctggccaagttgggatttctccatcaacaggctgctcacactggggagcaatcaaatagcaaaagcgacggtggggccatcagtcacagaggaaaaactcattacaactgtggagaacacacaaaagcattcagcggtaaacacacacttgttcagcagcagagaaccctcactacagaaagatgttacatatgcagtgaatgtgggaaatcctttagcaaaagctacagtctcaatgaccattggagacttcacactggagaaaagccttatgaatgtcgagagtgtgggaagtcctttaggcaaagctctagtctcattcagcaccggagagttcacactgcagtacgacctcatgaatgtgatgaatgtggaaaattatttagcaacaagtctaacctcattaaacatcggagagttcacactggggaaaggccatatgagtgcagtgaatgtgggaaatcctttagccaaaggtctgcactccttcaacatcggggagttcacactggggagaggccttatgagtgcagtgaatgtgggaagttttttacatatcattccagtctcataaaacaccagaaagttcacagtggatccaggccttatgagtgcagcgaatgtgggaagtcatttagccaaaactctagcctcattgaacaccatagggttcacactggagaaaggccttataagtgcagcgaatgtgggaaatcctttagccaaaggtctgcactccttcaacatcggggagttcacactggggagaggccttatgagtgcagtgaatgtgggaagttctttccctacagctccagtctccgaaaacaccagagagttcacactggatcaagaccctatgagtgcagtgaatgtgggaaatcctttactcaaaattccggcctcattaagcacaggagggttcacactggggagaagccttatgagtgcacggaatgtgggaaatcctttagccataactccagccttattaaacatcagagaattcatagtcgataaaagccttatgagtggcaaatgtggaaaatctgttagcaccctggagaaagtccttgagtacacagtgaatgtcagaaagcttcagctgaaggccatatctcattgagtgccacacagttcacaagggaaagacacttttgatatgtagggatgtccagttgatataacagctctgaaggagatcccttatgagggtggcatcagcctgaattgaacatcctatatctgaacatctgcataaattccaggtatgtgtgaactgcattgcaccttttgccctgcccagggcccatgtcagatttatgtctctgctgatactatagtggaagccattttacctctactgcctggcaggtgaccaccagtgtgcaccactcacccatcccagtgtagttaggccatggacctgacccagtttggcccagaggactctgctggtgacctgaaaagagggactacatatttcaggatattgttggtctcacatgactcttgatagagtttgccagccttcaaatcaccaactgtgggaaccaactgcctcttattgccttggtttgtacaataacaaaggccttattaatcttgggggttctatatgtatgggttggtttgaaaacagttgggttctgctaacatgaaggggtgaataactttttttggagatcccaaacattgtgtagctcaacagggacagggacagggacagtaggatggcagaatatagctctctctctagtttgagcctagttttcattgctattcaaggcctctgagaaaaaactacagggtattgtcctaatttatatcctggatgccatagaggtcagcctgaggaggcagcagttacttgacatcctttgatgtttctgaaagcaacatgaaattgttctcttgttcacaaggaatactgcatcgtgttcagtgccagtgggggaaatctgttccccaggtcctgtatgccttgatatcctgaattccacagggtagcaccacaggtggtaagattatagtaggaattataattgttatagaagtactggattgatagagagtggaaaactgcaataacactgcaataaatagaatgtgccccttttacagaggtttccatgatgttcgttattatggctcttaaggatgagcaggtacagaaatcctcaggacctacagaattgtgtatcttgtgtagctgaggtcattgtcagaaattttatggaatcctgtagcctctgggattttcacctcaaggtcattgctatgcaggcaggaaaacaaggatagagaagggaggtctaggccattgatacagcctttgtgatccagccaacatttctgttgagtcaggtggaaatggccttcactgttcacttgtatttgtgatcactgaggcaaaatcctctcccaggacatgaggagagagatggtggaatcaacatagggttgtcaaacctgattttccaaaaacaataggaaattcagacttttattttgaaccatattttgttaggttggtgcaaaagtaactgtggttttgaaccatgatttatttttatttttatttttttttgagtcagagtcttgctctgttgcccagtctggagggcaatggcactatctcagctcattgcaacctccgcctcccaggttcaagcgattcttctgcctcagcctcccaggtagctgggattacaggcacccgccaccacgcccatctgagttttgcatttttagtagacatggggtttcaccatgttggccaggctggtcttgaactcctgacttcatgtgatccacccaccttggcctcccaaagtgctgggatttacaggcatgagccactgcgcccagccaagctttttcaccattccaatttccttcaaatgctgaacagccgtggaatggttgacattgagttcttaggcaacttctcatgtagttgtaagaggatcagcttctaatattgctctcaattggtcattgtcaacttccagtggctggccactacttctcttcaaggctcttgtctcctttgcaaaacttcttgaaccaccactgcactgtacattcgttagcagttcctgggccaaatgtgtttatatcgtgagttgtctctgctgctttacgacccattgggaactcaagtaagaaaatctcagccgggtgcggtggctcacgcctgtaatcccagcactttgggaggctgaagtaggtggatcacaaggtcaggagttagagaccagcctgaccaacatattgaaacctcatctctactaaaaatacaaaaattagccgggcgtggtggcatgtgcctgtagtcccagctacttgggaggctgaggcaggagaatcacttgaacccgggaggcagaagtcacagtgagccaagatcacgccactgcactccagcctggacgacagacaaaacaagactccgtctcaaaaaaaagaggccagatgcggtggcttacacctgtaatcccagcactttgggaggccgaggtgggtggatcacaggtcacgagttcgagaccagcctggccaacatggtgaaaccccgtctctactaaaaatacaaaaattagctgggcatagtggcatgcacctgtaatcccagctactggggagcctgaggcacgagaattgtttgaaccccgggaggtggaggttgcagtgagccaagatcatgtcactgcactccagcctgggcaacagagcaagactctatctcaaaaaaatcgctgaaatttgagttttgtctaacatttccatagtctaaaataaacataaacagcaagtagtaagtcagcaaaaaaacataaagcgagaaatgcctattaaaatgatgtataaccacatttatttaagaatgttttccaatataaaatggcaaaatccaacatgcaaaaacggcaattacttttgcactaacctgataataattttaataagaataaatggtacatatttaaactatataatttgatcagctttgatattcatattaacctgtaattgctcccaccatgccaattttgaaactgccaacatgttactgaatgtagaattgggaagagttgctgatagcatcctaatatattctgtttctaccatactgatacagtggccacgaataacctcaagaatgtagaaaataaaatgtagtgaaatgattaggaagaagttgtttcttcacaatcatgacaatgaacgtgtcattccacaagttacctcattgtcctttaataattatctgcctataggcaactattgatttactttccattataatacattagttttcatttgctagaattttatatgattgaaaccataatgtatttactcttttttaatccctgggtatagtcacgtatttattttgagattcatcattatacctctatgagtagtttcttttttttgtattgctgagaagtatgatgttctgtggatataccagtattcgtttattcattcattcatttgttatggatattttgagtagttttttaaagtagtttgaggtataatggaacttaaagtgcttatatttaaaatgcatattttgatattttcatacatgcttacaccctggaacgcagtttccttctgtctttttagttcattctcaacatataaaattaattttcattgtgtaaaattactggtacaatgacatattttgtctcctgttacagctgtgttcaattacaaaaaaagatggaaaagactgttatgaagccagatgaacctttctccagtcttccttcactatttttttttccttcaccatttatcatttcatagtcatttatgtttcatcggtcctcatgtgtactagtgcgttattttacttatactcccggatatcatattatttaatgcatagcctcttcagaatgcaattttaaaatgtaaaggctcttttataaccccccaaaaaatcacacaaatatattttaaaatgtaaatattttatcgcttctgttttctcagttgtctaaaacaatgtgtttcttaaggaagatcatttttattcaggatccaaatgtatatttaatagctttcagtagttgtatctcataagtctgtaacctacaggttccatttacctttgttttcttatttcttgaagttgctgagtcattttttaattagaatttgctgt

SEQ ID NO: 45468 - DNA, 2914 bp, Homo Sapiens
atgtcaggaaacggaagcgtgtggtgttgactattaaagataagcttgatataataaagaaacttgaagacggaggttcttccaaacaactggcagtgatttatggaattggtgaaacaacagttcgggatataagaaaaaataaggaaaagattataacttatgcaagcagttctgattccacaagtcttttggccaagaggaaatctatgaagccatccatgtatgaggaattggacagggcaatgctggaatggttcaaccagcaaagagcaaaagggaatcccatatctggaccaatttgtgcaaaaagggcagagttcttcttttatgctttgggaatggatggtgattttaacccctctgccggttggctaactcgttttaagcagcggcacagcattagagagattaacattagaaatgaaagattaaatggagatgagactgcggtggaagatttttgtaataactttcgagattttattgaacgagagaatttacagcctgaacaaatctacaatgcagatgaaactggactcttttggaagtgcttgccttctaggatttcagtaatcaaaggtaaatgcactgtccctgggcacaaatcaattgaagaaagagtcacaatcatgtgttgtgccaatgcaacaggtttacacaaacttaaactttgtgttgtggggaaagcaaagaaacctcgctcctttaaatcaactgacaccttaaacctgccagtctcttatttcagccaaaaaggtgcatggatggatctttccattttccgacaatggtttgataaaatttttgtgccgcaagttcgagagtatttaagatctaaaggcttgcaggaaaaggctgtgctcttgttggataattcaccaacacatccaaatgaaaatgtcctaaggtcagatgatggccaaatatttgctaaatatttaccacctaatgtggcctcattgattcagccttcagatcagggagtcatagcaacgatgaagagaaattatcgtgcaggtcttctccagaacaacttggaagaaggtaatgacctgaaatcattctggaagaagctaactctgttggatgcactttatgaaatagcaatggcatggaacttagtaaaaccagttaccattagcagagcatggaagaagattctccctatggtagaggagaaagagagcctggactttgatgttgaagatatttctgtggctactgtggctgccattttacaacacaccaaaggattggaaaatgtgactactgagaaccttgaaaaatggcttgaagtagacagtactgaaccaggctatgaagtgttaactgatagcgaaatcatcagaagagcacaaggccaggcagatgaatccagtgaaaatgaggaggaggaaatagaactaattccagagaaacatattaatcatgcagctgccctccagtggactgaaaatttattggattatctagaacaacaaggtgatatgattctacctgatagactggtaatacgtaaacttcgagccaccatcagaaataaacagaagatgacaaagtcaagtcaataatgtcatttcaattttattgttctgctcattgtgtttgtgacaaactctttgcaatatggcttaattttctttgtgttctgaattctcagacttggtcctgtgaaatacaggcacaaaatgtatctgaagtggtttgaggattatgtgttttcatcatctgtgtcttttgtccttttatttgtacagataatcagaagatgatactgaatagatataaattacatgtacacatgtattcactttttagaatctgcaattataccttctgtaacagtggcattcccttaattttctagtgaaagttagagataactgaacagactgaagcacttttctgaaatcttttgcttgatttatgaaggctgccatagttatcttttcttgtgttaaccatcttaaatgatgttttgtatattttaatagactgataggatgagaaagatttatattattagatttcaggatgatttataataattcaaaaatgaaattcaataatggggaaataattatgaattatagaaattatgccttcattctcttacatttgtgtgggttgcaagagggggagattattctggaaatgaagtaaatatgggaagttattgccaaatgagagagaaactatgggaaagctgatctataaagaggcattctgatcaattcatttgtaggaaactgggaaataaaaacctggggaactttaggttatttatacaagggaataaataggctgattttaatttggtaagttgatctttttattatgaatttggtaatagtataggtttattatttattcatctaattttatagtacaggttttgtaatgttacatgtgatgatatgagctcccaccttatatgggggaacatcttgggaatttgagatttaataagtttttttttttttttttttagtgtttttactgcatactcacaaatgttgtctataatttgaaaaatattgtcatatctggccctttgatgagaaaaggaaattacaataataaagttttatgattttaaataagtcatatgtttgtatcctgttttatgaagaaagcagaaataattactgaaagtgccagacactaaggaatattattgtttattattttaatacatataaaaagggattaatctgctaaaatgtaatctaaatcagaattttgataaattttttttgtaaactaagtatgtttattcaagacattgaaactactttgcacatatgaatattaatgtacctggtaatttaaaagtaaagtgttcccatgctatttcatgtttgggccaaaaatttttaaaaaataaattacaattgttctctattagtca

SEQ ID NO: 45469 - DNA, 447 bp, Homo Sapiens
gacccatcacagaagtttaatccaacctacatcccagagtctccacaaatgctcaccgaagaaaattcccgggacgattcaggggcctctcaaatctgctccgagacgttgataaagaaccttagtaacttgactatcaacactagtagcgaatctgtttcccctctatcggaagctttactccgtcgagagtctgtaggagcagaagtcctcagggaaatcgaagatgagtggctttacagcaggagaggagtaagaacattgctgtctgtgcagagagaaaagatggcaagatcgagatacatgttactcggcagagttcgtatgcatgaaagaagaccaacaaacgaggagcctaagggagttaagaaggaatcaagaccattcaaatgtccctgcagtttctgcgtgtctaacggatgggatccttctgagaatgctagaata

SEQ ID NO: 45470 - DNA, 327 bp, Homo Sapiens
agaatgtcagtggattactgtaggcttaaccaagtggtgactccaattgtagctgctgtaccagatgtggtttcactgcttgagcaaattaacacatctcctggtacctggtatgcagccactgacttggcaaatgcctttttctccattcttgtccataaggcccaccagaagcaatttgccttcagctggcaaggccagcaatatgcctttactgtcctacctcaggggtatatcaactctccagctttgtgtcataatcttatttggagagaccctgattgctttttgcttccacaagatatcacgctggtcccttacattgat

SEQ ID NO: 45471 - DNA, 302 bp, Homo Sapiens
cttgagcccttcatgggctagcacaccaacaccatccccccagatgcttcagttgttggcttcgaatggcttactatttccatttctacggagaactgccatctcaggaatcacctcaccctggagtttattcccctcacccacagggtggctggcagccaacagctgactcgtacagagagtggcacaatgaagatttgaacccacgtatgtctcactggacgtatgcccaggaactgattgggaaagtgaggcccaggggtgcaaaccagtccaatattagcggcagagctcttccctag

SEQ ID NO: 45472 - DNA, 2055 bp, Homo Sapiens
ctcttttactgttctacacagagaaagggaatgacgtgggctcagtgtacaagaagtaccctcaaggaaggggcttgagaaggactagctcttctattgacttacccagaaaggatacagtttgctcaagccaagagtgggtggcaaaatatgggctcaaaaaattgaagctggagatttccagatgcatgggtcccaactgcactcatcaaaagtcaggacagaggtcagcatccgccaaacactgcagcatcttccccagcgttgagatccatggagtggtgagacacatccagtggacgcccagggagatggaggtgtacatcaggcacttggagaaggtgttaaggcgctatgtccagaggctgcagtggctgctgtccgggagccgccgactgtttggcaccgttttggagagcaaagtatgcatattgctggacacgtcagggtccatgggcccctacctgcagcaggtgaagacagagctggttttgctgatttgggaacagctgcggaagtgctgtgacagttttaacctgctcagctttgcagagagctttcagtcatggcaggacacgctggtggagaccacagatgcagcgtgtcatgaggctatgcaatgggtgacccacctgcaagctcagggcagcacctccatcttgcaagcattgctggcaactttcagtttccatgatctggaaggattgtacctcctgaccgacggaaagccagacacaagctgcagccttgtcctaaatgaagtccaaaaactcagggagaaaagagatgtgaaagtgcacaccatttccttgaactgctcagacagagcggcggttgagttcctgagaaagctggcttccttcaccggcggacgctatcactgccctgtgggtgaggacacactctccaaaattcacagcctgctgaccaaaggcttcatcaatgaaaaggatcccacattgccaccatttgaaggagatgatttaaggatcctggcccaggagatcaccaaggccagaagcttcctctggcaggcccaatccttcagatcccaactccagaagaaaaatgatgcagaaccaaaggtcactctttcctagagaagtgttctcagaaaagtcatcctgcaaaggaccactcactgagcaaatctcagccccgagggcaggatgggatgaaatgctgtgacctgcaggaaacatgattcctggtaccaggactctctggaagctgaggaaggaaagactttgtcttttgtgtgaggggccattcccgggtcttaatctaactctccagccctgtcccgcagcgcactctactctccagccactagattgtccctctctgggaagccctaaaccaaccccctgcctaaatggtggtgcttcttgcaaaccaaccccctgcctgaacggtgcttcttgccccctctgcctggagactcctgctcatccatcaaggcacagctcaaatgacatcagctccctgggacctatctagagcgaggggcctccagtctttctcttgcagcatcctgaccacgcagacctctcgcactcagcactctatgtcacgccaccttgctcgctgatctaactcttctccttgatggtgagctccttcgggatgagactggtgtcccaggatctgcaggtccccagaagctgccacataggagacacatggtgaacagtgagcaggcggctgagctgtgagagcctagctctggaaagcagctgatggggtggtctccaccctggttcataagaggctaatgcagagtcacagtcagcccatcctgggggaagaagaaacaagtgagcctcagcaccaccctccatccctgcccaaccaaactgaagtgaaggctgctcatctgggttcattttctaaaattaaaaacaattaattttattctactaataggatcaacatgactttaactgtttgaagtgatcattggcgtgtgtgtgtgtgcataaatttttagtgacataaaactttattaaaagactcataccataataaagaatttcaataagaaaaagataaaca

SEQ ID NO: 45473 - DNA, 1833 bp, Homo Sapiens
gccatcgtgtctatcctgttcattgtgctttccaccattgctttgtctctcaatacgctgccggagctgcaggaaacggacgaatttggacaactcaatgacaaccgccaattagcacacgtggaggctgtgtgtattgcatggtttaccatggagtaccttttgcgattcttatcctcaccaaataaatggaagttcttcaaaggcccactgaatgtcattgatttgctggccatcttgccgtactatgtcaccatttttctgacggagtccaacaagagcgtgctgcagttccaaaacgtgaggcgcgtggtccagatcttccgaatcatgcgcatcctcaggatcctgaaactcgccaggcattcgacaggcctgcagtctctgggtttcacccttaggcggagttacaatgaattgggcttgttgatattgtttctggccatggggataatgatattttccagcctggtattttttgctgagaaggatgaagatgctaccaagttcaccagtatccctgcatcattttggtgggccaccatcaccatgaccactgttggctatggtgacatttaccctaaaacattactagggaaaattgtgggaggtctgtgctgtattgctggggttctggttattgcccttcctatcccaattattgtgaacaatttttctgagttttacaaggagcagaaacgccaagagaaagcaattaaaaggagggaggctcttgagcgggccaaaaggaacggaagcatcgtttctatgaacttaaaagatgccttcgctcgaagtatggaactgatagatgtggctgttgagaaggccggagagtccgccaacacaaaggactccgccgacgataatcacctgtcgccaagccggtggaagtgggccaggaaggctctgtcggaaacaagctccaacaagtctttcgagaataagtaccaggaggttagccaaaaagactcccacgagcagctgaacaacacgtcttcctccagcccacagcatctgagtgcccagaaactggagatgctatacaatgaaatcaccaagacacagcctcattctcacccaaacccagactgccaagaaaagcctgagaggccatctgcatatgaagaagagattgaaatggaagaagtggtgtgtccacaggagcagctggccgtggcacagaccgaggtcattgtggacatgaagagcacctccagcatcgacagcttcaccagctgtgccaccgacttcacagagacagagagatcgccgctgccgccgccctccgcctctcacttgcagatgaagttcccaaccgacctcccagggacagaagagcaccaaagagctaggggccccccgtttctaactctatccagagagaaaggacctgctgccagggatggcacgctggagtatgccccagttgacataactgtgaacctcgatgccagtggctcccagtgtgggctacatagtcctttgcagtctgacaatgccaccgacagtcctaagagctctctaaaaggcagcaacccactaaagtccagatccctcaaagtgaactttaaggaaaatagaggcagtgcaccacagaccccgcccagcacagccaggccactgccagtcaccacagctgacttttcgctcactaccccgcagcacatcagtaccatcctcttagaagaaaccccctcccagggagacccttgctgggcactgaggtttcagcgccttgtcagggaccttccaaagggctgtcccccaggtttcccaagcagaaactgttccctttctcttcaagagagaggaggagcttcactgaaatag

SEQ ID NO: 45474 - DNA, 507 bp, Homo Sapiens
atgcccaaaggctggggtgttcggtcttcaacatttttgcctttgtggctcccagtcaagatagagctgcaccaagtccaattccattcctcatcacagatgattttttctactttaagatcagaactatacaagcttcttgctttgtgtcagcatgctgttgtacccatgggcaaattcttaggtaagacaaaaacacagtcccaagggcaggtagtaattttttcagaaaaaggtaaggcaatcatttatctcagtctgcccaggacagtcccaatttacacatgtatattctcccaatctgtaggctgtcttttcattttgttgattatttcacttaattttttattatttatttattttatagagacagatctcattatgttgcccagggtgatccttgatctcctggcctcaagtgatcctccaaccttggtctcccaaagtgctgggattacagatgtgaactaccacacccagtcaacgtgcagaaggttttcagtttga

SEQ ID NO: 45475 - DNA, 1974 bp, Homo Sapiens
tactgttgcttgtatttggactcatttggggattgatgttactgcactatacttttcaacaaccaagacatcaaagcagtgtcaagttacgtgagcaaatactagacttaagcaaaagatatgttaaagctctagcagaggaaaataagaacacagtggatgtcgagaacggtgcttctatggcaggatatgcggatctgaaaagaacaattgctgtccttctggatgacattttgcaacgattggtgaagctggagaacaaagttgactatattgttgtgaatggctcagcagccaacaccaccaatggtactagtgggaatttggtgccagtaaccacaaataaaagaacgaatgtctcgggcagtatcagatagcagttgaaaatcaccttgtgctgctccatccactgtggattatatcctatggcagaaaagctttataattgctggcttaggacagagcaatactttacaataaaagctctacacattttcaaggagtatgctggattcatggaactctaattctgtacataaaaattttaaagttatttgtttgctttcaggcaagtctgttcaatgctgtactatgtccttaaagagaatttggtaatttggttgatgtggtaagcagataggtgagttttgtataaatcttttgtgtttgagatcaagctgaaatgaaaacactgaaaaacatggattcatttctataacacatttatttaagtatataacacgttttttggacaagtgaagaatgtttaatcattctgtcatttgttctcaatagatgtaactgttagactacggctatttgaaaaaatgtgcttattgtactatattttgttattccaattatgagcagagaaaggaaatataatgttgaaaataatgttttgaaatcatgacccaaagaatgtattgatttgcactatccttcagaataactgaaggttaattattgtatatttttaaaaattacacttataagagtataatcttgaaatgggtagcagccactgtccattacctatcgtaaacattggggcaatttaataacagcattaaaatagttgtaaactctaatcttatacttattgaagaataaaagatatttttatgatgagagtaacaataaagtattcatgatttttcacatacatgaatgttcatttaaaagtttaatcctttgagtgtctatgctatcaggaaagcacattatttccatatttgggttaattttgcttttattatattggtctaggaggaagggactttggagaatggaactcttgaggactttagccaggtgtatataataaaggtacttttgtgctgcattaaattgcttggaaaatgttaacattatattatataagagtatcctttatgaaattttgaatttgtataacagatgcattagatattcattttatataatggccacttaaaataagaacatttaaaatataaactatgaagattgactatcttttcaggaaaaaagctgtatatagcacagggaaccctaatcttgggtaattctagtataaaacaaattatacttttatttaaatttcccttgtagcaaatctaattgccacatggtgccctatatttcatagtatttattctctatagtaactgcttaagtgcagctagcttctagatttagactatatagaatttagatattgtattgttcgtcattataatatgctaccacatgtagcaataattacaatattttattaaaataaatatgtgaaatattgtttcatgaaagacagatttccaaatctctcttctcttctctgtactgtctacctttatgtgaagaaattaattatatgccattgccaggtagaagtttggaataattgtttagtctctcctattagatgtggacatttttgtttttgtttttgttttcagggatgaaataaaatatattatttctacctacaaa

SEQ ID NO: 45476 - DNA, 948 bp, Homo Sapiens
ggtggggacggcgccctcaccgcgagtcacttgtcagcccttgtctgaggcggaggcagccccgcgccgcgccggacccgagcatatttcattttctgtcattggactttgagccattagaaccatgagcaactacagtgtgtcactggttggcccagctccttggggtttccggctgcagggcggtaaggatttcaacatgcctctgacaatctctagtctaaaagatggcggcaaggcagcccaggcaaatgtaagaataggcgatgtggttctcagcattgatggaataaatgcacaaggaatgactcatcttgaagcccagaataagattaagggttgtacaggctctttgaatatgactctgcaaagagcatctgctgcacccaagcctgagccggttcctgttcaaaaggtcccaccaagaaaacacattgtggagcgctatacagagttttatcatgtacccactcacagtgatgccagcaagaagagactgattgaggatactgaagactggcgtccaaggactggaacaactcagtctcgctctttccgaatccttgcccagatcactgggactgaacatttgaaagaatctgaagccgataatacaaagaaggcaaaggaaaagataccccttcacgtctttagtcccaaatacacaaaattacgtgactggcaccatgaagtttcagcacgtgctcttaacgtacagtgatttatgagccttgccccccaagcagccagcacataccttttcatttactttttttttttcaacttcatagcaaaatctgtattaaatttgccttatgaaaaaatagaactttttctatacttttctaacaatttcctattgttgtgagaaaaggaagatgaacatgttttgtgctagttggtagctcacaaatgtaaaaccaaaaaaaaaaaaaaatagaaaattaa

SEQ ID NO: 45477 - DNA, 762 bp, Homo Sapiens
atgctgccacctcccttagagcgggggtaccgggtcactgctgaagacctgcacctggaaaaagaggcggcattacagcggatcaacagtgcactgcaggttgaggacaaggccatctcggattgcagaccctcacggccttcccacactttgtcctcacttgcaacaggggcttctggtgggtctcccgtttctaaagcacccactatggatgcacagcaggacagacccaagtcccaagactgcctgggcctagtggcccccctagcatctgctgcagaggtcccctctacagctcctgtgtctgggaagaagcacagaccaccaggacccctgttctcctcctcagatccccttcctgccacatgttcccactcccgggactcagcccagtacacctcgctgattcctgcccccttcacagctgaaagcatggatgccggcatgagaagaaggaggcctggcacatcggctcctgcagctgccgcagcagcccctcccccctccacattgaaccccatgttggggttactactccaatggatgcaggcccctcatatttctgggcctcagccacagctgcagcaggtgcccagaggtcagagatataaccagagatcccagacctcccggaccagatcgtgcaccaaacgaaatgccagctcgagctcctacagctctacggaaggcctcccggaactaaagcggaggagggggccagcctcatcccactgccagctgaccctcagttcctcaaacaca

SEQ ID NO: 45478 - DNA, 2283 bp, Homo Sapiens
atggaaagcgcctcggaagggcaggaggcgcaccgagaagtggcggggggcgcggcggtagggctgagccccccggctccagccccttttcccctggagccgggggacgccgcgaccgctgccgccagggtgagcggagaggaaggggcagtggcggcggcggcggccggagcggcggcggatcaggtacaactccactcggaacttctgggcaggcaccaccacgccgccgccgccgccgcgcagaccccgctggccttctcgcccgaccacgtcgcctgcgtgtgcgaggcactgcagcaggggggcaacctggaccgcctggcccggttcctgtggtccctgccccagagcgacctgctacgtggcaacgagagcctgctgaaggcgcgggcgctcgtggccttccaccagggcatctaccccgagctctacagcatcctcgagagccacagcttcgagtcggccaaccacccgctgctgcagcagctctggtacaaggcgcgctacaccgaggccgagcgagcccgcggccggccgctgggagccgtagacaagtaccggctgcgcaggaaattccccctgccccgcaccatctgggacggcgaggagacggtgtattgtttcaaggagaagtcgcgcaacgcgctcaaggagctctacaagcagaatcgctacccttcgcccgccgagaagcggcacctggccaagatcaccggcctctccctcacccaggtcagcaactggttcaagaaccgccggcagcgcgacaggaacccctccgagacccagtccaaaagtgagtcagatggcaaccccagcactgaagatgaatccagcaagggacatgaggatttatctcctcacccactctccagttcatctgatggcatcaccaacctcagcctttccagtcatatggagccagtatatatgcaacaaattggaaatgctaagatatcattaagctcttctggagttctgttgaatggaagcttggtacctgcaagtacttcacctgtcttccttaatggaaattcttttattcagggacccagtggagttatccttaatggattaaatgtgggaaatacacaggcagtggcattgaacccaccaaaaatgtcatcaaacattgtgagcaatggtatatccatgactgacatactggggtctacttcccaggacgtgaaggaattcaaagtcctccagagttctgctaactcagcaaccaccacgtcctacagccccagtgtccctgtctcattcccaggcctgatacccagcactgaggtgaaaagagaaggcattcaaacagtggcttcccaagatggagggtctgtagtgacttttactacaccagtgcaaattaaccagtatggcattgtccagatccccaattccggagcaaacagccagttccttaatgggagcattggattctctccactgcagctgccccctgtgtcagtggcagcttcacaaggtaatatctcagtaagctcaagcacttcagatggaagcacatttacaagtgagtctaccacagtccagcaaggaaaggttttcttgagctctcttgctcccagtgcagtggtatacacggttcctaatacaggccagactataggatctgtgaaacaggaaggcttggaaaggagcctggtattttctcagttgatgcctgtcaatcagaatgcacaagtaaatgcaaacctgtcttctgaaaacatctcggggagtggcctgcatccactggcctcctcattagttaatgtatctccaactcacaatttttctctcagtccctctacactactaaatcccactgagctaaaccgcgacattgccgatagccaaccaatgtctgcaccggtggcaagcaaatctactgtgacatctgtcagcaacactaactatgcaactcttcagaactgctcccttattactggtcaagacctattgtcagtccctatgactcaggctgcccttggggaaatagttcctacagctgaagatcaggtaggtcacccctccccagcagtacatcaggattttgtccaagaacatcgtttggttctgcaatcggtagctaacatgaaagagaatttcttatcaaattctgagagcaaagcaacaagtagcttaatgatgctggactctaaatccaagtatgtcttagatggcatggttgatactgtctgtgaagacctggaaacagacaaaaaagagcttgccaagctccagactgtccagctggatgaagatatgcaagacttatga

SEQ ID NO: 45479 - DNA, 537 bp, Homo Sapiens
atactgtctctagtctttttggatgatgtgcagtggatgaacaagtggcggctctattatcaagtcctaaattttggaatgattgtctcatcagcactcatgatctggaaggggttaatggtaataactggaagtgaaagtccaattgtgttgctcagtggcagcatggaacctgcatttcatagaggatatcttctctttctaacaaatcgagttgaagatcccatacgagtgggagaaatcgctgttctaaggatagaaggaagaaagattcctatagttcaccgagtcttgaagattcatgaaaagcaaaatgggcatatcaagtttttgaccaaaggagataataatgcggttgatgacagaggcctctataaacaagatcaacattggctagagaaaaaagatgtcgtggggagagccaggggatttgttccttatattggaattgggacgagcctcatgaatgactatcctaaacataagtatgaagtgctctttttgctgggtttatttgtgctggtccatcgtgagtaa

SEQ ID NO: 45480 - DNA, 645 bp, Homo Sapiens
tgcgccctggcgctgcagggctggacgctgtatccccgggagagcccgtcgcgggagtccaaggagctgggcggcctctggagcttccgcgccgacttggacagtcgacgccagggcttcgaggagcagtggtacccgcggccgctgcgggagctgcggggcaggggcgggaggcgcccggaagcccggcgcttcaacgacatctgtcaggactggtggctgcggcagtttgttggctgggtgttgtacgaacaggaggtgaccctgccggagcaatggacccagcacctgcgcacaagagtggtgctgaggattgccagtgcccactcctatgccactgtgtgggtgaatggggtcgacacgctagagcatgagggggacagcagcagtctggtccaggtggggcccctgtcctcctgcccctgcatcactatcaccatcaataatacgctcaccccctccaccctgccaccagggaccatctgctacatgatcaacacctccaagtatcccaagggttactttgtccagaacacagactttgacttcttcaactacgcgggactgcagcggtctgtgcttctgtacacgacacctaccacctacatcgatgacatcaccatcaccaccggcgtggagcatgac

SEQ ID NO: 45481 - DNA, 312 bp, Homo Sapiens
cagctggacccgcaggccctgcaggacagagactggcagcgcgccgtcatcgccatgaatgggatcgaagtaaagctctcggtcaagttcaacagcagggagttcagcttgaagaggatgccgtcccgaaaacagacaggggtcttcggagtcaagattgctgtggtcaccaagagagagaggtccaaggtgccctacatcatgcgccagtgcgtggaggagatcgagcgccgaggcatggaggaggtgggcatctaccgcgtgtccggtgtggccacggacatccaggcactgaaggcaggcttcaacgtc

SEQ ID NO: 45482 - DNA, 327 bp, Homo Sapiens
atggaacctgacgactttgattctgaagacaaagagatattaagctgggatattaatgatgtgaaactgccacagaacgtgaaaaaaaccgactggttccaggagtggccagattcctatgccaaacacatctacagctcggaggacaagaatgcgcagcggcacctgagcagctgggccatgcgcaataccaacaaccacaactcccgcatcctcaagaagtcctgcctgggtgtggtggtgtgcggccgcgactgtctcgcagaggaggggcgcaagatctacctgagacctgccatctgtgacaaggcccggcagaagcagcag

SEQ ID NO: 45483 - DNA, 1281 bp, Homo Sapiens
cgccctagtccagcagtggccatgagggagatcgtgctatggcagaccgggcagtgcgggaaccagatcggtgccaagttctgggaggtgatctctgatgaacatgccatcgactctgctggcacctgccacggggacagggacctgcagctggagcgcatcaacatgtactacaacgaggccagcggtggcaggtacgtgccccgccctgtgcttgtggatgtggagccgggcaccatcggctctgtgtgctcagcgccattcgggaggatcttcaggccggacgacttcatcttcggtcagtgtggggccgggaacaactgggccaaggggcactacacagaaggtgcagagctgaaggagacgctgatggatgttgtgaaagaatctgagagctgtgactgcctgcagggtttccagcttacccactccctgggtaggggtaccgggtctctgatggatactcttctcatcagtaagatctgggagtacccagacaggatcataaacacattcagtgttctgcctttgcccaaggtgtcagacaccgtggtggagccctacaatgccaccctctcagtccaccagctcatggaaaatgcagatgagaccttttgcattgatagtgaagctctgctgtgtgacatctgttccagaaccctaaaactgcccacacccacctacggtgacctgaatcacctggtttctgctaccacaagtggggtcaccacgtgcctgttcttcccaggccagctgaatactgatctgcaaaggctggccacgaacgtgatcctagttgcctggctacacttcttcatgcttcgctttgctccactgtccagccggggcagccagccatactcggccctgaccatggctgagttcacccagcagatgtttgatgctaagaatatggttgcctgtgagccccgtcatggccactacctgacagtggctgccgttttcagaggttgcatgcccatgagggaggtggatgagcaaatgttcaatattcaaaataagaacagcaggtactctgctgattggctccctcacaatgtgaaaatggctatctgtgccatcccacccaaggggctaaaaatggccacctgcattggcaacaacacggccatccgggagctgttcaaggtgttccaggccttcctgcactggtacacgggcgagggcatggacgtgatggagttcaccgaggcggagagcaacatgaacgacctgctgtctgagtatcagcagtaccaggacgccacagccgaggaggag

SEQ ID NO: 45484 - DNA, 2265 bp, Homo Sapiens
atcgagcgcagggcgatgggtgggcgccgggcgccgggcgccaggcagtgatgggccttcccgcgctgcggccccactgaggaggaggctcggggacagcaggagcacgggctgcccgcgcggtgcggaccatggcgttcctggccgggccgcgcctgctggactgggccagctcgccgccgcacctgcagttcaataagttcgtgctgaccgggtaccggcccgccagcagcggctcgggctgcctgcgcagcctcttctacctgcacaacgaactgggcaacatctacacgcacggggccctgcccatcatccactgcaccctggcctgcaggccctggctgcgcccggctgccctggtgggctacactgtgttgtcgggtgtggccggctggcgtgctctcaccgccccctccaccagtgctcggctccgggcatttggatggcaggctgctgcccgcctactggtatttggggcccggggagtgggtctgggttcaggggctccaggctccctgccctgctacctgcgcatggacgcactggcgctgcttgggggactggtaaatgtagcccgtctgcccgagcgctggggacctggccgctttgactactggggcaactcccaccagatcatgcacctgctgagcgtgggctccatcctgcagctgcacgccggcgtcgtgcccgacctgctctgggctgcccaccacgcctgtccccgggactgagctgccatgccagcctgcccacagcagcctcctagagttagcaacaccaggtgttcctcccaactcgtctgcaaggggctggctccttggatgcttccagctcatgagatgtctcagcaggagccctgttcacccgttcttccctgtggactgacctcttccacccacgccgtggcgctccaacttccttccctgccttttccctccaagctcctattttactgtgtcagctggaaggaaacctttccctcttgggacctctttaccctctgtgacctgtggggttagaccagagagggactctggggtcacgtcttgctctgagagttcaagtcctgccaggccgccagcccagagcctcctcaccctatcctgttcctcccaccaggcctgtggccagtcttcctgatctccatctttctgccctgcataccagccctcccagcagccacaagcttgcccgccctggctccctctgcccagagactatggagtaaggcattcaggacaaaaggaccaagggggcgtggacccgtcttgtaccagctggccacaggcacaagggctgcagctgcttcttccaggaaactgacacagggagctcagcggcctcagatcctgggacccctgggccgtgcctgccctccaccttgagtgccatactcccaacagctccaggtacccaccgggggatgtgcctgctcaggaaacctctttgctccacacagcatggggcttcagctgctggcccaaggccaggagcgctgggttctgcagcagggctcagcctcaggggcgttaagaccctggatgacatcaataaagggacaggaagggccatgttgccacatgagcaagcttgggtgctcccaaggttcaaatactttttattagacacggccaggcagagaagaccatgggagttcccgaggggccccagctttcaagggcgacgggagagacacaggataaaaggttaaaagtgcagaggcagagtctggggctcaggttgggtctagggtgtcctcaaacaggctgaggaggttccgaggctcaaaggaggggaaggagccccgaggaggctctgagttgatgtcacttaggtccagggcatccctgggaggagagagtagtgacactcaggatccaaaagctagccctgcccaccccagcccctggacctgcttacctgggtgtgcacctgctccggggggtggaggtgctccccacagtccgggccaggacagcctcaggggagagtgaaggcctgcaggagggcaggcgagacaaggagggtgtccagggctagggagtgccggatgaaaccagctctgtccctgtgcaggctccaggctcccgcctgacaaacaggcagggagccacagtcagggacaataaaaacttggtgcactctgaaagcagcacttggacagccttcaaagtccttccatctggctgcactccaaggccccctctgtccttttcagaacacatggacttggaggcagatttgaaataaacttttagtaaatgt

SEQ ID NO: 45485 - DNA, 501 bp, Homo Sapiens
agtttcctgctacctgagccagcagaggggcacctgcagcagcagccagacaccaaggctgtgctgaacaggaaggtcctccgcactggtaccctttatatcgctgagagccacctgtcttggttagatagctctggattaggattctcactggaataccccaccattagtttacttgcattatccagggaccaaagtgactgtctaggagaacatttgtatgctacggtgaatgacaaatttgaagaatccaaagaatctgttgctgatgaagaagaggaagacagtgatgatgttgaacttattactgaatttatatttgtacctagtgataaatcagcactgggggcaatgttcactgcaatgtgtgaatgccaggccttgcatccagatcctgaggatgaggatgaggatgactacgatggagaagaatattggaagcacatgaacgaggaaaaggggacatccctaaatcttacacctatgaaggattatcccatt

SEQ ID NO: 45486 - DNA, 2256 bp, Homo Sapiens
atgtctgctgaaaataatcagttatcaggagcatcacctcctcaccctcccacaactccccaatattccacacagaacttgccttcagagaaagaggatactgaagtagaactagatgaggaaagtctacaggatgaatctccattttctccagagggagagtctctggaggacaaagagtatctggaggaggaagaggatctggaagaggaagagtatctggggaaagaagaatacttgaaggaggaagagtatctggggaaggaagagcatctggaggaggaagagtatctggagaaggcagggtatctggaggaggaagagtatattgaagaggaagagtatctggggaaggaagggtatctggaggaggaagagtacctggggaaggaagagcatctggaggaggaagagtatctggggaaggaagggtatctggagaaggaagattatattgaggaggtagattatctggggaagaaagcgtatctggaggaggaggagtatctggggaagaaatcatatctagaagaggaaaaggctctggagaaggaagagaatctggaggaggaagaagctctggagaaggaagagaatctggatggaaaagaaaatctgtataaaaagtatctgaaagaacccaaggcaagttattcatcacaaaccatgcttcttcgtgatgcaaggagtccagacgctggcccctctcaggtgaccaccttcttgactgtcccgttgactttcgctaccccttctcctgtctctgaatctgccacagagtcttctgagttgcttctgacattgtacaggaggagccaggccagtcagacagactggtgctacgacagaactgccgtaaaatctttaaaatcgaaatcagaaacagagcaagaaaccaccacgaagctggctccggaagagcatgttaacactaaagtacagcaaaaaaaggaagaaaatgtcctggagtttgcttctaaagagaacttttgggatggtataacagatgagtccattgacaagctggaagtggaagatttagatgaaaactttttgaacagctcctatcagacagtatttaaaacaataatcaaagaaatggctgctcacaatgaactggaagaggattttgacattcccctaactaagctactggaaagtgaaaacagatggaaactggtaattatgctgaagaaaaattatgaaaagttcaaggaaacaatcttacggattaagaggagacgtgaagctcaaaagttaacagagatgaccagtttcacatttcatttaatgagcaaaccaacacctgagaagcctgagacagaagaaatccaaaagcctcaacgtgttgttcatcataggaagaaattagaacgagataaggaatggatacagaagaagacagtggtgcatcaaggtgatggaaaattaattctctaccccaacaagaatgtctatcaaattctctttcctgatgggacaggccagatacattatccatcaggaaacctggctatgctcatcttatatgcgaaaatgaaaaagttcacatacatcattctggaagacagtctagaagggaggatccgggcccttatcaacaactcaggcaatgctaccttctatgatgaaaatagtgatatctggttgaacctgagctccaacctgggctactacttccccaaagacaaacgccagaaggcctggaactggtggaatctgaacatccatgtccacgcaccccctgtccagcccatctccttgaaaatcaatgagtacatccaggtacaaataaggagccaggataagatcatcttctgcttcacctatgaacagaagcagatttgtttaaacctgggcaccaggtacaagtttgtgatcccagaggtgctgagcgaaatgaagaagaaaaccatcctggaggcagaacccggcccaacagcccagaagatccgggtccttctggggaaaatgaataggctcctgaattacgcgaccacccctgatctggaaaacttcatagaggccgtcagtatatcactgatggacaacaagtacctgaagaagatgctctctaaactctggttttaaggcggggcttatctggcatccaccaaatgccttaggaagttggagaccttgggagctccagggaaaaaaaacccaaagacctgttgaccttttatgagagttggtttgtaatttgggacctgtcgtggctccttgatttgaagtaaacatttttggcagaagggc

SEQ ID NO: 45487 - DNA, 798 bp, Homo Sapiens
gaagatgaggtggcccgcagtgccaagaagatggacaagatggtgcaggagaagaacacggccggagcactgggtttgttaacagagcttcagaatgttctggaattactgcggtccacaggaactggaatgttacttaatgttagtctcaagcagagtgcagatgaagaagttacatctttagcaaagtctctcgtcaaatcctggaaaaagttaccagataagccatcaagtgagaaagaccctaaagaaaagcaaatagaacctgcaatgacatcgcagaatagcaaaagaaacacttctgattctgtgcggatgaagtacagggagatgcttcctgcagcccttcgaacaggagatgactgcattgaaatgggaactgatgaggaagaattaggatctcgaactgaggaagcaatagatccagaaagagggaatacaggcatgaagtacaaaaatagagtccaaagtaagatatcaaatcttacagatgcaaagaatccagatttaaggaaaaatgcaccgtgtgggaatattcctcctgacttacttgctagaatgacagcagaagaaatggctagtgatgagctcaaagagatgcacaaaaacttgacgaaagaagccatcagagagcatcagatggccaagacaggtggaacccagcctgattcgctcacatgtgccaaatgtaaaaagaagaattgcacttccacacaggtacaagcctgcagtgctggtgaaccaatgacaacgtttgttgactgtaatgaatgtggaaatcaacagaagttctgttga

SEQ ID NO: 45488 - DNA, 936 bp, Homo Sapiens
atgaagaacaaatcaatggaaatagagttcattctcctaggattgacagatgacccacagttgcaaattgtgattttcctgtttctatttctcaactacaccttgagcctgatggggaacttaatcatcatcatcctcaccctgctggatccccggctcaagacgccaatgtatttctttctccgtaatttctcctttttggaagtaatattcacaacagtgtgtattcctagattcttgataaccattgtgactagagacaaaaccatttcttataataattgtgcaactcaattattttttatccttttaccgggagttactgagttttacctcctggctgccatgtcctatgaccgctacgttgccatctgcaaaccactgcattatccaatcattatgagcagcaaagtctgctaccaacttgtacttagctcttgggtaactggattcttaatcatatttcccccattggtcatgggactcaagctggatttttgtgcttccaaaactattgaccactttatgtgtgaaacttctcctattctgcagatctcctgcacagatacccatgtcctagaattgatgtcttttaccttagctgtggtgacacttgtggtcacactggtattagtgattctctcttacacttgcattattaagaccattctgaaattctcttctgcacagcaaaggaacaaagcattttccacctgtacttcccacatgattgttgtctccatgacatacggtagctgtatctttatgtatattaaaccatctgcaaaagaaagagtgactgtatccaaaggtgtagctttgctctatacctcaattgcccctttactaaatcccttcatttatactctcagaaaccagcaggtgaaagaagtcttctgggatgtattacaaaagaatttgtgtttttctaaaaga

SEQ ID NO: 45489 - DNA, 657 bp, Homo Sapiens
atgtggttcattaaagttgttaagactaaggcctactttaagagacaccaagtgaaatttagaagacaatgggacggtaaaattgattactatgctcagaaacgcttggtgatacaggataaaaataaaaacacccaaatacaggatgatagtgtaacagatatcatttgtcatattgcttatgcctgtatagaaggggatatgatagtctgcatagcatatgcacatgaactgccaaaatatggcgtgaaggttggcttgacaaattacgctgcagcgtattgtactggcctgctgctggaccacaggcttctcaataggtttggtatggacaagatctatgaaggccaagtggaggtgactggagatgaaggccttgccagaactactactggcaataaagtttctggcgccctgggagctgtgaatggaggtttgtctatcccttacagtaccaaacgattcggttatgattctgaaagcaaggaatttaatgcagaagtacactggaagcacattatcagccagaatgtcgcagattacatgctactagaggaagatgaagatgcttacaagaaacaatcctctcaatatataaagaacggcataactctagacatggaggagatgtataagaaagctcatgctgctatatga

SEQ ID NO: 45490 - DNA, 1074 bp, Homo Sapiens
gtgagatgtactactgttccaagtgtaagacccactttagcaacaaagaagctggatctctggaggcttccacccttcctgattattcaccttaagcgatttcaatttgtaaatgatcagtggataaaatcacagaaaattgtcagatttcttcgggaaagttttgatccgagtgcttttttggtaccacgagacccggccctctgccagcataaaccactcacaccccagggggatgagctctccaagcccaggattctggcaagagaggtgaagaaagtggatgcgcagagttcggctggaaaagaggacatgctcctaagcaaaagcccatcctcactcagcgctaacatcagcagcagcccaaaaggttctccttcttcatcaagaaaaagtggaaccagctgtccctccagcaaaaacagcagccctaatagcagcccacggactttggggaggagcaaagggaggctccggctgccccagattggcagcaaaaataagccgtcaagtagtaagaagaacttggatgccagcaaagagaatggggctgggcagatctgtgagctggctgacgccttgagccgagggcatatgcgggggggcagccaaccagagctggtcactcctcaggaccatgaggtagctttggccaatggattcctttatgagcatgaagcatgtggcaatggctgtggcgatggctacagcaatggtcagcttggaaaccacagtgaagaagacagcactgatgaccaaagagaagacactcatattaagcctatttataatctatatgcaatttcatgccattcaggaattctgagtgggggccattacatcacttatgccaaaaacccaaactgcaagtggtactgttataatgacagcagctgtgaggaacttcaccctgatgaaattgacaccgactctgcctacattcttttctatgagcagcaggggatagactacgcacaatttctgccaaagattgatggcaaaaagatggcagacacaagcagtacggatgaagactctgagtctgattacgaaaagtactctatgttacagtaa

SEQ ID NO: 45491 - DNA, 1116 bp, Homo Sapiens
ggtttggtattttcctggggtgatggtgactttggaaaattgggccggggcggaagtgaaggctgcaacattccccagaacattgagagactaaatggacagggggtgtgccagattgagtgtggagctcagttcctactggcgctcaccaagtctggagtggtgtggacatggggaaagggggattacttcaggttgggccaccgctctgacgtgcacgttcggaagccgcaggtggtggaagggctgagagggaagaagatcgtgcatgtggctgtcggggcccagcattgcctggcggtcatggactcagggcaggtgtatgcttggggtgacaatgaccacggccagcagggcaatggcacgaccacggttaacaggaagcccatgctcgtgcaaggcttagaaggccagaagatcatgtgtgtggcttgcgggtcgtcccacagtgtggcgtggacaactatggatgtggccacgccctctgtccacgagcccgtcctcttccagactgcaagggaccctttaggtgcttcctatttaggtggccgcgtttattctcacaaattcagcccgatgactcagtccttccaggaatggtggtacgtgaatctcaacagcctaatggaccaggctttgaccccacagtgtggcagtggggaagacctatatatcctcacaggcacagtgccctcagactacaaagttaaagacaaaagttttacaggtagtgctcttgctgctttggtgaaaggtcttccagaagctttgcaaaggcagtttgaatatgaagatcctattgtgaggggtggcaaacagctgctccacagcccattctttaaggtactggtagctcttgcttgtgacctggagctggacactctgccttgctgtgccgagacgcacaagtgggcctggttccggaggcgaccagatgattggaatctgtctgctggtggcagtggaacaatttatggttggggacatgatcataggggccagctcgggggcattgaaggtgcaaaagtcaaaattccctctccctgtgaagccctcacaactctcagacccatgcagttaatcggaggggaacagaccctctgctgtgacagctga

SEQ ID NO: 45492 - DNA, 267 bp, Homo Sapiens
atgtcagggccaggattggaggtaggtgcattccttgctctctcccattgctactttcaaattatttcaccccttccctcctgcaaaaatcaccgttcttttgatgtttatgtcatctggatataccaccctttcttagaccttctcactatcttctgccaacatcctagtcaaatctcttcatttactgaagtcttccattcctggcaaaaggtcttccattctaacccagttccttcctttatccttggtgatttccatacctga

SEQ ID NO: 45493 - DNA, 972 bp, Homo Sapiens
ctgatgtctgccagactataaaatggggggtcggactctagtcacccatagcacctgcccgcctgcctgtcctccagcaggaagtagcaagtccccagacttttgcaggcgggaaccatgtctcaggctgcaaaggcctcggcctcggccacagtggcggtgaacccagggcctgacaccaaggggaagggggccccacctgcaggaacatcccctagtcccggcactaccctggccccaacaaccgtgcctattaccagcgccaaggcggcggaactgcctcctgggaactacaggctggtggtcttcgaactggaaaacttccagggccgtcgagcagaattctcgggggagtgctcaaatctggcagaccgtggcttcgaccgtgtgcgcagcatcattgtctccgcgggaccctgggtcgcctttgagcagtccaacttccgcggggagatgttcatcctggagaagggcgagtaccctcgctggaacacatggtcgagcagctaccgcagtgatcggctcatgtccttccggcccatcaaaatggatgcccaggagcacaaaatctccctgtttgaaggggccaacttcaagggcaacaccatagagatccagggggacgacgcacccagtctctgggtctacggcttcagtgaccgcgtgggcagcgtgaaggtctccagtggaacatgggttggctatcagtatcctggctaccgcgggtaccagtacctcctagagcctggtgacttccggcactggaatgagtggggagccttccagccacagatgcagtccctgcgtcgcctgcgtgacaagcagtggcacctcgaggggtccttccctgtcctggccacagagccccccaagtgagtccacacctcactctgctaccttgccccaacccttcttcatgttcaattatttcccccatttttcccaggcaaataaaattccctaaagccaaaa

SEQ ID NO: 45494 - DNA, 813 bp, Homo Sapiens
atggggaatcttggtctaattgttctcatctggaaagaccctcaccttcatatcccaatgtatttattccgtgggagtttggcctttgtggatgcttggttatcatccacagtgactccaaagatgctgatcaacttcttagctaagagtaagatgatatctctctctgaatgcatggtacaatttttttcctttgtaatcagtgtaaccacagaatgttttatctcggcatcaatggcatatgatcgctatgtagccatttgcaaagctttactttatccagtcattatgaccaacggactatgcatccagctattagtcttgtcatttataggtggccttcttcatgctttaatccatgaaatttttttattcagattaaccttctgtaattccaacataatacaacacttttactgtgacattatcccattgttaaagatttcctgtactgattcttttattaactttctaatggtttttattttcgcagattcaattcaagtttttaccattggaactattcttatatcttatacacttgtcctccttataatcttaaaaaataagtctgtcaaagggatacaaaaagctgtctccacctgtggagctcatctcttatctgtatctttatactatgggccccttgtcttcatgtatgtgggctctgcatccccgcaagcagatgaccaagatatgatggagtctctattttacactgtcatcgttcctttattaaattccatgatctacagcctgagaaacaagcaagtaatagcttcattcacaaaaatgttcaaaagaaatgtttag

SEQ ID NO: 45495 - DNA, 423 bp, Homo Sapiens
caggtatacggcttcaggagtctcgaatcccacgggcgtacggcttcaggagtctcgaatcccacgggcgtacggcttcaggagtctcgaatcccacgggcgtacggcttcaggagtctcgaatcccacgggcgtacggcttcaggagtctcgaatcccacgggcgtacggcttcaggagtctcgaatcccacgggcgtacggcttcaggagtctcgaatcccacgggcgtacggcttcaggagtctcgaatcccacgggcgtacggcttcaggagtctcgaatcccacgggcgtacggcttcaggagtctcgaatcccacgggcgtacggcttcaggagtctcgaatcccacgggcgtacggcttcaggagtctcgaatcccacgggtgtacggcttcaggagtcttgaggggctcctttga

SEQ ID NO: 45496 - DNA, 402 bp, Homo Sapiens
ggccacatttgtaccaaaatcacgaagaaggccacccaggtcatcatagaaaagtactgcacgcgcctaggcaacgacttctacacgaacaaatgtgtgtgcgagatcgccattatcctcagcaagaagctccgcaacaagatagtaggctatgtcaagcatctgatgaagcggattcggaagggcccagtgagaggtatctccatcaagctgcaggaggaggagagagaaaacagagacaattatgttcccgagatctcagtcctggatcaggagaccgttgaagtagatcctgacactaaggaaatgctggagcttttggactttgtcagtctgtccaacctgcaggtcactcgacctacagttgagataaatttcaaaatgcctcggggagctctttga

SEQ ID NO: 45497 - DNA, 1842 bp, Homo Sapiens
ctttcccaacagaaaaacaagagctggatctcagaggatgacttctaccggccttcccgggagcaacccctgaagagtgcttcagaccacccaatagcttcttacagggggactccagagtcaaggcctggtctccacaggcatttttctcaagaaccaagaaaaaactgctccctgggggcgttagaccaagcgtgtgtaccttccccaggaagaaggcaagcccaggcagccccatcccaggggcataagagtttccaggtggtacaccggaggcagatgggactgtccaacccattccagggtctcatgaagctgggcaccgtggagcggcagggggcaatgggcatctggaaggagctcttctgcgagctctccccactggagttccgcctctacctgagcaacgaggagcacacctgtgtggagaactgctccctgcttcgctgtgagtctgtggggccagcccacagtgacgggcgctttgagctggtcttctctggcaagaagctggccctgcgcgcctcctcccaggacgaagctgaggactggctggacctggtgcgggaggccctgcagaaggtccggcctcagcaggaggatgagtgggtgaacgtgcagtactcagaccagcctgaggaaccccccgaggcgccccagggctgcctctctccctcagacctgctctcggagcccgcggccctccagggcacacagtctgactggtcgtccgcccaggttccagagctagatgccatcaaggagtccctgctgtacttgtacatggacaggacctggatgccctatatattttctctgcccttggaggctctgaaatgtttccgcatcaggaacaatgagaagatgctgagtgacagccacggcgtggagaccatccgggacatcctgccagacaccagccttgggggcccatccttcttcaaaatcatcacggccaaggctgtcctgaagctgcaggccggaaacgccgaggaagccgccctgtggagggatctggtccgcaaagtcctggcatcctacttggagacagccgaggaggcggtgaccctgggcgggagcctggatgaaaactgtcaggaggtgctgaaatttgccacccgggagaatggcttcctgctgcagtacctggtggccatccccatggagaaaggccttgactcccaaggctgcttctgcgcaggctgctcccggcagatcggcttctcctttgtacgacccaagctctgtgccttctctggcctctattactgtgacatctgccaccaagacgatgcctcagtgattccggccaggatcatccacaactgggacctcaccaagcgcccgatctgcaggcaggccctgaagtttctgacgcagatccgggcccagcccctcatcaacctgcagatggtgaacgcgtctctgtacgagcatgtggagcggatgcacctcattgggaggagccgggagcagctgaagctcctgggggattacctgggcctgtgccggagtggcgccctgaaggagctcagcaagaggctcaaccaccggaattatctcttggagtctccgcataggttccgtgttgctgacctccggcagatcgcagatgaggtatatgaaggattcctcaaggccctgattgaatttgcctcccagcatgtctaccactgcgacctgtgcacccagcgcagcttcatctgccagatctgccagcaccacgacatcatcttcccctctgagtttgacaccacaatcaggtgtgccaagtgcaagaccgtcttccaccagagctgccaggctgtggtgaagaagggctgcccccgctgtgctcgctga

SEQ ID NO: 45498 - DNA, 1176 bp, Homo Sapiens
atgggctacccggaggtggagcgcagggaactcctgcctgcagcagcgccgcgggagcgagggagccagggctgcgggtgtggcggggcccctgcccgggcgggcgaagggaacagctgcctgctcttcctgggtttctttggcctctcgctggccctccacctgctgacgttgtgctgctacctagagttgcgctcggagttgcggcgggaacgtggagccgagtcccgccttggcggctcgggcacccctggcacctctggcaccctaagcagcctcggtggcctcgaccctgacagccccatcaccagtcaccttgggcagccgtcacctaagcagcagccattggaaccgggagaagccgcactccactctgactcccaggacgggcaccagatggccctattgaatttcttcttccctgatgaaaagccatactctgaagaagaaagtaggcgtgttcgccgcaataaaagaagcaaaagcaatgaaggagcagatggcccagttaaaaacaagaaaaagggaaagaaagcaggacctcctggacccaatggccctccaggacccccaggacctccaggaccccagggacccccaggaattccagggattcctggaattccaggaacaactgttatgggaccacctggtcctccaggtcctcctggtcctcaaggaccccctggcctccagggaccttctggtgctgctgataaagctggaactcgagaaaaccagccagctgtggtgcatctacagggccaagggtcagcaattcaagtcaagaatgatctttcaggtggagtgctcaatgactggtctcgcatcactatgaaccccaaggtgtttaagctacatccccgcagcggggagctggaggtactggtggacggcacctacttcatctatagtcaggtagaagtatactacatcaacttcactgactttgccagctatgaggtggtggtggatgagaagcccttcctgcagtgcacacgcagcatcgagacgggcaagaccaactacaacacttgctataccgcaggcgtctgcctcctcaaggcccggcagaagatcgccgtcaagatggtgcacgctgacatctccatcaacatgagcaagcacaccacgttctttggggccatcaggctgggtgaagcccctgcatcctag

SEQ ID NO: 45499 - DNA, 2610 bp, Homo Sapiens
gttcgtggatgtccgttgtgtcccgagactaggacgtggctccagggtgttccagaccctggaagggcctctcttcaaagacccgtgtttccagaacggtggcagcgggctcacgtggcttggggagagcaggcactgggggagctgggtgaggacaggcgagcccaggctcgactggtggccccaaggggcgcccgtgcccgctgtgatgatagcagcgcccaggtctctctctagcccccagagtgcggccactaaggttttgggtcggcctgggtggaatggaggcaggatggggccccccaaactcctgtcactgctgcagggactgcccagagcagctgcaagtggggctggcagggatgaggaggaggtggcctgggcttgggggaccatgtacatcctgagttggaacccaggggagcagcaggtttggggccatgatgaggagagacctaggggttgcccgacggagagaaaagggacaggaagaggcaggagcttcagagactactcaatgccactctagcctgagggactggaacttagtccgggggcattagggagccatgggaggatcaggagcaggggcaagtcaggatcaaactcccatgagaagccagccggccaaatccaggctgatgtggcaagaatggcagctgcccagggctgtgtgggagccagacacggcccctcgcttcccggaagaggccacgtgaagccgaagcaggatgcaggagggcgtcccaggcagagacctgggcatgggagcggtccgcagctcagagtggctggagcatcatgtgcgatttggggtgctgaggagtgctcgggccagctggtccttttcccatccctccccatgaaggagggaggctggtagctttgccagcagctgcgccgcggcaggggtggcccatggacctgcccgagggcccggtgggtggccccactgcggaaatgtacctccgggagcggcctgaggaggcaaggctgggaatgccggtcagcttggaggagcaaatactcaactccacgttcgaagcttgtgaccctcagaggacaggtggcactgtggctgtggcccaggtgctggcctacctggaggctgtgacaggccagggcccccaggatgcacgcctccaaacattggccaacagcctggaccccaatggggagggccctaaggccactgtggacttggacactttcctggttgtcatgcgtgactggattgctgcctgtcaactacatgggggattagagctggaagaggagaccgccttccagggagccctgacctcccggcaactgccatctggatgcccagaagctgaggagccagccaacctggagagcttcggaggcgaagaccccagacccgagctacaagccacagctgacctgctgagcagcctggaggacctggagctcagcaaccgacgtctggttggggagaatgccaaattgcagcggagcatggagacagctgaggaggggtcagcacgccttggggaggagatcttggctctgcgtaagcagcttcacagcacccagcaggccctgcagtttgccaaggccatggatgaggagctggaggacctgaagactctggccaggagcctggaggaacagaatcgcagccttctggcccaagcccggcaggcggaaaaggagcagcagcatctggtggctgagatggagactctgcaggaggagaacgggaagctgcttgccgagcgggatggagtgaaaaagagaagtcaggagctggccatggagaaggacactttgaagcggcagctctttgagtgtgaacacctcatttgccaaagagacaccatcctctctgagcgcactcgcgatgtggagagcctggcccagaccctggaagaatacagagtgacgacgcaggaactgaggctggagatttcacgcctggaggagcagctgagtcagacctatgaggggcccgatgagctacctgaaggggcccagctgagaagagtgggctggaccgagctgctacccccatcgctgggcttggagatcgaggccattcgacagaaacaggaagtggcaactgctgatctctccaaccctctgtgtggggtgtggcagtgggaggaagtcatccatgagaccagtgaggaaactgagtttccatctgaagccccagctgggggacagagaaacttccagggagagccagcgcaccctgaagaaggaaggaaggagccatccatgtggttgaccagaagagaggaagaggaggatgcagagagccaggtcacggctgatctccctgtccctctaggagcccctcgccctggagacatcccagaaaaccctccagagagacctgcgcggcgggaactccagcaagccctggtgcctgtgatgaaaaagctggtcccagtcaggaggagggcctggggccagctctgcctgcccccacagcggctcagagtcactcgacatccactgatcccagctcctgtcctgggcctgctgctgctgctgctgctctctgtcctgctgcttggcccgtccccacctcccacctggccccacctccagctctgctacctccagccccctccagtgtga

SEQ ID NO: 45500 - DNA, 1062 bp, Homo Sapiens
atggttggagacacattaaaacttctgtctccactgatgacaagatacttctttctgcttttttattctactgattcttcagacctcaatgaaaatcaacatcccctagattttgatgaaatggcttttggaaaagtaaaatcagggattagcttcctcattcagactggagttgggatcctgggaaattcctttctcctttgtttttataacttaattttgttcactggacacaagctgagacccacggacttgattctcagccaactggccttggctaactccatggtccttttctttaaagggatacctcagacaatggcagcttttggattgaaatatttgctgaatgacactggatgtaagtttgtcttttattatcacagggtgggcacaagagtttccctcagcaccatctgccttctcaatggattccaagccattaagctcaaccccagtatatgcaggtggatggagatcaagattagatccccaaggtttattgacttctgttgtctcctctgctgggccccccatgtcttgatgaatgcatctgttcttctattagtgaatggcccactgaatagcaaaaacagtagtgcaaaaaacaattatggatactgttcttacaaagcatcaaagagatttagctcattacatgcagtcttatatttttcccctgattttatgagtttgggcttcatggtctgggccagtggctccatggtcttcttcctctacagacacaagcagcaagtccaacacaatcacagcaacagactctcctgcagaccttcccaggaagccagagccacacacaccatcatggtcctggtgagctccttttttgttttctattcagtccatagttttctgacaatttggacaactgtagttgcaaacccaggccagtggatagtgaccaactctgtgttggtcgcctcatgtttcccagcacgcagcccttttgtcctcatcatgagtgatactcatatctctcagttctgttttgcctgcaggacaaggaaaacactctttcctaatctggttgtcatgccatga

SEQ ID NO: 45501 - DNA, 900 bp, Homo Sapiens
atgataacttttctatacatttttttttcaattctaataatggttttatttgttctcggaaactttgccaatggcttcatagcactggtaaatttcattgactgggtgaagagaaaaaagatctcctcagctgaccaaattctcactgctctggcggtctccagaattggtttgctctgggcattattattaaattggtatttaactgtgttgaatccagctttttatagtgtagaattaagaattacttcttataatgcctgggttgtaaccaaccatttcagcatgtggcttgctgctaacctcagcatattttatttgctcaagattgccaatttctccaaccttctttttcttcatttaaagaggagagttaggagtgtcattctggtgatactgttggggactttgatatttttggtttgtcatcttcttgtggcaaacatggatgagagtatgtgggcagaagaatatgaaggaaacatgactgggaagatgaaattgaggaatacagtacatctttcatatttgactgtaactaccctatggagcttcataccctttactctgtccctgatatcttttctgatgctaatctgttctctgtgtaaacatctcaagaagatgcagctccatggagaaggatcgcaagatctcagcaccaaggtccacataaaagctttgcaaactctgatctccttcctcttgttatgtgccattttctttctattcctaatcgtttcggtttggagtcctaggaggctgcggaatgacccggttgtcatggttagcaaggctgttggaaacatatatcttgcattcgactcattcatcctaatttggagaaccaagaagctaaaacacacctttcttttgattttgtgtcagattaggtgctga

SEQ ID NO: 45502 - DNA, 1526 bp, Homo Sapiens
cagaacccagcagccgtgtaccccgcagagccgccagccccgggcatgttccgagacttcggggaacccggcccgagctccgggaacggcggcgggtacggcggccccgcgcagcccccggccgcagcgcaggcagcccagcagaagttccacctggtgccaagcatcaacaccatgagtggcagtcaggagctgcagtggatggtacagcctcatttcctggggcccagcagttaccccaggcctctgacctaccctcagtacagccccccacaaccccggccaggagtcatccgggccctggggccgcctccaggggtacgtcgaaggccttgtgaacagatcagcccggaggaagaggagcgccgccgagtaaggcgcgagcggaacaagctggctgcggccaagtgcaggaaccggaggaaggaactgaccgacttcctgcaggcggagactgacaaactggaagatgagaaatctgggctgcagcgagagattgaggagctgcagaagcagaaggagcgcctagagctggtgctggaagcccaccgacccatctgcaaaatcccggaaggagccaaggagggggacacaggcagtaccagtggcaccagcagcccaccagccccctgccgccctgtaccttgtatctccctttccccagggcctgtgcttgaacctgaggcactgcacacccccacactcatgaccacaccctccctaactcctttcacccccagcctggtcttcacctaccccagcactcctgagccttgtgcctcagctcatcgcaagagtagcagcagcagcggagacccatcctctgacccccttggctctccaaccctcctcgctttgtgaggcgcctgagccctactccctgcagatgccaccctagccaatgtctcctccccttcccccaccggtccagctggcctggacagtatcccacatccaactccagcaacttcttctccatccctctaatgagactgaccatattgtgcttcacagtagagccagcttggggccaccaaagctgcccactgtttctcttgagctggcctctctagcacaatttgcactaaatcagagacaaaatatttcccatttgtgccagaggaatcctggcagcccagagactttgtagatccttagaggtcctctggagccctaaccccttccagatcactgccacactctccatcaccctcttcctgtgatccacccaaccctatctcctgacagaaggtgccactttacccacctagaacactaactcaccagccccactgccagcagcagcaggtgattggaccaggccattctgccgccccctcctgaaccgcacagctcaggaggcgcccttggcttctgtgatgagctgatctgcggatctcagctctgagaagccttcagctccagggaatccaagcctccacagcgagggcagctgctatttattttcctaaagagagtatttttatacaaacctaccaaaatggaataaaaggcttgaagctgtg

SEQ ID NO: 45503 - DNA, 963 bp, Homo Sapiens
atggccaatatcacctggatggccaaccacactggatggtcggatttcatcctgttgggactcttcagacaatccaaacatccagcactactttgtgtggtcatttttgtggttttcctgatggcgttgtctggaaatgctgtcctgatccttctgatacactgtgacgcccacctccacacccccatgtactttttcatcagtcaattgtctctcatggacatggcgtacatttctgtcactgtgcccaagatgctcctggaccaggtcatgggtgtgaataagatctcagcccctgagtgtgggatgcagatgttcttctacgtgacactagcaggttcagaatttttccttctagccaccatggcctatgaccgctacgtggccatctgccatcctctccgttaccctgtcctcatgaaccatagggtgtgtctcttcctgtcatcaggctgctggttcctgggctcagtggatggcttcacattcactcccatcaccatgaccttccccttccgtggatcccgggagattcatcatttcttctgtgaagttcctgctgtattgaatctctcctgctcagacacctcactctatgagattttcatgtacttgtgctgtgtcctcatgctcctcatccctgtggtgatcatttcaagctcctatttactcatcctcctcaccatccacgggatgaactcagcagagggccggaaaaaggcctttgccacctgctcctcccacctgactgtggtcatcctcttctatggggctgccatctacacctacatgctccccagctcctaccacacccctgagaaggacatgatggtatctgtcttctataccatcctcactccagtggtgaaccctttaatctatagtcttaggaataaggatgtcatgggggctctgaagaaaatgttaacagtggaacctgcctttcaaaaagctatggagtag

SEQ ID NO: 45504 - DNA, 922 bp, Homo Sapiens
agcccgggccagctcttaaggagttcaggagtgagaagaggccctcagagatctgacagcctaggagtgcgtggacaccacctcagcccactgagcaggagtcacagcacgaagaccaagcgcaaagcgacccctgccctccatcctgactgctcctcctaagagagatggcaccggccagagcaggattctgcccccttctgctgcttctgctgctggggctgtgggtggcagagatcccagtcagtgccaagcccaagggcatgacctcatcacagtggtttaaaattcagcacatgcagcccagccctcaagcatgcaactcagccatgaaaaacattaacaagcacacaaaacggtgcaaagacctcaacaccttcctgcacgagcctttctccagtgtggccgccacctgccagacccccaaaatagcctgcaagaatggcgataaaaactgccaccagagccacggggccgtgtccctgaccatgtgtaagctcacctcagggaagcatccgaactgcaggtacaaagagaagcgacagaacaagtcttacgtagtggcctgtaagcctccccagaaaaaggactctcagcaattccacctggttcctgtacacttggacagagtcctttaggtttccagactggcttgctctttggctgaccttcaattccctctccaggactccgcaccactcccctacacccagagcattctcttcccctcatctcttggggctgttcctggttcagcctctgctgggaggctgaagctgacactctgttgcgcaagaaagaagtcactgttacagaggcaagcggtgaactaggtaagagttcactcatgaagaaacgagtgctctgaagagccagttaccctgtgttggctgcaataaaggtcattacctctctagccaag

SEQ ID NO: 45505 - DNA, 1063 bp, Homo Sapiens
gtgctgcggcgagctccgtccaaaagaaaatggggtttggtgtaaatctgggggtgtaatgttatcatatatcactctacctcgtaaaaccgacactgaaagctgccggacaacaaatcacaggtcaaaattatgagttcttcgtattatgtgaacgcgctttttagcaaatatacggcgggggcttctctgttccaaaatgccgagccgacttcttgctcctttgctcccaactcacagagaagcggctacggggcgggcgccggcgccttcgcctcgaccgttccgggcttatacaatgtcaacagccccctttatcagagcccctttgcgtccggctacggcctgggcgccgacgcctacggcaacctgccctgcgcctcctacgaccaaaacatccccgggctctgcagtgacctcgccaaaggcgcctgcgacaagacggacgagggcgcgctgcatggcgcggctgaggccaatttccgcatctacccctggatgcggtcttcaggacctgacaggaagcggggccgccagacctacacgcgctaccagacgctggagctggagaaggagttccacttcaaccgctacctgacgcggcgccgccgcattgaaatcgcccacgcgctctgcctcaccgagcgccagattaagatctggttccagaaccgccgcatgaagtggaagaaagagcataaggacgaaggtccgactgccgccgcagctcccgagggcgccgtgccctctgccgccgccactgctgccgcggacaaggccgacgaggaggacgatgatgaagaagaggaagacgaggaggaatgaggggccgatccggggccctctctgcaccggacagtcggaaaagcgtctttaagagactcactggttttacttacaaaaatgggaaaaataaaagaaaatgtaaaaaacaaaaacaaaaacaaaaaagcaacccagtccccaacctgcactctacccacccccatcacctactccagctcccaacttttgtggactgagcggccgcagagactgggtcgccttggattccctctgcctc

SEQ ID NO: 45506 - DNA, 1674 bp, Homo Sapiens
cacagccagcatgtcttggaacagctgaaccagcagcggcagctggggcttctctgtgactgcacctttgtggtggacggtgttcactttaaggctcataaagcagtgctggcggcctgcagcgagtacttcaagatgctcttcgtggaccagaaggacgtggtgcacctggacatcagtaacgcggcaggcctggggcaggtgctggagtttatgtacacggccaagctgagcctgagccctgagaacgtggatgatgtgctggccgtggccactttcctccaaatgcaggacatcatcacggcctgccatgccctcaagtcacttgctgagccggctaccagccctgggggaaatgcggaggccttggccacagaaggcaggacgcagcacacccataggccccagcagggacctcaaggaggagcgcggcggtcaggcccagagtgcggccagcgggggtctgtttcaaccagagcagacacaacagccttggctaggggtgtgctggggcctcccctcctgggtcacacgcagccaccaccagcgcgctggtccaggagaggtatccgacccctggcagagggtagcaatccagcctccggtgcttcccccacccaggtgcagagcagacagagaaagccgatgcgccccgggagccgccgcctgtggagctcaagccagaccccacgagtggcatggctgccgcagaagctgaggccgctttgtccgagagctcggagcaaggtagccccgcccagccaggaccaggccctacctgccagcgtccctcccctccggcctcccaccggctgctcctcacaccccgcttccccgctgcacccacaggactgtgggaaggagttcacgcacacggggaacttcaagcggcacatccgcatccacacgggggagaagcccttctcgtgccgggagtgcagcaaggccttttccgacccggccgcgtgcaaggcccatgagaagacgcacaggtactgccccaggccggcctcctaccccggcccctgccaggcccggcctttcacgccccagcgagccctgcctcctgtcgccttctggccctgcagccctctgaagccctacggctgcgaggagtgcgggaagagctaccgcctcatcagcctgctgaacctgcacaagaagcggcactcgggcgaggcgcgctaccgctgcgaggactgcggcaagctcttcaccacctcgggcaacctcaagcgccaccagctggtgcacagcggcgagaagccctaccagtgcgactactgcggccgctccttctccgaccccacttccaagatgcgccacctggagacccacgacacggacaaggagcacaagtgcccacactgcgacaagaagttcaaccaggtagggaacctgaaggcccacctgaagatccacatcgctgacgggcccctcaagtgccgagagtgtgggaagcagttcaccacctcagggaacctgaagcggcaccttcggatccacagcggggagaagccctacgtgtgcatccactgccagcgacagtttgcagaccccggcgctctgcagcggcacgtccgcattcacacaggtgagaagccatgccagtgtgtgatgtgcggtaaggccttcacccaggccagctccctcatcgcccacgtgcgccagcac

SEQ ID NO: 45507 - DNA, 980 bp, Homo Sapiens
ggggcagacgtgggacgggaaggacggctgccgggactggcgcgcggggacactgggccgacgcgtggagtagcggggagagcgggaagcctgagggggcggggccggcgcgaggccgtgggtgcggcacgaggatgccggcggcgggacagcgcccgtaggcagccccacgggcagggcgcgcgggcggggcggggcgggccgggccagaggagcgcccggcatgtcgcaagggctcccggccgccggcagcgtcctgcagaggagcgtcgcggcgcccgggaaccagccgcagccgcagccgcagcagcagagccctgaggatgatgacaggaaggtccgaaggagagaaaaaaaccgagttgctgctcagagaagtcggaagaagcagacccagaaggctgacaagctccatgaggaatatgagagcctggagcaagaaaacaccatgctgcggagagagatcgggaagctgacagaggagctgaagcacctgacagaggcactgaaggagcacgagaagatgtgcccgctgctgctctgccctatgaactttgtgccagtgcctccccggccggaccctgtggccggctgcttgccccgatgaagccggggacactcctctgcccagcaaggagccttggtcattttcatacctgggaggaaggcttttccttcacaattgtatacagggggcacctgtggccaggcctcctcctgggagctccaggaccagccagctgtgttccctgcagactgggctcagcccgacatccaacaggcgccaaactcacagagcccttgtgcagatccagcatggaggccaccctcaggagtgacttctcatccaccctggcagctagtaggttctgctgttatgcagagccatttcctctagaatttggataataaagatgcttattgtctctcccttctccagttctgggaatttacaggcacaatacacttccttttcctgg

SEQ ID NO: 45508 - DNA, 1167 bp, Homo Sapiens
cctcggaccccattctctcttcttttctcctttggggctggggcaactcccaggcgggggcgcctgcagctcagctgaacttggcgaccagaagcccgctgagctccccacggccctcgctgctcatcgctctctattcttttgcgccggtagaaaggatgacgcctcaaccctcgggtgcgcccactgtccaagtgacccgtgagacggagcggtccttccccagagcctcggaagacgaagtgacctgccccacgtccgccccgcccagccccactcgcacacgggggaactgcgcagaggcggaagagggaggctgccgaggggccccgaggaagctccgggcacggcgcgggggacgcagccggcctaagagcgagttggcactgagcaagcagcgacggagtcggcgaaagaaggccaacgaccgcgagcgcaatcgaatgcacaacctcaactcggcactggacgccctgcgcggtgtcctgcccaccttcccagacgacgcgaagctcaccaagatcgagacgctgcgcttcgcccacaactacatctgggcgctgactcaaacgctgcgcatagcggaccacagcttgtacgcgctggagccgccggcgccgcactgcggggagctgggcagcccaggcggttcccccggggactgggggtccctctactccccagtctcccaggctggcagcctgagtcccgccgcgtcgctggaggagcgacccgggctgctgggggccaccttttccgcctgcttgagcccaggcagtctggctttctcagattttctgtgaaaggacctgtctgtcgctgggctgtgggtgctaagggtaagggagagggagggagccgggagccgtagagggtggccgacggcggcggccctcaaaagcacttgttccttctgcttctccctggctgacccctggccggcccaggcctccacgggggcggcaggctgggttcattccccggccctccgagccgcgccaacgcacgcaacccttgctgctgcccgcgcgaagtgggcattgcaaagtgcgctcattttaggcctcctctctgccaccaccccataatctcattcaaagaatactagaatggtagcactacccggccggagccgcccaccgtcttgggtcgccctaccctcactca

SEQ ID NO: 45509 - DNA, 785 bp, Homo Sapiens
cttggttcctcgttccctgcacaaaatgccctgtgaagccacagaaaccgtccctgctacagagcaggagttgccgcagccgcaggctgagacagggtctggaacagaatctgacagtgatgaatcagtaccagagcctgaagaacaggattccacccagacgtccacacaagaagcccagctggtggcagcagctgaaattgatgaagagccagtcagtaaagcaaaacagatttggagtgaaaagaaggcacagaaggctatgtccaaactgggtcttcgacaggttacaggagtcactagagtcgctatccggaaatctaagaatatcctttttgtcatcacaaaaccaaatgtctgcaagagccctgctttggatacctacatagtttctggggaagccaagatcgaagatttatctgagcaagcacaactagcagctgctgagaaattcaatgttcaaggtgaagctgtctcaaacattcaagaaaacacacaaactccaactgtacaaaaggagagtgaagaagaagaggtcgatgaaacaggtgtagaagttaaggacatagaattggtcatgtcacaagcaaatgtgtggagagcaaaggcagtccatgccctgaagaacaacagtaatgatattgtaagtgccattatggaattaacaatgtaaccatctgaaagcaacttttcttggtgtctcaaaggagtaactgcagcttggtttgaaatttgtactgtttctatcataaataaagttatggcttcttgttggaaaaaaaaaa

SEQ ID NO: 45510 - DNA, 2501 bp, Homo Sapiens
ctctttggccaagccctgcctctgtacagcctcgagtggacagccagaggctgcagctggagcccagagcccaagatggagccccagctggggcctgaggctgccgccctccgccctggctggctggccctgctgctgtgggtctcagccctgagctgttctttctccttgccagcttcttccctttcttctctggtgccccaagtcagaaccagctacaattttggaaggactttcctcggtcttgataaatgcaatgcctgcatcgggacatctatttgcaagaagttctttaaagaagaaataagatctgacaactggctggcttcccaccttggactgcctcccgattccttgctttcttatcctgcaaattactcagatgattccaaaatctggcgccctgtggagatctttagactggtcagcaaatatcaaaacgagatctcagacaggagaatctgtgcctctgcatcagccccaaagacctgcagcattgagcgtgtcctgcggaaaacagagaggttccagaaatggctgcaggccaagcgcctcacgccggacctggtgcaggactgtcaccagggccagagagaactaaagttcctgtgtatgctgagataacaccagtgaaaaagcctggcatggagcccagcactgagaacttccagaaagtgttagccttctcccaactgtgttataccaaccacattttcaaatagtaatcattaaagaggcttctgcatcaaaccttcacatgcagctcccatgccaccctccagaattcaccaacacacaggcccaccagcaacaggctacctttgcacaatattctctgatgacaactccaaagccccggctctttccaccacactgtggtcccctagatggggctgttgctgagcccaccccaatccagatgtgatccccctgtgatctacttctggcaagattctcagtctggacaggtcttccctatgagatagaacctgataaggagctagggcaattctgacaacattaccaaaggcccacataacttctaaattttggtctggtctgaaggaaaacctgttcttgccctagtgatggatgaactctcttatctctggcttctagagggaaaaaaaagcatacctcttttactttttaagtacctccatcagagtcatgaaatcacctgtcaagactatctatcttttatgtttccattctggtaagaactctttaaatgaggacactgctgattgctggtgatgttttttgagcaaacactcgggggtatggatgaaagccaatcgcaggtcaaatgactccttggggaagctacttctcctctattcagatttcactaaaatcttccaagatgaaagcaaatctagatttcggtcttcattgctgtccatttttgtaatgaacgagtgtttttcctttagctagtgtatcaggcagggttctaccagagaaacagaaccagtaggagatacatatacatgtccagatttatttcaaagaattgatttacatgattgtggggattggcaagtccaaaatccatatggtaggcctgcaatctgtaaacctttgggcaggagctgatgctgtagtttgcagatagaattccttgttccttaaaaaaatctgtttttgttcttaagggctttgaatgattggatcaggcccacccagattacctagataatctcttttacttaaagtaaactgattgtaggtgctaatcacatctatgaaatgccttcacagcaacacctagattagcattcaattgaataactggggaatacagcctagccaagttgacacataaaattaaccatcacagcaacatgcctgctaaattttatcgaccgtcttcagactgttaaggattgtggtagagaactgtgacagccactctcagcatcaccctgaaccaaaggcccctatcaagtaacaatatagccaagcaaaattccagtcaatagagacattgactggttggctggcttcccaagggatagcaccagacaagaaatgcaaggatgaggaaaccaggcacgggagagagaggggcaacagaggtccagggtttggttatctttttatttttcactgggaggtggtaagttagccctgttgcccatgtatgcagatgggagaagtgatttagaaactccaaagcaattggtaatccccaaaatgggtgtatctggtttgaaatgaaaccttattttattggaaatggttggtttcccaattctgtttgccattggccaatataattgtgggtttgcacatggccagcacatgccaaacagaagtagacaaaggtctcactctgtaagtgggaccttggggaggagctgcctccatcataaagggaggggttagtaaaaatggtctcttaagcctgttcctgctacagttatagaggttgctcagaaccttctcagcaaatatagcagttatctattgttgtgtattaaaccatttcaacacat

SEQ ID NO: 45511 - DNA, 1461 bp, Homo Sapiens
aggtggtttcaccccaacatcagcagggtggaggcggagaagctgttcctatccagaggtcagcgtggggacttccttgccaggcccagtgagagcagcccggggggcttcacgctgtccgtcaggtgggtgggccctggctgggcatggacagggaccctttcctcccctgtgagggccctggggacaggcagggcctccgtggctgcgaccgtgttgccagagcctgggggtgcagctggggagtgcagcggggttcccattgagctctggtacccgctgggctgccaggaccccgcgttggagtggtggtaccacgggcgcctgtctggcaaggaggctgagaagctgctgctgcagaaggggcatccgggcagcttcctggtgcacatgagtcagagcgatcctgggggcttcccgctgtcagcgctgacgcaagggtgggacgaggcgcagggctcaggccgccagccacaggtcacgcacatcatgactcactcccaggtgggagggggcggcgagctggggcggcctctgggaagggcgggcggccttggccaggcccctcaccgccacccccacggccggatgaagtgggagacggggagcgttttgacaccctcggagacccggtgtagcaggaagagcccattgatggggaaggtgggggcggttgtgcacctcaagcagatgctgcagcagcaggaatgccggttcctgtaccctcggaaggaggggcagagtgtggagaacaagcccaagaatcactacaagaacatccttccctgtgagggcggaggccagggcgtcacccgtcgggcctgggggagggcctcgcgggcgcagggtgtacatcgcctgcagggctgtctgcaggcctgtctgcaggccacggtggctgctttctgggccacggtgcaccaggagaacacgcgtgtcatcgtcatgaccaccagggagatggagcggggccggcgctcccctcggaacaagtgtttccgggactggccagagctgcccggcagccaagagttcggccgtgtgcacatgcgcgtcctcggcaagggccaggcccagggctactgcgtgcgggagctgcaggtgtggcggccgggccaggaggagccacagcgtacggtgcagcacttccagtacttcggctggccggactacggcgtccgggccgatcccgccggcgtcctcggcttccgggacgaggtgaaccgggcccagagcagcaagccgcgggccgggcccatggtggtgcacttcagctccccgcccctgcctgccggcaccttccccccatccgtagcccctccccaagcgcgcttgtccgcagggctggactgcgacaccgacgtcccgaagacgatccagctggtttggcggcagcactggggaatggtgcagacggaggctccgtacaagttcacgtacctggcgctgcagcggcacatc

SEQ ID NO: 45512 - DNA, 210 bp, Homo Sapiens
taccacctcctgagctgattgggcctatgctggagcccagtgatgaggaacctcagcaagaggaaccaccaactgaaagtcgggatcctacacctgtacctgacctggaaactgatctccaggagctgtctcagtcaaagactggggatgaatgcagagatggtcccgatgacaaggggaagattctgccaaaatcagagcaatttaaaa

SEQ ID NO: 45513 - DNA, 234 bp, Homo Sapiens
ctgatggcctcagaggaggagtattccaccaaagaagagaaatatgaaaaggagatgaaactgctggaggagaaactgaaggaggctgagaccagagcagagtttgtcgaaaggtctgtggcaaagttggagaaaaccaccgatgacctagaagagacgttggccagtgccaaggagaacgtggagattcatcagacctgggaccagaccctactggaactcagcaacctgtga

SEQ ID NO: 45514 - DNA, 3135 bp, Homo Sapiens
cgcagaacttggggagccgccgccgccatccgccgccgcagccagcttccgccgccgcaggaccggcccctgccccagcctccgcagccgcggcgcgtccacgcccgcccgcgcccagggcgagtcggggtcgccgcctgcacgcttctcagtgttccccgcgccccgcatgtaacccggccaggcccccgcaactgtgtcccctgcagctccagccccgggctgcacccccccgccccgacaccagctctccagcctgctcgtccaggatggccgcggccaaggccgagatgcagctgatgtccccgctgcagatctctgacccgttcggatcctttcctcactcgcccaccatggacaactaccctaagctggaggagatgatgctgctgagcaacggggctccccagttcctcggcgccgccggggccccagagggcagcggcagcaacagcagcagcagcagcagcgggggcggtggaggcggcgggggcggcagcaacagcagcagcagcagcagcaccttcaaccctcaggcggacacgggcgagcagccctacgagcacctgaccgcagagtcttttcctgacatctctctgaacaacgagaaggtgctggtggagaccagttaccccagccaaaccactcgactgccccccatcacctatactggccgcttttccctggagcctgcacccaacagtggcaacaccttgtggcccgagcccctcttcagcttggtcagtggcctagtgagcatgaccaacccaccggcctcctcgtcctcagcaccatctccagcggcctcctccgcctccgcctcccagagcccacccctgagctgcgcagtgccatccaacgacagcagtcccatttactcagcggcacccaccttccccacgccgaacactgacattttccctgagccacaaagccaggccttcccgggctcggcagggacagcgctccagtacccgcctcctgcctaccctgccgccaagggtggcttccaggttcccatgatccccgactacctgtttccacagcagcagggggatctgggcctgggcaccccagaccagaagcccttccagggcctggagagccgcacccagcagccttcgctaacccctctgtctactattaaggcctttgccactcagtcgggctcccaggacctgaaggccctcaataccagctaccagtcccagctcatcaaacccagccgcatgcgcaagtaccccaaccggcccagcaagacgcccccccacgaacgcccttacgcttgcccagtggagtcctgtgatcgccgcttctcccgctccgacgagctcacccgccacatccgcatccacacaggccagaagcccttccagtgccgcatctgcatgcgcaacttcagccgcagcgaccacctcaccacccacatccgcacccacacaggcgaaaagcccttcgcctgcgacatctgtggaagaaagtttgccaggagcgatgaacgcaagaggcataccaagatccacttgcggcagaaggacaagaaagcagacaaaagtgttgtggcctcttcggccacctcctctctctcttcctacccgtccccggttgctacctcttacccgtccccggttactacctcttatccatccccggccaccacctcatacccatcccctgtgcccacctccttctcctctcccggctcctcgacctacccatcccctgtgcacagtggcttcccctccccgtcggtggccaccacgtactcctctgttccccctgctttcccggcccaggtcagcagcttcccttcctcagctgtcaccaactccttcagcgcctccacagggctttcggacatgacagcaaccttttctcccaggacaattgaaatttgctaaagggaaaggggaaagaaagggaaaagggagaaaaagaaacacaagagacttaaaggacaggaggaggagatggccataggagaggagggttcctcttaggtcagatggaggttctcagagccaagtcctccctctctactggagtggaaggtctattggccaacaatcctttctgcccacttccccttccccaattactattccctttgacttcagctgcctgaaacagccatgtccaagttcttcacctctatccaaagaacttgatttgcatggattttggataaatcatttcagtatcatctccatcatatgcctgaccccttgctcccttcaatgctagaaaatcgagttggcaaaatggggtttgggcccctcagagccctgccctgcacccttgtacagtgtctgtgccatggatttcgtttttcttggggtactcttgatgtgaagataatttgcatattctattgtattatttggagttaggtcctcacttgggggaaaaaaaaaaaagaaaagccaagcaaaccaatggtgatcctctattttgtgatgatgctgtgacaataagtttgaacctttttttttgaaacagcagtcccagtattctcagagcatgtgtcagagtgttgttccgttaacctttttgtaaatactgcttgaccgtactctcacatgtggcaaaatatggtttggtttttctttttttttttttttgaaagtgttttttcttcgtccttttggtttaaaaagtttcacgtcttggtgccttttgtgtgatgcgccttgctgatggcttgacatgtgcaattgtgagggacatgctcacctctagccttaaggggggcagggagtgatgatttgggggaggctttgggagcaaaataaggaagagggctgagctgagcttcggttctccagaatgtaagaaaacaaaatctaaaacaaaatctgaactctcaaaagtctatttttttaactgaaaatgtaaatttataaatatattcaggagttggaatgttgtagttacctactgagtaggcggcgatttttgtatgttatgaacatgcagttcattattttgtggttctattttactttgtacttgtgtttgcttaaacaaagtgactgtttggcttataaacacattgaatgcgctttattgcccatgggatatgtggtgtatatccttccaaaaaattaaaacgaaaataaagtagctgcgattggg

SEQ ID NO: 45515 - DNA, 270 bp, Homo Sapiens
atgtgcgaccgaaaggccgtgatcaaaaatgcggacatgtcggaggagatgcaacagaactcagtggagtgcgctcctcaggcgctggagaaatacaacatagagaagaacactgcggctcatatcaagaaggaatgtgacaagaagtacaatgccacctggcactgcatcctggggaggaacttcagtagttacgtgacacatgaaaccaaacacttcatctacttctacctgggccaagtggccattcttctgttcaaatctggttaa

SEQ ID NO: 45516 - DNA, 1023 bp, Homo Sapiens
atggaggcggcggcaggcggccgcggctgtttccagccgcacccggggctgcagaagacgctggagcagttccacctgagctccatgagctcgctgggcggcccggccgctttctcggcgcgctgggcgcaggaggcctacaagaaggagagcgccaaggccaccgagccgccgcccgtgctgcacctgcccgccatccagccgccgccgcccgtgctgcccgggcccttcttcatgccgtccgaccgctccaccgagcgctgcgagaccgtactggaaggcgagaccatctcgtgcttcgtggtgggaggcgagaagcgcctgtgtctgccgcagattctcaactcggtgctgcgcgacttctcgctgcagcagatcaacgcggtgtgcgacgagctccacatctactgctcgcgctgcacggccgaccagctggagatcctcaaagtcatgggcatcctgcccttctcggcgccctcgtgcgggctcatcaccaagacggacgccgagcgcctgtgcaacgcgctgctctacggcggcgcctacccgccgccctgcaagaaggagctggccgccagcctggcgctgggcctggagctcagcgagcgcagcgtccgcgtgtaccacgagtgcttcggcaagtgtaaggggctgctggtgcccgagctctacagcagcccgagcgccgcctgcatccagtgcctggactgccgcctcatgtacccgccgcacaagttcgtggtgcactcgcacaaggccctggagaaccggacctgccactggggcttcgactcggccaactggcgggcctacatcctgctgagccaggattacacgggcaaggaggagcaggcgcgcctcggccgctgcctggacgacgtgaaggagaaattcgactatggcaacaagtacaagcggcgggtgccccgggtgagtggccccaggcctgggagctggggaggatgcgcttggggtgtggtccccggctcctggattggctgcccatgctcaggatggtctggg

SEQ ID NO: 45517 - DNA, 486 bp, Homo Sapiens
cacatctgtaagaagaaaagtgatggcgtctacatcctacatctgaagaggacctgggagaagcaagaagttctggcagctcgtgccatcgctgcctttaaaaaccctgttgatgtcagtgtcatgtcctctagcaatactggccagagggctgtgctgaagtttgctgctgccactggagccactcaaattgttggccgcttcactcctggaaccttcactagccagacccaggcagccttcagggagccacggcttctagtggttactgatcccagggctgaccaccagcctctcacagagacatcttatgttaacctacctaccattgctctatgtcacacagattttcctctgcgctatgtggacattgccatcacatgcaacaacaagggagctccctcagtgggtccgagctggtggatgctggccctggaagttctgcgcgtgtgtggcaccatttccctcgaacacccatgggaggtc

SEQ ID NO: 45518 - DNA, 2712 bp, Homo Sapiens
atgctgggccctgctgtcctgggcctcagcctctgggctctcctgcaccctgggacgggggccccattgtgcctgtcacagcaacttaggatgaagggggactacgtgctgggggggctgttccccctgggcgaggccgaggaggctggcctccgcagccggacacggcccagcagccctgtgtgcaccaggttctcctcaaacggcctgctctgggcactggccatgaaaatggccgtggaggagatcaacaacaagtcggatctgctgcccgggctgcgcctgggctacgacctctttgatacgtgctcggagcctgtggtggccatgaagcccagcctcatgttcctggccaaggcaggcagccgcgacatcgccgcctactgcaactacacgcagtaccagccccgtgtgctggctgtcatcgggccccactcgtcagagctcgccatggtcaccggcaagttcttcagcttcttcctcatgccccaggtcagctacggtgctagcatggagctgctgagcgcccgggagaccttcccctccttcttccgcaccgtgcccagcgaccgtgtgcagctgacggccgccgcggagctgctgcaggagttcggctggaactgggtggccgccctgggcagcgacgacgagtacggccggcagggcctgagcatcttctcggccctggccgcggcacgcggcatctgcatcgcgcacgagggcctggtgccgctgccccgtgccgatgactcgcggctggggaaggtgcaggacgtcctgcaccaggtgaaccagagcagcgtgcaggtggtgctgctgttcgcctccgtgcacgccgcccacgccctcttcaactacagcatcagcagcaggctctcgcccaaggtgtgggtggccagcgaggcctggctgacctctgacctggtcatggggctgcccggcatggcccagatgggcacggtgcttggcttcctccagaggggtgcccagctgcacgagttcccccagtacgtgaagacgcacctggccctggccaccgacccggccttctgctctgccctgggcgagagggagcagggtctggaggaggacgtggtgggccagcgctgcccgcagtgtgactgcatcacgctgcagaacgtgagcgcagggctaaatcaccaccagacgttctctgtctacgcagctgtgtatagcgtggcccaggccctgcacaacactcttcagtgcaacgcctcaggctgccccgcgcaggaccccgtgaagccctggcagctcctggagaacatgtacaacctgaccttccacgtgggcgggctgccgctgcggttcgacagcagcggaaacgtggacatggagtacgacctgaagctgtgggtgtggcagggctcagtgcccaggctccacgacgtgggcaggttcaacggcagcctcaggacagagcgcctgaagatccgctggcacacgtctgacaaccagaagcccgtgtcccggtgctcgcggcagtgccaggagggccaggtgcgccgggtcaaggggttccactcctgctgctacgactgtgtggactgcgaggcgggcagctaccggcaaaacccagacgacatcgcctgcaccttttgtggccaggatgagtggtccccggagcgaagcacacgctgcttccgccgcaggtctcggttcctggcatggggcgagccggctgtgctgctgctgctcctgctgctgagcctggcgctgggccttgtgctggctgctttggggctgttcgttcaccatcgggacagcccactggttcaggcctcgggggggcccttgtcccacctcccgctcacgggctgcctgagcacactcttcctgcaggcggccgagatcttcgtggagtcagaactgcctctgagctgggcagaccggctgagtggctgcctgcgggggccctgggcctggctggtggtgctgctggccatgctggtggaggtcgcactgtgcacctggtacctggtggccttcccgccggaggtggtgacggactggcacatgctgcccacggaggcgctggtgcactgccgcacacgctcctgggtcagcttcggcctagcgcacgccaccaatgccacgctggcctttctctgcttcctgggcactttcctggtgcggagccagccgggctgctacaaccgtgcccgtggcctcacctttgccatgctggcctacttcatcacctgggtctcctttgtgcccctcctggccaatgtgcaggtggtcctcaggcccgccgtgcagatgggcgccctcctgctctgtgtcctgggcatcctggctgccttccacctgcccaggtgttacctgctcatgcggcagccagggctcaacacccccgagttcttcctgggagggggccctggggatgcccaaggccagaatgacgggaacacaggaaatcaggggaaacatgaggcccccatcctgcaccctgccaggcaccacagcagtgggaggccaggtgggggcacacaggcatatgcccagggcagagcccgccgaggtaggggtggcacccagcttcctactctgccctttgcccagtgggtagacagcatcatgactgtcaccagtaccagggacagagcccaggatctgacgccagcacgccgccaggcccacacagggtctccggtcagagtcccagggtcagctcccagcagggcctag

SEQ ID NO: 45519 - DNA, 1691 bp, Homo Sapiens
atgcccgccctacgtccactcctgccgctcctgctcctcctccggctgacctcgggggctggcttgctgccagggctggggagccacccgggcgtgtgccccaaccagctcagccccaacctgtgggtggacgcccagagcacctgtgagcgcgagtgtagcagggaccaggactgtgcggctgctgagaagtgctgcatcaacgtgtgtggactgcacagctgcgtggcagcacgcttccccggcagcccagctgcgccgacgacagcggcctcctgcgagggctttgtgtgcccacagcagggctcggactgcgacatctgggacgggcagcccgtgtgccgctgccgcgaccgctgtgagaaggagcccagcttcacctgcgcctcggacggcctcacctactacaaccgctgctatatggacgccgaggcctgcggggcctgcacctccacatcgtgccctgcaagcacgtgctcagctggccgcccagcagcccggggccgccggagaccactgcccgccccacacctggggccgcgcccgtgcctcctgccctgtacagcagcccctccccacaggcggtgcaggttgggggtacggccagcctccactgcgacgtcagcggccgcccgccgcctgctgtgacctgggagaagcagagtcaccagcgagagaacctgatcatgcgccctgatcagatgtatggcaacgtggtggtcaccagcatcgggcagctggtgctctacaacgcgcggcccgaagacgccggcctgtacacctgcaccgcgcgcaacgctgctgggctgctgcgggctgacttcccactctctgtggtccagcgagagccggccagggacgcagcccccagcatcccagccccggccgagtgcctgccggatgtgcaggcctgcacgggccccacttccccacaccttgtcctctggcactacgacccgcagcggggcggctgcatgaccttcccggcccgtggctgtgatggggcggcccgcggctttgagacctacgaggcatgccagcaggcctgtgcccgcggccccggcgacgcctgcgtgctgcctgccgtgcagggcccctgccggggctgggagccgcgctgggcctacagcccgctgctgcagcagtgccatcccttcgtgtacggtggctgcgagggcaacggcaacaacttccacagccgcgagagctgcgaggatgcctgccccgtgccgcgcacaccgccctgccgcgcctgccgcctccggagcaagctggcgctgagcctgtgccgcagcgacttcgccatcgtggggcggctcacggaggtgctggaggagcccgaggccgccggcggcatcgcccgcgtggcgctcgaggacgtgctcaaggatgacaagatgggcctcaagttcttgggcaccaagtacctggaggtgacgctgagtggcatggactgggcctgcccctgccccaacatgacggcgggcgacgggccgctggtcatcatgggtgaggtgcgcgatggcgtggccgtgctggacgccggcagctacgtccgcgccgccagcgagaagcgcgtcaagaagatcttggagctgctggagaagcaggcctgcgagctgctcaaccgcttccaggactagcccccgcaggggcctgcgccaccccgtcctggtgaataaacgcactcc

SEQ ID NO: 45520 - DNA, 321 bp, Homo Sapiens
gtgatgcatgtcatggccgcctccatggcccggggaggcgtgagtgccagggttctactgcaggctgccaggggcacctggtggaacagacctgggggcacttccgggtcgggggagggggtggcgctggggacaaccagaaagtttcaagcgacaggctcgcgcccggctggagaggaggacgcgggcggcccggagcggcccggggacgtggtgaacgtggtgttcagaccgctcaggccagcggatcccagtgagtggcagagtcggggacaatgttcttcacctggcccagcgccacggggtggacctggaaggtag

SEQ ID NO: 45521 - DNA, 1517 bp, Homo Sapiens
cgacacttgacccagaccagtcccaacgcccagtgcggccgcccggggagccgcgggagaggcggcggcggggggaggagggagaggagggccgagccggcggcacgggaggcccggttttgaagccgcttctctgcccgagttaggtttcgcccagcgcaatttctttctctatgtactttgcgaataagtttcggagcatcggttaacagcctatgggtgaaatttggctttcattcatgaatgagaaattattcttgacagaagtattttaaaagaaaaatctttacgatggcctcagcagtacttagttctgttcccaccaccgcttctcgttttgccctgttacaagtggatagtggcagtggctctgattctgaacctggaaaaggtaaaggtcgaaatactggaaagtctcaaactttaggaagcaagtcaactacaaatgagaaaaaaagagagaaaagaagaaaaaagaaggaacagcaacagagtgaagcaaatgagctcaggaatcttgcttttaagaaaattccccagaaatcctcccatgctgtttgtaacgctcaacatgatcttccattgtcaaacccagtacagaaggattcacgagaagaaaattggcaagagtggagacaaagagatgagcagctgacatctgaaatgtttgaagcagatcttgagaaggcattgttactaagtaaactagaatatgaagagcacaaaaaggagtatgaagatgctgaaaatacttcaactcagtccaaagttatgaataaaaaagataaaagaaagaatcatcagggaaaagacagacctctcacagtatcactaaaagattttcattcggaagatcacattagtaaaaagactgaggaagtggttctgaaagatggaagaattgaaagactaaagttagagcttgaaaggaaagatgctgaaatccagaagctgaaaaatgtaatcactcaatgggaggcaaagtataaggaagtaaaggcaagaaatgcacaattattgaaaatgcttcaggaaggtgaaatgaaagataaggcagaaatacttctgcaagttgatgaatcacaaagtatcaagaatgagctcactattcaggtgacttcacttcatgctgcattagaacaagaaagatctaaagtgaaagtattacaagcagagttagccaaataccagggtggcagaaaagggaaaagaaactctgaatccgaccagtgtaggtgattacattagcctttgaagtcaacacaaagtttaaaacttccaggattttgcaaagttgtatatatttaatgctgtgcaactgctaaactatgcagtttttcttgaaggaactaaaagcaactagctccctaatggtctataattttatttcttttggcttaaagtgaaaaagaagaaatagagaattccagcagaattcagtggttgtctactatccatacttcttatcactttagtttttcatcagtcaataaaattaatttactcttccactaata

SEQ ID NO: 45522 - DNA, 972 bp, Homo Sapiens
actgcgggcgtgatgatctctctgagccgcatcctcacggagctactgctgcccgacgagcgcgccagcatgctcatcttcttcctggtgtcggtggcgctggagctgctgtgcttcctgctgcacctgttagtgcggtgcagtggcttcgtgctcttctataccacacggccgcgcgacagccgccggggcaggccaggcctgggcaggggctctggctaccgcgtgcaccacgacgtcgtcgccggggacgtccacttcgagcacccagccccggccctggcccccaacgggtccccaaaggacagcccagcccatgaggtgaccggcagcggcggggcctacatgtgctttgacgtactgtggccaagggtccagcgcagctggcccaccttcagagccgtgttactgcaccgctacgtggtggcaggggtgatctgggccgacatgctctccatcgccgtgacctacttcatcacgctgtgcctgttccccgaccttgagtctgagatctgccactgcatcctgggcgagtggctgcccatcctcatcatggctgtgttcaacctgtcagacttcgtgggcaagatcctggtagccctgcccgtgtactggcggggcacccacctgctggcctgctcctgcctgcgtgtggtcttcatccccctcttcaccctgtgcgtctaccccagcggcatgcccgccctccgccaccccgcctggccctgcattttctcactgctcatgggcatcagcaacggctccttcggcagcgtgcccatgatcctggcagcaggcaaagtgagccccaagcagcgggagccggcagggaacaccatgactgtgtcctacatgtcagggctgacactggggtccgccgtggcctactgcagctacagcctcacccgcaacgcccacggcagctgcctgcacgcctccaccgccaatggctccatcctcacaggcctctga

SEQ ID NO: 45523 - DNA, 540 bp, Homo Sapiens
atggcgggtgcgggcccgaagcggcgcgcgctagcggccccggtggccgaggagaaggaagaggcgcgggagaagatgatggccgccaagcgcgcggacggcgcggcgccggcaggcgagggcgagggcgtgaccctgcaggggaacatcacgctactcaagggcgtggccgtcatcgtggtcgccatcatgagctcgggcatcttcgtgacgcccacgggcgtgctcaaggaggcaggctcgccggggctggcgctggtggtgtgggccgcgtgcggcgtcttctccatcgtgggcgcgctctgctacgcggagctgggcaccaccatctccaaatcgggcggcgactacgcctacatgctggacgtctacggctcgctgcccgccttcctcaagctctggatcgagctgctcatcatccggccttcatcgcagtacatcgtggccctggtcttcgccacctacctgctcaagccgctcttccccacctgcccggtgcccgaggaggcagccaagctcgtagcctgccactccgtgcgt

SEQ ID NO: 45524 - DNA, 1680 bp, Homo Sapiens
ccctgcgctaccgtgtcggtgttccccggcgcccgcctcctcaccatcggcgacgcgaacggcgagatccagcggcacgcggagcagcaggcgctgcgcctcgaggtgcgcgccggcccggactcggcgggcatcgccctctacagccatgaagatgtgtgtgtctttaagtgctcagtgtcccgagagacagagtgcagccgtgtgggcaagcagtccttcatcatcaccctgggctgcaacagcgtcctcatccagttcgccacacccaacgatttctgttccttctacaacatcctgaaaacctgccggggccacaccctggagcggtctgtgttcagcgagcggacggaggagtcttctgccgtgcagtacttccagttttatggctacctgtcccagcagcagaacatgatgcaggactacgtgcggacaggcacctaccagcgcgccatcctgcaaaaccacaccgacttcaaggacaagatcgttcttgatgttggctgtggctctgggatcctgtcgttttttgccgcccaagctggagcacggaaaatctacgcggtggaggccagcaccatggcccagcacgctgaggtcttggtgaagagtaacaacctgacggaccgcatcgtggtcatcccgggcaaggtggaggaggtgtcactccccgagcaggtggacatcatcatctcggagcccatgggctacatgctcttcaacgagcgcatgctggagagctacctccacgccaagaagtacctgaagcccagcggaaacatgtttcctaccattggtgacgtccaccttgcacccttcacggatgaacagctctacatggagcagttcaccaaggccaacttctggtaccagccatctttccatggagtggacctgtcggccctccgaggtgccgcggtggatgagtatttccggcagcctgacacatttgacatccggatcctgatggccaagtctgtcaagtacacggtgaacttcttagaagccaaagaaggagatttgcacaggatagaaatcccattcaaattccacatgctgcattcagggctggtccacggcctggctttctggtttgacgttgctttcatcggctccataatgaccgtgtggctgtccacagccccgacagagcccctgacccactggtaccaggtgcggtgcctgttccagtcaccactgttcgccaaggcaggggacacgctctcagggacatgtctgcttattgccaacaaaagacagagctacgacatcagtattgtggcccaggtggaccagaccggctccaagtccagtaacctcctggatctgaaaaaccccttctttagatacacgggcacaacgccctcacccccacccggctcccactacacatctccctcggaaaacatgtggaacacgggcagcacctacaacctcagcagcgggatggccgtggcagggatgccgaccgcctatgacttgagcagtgttattgccagtggctccagcgtgggccacaacaacctgattcctttagggtcctccggcgcccagggcagtggtggtggcagcacgagtgcccactatgcagtcaacagccagttcaccatgggcggccccgccatctccatggcgtcgcccatgtccatcccgaccaacaccatgcactacgggagctag

SEQ ID NO: 45525 - DNA, 339 bp, Homo Sapiens
cccagccccagccaactcccggcactgaacactacagggaatggacttccggcagatctcacccaccacctgcaccaccccagccagcagcagctctgcagccccgcccaccccagccagcagcagctctgcagccccgcccaccccagccagcagcagctctgcagccccgcccaccccagccaattgcagcactgcagccccgcccaccccagccaattgcagcactgcagccccgcccaccccagccagcagcggctctgcagccccgcccaccccagcccccgaccattggtggatggaagccccccaccattggctcccaggcttgctggctag

SEQ ID NO: 45526 - DNA, 1274 bp, Homo Sapiens
cagcgggagacggccacgagattcccccatctctttgaatataattttagattgagattcagattaaatccgaggggaaaacactttatgaggctgaaagctgtgtcgttgccagagacagggttatgagctatcaaatgcaattacattaagacagattatactgggcaaattgagccatttagaaggtgagaatcaaagaaacggctctgatcctcttttcccccttctctctccctctccctctctctctaaattgcagttcgtagttccttccaattctgaggcacaaaagtaggtgagactgcttttgtatctgcgaagtgcttcactcctgaatgtaattctagctgagtgcaatctaggttaagagccggacaagcgggtaattagagcccgctagctgcccgaagaccggccgcccctccaaagcgcgccccgagtcggcgcccttctcccggccgagcctagctgcggctggacacggagcgcccgagatgatggtgctggacaaggaggacggcgtgccgatgctctccgtccagcccaaagggaagcagaagggctgtgcgggctgtaaccgcaagatcaaggaccgctatctgctgaaggcattggacaagtactggcacgaagactgcctcaagtgtgcctgctgtgactgccgcctgggcgaggtgggctccaccctctacaccaaggccaacctcatcctgtgccgacgcgactacctgaggctctttggcaccacagggaactgtgctgcttgcagcaagctgatcccagccttcgagatggtgatgcgggcccgggacaacgtgtatcacctcgactgcttcgcctgccagctctgcaaccagagattttgtgtgggagacaaattcttcctgaagaacaacatgatcttgtgtcagatggactatgaggaagggcagctcaatggcacctttgaatcccaagttcagtaacgcccggcgcctggcctccaggcccgtctgtccatctgcccgcctgcccacctgcctggccggccagccagccactctaccagtgcaggctggccagccgctctcctgccacattagaacttctccgtcctcgatgggagggatggcccttcctcctccaccaccgcccgtctgtgtgtgacccctcctggggccaggccgggcctgtacagtctgtcttctgtatataaatgggaacatttattttatgagaaatgtaatgcgattttattactggcgtggattaaacttatgaatgtttccggg

SEQ ID NO: 45527 - DNA, 1468 bp, Homo Sapiens
aattcttgctgtgttggaactagcgagtggtggagtctctgaagcctcatcagtcaccgggactgtcaggaatagtggtttaagaggaagctcggcctggggcactataccctgtcatccagttccctgcctcggagataaagattccagctacatgggcaaacgcctggatcagccacaaatgtacccccagtacacttactactatcctcattatctccaaaccaagcagtcctatgcaccagctccccaccccatggctcctcccagccccagcacaaacagcagcagcaacaacagcagcaacaacagcagcggggaacagttgagtaaaaccaacctgtacattcgaggcctcccaccaggcaccactgaccaggacctaatcaagctgtgccaaccgtatggaaaaattgtatctacaaaggcaattcttgacaaaaacacaaatcagtgcaaaggttatggttttgtagattttgacagtcctgcagccgcacagaaagcggtagcatctctcaaggcaaatggcgtgcaggcacagatggctaagcaacaagagcaagacccaacaaacctatacatctcaaatctccccatttctatggatgagcaggagcttgagaatatgctgaaaccctttggacatgtcatttccacaagaatactaagagacgctaatggagtcagcagaggtgttggctttgccagaatggagtctactgaaaaatgtgaagtggtaattcaacattttaatggaaaatatctgaaaacaccaccaggcatcccagcccccagtgagcctttgctgtgcaaattcgctgatggaggacaaaagaagcgacagaatcaaagcaaatatacccagaatgggaggccttggcccagggaaggagaggctggcatggctttgacctatgaccccacagctgccatacagaatggattttattcttcaccgtacagtattgcaaccaaccgcatgattccacagacatctatcacgccattcattgctgcttcccctgtctccacataccaggtccagagtacttcatggatgcctcatccgccatacgttatgcaaccaacaggtgctgtgattacaccaaccatggaccatcccatgtcaatgcagccagccaacatgatgggcccactgacacagcagatgaatcacctttcgttgggcacaacaggaacgtatatgactgctgctgctcctatgcaagggacctacattcctcagtacacgcctgtgcctccgacagctgtttctattgaaggtgttgttgctgatacctctccccagacagtggcaccttcatcccaggacaccagtggtcagcagcaacagatagcagtggacacatccaacgaacatgcacctgcatattcttaccaacagtctaagtaagtctgggctgtgctaagctcttttcctcaagatcagccatcttgacatcac

SEQ ID NO: 45528 - DNA, 402 bp, Homo Sapiens
atggaaactaatataaattggggtgcaagggtgtttcttgctgattttcaagcacaaaaggtcattacaaacccagctgggaagggactgggggaggtgctgaaagttaaaaccacggcagtaaattttcaacacaagggaatacctcctaaaaatcacctaggggctcttttaaacctttattgtttttttcagcataaaaacaacttcagaggagactggggatttcaaagctctctggctctaactgcctcctgggaacagcatggaagcttccctaatcatggaggagttaatgcaggcctctgggggaagaagtctctaatgggaggaaataaatgggcccttgccttgcagatggtcccaagccctcccctcactggaattcttcttgctctgtga

SEQ ID NO: 45529 - DNA, 2809 bp, Homo Sapiens
acttggctctgcctccgctgactctagcgccatggcccggcacctgctcctcccccttgtgatgcttgtcatcagtcccatcccaggagccttccaggactcagctctcagtcctacccaggaagaacctgaagatctggactgcgggcgccctgagccctcggcccgcatcgtggggggctcaaacgcgcagccgggcacctggccttggcaagtgagcctgcaccatggaggtggccacatctgcgggggctccctcatcgccccctcctgggtcctctccgctgctcactgtttcatgacgaatgggacgctggagcccgcggccgagtggtcggtactgctgggcgtgcactcccaggacgggcccctggacggcgcgcacacccgcgcagtggccgccatcgtggtgccggccaactacagccaagtggagctgggcgccgacctggccctgctgcgcctggcctcacccgccagcctgggccccgccgtgtggcctgtctgcctgccccgcgcctcacaccgcttcgtgcacggcaccgcctgctgggccaccggctggggagacgtccaggaggcagatcctctgcctctcccctgggtgctacaggaagtggagctaaggctgctgggcgaggccacctgtcaatgtctctacagccagcccggtcccttcaacctcactctccagatattgccagggatgctgtgtgctggctacccagagggccgcagggacacctgccagggtgactctggggggcccctggtctgtgaggaaggcggccgctggttccaggcaggaatcaccagctttggctttggctgtggacggagaaaccgccctggagttttcactgctgtggctacctatgaggcatggatacgggagcaggtgatgggttcagagcctgggcctgcctttcccacccagccccagaagacccagtcagatccccaggagcccagggaggagaactgcaccattgccctgcctgagtgcgggaaggccccgcggccaggggcctggccctgggaggcccaggtgatggtgccaggatccagaccctgccatggggcgctggtgtctgaaagctgggtcttggcacctgccagctgctttctggacccgaacagctccgacagcccaccccgcgacctcgacgcctggcgcgtgctgctgccctcgcgcccgcgcgcggagcgggtggcgcgcctggtgcagcacgagaacgcttcgtgggacaacgcctcggacctggcgctgctgcagctgcgcacgcccgtgaacctgagcgcggcttcgcggcccgtgtgcctaccccacccggaacactacttcctgcccgggagccgctgccgcctggcccgctggggccgcggggaacccgcgcttggcccaggcgcgctgctggaggcggagctgttaggcggctggtggtgccactgcctgtacggccgccagggggcggcagtaccgctgcccggagacccgccgcacgcgctctgccctgcctaccaggaaaaggaggaggtgggcagctgctggaatgactcgcgttggagccttttgtgccaggaggaggggacctggtttctggctggaatcagagactttcccagtggctgtctacgtccccgagccttcttccctctgcagactcatggcccatggatcagccatgtgactcggggagcctacctggaggaccagctagcctgggattggggccctgatggggaggagactgagacacagacttgtcccccacacacagagcatggtgcctgtggcctgcggctggaggctgctccagtgggggtcctgtggccctggctggcagaggtgcatgtggctggtgatcgagtctgcactgggatcctcctggccccaggctgggtcctggcagccactcactgtgtcctcaggccaggctctacaacagtgccttacattgaagtgtatctgggccgggcaggggccagctccctcccacagggccaccaggtatcccgcttggtcatcagcatccggctgccccagcacctgggactcaggccccccctggccctcctggagctgagctcccgggtggagccctccccatcagccctgcccatctgtctccacccggcgggtatccccccgggggccagctgctgggtgttgggctggaaagaaccccaggaccgagtccctgtggctgctgctgtctccatcttgacacaacgaatctgtgactgcctctatcagggcatcctgccccctggaaccctctgtgtcctgtatgcagaggggcaggagaacaggtgtgagatgacctcagcaccgcccctcctgtgccagatgacggaagggtcctggatcctcgtgggcatggctgttcaagggagccgggagctgtttgctgccattggtcctgaagaggcctggatctcccagacagtgggagaggccaacttcctgccccccagtggctccccacactggcccactggaggcagcaatctctgccccccagaactggccaaggcctcgggatccccgcatgcagtctacttcctgctcctgctgactctcctgatccagagctgaggggctagggtcccagcaccacttcccccttctccaccctctacttcccgcccagtggggctggaatgtggcccagccggctggaacctcaagggccccacccaccgagattgcagcggctctggctaattgggcctcagtgcccgggctattttgaacccaggaatccttgggggtggtgggaggagcggacaataaaggtgtaaacac

SEQ ID NO: 45530 - DNA, 774 bp, Homo Sapiens
agaatcagacatggcttcaggggatgcaggacgctcccctgagctgcctgtcaccgactaagtggagcagtgtttcttccgcagactcaactgagaagtcagcctctggggcaggcaccaggaatctgccttttcagttctgtctccggcaggctttgaggatgaaggctgcgggcattctgaccctcattggctgcctggtcacaggcgccgagtccaaaatctacactcgttgcaaactggcaaaaatattctcgagggctggcctggacaattactggggcttcagccttggaaactggatctgcatggcatattatgagagcggctacaacaccacagcccagacggtcctggatgacggcagcatcgactatggcatcttccagatcaacagcttcgcgtggtgcagacgcggaaagctgaaggagaacaaccactgccatgtcgcctgctcagccttgatcactgatgacctcacagatgcaattatctgtgccaggaaaattgttaaagagacacaaggaatgaactattggcaaggctggaagaaacattgtgagggcagagacctgtccgagtggaaaaaaggctgtgaggtttcctaaactggaactggacccaggatgctttgcagcaacgccctaggatttgcagtgaatgtccaaatgcctgtgtcatcttgtcccgtttcctcccaatattccttctcaaacttggagagggaaaattaagctatacttttaagaaaataaatatttccatttaaatgtc

SEQ ID NO: 45531 - DNA, 2055 bp, Homo Sapiens
ggctcgcgggggtcccgcgagggtctcggtagccgcgcgcccagagacccccgccgcggcccgattctctgagcgccagacatgaaccgcaagaaactgcagaagctgacggacaccttaaccaaaaattgcaagcattttaataaatttgaagtgaactgtcttataaagcttttttatgacttggtgggaggagtagagaggcaaggtctggttgttggactggatcgtaatgcatttcgaaacatcctgcatgtgacatttggaatgacagatgacatgattatggacagagtattccgaggttttgataaagataatgatggctgtgtaaatgtattggagtggattcatggattatcactgtttcttcgaggatctttggaagaaaaaatgaaatattgctttgaagtgtttgatttgaatggtgacggattcatttcaaaggaggaaatgtttcacatgttgaagaacagccttctcaaacagccatctgaggaagaccctgatgaaggaattaaagatttggttgaaataacactgaagaaaatggatcatgaccatgatgggaagctgtcttttgcagactatgaactggctgtgagagaagagactcttctactggaggcctttgggccatgtcttcctgatccaaagagccagatggaatttgaagctcaagtattcaaagatccaaatgaattcaatgatatgtgaataactaaatgtctatattgtctcaagtgagtaaaaaaggaggcacacacatattgcttattttttctacttagttcagaaaaatgatgttgaattgtgtgtttcagggtgaagatgaggttcacttacatatatcatttaacatcagtgtaagatgcaattaaaatagatggaagacaagaagtcccttattagatgatgggtttggcaagacagttaacttttctacagatgttttatcacatagactatctgtcgaagcacataactggcataaaacctttgggttcattaaatgaatagagagattacataattatgaattgttaatacaaatattctgcatgtcaaaaagaagctgggtgtacactgaaaaatcattgaaactactggatttcctttgaaacaaataatgaagatggcatcaaaagaataagagtattctattgagcattgaaacgcctttctggtaggcattgagggagatctagagagatgaaagatacatggaaatcatattatattgaaatataatatgatttgcattattgtttgaggctttggctaaataacgttactgattgtaagcacctgaaggcaagggttttatccaccacatctttgtctgccatagcatttagtcctctgcatacaatgggctgtccataattactgtagattggactgaaaatcaaaaagtaccacaagataaatgcaaactcttggtgagcagagggagaacatgtactgagtttcttaggtttcatggctaatgcattggcacagctttcagtgtatccctgcagtccttccagatagtccctgccccatgcattgcagatggttgccaaagcccccctctgtcctggcacccagtgttcctccatcctgactccacgtattgcccccttgccactgcctgagtgcaccatagtgtccccatccccccactgcctggagttccccttgtgtacccccttatcagggcacgacctaactgtgccctgctggctgtgacctcctgaagacagacctggcttctccctgcatccagttccccagtatgtgctgtgggcatcctgagaagcctgaaaaagacagggccaggttaggcttgggtgagctgctttctgccttcttggtacacacagtaagcagtggagaggcgtgttacaccgtatctgttctatcctcatctaaatactgagaggctagttgggatagtaaatctttcttactacatatgcattaagtttaagtaaaatagaatattgtgtgaaaaaatgcactgttactaataaatggaataaacagatccatgaaataaaagaaaacata

SEQ ID NO: 45532 - DNA, 507 bp, Homo Sapiens
aggggttgtaaaagtgatgaatgtagacagttcttcactaagaaatcaaatcttattcaacagcaaaggatccacactgaagagagaccctgtaaatacaaagtttgtggcaagttcagtgggaacactagcctctatctccagaagatccacactggggagaacccttataaacactatgaatgtgatcagtgtggcaagactttcatttggagctcagatcttagtaaacatcagaggcttcatactggagggaaatccacaagcgtaatgtatgcaataagacttcagaattctgaccatctcaaacatcagagaatacatactggagagaaaccctacaaatatcttatgcatgggaaagcttttaatcagagcccactctttcttaagcatcatagagtacacactgagaaaccttatcactttaaggaatgtggagaaagctttagtcacaatggaggcctgacatcgtatgagagactgcacacaagagagaagtcttat

SEQ ID NO: 45533 - DNA, 1112 bp, Homo Sapiens
atgcgccctgagggctcgctgacctaccgggtgccagagaggctgcggcagggtttctgtggcgtgggtcgggcagcacaggccttggtgtgtgcgagtgccaaggagggcaccgccttcaggatggaggctgtgcaggagggggcggccggggtggagagtgagcaggcggctttgggggaggaggcggtgctgctgttggatgacataatggcggaggtggaggtggtggcggaggaggagggcctcgtggagcggcgggaggaggcccagcgggcacagcaggctgtgcctggccctgggcccatgaccccagagtctgcactggaggagctgctggccgttcaggtggagctggagccggttaatgcccaagccaggaaggccttttctcggcagcgggaaaagatggagcgggcgcaagccccacctagaccgcagaggcgccgtcatccagagcgtccctggcttctgggccaatgttattgcaaaccacccccagatgtcagccctgatcactgacgaagatgaagacatgctgagctacatggtcagcctggaggtggaagaagagaagcatcctgttcatctctgcaagatcatgttgttctttcggagtaacccctacttccagaataaagtgattaccaaggaatatctggtgaacatcacagaatacagggcttctcattccactccaattgagtggtatccggattatgaagtggaggcctatcgccgcagacaccacaacagcagccttaacttcttcaactggttctctgaccacaacttcgcaggatctaacaagattgctgagatcctatgtaaggacctgtggcgcaatcccctgcaatactacaagaggatgaagccacctgaagagggaacagagacgtcaggggactcccagttgttgagttgaatatgatggagcatcagattttacctaatacagcagaactcctaaaaagttacagccatatgcaggacggcagtactcagcatggtcttatgcacaggaactaaaggaaaaagagatcgagtcacaaaaattcaggaagagggggtaaatgtggattgtatggaatgaaaaataaacattctcaagg

SEQ ID NO: 45534 - DNA, 834 bp, Homo Sapiens
gttcctgttttacagtggatgattcaacagccacacaaagcagcaacattttttggatgcattgggatagataaatttggggagatcctgaagagaaaagctgctgaagcccatgtggatgctcattactacgagcagaatgagcagccaacaggaacttgtgctgcatgcatcactggtgacaacaggtccctcatagctaatcttgctgctgccaattgttataaaaaggaaaaacatcttgatctggagaaaaactggatgttggtagaaaaagcaagagtttgttatatagcaggcttttttcttacagtttccccagagtcagtattaaaggtggctcaccatgcttctgaaaacaacaggattttcactttgaatctatctgcaccgtttattagccagttctacaaggaatcattgatgaaagttatgccttatgttgatatactttttggaaatgagacagtgagttacctttcctttttcaaaagaacctgggggttttttgtttacattaaagagatagccaaaaagacacaagccctgccaaagatgaactcaaagaggcagcgaatcgtgatcttcacccaagggagagatgacactataatggctacagaaagtgaagtcactgcttttgctgtcttggatcaagaccagaaagaaattattgataccaatggagctggagatgcatttgttggaggttttctgtctcaactggtctctgacaagcctctgactgaatgtatccgtgctggccactatgcagcaagcatcataattagacggactggctgcacctttcctgagaagccagacttccactga

SEQ ID NO: 45535 - DNA, 348 bp, Homo Sapiens
atgacaaagaaaagaaggaacaatggtcgtgccaaaaagggccgcggccacgtgcagcctattcgctgcactaactgtgcccgatgcgtgcccaaggacaacgccattaagaaattcgtcattcgaaacatagtggaggccgcagcagtcagggacatttctgaagcgagcgtcttcgatgcctatgtgcttcccaagctgtatgtgaagctacattactgtgtgagttgtgcaattcacagcaaagtagtcaggaatcgatctcgtgaagcccgcaaggaccgaacacccccacctcgatttagacctgcgggtgctgccccacgtcccccaccaaagcccatgtaa

SEQ ID NO: 45536 - DNA, 1095 bp, Homo Sapiens
atggatgccaattcaaaagacaagccccctgaaaccaaggagtctgcaatgaataatgctggaaatgcctctttcattttgggaactgggaagattgtgactcctcagaagcatgccgaattacctcctaatccttgcacaccagatacttttaaatcacctttgaacttttccacagtaaccgtagagcaattgggaattacacctgaaagctttgttaggaactctgcaggaaagtcatcatcctaccttaaaaaatgtagacgacgttctgcagtcggtgctcggggctctcctgaaacaaaccatctgattcgtttcattgctcggcagcaaaatataaagaatgctaggaaatctcctttggcacaagattctccttcccagggcagccctgcactgtatcgaaatgttaacactttaagagaacgaatatcagccttccagtcagcttttcactccataaaggaaaatgagaaaatgaccggctgtctggaattctcagaggcaggaaaagagtccgagatgacagacttgaccagaaaggaaggtctcagcgcttgccagcagtctgggttccctgcagtgttgtcctccaaacgtcggagaatatcctatcagagagactctgatgaaaatctgacggatgctgaaggaaaagtaattggtctccagatattcaatattgatacagacagagcatgtgcagttgaaacttctgtagatctttctgagatatcatctaaacttggttcaacacagtctggatttttagttgaagagtctcttcccctttcagagctcacagagacttcaaatgcactaaaggttgctgactgtgtagtgggcaaaggatcaagtgatgccgtttcgcctgacacgttcacagcagaagtgagctcagacgcagtccctgatgtcaggtcaccagctactccagcctgcaggagggaccttcccacccccaagacctttgtacttcgttctgtactgaagaaaccctctgttaagatgtgtctagagagcttacaggtaagaagagagttaaatttcctaaagcaaatgaataaaaatgcattttgcttcaaagtaata

SEQ ID NO: 45537 - DNA, 627 bp, Homo Sapiens
aggccggccgacttcaagttgcaggtcatcattatcggctcccgcggcgtgggcaagaccagcctgatggagcgcttcaccgacgacaccttctgcgaggcctgcaagtccaccgtgggtgttgacttcaaaatcaaaactgtagagctaagaggaaagaaaattagattacagatctgggacacagcaggtcaggagagattcaacagcattacctcagcttattacagaagtgccaaggggatcatattagtatatgatatcactaagaaggagacatttgatgatttgccgaaatggatgaagatgattgataagtatgcttcagaagatgcagagcttctcttagttggaaataagttggactgtgaaacggacagagaaatcaccaggcagcagggggaaaagtttgcacagcagatcactgggatgcggttctgtgaagcaagtgccaaggataacttcaatgtggacgagatatttttgaaacttgtcgatgacattctgaaaaagatgcctctggatattttaaggaatgagttgtccaatagtatcctgtcgttacaaccagagcctgagataccgccagaactgcctccaccaagaccacatgtccgatgctgttga

SEQ ID NO: 45538 - DNA, 801 bp, Homo Sapiens
ggaattctgagagctgattcctgccttgtcttctccactgttcctggaggaatccgagaagagcagagcggagggagccccagacacggtccgcgggagagctgtggggcttggtgagtgtttcgtggcctctcgggttggtcagcacccccagccagctggcccaggacccctctacagaagtccaggagagcaggcgtcaccaagatgtccaaccccttcctgaagcaagtcttcaacaaggacaagacattccgccccaagcgcaagtttgagccaggcacccagcgcttcgagctgcacaagaaggcgcaggcgtcgctgaacgccgggctggacctgcggctggccgtgcagttgcccccgggcgaggacctgaacgactgggtggctgttcacgtggtggacttctttaaccgcgtcaacctcatctacggcaccatcagcgacggctgcacggagcagtcctgccccgtcatgtcggggggccccaagtatgagtaccgctggcaggatgagcataagttccggaagcccacggcactctccgcgcccaggtacatggacctgctgatggactggatcgaggcgcagatcaacaacgaggacctcttccccaccaacgttgcagagaatgacaggatcagcatcaggcctggagtccttcgcagaggagacaagcacccctgccagtgctgggcccagtgttctcagtggtttcagaatcactgccatggagcccctgggcccaccaggatcatcaccccgttggcgggaccccctgcccagctcgatgtgtaa

SEQ ID NO: 45539 - DNA, 930 bp, Homo Sapiens
atggtggattactatgaagttctaggactgcaaagatatgcttcacctgaggacattaaaaaagcttatcataaagtggcacttaaatggcaccctgataaaaatccagaaaataaagaagaagcagagagaaaattcaaagaagtagctgaggcatacgaggtattatcaaatgatgagaaacgggacatttatgataaatatggcacagaaggattaaacggaggtggaagtcattttgatgatgaatgtgagtacggcttcacattccataagccagatgatgtttttaaagaaatttttcatgaaagggatccattttcttttcacttctttgaagactcgcttgaggacctgttaaatcgtccaggaagctcctatggaaacagaaacagagatgcaggatactttttctccactgccagtgaatatccaatttttgagaaattttcttcatatgatacaggatatacatcacagggttcattggggcatgaaggccttacttctttctcttccctggcttttgataatagtgggatggacaactacatatctgttacaacttcagacaaaatcgttaatggcagaaatattaatacaaagaaaattattgaaagtgatcaagaaagagaagctgaagataatggagagttgacattttttcttgtaaatagtgtggccaatgaagagggctttgcaaaagaatgcagctggagaacacagtcattcaacaactattcaccaaattctcacagctccaaacatgtatctcaatatactttcgtggacaatgatgagggaggtatatcttgggttaccagcaacagagatccccctattttctcagcaggagtcaaagagggtggtaagaggaaaaaaaagaagcgtaaagaggtgcaaaagaagtctaccaaaaggaattgttaa

SEQ ID NO: 45540 - DNA, 3852 bp, Homo Sapiens
gagcggcggcggcggggcgctggggcggagactgcgacccggagccgcccggactgacggagcccactgcggtgcgggcgttggcgcgggcacggaggacccgggcaggcatcgcaagcgaccccgagcggagccccggagccatggccctgagcgagctggcgctggtccgctggctgcaggagagccgccgctcgcggaagctcatcctgttcatcgtgttcctggcgctgctgctggacaacatgctgctcactgtcgtggtccccatcatcccaagttatctgtacagcattaagcatgagaagaatgctacagaaatccagacggccaggccagtgcacactgcctccatctcagacagcttccagagcatcttctcctattatgataactcgactatggtcaccgggaatgctaccagagacctgacacttcatcagaccgccacacagcacatggtgaccaacgcgtccgctgttccttccgactgtcccagtgaagacaaagacctcctgaatgaaaacgtgcaagttggtctgttgtttgcctcgaaagccaccgtccagctcatcaccaaccctttcataggactactgaccaacagaattggctatccaattcccatatttgcgggattctgcatcatgtttgtctcaacaattatgtttgccttctccagcagctatgccttcctgctgattgccaggtcgctgcagggcatcggctcgtcctgctcctctgtggctgggatgggcatgcttgccagtgtctacacagatgatgaagagagaggcaacgtcatgggaatcgccttgggaggcctggccatgggggtcttagtgggcccccccttcgggagtgtgctctatgagtttgtggggaagacggctccgttcctggtgctggccgccctggtactcttggatggagctattcagctctttgtgctccagccgtcccgggtgcagccagagagtcagaaggggacacccctaaccacgctgctgaaggacccgtacatcctcattgctgcaggctccatctgctttgcaaacatgggcatcgccatgctggagccagccctgcccatctggatgatggagaccatgtgttcccgaaagtggcagctgggcgttgccttcttgccagctagtatctcttatctcattggaaccaatatttttgggatacttgcacacaaaatggggaggtggctttgtgctcttctgggaatgataattgttggagtcagcattttatgtattccatttgcaaaaaacatttatggactcatagctccgaactttggagttggttttgcaattggaatggtggattcgtcaatgatgcctatcatgggctacctcgtagacctgcggcacgtgtccgtctatgggagtgtgtacgccattgcggatgtggcattttgtatggggtatgctataggtccttctgctggtggtgctattgcaaaggcaattggatttccatggctcatgacaattattgggataattgatattctttttgcccctctctgcttttttcttcgaagtccacctgccaaagaagaaaaaatggctattctcatggatcacaactgccctattaaaacaaaaatgtacactcagaataatatccagtcatatccgataggtgaagatgaagaatctgaaagtgactgagatgagatcctcaaaaatcatcaaagtgtttaattgtataaaacagtgtttccagtgacacaactcatccagaactgtcttagtcataccatccatccctggtgaaagagtaaaaccaaaggttattatttcctttccatggttatggtcgattgccaacagccttataaagaaaaagaagcttttctaggggtttgtataaatagtgttgaaactttattttatgtatttaattttattaaatatcatacaatatattttgatgaaataggtattgtgtaaatctataaatatttgaatccaaaccaaatataattttttaacttacattaacaaacatttgggcaaaaatcatattggtaatgagtgtttaaaattaaagcacacattatctctgagactcttccaacaaagagaaactagaatgaagtctgaaaaacagaatcaagtaagacagcatgttatatagtgacactgaatgttatttaacttgtagttactatcaatatatttatgcgttaaacagctagttctctcaagtgtagaggacaagaacttgtgtcagttatcttttgaatccataaatcttagctggcattagttttctatgtaatcacctacctagagagagttgtaaattatatgttaacatgttatctggttggcagcaaacactaaagccaataaaggaaaaacagtaaatgttccgaaagcagagaaaagcaaccaaacatattgttatgaactaaaagctttccctttaagatgcatacttgtcttactggatgaagaaaattgagggtacatgtaccttatactgtcaaggttgtttaaacatgataaggttaatcgccatctacttcaagttttagaaaaggaaacaagaagctgaaaacagctgctctgactttaatatctgactatatctttgatctgtttgcaggtcatccaagtgttttctaggaatatatttattttaggttgtctgaaactactattttttagactcctgaaagttgttcacatcaatgtgaagacaaattttaaatgaaaatgaagaatgaaattatgtcttgaatcatatattaagaagtaaaaataatagtgatcaggcagaaaagaaaaatggaacatctaaaaatgtatgtgctaactatatcatccagtgtgcagtgttgtgtatttttctaagcatgacaacattgatgtgccttttcagtgtaacagcaaatactgttagtgaacattgtcaatttatgtcattttgttaagagatatgactggagtgtgcagtgtggaatgtctctaatactacttgtgaatcctgcagttctataatcataaacaaaaattacttagtttcgttaagctaagattgtgtttgtgttaacttcgacatcaaggagcaaagaactttagaacagactcctcaatcttgtgactttcttattctctaggaaagtaacacttcgtttcatgaagcttttctgtggggcttcgattatttcaagtctggtttctaagtgcagtgtgtttgaagcaaacgaacttccaactcacttatttggcattgggcaacttggccaagtctgccactttggaagatggctctggaggaaactctcatatggctaaaaaggcaggctagtttcttacttctacaggggtagagccttaaaaaagaacgtgctacaaattggttctctttgagggtttctggttctccctgcccccaataccatatactttattgcaattttatttttgcctttacggctctgtgtctttctgcaagaaggcctggcaaaggtatgcctgctgttggtccctcgggataagataaaatataaataaaaccttcagaactgttttggagcaaaagatagcttgtacttggggaaaaaaattctaagttcttttatatgactaatattcttggttagcaagactggaaagaggtgtttttttaaaatgtacataccagaacaaagaacatacagctctctgaacatttattttttgaacagaggtggtttttatgtttggacctggtaatacagatacaaaaactttaatgaggtagcaatgaatattcaactgtttgactgctaagtgtatctgtccatattttagcaagtttacttaataaatcttctgaaccatg

SEQ ID NO: 45541 - DNA, 231 bp, Homo Sapiens
atggatttgaggcgtgtgaaggaatatttctcctggctctactatcaataccaaatcattagctgctgtgctgttttagagccctgggagcgatctatgtttaacaccatcttactaaccattattgctatggtggtatacactgcctatgtctttattccaatccacattcgcctggcttgggaatttttctcaaaaatatgtggatatcacagtacaatttctaattga

SEQ ID NO: 45542 - DNA, 187 bp, Homo Sapiens
ggggacggcaaaacagaacagaaaggcggagataaaaagaggggtgttaaaagaccacgagaagatcatggccgtggatattttgagtacattgaagagaacaagtatagcagagccaaatctcctcagccacctgttgaagaagaagatgaacacttcgatgacacagtggtttgtcttgatactt

SEQ ID NO: 45543 - DNA, 879 bp, Homo Sapiens
caggaggatgtggccttcaacctcatcatcctgtccctcaccgaggggctcggcctcggtgggctgctggggaatggggcagtcctctggctgctcagctccaatgtctacagaaaccccttcgccatctacctcctggacgtggcctgcgcggatctcatcttccttggctgccacatggtggccatcgtccccgacttgctgcaaggccggctggacttcccgggcttcgtgcagaccagcctggcaacgctgcgcttcttctgctacatcgtgggcctgagtctcctggcggccgtcagcgtggagcagtgcctggccgccctcttcccagcctggtactcgtgccgccgcccacgccacctgaccacctgtgtgtgcgccctcacctgggccctctgcctgctgctgcacctgctgctcagcggcgcctgcacccagttcttcggggagcccagccgccacttgtgccggacgctgtggctggtggcagcggtgctgctggctctgctgtgttgcaccatgtgtggggccagccttatgctgctgctgcgggtggagcgaggcccccagcggcccccaccccggggcttccctgggctcatcctcctcaccgtcctcctcttcctcttctgcggcctgcccttcggcatctactggctgtcccggaacctgctctggtacatcccccactacttctaccacttcagcttcctcatggccgccgtgcactgcgcggccaagcccgtcgtctacttctgcctgggcagtgcccagggccgcaggctgcccctccggctggtcctccagcgagcgctgggagacgaggctgagctgggggccgtcagggagacctcccgccggggcctggtggacata

SEQ ID NO: 45544 - DNA, 1537 bp, Homo Sapiens
acggaaaactcgctgctgccccaacctggcttgacaggcttggtctctgcaagtggctctcagccccttcttctttcctgcctcaccttccaattcgtttgccgccgccgtcccgcagctgctgtttccggagttgccccttccccatgttccggggcaggagtccgcaaagcgaagatccgcccgccggttcctcatcatgtccgaactgactaaagagctgatggagctggtgtggggcaccaagagcagccccggtctctcggacaccattttctgccgctggacgcaagggtttgtgtttagtgaatcagagggatctgcattagaacagtttgaaggtggcccctgtgctgttattgcacctgttcaggcatttcttttgaagaagctcctgttttcttcggagaagtcttcttggcgggattgttcagaggaagagcagaaggaactcctttgtcataccttgtgtgatattttagaaagtgcttgttgtgaccactctggatcatactgcttggtttcatggttaagaggaaagacaactgaggaaactgctagtatttctgggagtcctgcagagtctagttgccaagtggaacattcttctgccttggctgtcgaagagcttggctttgagcgatttcatgcattaattcaaaaaagatcgttcagaagtttaccagaattaaaagatgctgtcttggaccagtattcaatgtggggaaataaatttggagtattgctttttctgtattctgtattactgacaaagggcattgaaaacataaaaaacgaaattgaagatgcaagtgaacccttgatagatcctgtatatggacatggcagccaaagtttaattaatctcctgctgacgggacatgctgtttctaatgtatgggatggtgatagagagtgctcaggaatgaaacttcttggtatacatgaacaagcagcagtaggatttttaacactaatggaagctttaagatactgtaaggttggttcttacttgaaatctccaaaattccctatttggattgttggcagtgagactcacctcaccgtattttttgccaaggatatggctttagttgcccctgaagctccttcagaacaagccagaagagtttttcaaacctacgacccagaagataatggattcatacccgattcacttctggaagatgtgatgaaagcattggaccttgtttcagatcctgaatatataaatctcatgaagaataaattagatccagaaggattaggaatcatattattgggcccatttcttcaagaattttttcctgatcagggctccagtggtccagaatcttttactgtctaccactacaatggattgaagcagtcaaattataatgaaaaggtcatgtacgtagaagggactgcagttgtgatgggttttgaagatcccatgctacagacagatgacactcctattaaacgctgtctgcaaaccaaatggccatacattgagttactctggaccacagatcgctctccttcactaaattaa

SEQ ID NO: 45545 - DNA, 408 bp, Homo Sapiens
cagacacccggcggcagttcctgcaggaaggaggctgtcctgccacgcctgcgggtgacccggcctctggtgccagagcctgccatccttcctgtttgtgctgccaggctggcagggtcccttgccaccgacctcagccgcagccacagcctgctccctccctgggtggatttgaaggagcctcccccaccctccgcccctagcttgctccttgaggaccctgggcagggtggctgccatggggcccaatcgtgcgtgggaacctgcgagctggcaaacggggctcgggggttttgcccagaaatgggtcagaacgaaagcctctcagaggaaagaaaagggcatgagtcaaagagaaagtcggggggcaggggctccccctcatctcaccccacccaggcctcctga

SEQ ID NO: 45546 - DNA, 2089 bp, Homo Sapiens
gcggccgctccgtgtgccctggactcgccgcccgcggctcggaagctggagagtcagcgacggggcccgactgcgggaccgagggctgcaagaagaagcgaacaaatagtccccagcgcctcctctggatgcggtcgcgtctgtggtcctggcagccgctgggcgggccaggccaggtcgggccgggccgagccgggcacatggacctgggcctgcgggctctaattgcggcgcttatgttgatgattttttttttaatcacagcagcccccagtttagcggactgatttactcccggtattggtaaatatgatcacgtgggccgcgcgaccaatggtggaggctgcagcctgcgaactagtcggtggctcgggcgccggcggggagctgctcggcggcggacagtgtaatgttgggtgggagtgcgggacgcctcaaaatgtcttccagtggcaccctcagcaactactacgtggactcgcttataggccatgagggcgacgaggtgttcgcggcgcgcttcgggccgccggggccaggcgcgcagggccggcctgcaggtgtggctgatggcccggccgccaccgccgccgagttcgcctcgtgtagttttgcccccagatcggccgtgttctctgcctcgtggtccgcggtgccctcccagcccccggcagcggcggcgatgagcggcctctaccacccgtacgttcccccgccgcccctggccgcctctgcctccgagcccggccgctacgtgcgctcctggatggagccgctgcccggcttcccgggcggtgcgggcggtggcggtggtggtggaggcggcggtccgggccgcggtcccagccctggccccagcggcccagccaacgggcgccactacgggattaagcctgaaacccgagcggccccggcccccgccacggccgcctccaccacctcctcctcctccacttccttatcctcctcctccaaacggactgagtgctccgtggcccgggagtcccaggggagcagcggccccgagttctcgtgcaactcgttcctgcaggagaaggcggcagcggcgacggggggaaccgggcctggggcagggatcggggccgcgactgggacgggcggctcgtcggagccctcagcttgcagcgaccacccgatcccaggctgttcgctgaaggaggaggagaagcagcattcgcagccgcagcagcagcaacttgacccaaacaaccccgccgcgaactggatccacgctcgctccacccggaaaaagcgctgtccctacaccaaataccagacgcttgagctggagaaagaattcctcttcaacatgtacctcacccgggaccggcgctacgaggtggccaggattctcaacctaacagagagacaggtcaaaatctggtttcagaaccgtaggatgaaaatgaaaaagatgagcaaggagaaatgccccaaaggagactgacccggcgcggtgctggcgggagcgctcaagggcagcggatttgttgttgttgctgttttcctttgtgggtgtttggtgcttgatttccagaaactctccagcgacttggacttcttcttctttttttttttctttttagatagaagtgactgtgtggttggtctctgaggtatttgggggactctgtatttgctcgtttacgtgttggaaaaaccaagtggctttggggtttcgccctatcccactccctctctttcctgctccattggttccttaagaaatgctatattttgtgagtgcaagctggcttggggagccctctcttgtgtaaatgtcccccatgtttctgaaaagtgctgtagtttagtcccctcacccccagcactgcccaaacaggggccaagtgcgccccaattccaagaatgaaggcagagcgacaacagtgcggacaccccggctgctagcccacggtgaagcccggcggggttgcccaccagttgcgaaagccccctttcctcagggagcacgcgggacctcggtggagatctccagtgaggcttagaggagcccagggcctcgggcgggttggggtttgtcctcagtgcattggacgcgctgctc

SEQ ID NO: 45547 - DNA, 1248 bp, Homo Sapiens
atgactggggagcgacccagcacggcgctcccggacagacgctgggggccgcggattctgggcttctggggaggctgtagggtttgggtgtttgccgcgatcttcctgctgctgtctctggcagcctcctggtccaaggctgagaacgacttcggtctggtgcagccgctggtgaccatggagcaactgctgtgggtgagcgggagacagatcggctcagtggacaccttccgcatcccgctcatcacagccactccgcggggcactcttctcgcctttgctgaggcgaggaaaatgtcctcatccgatgagggggccaagttcatcgccctgcggaggtccatggaccagggcagcacatggtctcctacagcgttcattgtcaatgatggggatgtccccgatgggctgaaccttggggcagtagtgagcgatgttgagacaggagtagtatttcttttctactccctttgtgctcacaaggccggctgccaggtggcctctaccatgttggtatggagcaaggatgatggtgtttcctggagcacaccccggaatctctccctggatattggcactgaagtgtttgcccctggaccgggctctggtattcagaaacagcgggagccacggaagggccgcctcatcgtgtgtggccatgggacgctggagcgggacggagtcttctgtctcctcagcgatgatcatggtgcctcctggcgctacggaagtggggtcagcggcatcccctacggtcagcccaagcaggaaaatgatttcaatcctgatgaatgccagccctatgagctcccagatggctcagtcgtcatcaatgcccgaaaccagaacaactaccactgccactgccgaattgtcctccgcagctatgatgcctgtgatacactaaggccccgtgatgtgaccttcgaccctgagctcgtggaccctgtggtagctgcaggagctgtagtcaccagctccggcattgtcttcttctccaacccagcacatccagagttccgagtgaacctgaccctgcgatggagcttcagcaatggtacctcatggcggaaagagacagtccagctatggccaggccccagtggctattcatccctggcaaccctggagggcagcatggatggagaggagcaggccccccagctctacgtcctgtatgagaaaggccggaaccactacacagagagcatctccgtggccaaaatcagtgtctatgggacactctga

SEQ ID NO: 45548 - DNA, 2592 bp, Homo Sapiens
tgcccggcgcggagagcggcgagcgcagccatgccccaggccgcctccggggcagcagcagcggcggccggggccgaggcgcgggccgggggcgccggggggccggcggcggcccgggcgggacgatgaagcggcagaacgtgcgcacgctggcgctcatcgtgtgcaccttcacctacctgctggtgggcgccgcggtcttcgacgcgctggagtcggagcccgagctgatcgagcggcagcggctggagctgcggcagcaggagctgcgggcgcgctacaacctcagccagggcggctacgaggagctggagcgcgtcgtgctgcgcctcaagccgcacaaggccggcgtgcagtggcgcttcgccggctccttctacttcgccatcaccgtcatcaccaccatcggctacgggcacgcggcacccagcacggatggcggcaaggtgttctgcatgttctacgcgctgctgggcatcccgctcacgctcgtcatgttccagagcctgggcgagcgcatcaacaccttggtgaggtacctgctgcaccgcgccaagaaggggctgggcatgcggcgcgccgacgtgtccatggccaacatggtgctcatcggcttcttctcgtgcatcagcacgctgtgcatcggcgccgccgccttctcccactacgagcactggaccttcttccaggcctactactactgcttcatcaccctcaccaccatcggcttcggcgactacgtggcgctgcagaaggaccaggccctgcagacgcagccgcagtacgtggccttcagcttcgtctacatccttacgggcctcacggtcatcggcgccttcctcaacctcgtggtgctgcgcttcatgaccatgaacgccgaggacgagaagcgcgacgccgagcaccgcgcgctgctcacgcgcaacgggcaggcgggcggcggcggagggggtggcagcgcgcacactacggacaccgcctcatccacggcggcagcgggcggcggcggcttccgcaacgtctacgcggaggtgctgcacttccagtccatgtgctcgtgcctgtggtacaagagccgcgagaagctgcagtactccatccccatgatcatcccgcgggacctctccacgtccgacacgtgcgtggagcagagccactcgtcgccgggagggggcggccgctacagcgacacgccctcgcgacgctgcctgtgcagcggggcgccacgctccgccatcagctcggtgtccacgggtctgcacagcctgtccaccttccgcggcctcatgaagcgcaggagctccgtgtgactgccccgaggggcctggagcacctgggggcgcgggcgggggacccctgctgggaggccaggagactgcccctgctgccttctgcccagtgggaccccgcacaacatccctcaccactctcccccagcacccccatctccgactgtgcctgcttgcaccagccggcaggaggccgggctctgaggacccctggggcccccatcggagccctgcaaattccgagaaatgtgaaacttggtggggtcagggaggaaaggcagaagctgggagcctcccttccctttgaaaatctaagaagctcccagtcctcagagaccctgctggtacccagacccccaccttcggaggggacttcatgttccgtgtacgtttgcatctctatttatacctctgtcctgctaggtctcccaccttcccttggttccaaaagccagggtgtctatgtccaagtcacccctactcagccccactccccttcctcatccccagctgtgtctcccaacctcccttcgtgttgttttgcatggctttgcagttatggagaaagtggaaacccagcagtccctaaagctggtccccagaaagcaggacagaaagaaggagggacaggcaggcagcaggaggggcgagctgggaggcaggaggcagcggcctgtcagtctgcagaatggtcgcactggaggttcaagctaactggcctccagccacattctcatagcaggtaggacttcagccttccagacactgcccttagaatctggaacagaagacttcagactcaccataattgctgataattacccactcttaaatttgtcgagtgatttttagcctctgaaaactctatgctggccactgattcctttgagtctcacaaaaccctacttaggtcatcagggcaggagttctcactcccattttacagatgagaatactgaggcctggacaggtgaagtgaccagagagcaaaaggcaaaggggtgggggctgggtgcagtggctcacacctgtattcccaacacttttggaggctgaggttggaggattgcttgagcccaggaatttgagaccagcctaggtgacatagtgagaccccatctctacaaaaaataaaaaattaaccaggtgtggtggcacgtgcctgggagtcccagcgacttgggaggctgaggtgggaggattgtttgagcctgggaggtcgaggctgtagtgagccctgattgcaccactgtactccagcctgggtgacagggcaagaccctgtctcaaaaaaaaaaaaaaa

SEQ ID NO: 45549 - DNA, 402 bp, Homo Sapiens
gcccctcattttggcagaacttaccatgtcgaccagccgcaaattaaagagtcatggcatgaggaggagcaagagccgatctcctcacaagggagtcaagagaggtggcagcaaaagaaaataccgtaagggcaacctgaaaagtaggaaacggggcgatgacgccaatcgcaattaccgctcccacttgtgagcccccagcgggctctgccctggtgcgcttcacacagcaccaagcagcaacaagaacagcagaaggggaactgccaaggagacctgatgttagatcaaagccagagaggagcctatggaatgtggatcaaatgccagttgtgacgaaatgaggaatgtatatgttggctgtttttccccaacatctcaataaaactttgaaagcagaaa

SEQ ID NO: 45550 - DNA, 849 bp, Homo Sapiens
atgttccttgtgaattgcttgcatccagcattaagggctggtttttatcttttatttttccaatcctctttccttctcaaggtgtccaagacacagagagccacggaatctcacaggtgtctgagaattcctcctcctgggactctcagaggatccagaactgcagccgtcctcgctttgctgtccctgtccctgtccatgtatctggtcacggtgctgaggaacctgctcagcatcctggctgtccgctctgactcccccctccacacccccatatacttcttcctctccaacctgtgctgggctgacatcggtttcacctcggccacagttcccaagatgattgtggacatgcagtcgcatagcagagtcatctctcatgcaggctgcctgacgcagatgtctttcttggtcctttttgcatgtatagaaggcatgctcctgactgtgatggcctatgactgctttgtagccatctgtcaccctctgcactacccagtcatcgtgaatcctcacctctgtgtcttcttcgttttggtgtcctttttccttagcctgttggattcccagctgcacagttggattgtgttacaattcaccatcatcaagaatgtggaaatctctaatttagtctgtgacccctctcaacttctcaaatttgcctgttctgacagcatcatcaatagcatattcatatatttccatagtactatgtttggttttcttcccatttcagggatccttttgtcttactataaaatcatcccctccattctaaggatttcatcatcagatgggaagtataaagccttctccacctgtggctctcacctagcagttgtttgctga

SEQ ID NO: 45551 - DNA, 4906 bp, Homo Sapiens
cccggctttatatctatatatacacaggtatatgtgtatattttatataattgttctccgttcgttgatatcaaagacagttgaaggaaatgaattttgaaacttcacggtgtgccaccctacagtactgccctgacccttacatccagcgtttcgtagaaaccccagctcatttctcttggaaagaaagttattaccgatccaccatgtcccagagcacacagacaaatgaattcctcagtccagaggttttccagcatatctgggattttctggaacagcctatatgttcagttcagcccattgacttgaactttgtggatgaaccatcagaagatggtgcgacaaacaagattgagattagcatggactgtatccgcatgcaggactcggacctgagtgaccccatgtggccacagtacacgaacctggggctcctgaacagcatggaccagcagattcagaacggctcctcgtccaccagtccctataacacagaccacgcgcagaacagcgtcacggcgccctcgccctacgcacagcccagctccaccttcgatgctctctctccatcacccgccatcccctccaacaccgactacccaggcccgcacagtttcgacgtgtccttccagcagtcgagcaccgccaagtcggccacctggacgtattccactgaactgaagaaactctactgccaaattgcaaagacatgccccatccagatcaaggtgatgaccccacctcctcagggagctgttatccgcgccatgcctgtctacaaaaaagctgagcacgtcacggaggtggtgaagcggtgccccaaccatgagctgagccgtgaattcaacgagggacagattgcccctcctagtcatttgattcgagtagaggggaacagccatgcccagtatgtagaagatcccatcacaggaagacagagtgtgctggtaccttatgagccaccccaggttggcactgaattcacgacagtcttgtacaatttcatgtgtaacagcagttgtgttggagggatgaaccgccgtccaattttaatcattgttactctggaaaccagagatgggcaagtcctgggccgacgctgctttgaggcccggatctgtgcttgcccaggaagagacaggaaggcggatgaagatagcatcagaaagcagcaagtttcggacagtacaaagaacggtgatggtacgaagcgcccgtttcgtcagaacacacatggtatccagatgacatccatcaagaaacgaagatccccagatgatgaactgttatacttaccagtgaggggccgtgagacttatgaaatgctgttgaagatcaaagagtccctggaactcatgcagtaccttcctcagcacacaattgaaacgtacaggcaacagcaacagcagcagcaccagcacttacttcagaaacagacctcaatacagtctccatcttcatatggtaacagctccccacctctgaacaaaatgaacagcatgaacaagctgccttctgtgagccagcttatcaaccctcagcagcgcaacgccctcactcctacaaccattcctgatggcatgggagccaacattcccatgatgggcacccacatgccaatggctggagacatgaatggactcagccccacccaggcactccctcccccactctccatgccatccacctcccactgcacacccccacctccgtatcccacagattgcagcattgtcagtttcttagcgaggttgggctgttcatcatgtctggactatttcacgacccaggggctgaccaccatctatcagattgagcattactccatggatgatctggcaagtctgaaaatccctgagcaatttcgacatgcgatctggaagggcatcctggaccaccggcagctccacgaattctcctccccttctcatctcctgcggaccccaagcagtgcctctacagtcagtgtgggctccagtgagacccggggtgagcgtgttattgatgctgtgcgattcaccctccgccagaccatctctttcccaccccgagatgagtggaatgacttcaactttgacatggatgctcgccgcaataagcaacagcgcatcaaagaggagggggagtgagcctcaccatgtgagctcttcctatccctctcctaactgccagccccctaaaagcactcctgcttaatcttcaaagccttctccctagctcctccccttcctcttgtctgatttcttaggggaaggagaagtaagaggctacctcttacctaacatctgacctggcatctaattctgattctggctttaagccttcaaaactatagcttgcagaactgtagctgccatggctaggtagaagtgagcaaaaaagagttgggtgtctccttaagctgcagagatttctcattgacttttataaagcatgttcacccttatagtctaagactatatatataaatgtataaatatacagtatagatttttgggtggggggcattgagtattgtttaaaatgtaatttaaatgaaagaaaattgagttgcacttattgaccattttttaatttacttgttttggatggcttgtctatactccttcccttaaggggtatcatgtatggtgataggtatctagagcttaatgctacatgtgagtgacgatgatgtacagattctttcagttctttggattctaaatacatgccacatcaaacctttgagtagatccatttccattgcttattatgtaggtaagactgtagatatgtattcttttctcagtgttggtatattttatattactgacatttcttctagtgatgatggttcacgttggggtgatttaatccagttataagaagaagttcatgtccaaacgtcctctttagtttttggttgggaatgaggaaaattcttaaaaggcccatagcagccagttcaaaaacacccgacgtcatgtatttgagcatatcagtaacccccttaaatttaataccagataccttatcttacaatattgattgggaaaacatttgctgccattacagaggtattaaaactaaatttcactactagattgactaactcaaatacacatttgctactgttgtaagaattctgattgatttgattgggatgaatgccatctatctagttctaacagtgaagttttactgtctattaatattcagggtaaataggaatcattcagaaatgttgagtctgtactaaacagtaagatatctcaatgaaccataaattcaactttgtaaaaatcttttgaagcatagataatattgtttggtaaatgtttcttttgtttggtaaatgtttcttttaaagaccctcctattctataaaactctgcatgtagaggcttgtttacctttctctctctaaggtttacaataggagtggtgatttgaaaaatataaaattatgagattggttttcctgtggcataaattgcatcactgtatcattttcttttttaaccggtaagagtttcagtttgttggaaagtaactgtgagaacccagtttcccgtccatctcccttagggactacccatagacatgaaaggtccccacagagcaagagataagtctttcatggctgctgttgcttaaaccacttaaacgaagagttcccttgaaactttgggaaaacatgttaatgacaatattccagatctttcagaaatataacacatttttttgcatgcatgcaaatgagctctgaaatcttcccatgcattctggtcaagggctgtcattgcacataagcttccattttaattttaaagtgcaaaagggccagcgtggctctaaaaggtaatgtgtggattgcctctgaaaagtgtgtatatattttgtgtgaaattgcatactttgtattttgattattttttttttcttcttgggatagtgggatttccagaaccacacttgaaacctttttttatcgtttttgtattttcatgaaaataccatttagtaagaataccacatcaaataagaaataatgctacaattttaagaggggagggaagggaaagtttttttttattatttttttaaaattttgtatgttaaagagaatgagtccttgatttcaaagttttgttgtacttaaatggtaataagcactgtaaacttctgcaacaagcatgcagctttgcaaacccattaaggggaagaatgaaagctgttccttggtcctagtaagaagacaaactgcttcccttactttgctgagggtttgaataaacctaggacttccgagctatgtcagtactattcaggtaacactagggccttggaaattcctgtactgtgtctcatggatttggcactagccaaagcgaggcacccttactggcttacctcctcatggcagcctactctccttgagtgtatgagtagccagggtaaggggtaaaaggatagtaagcatagaaaccactagaaagtgggcttaatggagttcttgtggcctcagctcaatgcagttagctgaagaattgaaaagtttttgtttggagacgtttataaacagaaatggaaagcagagttttcattaaatccttttaccttttttttttcttggtaatcccctaaaataacagtatgtgggatattgaatgttaaagggatatttttttctattatttttataattgtacaaaattaagcaaatgttaaaagttttatatgctttattaatgttttcaaaaggtattatacatgtgatacattttttaagcttcagttgcttgtcttctggtactttctgttatgggcttttggggagccagaagccaatctacaatctctttttgtttgccaggacatgcaataaaatttaaaaaataaataaaaactaattaagaaa

SEQ ID NO: 45552 - DNA, 333 bp, Homo Sapiens
tcatcagccacaccactggccccctcttcagactgtcacctatggacttctaatcggccttcatctaacagtctttcctccatctcgggctcggccaccctgccgtggcttagcatcatgcggaaaacccaccgaacacttcttcagtccagcttcctgactgcctccatctccagtggccctttctccacttttgatggggttccaccttggatcttgtcattgccagaactgctccaacccccaaatcaccagttcaaacacctgataataaagccccctctcctccttccaggagatttgttcaaccactaccactgcaacttgttttag

SEQ ID NO: 45553 - DNA, 2563 bp, Homo Sapiens
ggcgtggctgtgggtcccggattagcggcggcatgggacggttgagttggcaggtggcggccgcggcggctgtgggcctggctctgactctggaggcgctgccttgggtgctgcgctggctgcggtccaggcggcggcggccgcggcgcgaggcgctgttcttcccgtctcaggtgacctgtaccgaggccctgctgcgggctccgggcgcggagctggccgagctccccgagggctgcccgtgcggcctgccccacggcgagagcgcgctaagccgcctgctgcgtgccctgctggccgcccgcgccagcctggatctctgcctgttcgccttctccagcccgcagctgggccgcgccgtgcagttgctgcaccagcgtggggtgcgagtgcgggtcgtcaccgactgcgactacatggccctcaacggctcgcaaatcggtctgctgcgcaaggcagggatccaggtccggcacgatcaagacccaggctacatgcatcacaagtttgccatcgtggacaagagggtgctcatcactggctcgctcaactggaccacgcaagccatccagaacaacagggagaatgttctcatcacggaggacgacgagtacgtgcggctttttctggaagaatttgagcgcatctgggaacagtttaaccctacaaagtatacctttttcccaccaaagaaaagtcacggaagctgtgccccacctgtctccagagctggagggagattgctttcatggcacagaacttgcggcacctccagcgaaagccaaacctaaccaagaatggggctgagccctccctgcgggctgctgtgcgttctgagggagggagacctcggcactagaaaaaaatcgttaaactaaagtctcgtctattagaatactaaattgaactaaagaaggttaggaaagggaaatttctgttacttcgggtcagttatttcgggccagacctttttcttgctcctttgccaaaataacttcagtcacgacctgccacggggtgctttcatgagtgtggtccgtatcttggtttggaatcgaaacttctgctacagcacagaaaaggcacagtgcctcttccaggtcgatcccattcccttccctgattctagaaaagtccctcctgctttggctgatgtgggccctttcagcatctccctgagatttcatccctctctccatgtggcacgactggggttggttggggcctacagtctccttgtccctcacagtctgcccctgtcagggctcggtcctcagagtaaggaaaggaaatggaagtcaggaggaagggaagatgtgagtgtgcggtgcgggtggcaaaagcagccttcggggcaaccccgtgagcgtcattgccaccaaaggctggctgttcccttgattccttgcataattgctctttaaaaccagtatgcacgccagtgccaagctcttcagcagcctgtccttgggtagtaagtgctgtggtctgtcaggactgatggccagcagctgtttctatgttgggcttttaactttttttattttatttatttatttatttatcttttttgagatggagtctcactctgtggcccaggctggagtgcagtggcacaacctcggctcactgcatcctctgcctcctgggttcaaacgattgtcctgcctcagcctcccgagtagctgggattacaggtgcctgccacaacacctggctgattttttttttggtatttttagtagagacagggtttcaccatgttggttaggctggtctcaaactcctgacctcaagtgatccaccacttccgcctcccaaagtgctgggattacaggtgtgagccgccatgcccggccgggcttttaacttttaatgtcctaatgttaaggtaattttgttgtgtgtttagaagtgaccttacctttaacacctgtggagttagtgcgtgcacattgctggctcagcgtaacccatcacgggaccggaggagaggagagcggggaagaggagagcagcttcaggccgtggtgtctcccacgtctgtgttcttatttgcagctcagggtttgcattcccaggtagaacaggtgtcgtacactgtgaaatgttccaggttatttgtttataatgtgtgtgtcatatacagatagctccgatgacatctgaagttgtgacttcatcatcttgtcatatttctgtatgatgagccccagggcccatcctgaggtctgctagccatgtgcttagtctcacctccccagcccacgctggcattaccacccagagacccttcagtgctgtgtgtttttcctttttagggttacttttgactcacagtgttaggcaagccagcttggaagttaacttttaaaaaaattcaattgaagctgtaaagtataatatatagattggaagtcaccagaaattgttttagtttgtgaattcccccagtgtatgttctgaaaagaaaatgggagagcttgtaaagcatctcctaaatgcgaagccgcgtgaccctggacttctggcacatctgaataaacatgttcttattctggaa

SEQ ID NO: 45554 - DNA, 498 bp, Homo Sapiens
aatcatccaagttcccgagaaaccagggattatgctccaccacatagagactatgcataccgtgattatggtcattctagttgggatgaacattcctctagaggatatagttatcatgatggctacggtgaggcccttggtagagatcattctgaacatctaagtggaagttcttatagagatgcacttcagagatacgggacctctcatggtgcaccacctgcaagagggcctcggatgtcttatggtggaagcacctgccacgcatatagtaatacacgagatagatatggcagaagttgggagagttactcgagctgtggtgattttcattattgtgatcgtgagcatgtttgcagaaaagaccaaaggaatccgccttctctgggtagggtgctccctgatcctcgtgaagcatatggtagctcaagttatgtggcatctatagtagatggtggggagagtcgatctgaaaaaggagactcgagcagatattaa

SEQ ID NO: 45555 - DNA, 180 bp, Homo Sapiens
atgctcacagataggaagaatcaatatcgtgaaaatggcaataccacccaaagtgacctaaagattcaatgctattcccatcaaactaccattaacattcttcacagaatcagaaaaaaaaactatttcaaaattcatatggaaccaaaaaagagcccatatagccaagacaatccttag

SEQ ID NO: 45556 - DNA, 1374 bp, Homo Sapiens
ggagcctgcggagttcgagaccatgctgctgttctgccccggctgcgggaacgggctgatcgtggaggagggacaacgctgccaccgcttctcctgcaacacgtgcccctacgtgcacaacatcacccgcaaggtaacaaatcggaagtacccaaaactgaaagaagtggatgatgtgcttggtggagcagctgcctgggagaatgttgactctactgcagagtcgtgtcccaaatgcgaacatcctcgtgcttacttcatgcagcttcagacccgctctgcagatgagccgatgaccaccttctacaagtgctgcaatgctcagtgtggacaccgctggagggattagggccaggatggcccagctgccctagtgtgtgcttgccttgtccctcggggtagatgcttagctggcagtatgagttgtgtgtcctgagggtctttgctagtgtggtggaaagataaaccttttgaggtgaagagccagggggtcaggaaatatggcctatctgccaggcagggtggatgaagtcatgaatgtctgggagtttttctgtgtggggaggagacagagacccataactaaatatgctctgtgtaaagtcctattctttcatcttccactttattggcagttgacattcccttactcccaatcaacactcttaaatatttgtactgtttgtaaaacttagtacatgtccctaaatatttaactgttacttgtaaacttgtgtaatttattatttattttaatcaaaattctgaatatttcatttaaatgaaagttggaatattgccttctcagtgttttaaatagcttaagaggtagaaagcaaaccccaaatcacagtgatcccagaatagactacatacttacatttgaacaggctacgaaaatgttaatcaccgggatttcaatttctttctttattcctattcttactcccttattcatttttttgaacctcccctgatttgcttcctcgggttgctttaaatgtataagatactatttatttatttatttattttatttatttatttatttatttaagacagagtcttgttctgtcgcccaggctggagtgcagtggtacgaattcagctcactgcaacctctgccttccgggttcaagggattctcctgtctcagcctcccaagcagctgggactacaggcatgcaccaccacacctgggtaattttgcatttttagtagagatggggtttctccatgttggtcgggctggtctccaactcctgacctcagataatctgtctgcctcggcctcctaaagtgctgggattacaggcgtgagccactgtgtcccaccaatctttacatttaatatgactattttcttattgtttg

SEQ ID NO: 45557 - DNA, 3995 bp, Homo Sapiens
cgaattttcaaagaacatattttccgttcacccccgctggtcttttactgccatcaatacactgttcttggtgcaaatacttcagcctctttattcaaagtatgttttatgtttttgccaaatatgatctctaattgaaagtttatttttggttttggatgaatctgcggagcttaagttgtgagaagaaagggggaacaagacacaatgaaagaaaagtccaaaaatgctgcgcggactaggagggagaaggaaaacagtgaattttatgaactggctaaattactgcctttgccctcggctatcacctcgcagctggacaaagcatccataatcagactcacgaccagctatctcaaaatgagagtggtgttcccagaagggctcggcgaggcgtggggccactcaagtcggaccagccccctggacaacgttggccgagaactgggctcccatctgctccagaccctggatggcttcatcttcgtggtagccccagatgggaagatcatgtacatctcagagacagcctcagtccacttgggtctttctcaggtagagctgaccggaaacagcatttatgaatacattcacccggcagaccacgacgagatgacggcggtgctcaccgcccatcaaccctaccactctcacttcgtgcaggagtatgagatcgagcgctccttcttcctgaggatgaagtgcgtcttggccaagcgtaacgccggcctcacctgtggcggctacaaggtcatccactgcagcggctacttgaagatccgccagtacagcctggacatgtcccccttcgacggctgctaccaaaacgtgggcctggtggccgtgggccactcgctgcctcccagcgccgtcacggagatcaagctacacagcaatatgtttatgttccgcgccagcctggacatgaagctcatctttctggactccagggtggcggagctgacggggtacgaacctcaggacctgattgagaagactctgtaccaccatgtgcacggctgcgacaccttccacctgcgctgcgcgcaccatttgctgctggtgaagggacaggtgaccaccaagtactacaggttcctggcgaaacacggcggctgggtatgggtgcagagctacgcgaccatcgtgcacaacagtcgctcctccaggccacactgtatcgtcagcgtcaactatgtcctcacagacacagaatacaaagggctgcagctctccctggatcagatctcagcctccaaaccagccttctcctataccagcagctccacccccaccatgactgacaacagaaagggggccaaatcccggctctccagctcaaagtcaaaatccaggacttccccataccctcagtattcgggatttcacacagaaagatcggaatctgatcatgacagccagtggggcggaagtcccttgaccgacacggcctctccgcagcttctggaccccgccgataggcctggctcccagcacgacgcatcgtgcgcctacagacagttttcggaccgcagctctctctgctatggctttgcgcttgaccactcgaggctggtggaagagaggcatttccatacccaggcctgtgaaggaggccgatgtgaggcaggcaggtacttcctgggaacgccgcaggccgggagggagccctggtggggctctcgcgcagccttgcccctgacaaaggcctccccagaaagcagagaagcctatgaaaacagcatgcctcacatcgcttcagtccacaggatccatgggcgaggtcattgggatgaagatagtgtggtcagttctccagaccctgggtcggccagtgaatcaggtgaccgatatcgtactgagcagtatcaaagtagcccacatgaacccagcaaaattgaaactcttataagagccactcagcaaatgattaaagaagaagagaacagattacagctaaggaaagccccctcagaccaactggcttccattaatggggctgggaaaaaacactccctgtgttttgcaaactaccaacagcccccaccaacaggtgaagtctgccatggctctgctcttgccaacacttcaccatgtgaccatatccagcagagagagggaaaaatgttgagcccccatgaaaatgactatgacaacagtcccaccgcactatctcggataagtagtcccaattcggatcgcatttcaaaatccagtttgatcctagctaaagactatctgcattcggatatatctcctcatcagacagcaggagaccaccctactgtctctccaaactgctttggctctcaccggcagtattttgacaagcatgcttacacattaactggatatgccctggagcacttatatgacagcgaaaccattagaaactattccttgggctgtaatggctcacactttgatgtaacttcccatctgaggatgcaaccagacccagcacaaggacacaagggaacatctgttataataaccaacggaagctgatgttttgctgaaatattttgttctttaaggatctctgaaacatatttatagtttaataccccattaccagcatttactatgccacagattgttagagagtataacttaagttactgggtatttgatacgtgttcctataaaatcaaagaaaacatagcactagcattcagggttatacacagaaaagggagctaaattgaatacacaaatttcccctctaattatatgggaaccagaatagataaattttgacttgaaaaatattcatgtagatcaagtgtgcatatatactacatgagaggactgatgaatgacaacattgcattgtgactatccagtgatcctcaaacacacaaactattacttacaaactgcggtatacattttacatatggaaatataggctatgtaatgtaaatacatcaaaaatgggtaattttctttgactctgtcacactaaacttcttaacgaaatttccattcccaaaataactgagaaagagagagatacatcttataaactgacttctttgtggtttcaaatcagccagctcatttggttcaggcataaattagagaaatggttctggatatggtgcaaaaatgagttttcacctggtatccattataaacaatcaggaagaggtaatttttcaccttgcttttcagttagacaaggaccaggattgcactgacatggcgctgagggtttttctaagtaagaacactgagatattgggacacacatcaaaaacctggagtgctcaattggaagtagttctatgaatatggaaaggccagaggcagagtgaaataaaatgctatctcaaagtttaacacaatttaagggctcagcataagtaaacaacatatttggggtttgcttgtaaaaccaactaaataaaaaattcaaaccaattcacccagaaaaaagaccaataggtgcaaaaataaaaggaaaaccagtgaagtgccacatgacagcagtgttaagtgtttgaaaacgtttcaaagcacatatgtgccaatgtgacaacatgtggaaagcctcaggagagagtctaagataaaagcttaggctgatagacaagtagttaagagctaagagcagtactctgaaggaataggcaaaatgtttattttccttattgtttgtaaacaacaaacttggtcttacatctgtgtggtatagtagaaaggccagctgactagatctctggattctaattttggccctacctgtaacttaattttgtgaccacagttgtaccattcaccgtgcctgggctctagtttcctggtttgtaaggcagccccagcgttcatgttctgtgatagagcagaactgaacttattacctaattaactctctgctatgagttgtcaagactgatcattctgttttttctgtacacagaagtttagatgctttgtgacttaagcaggtgtgtgggctcctttaggcaggttacagttaactttctaga

SEQ ID NO: 45558 - DNA, 1188 bp, Homo Sapiens
tctgatgcccctgccagagccagctcctggtggacccatgtggagatgggaccaccagatcccatccttggagtcaccgaaggctttaagagggacaccaatagcaaaaagatgaatctgggagttagtgcctacagggaccacaacggaaagccttacagcatccacaaggcagaggcccagattgcagccaaaaatttggacgaggactacctctccattgggcggctggctgaattttgcaaggcatctgcagaagtagccttgggcgagaatagcgaagtctcgaaaagtggccggtttgtcactgtgcagaccatttctggaactagtgccttaaggatcagagctagttttctgcaaagatttcttaagttcagccaagatgtctttctgcccaaaccaacctggggaagtcgcacacccatcttcagggatactggcatgcagctacaaggttatcgatactatgaccgcaagacttgcggttttgacttcacagacactgtggaggacatttcaaaaacaccagagcaaagtcttcttcttctgcatgcttgctcccataatcccacaggagtggaccctggtcccaagcagcagaaggaaatagcaacagtggtgaagaaaaatctctttgcactcttcgacatggcctaccaaggctttgccagtggcaatggtaacaaggatgcctgggctgtgcgccactctgccaattatacgccattgtcgctgcaatcatacaccaagaacatggtcttacacagtgagggtgtggcaggcttcaccatggtttgcaaagacgcagatgaagccaagagggtagagtcacatttgaagatcttgatgtgtcccatgtattccaaccctcccctcaatgggacccgtttgcttctaccattctgctccagatttgtgaaacaatggttgcaagaagtgaaaggcaaggcccatcgcatcattagcatgcagactcagctggtctctaacctcaagaaggagggttctacccactactggccacacatcactgcccaaattgacatgttttgtttcacagggttaaagcccgaacaggtggaaaggatgagcaaggagtcctccatctacgtgacaaaggacagctgcttctctgaggcaggggtcacctccagcaatgtgggctaccttgtccataccattcac

SEQ ID NO: 45559 - DNA, 984 bp, Homo Sapiens
atggcaatattcaataacaccacttcgtcttcctcaaacttcctcctcactgcattccctgggctggaatgtgctcatgtctggatctccattccagtctgctgtctctacaccattgccctcttgggaaacagtatgatctttcttgtcatcattactaagcggagactccacaaacccatgtattatttcctctccatgctggcagctgttgatctatgtctgaccattacgacccttcccactgtgcttggtgttctctggtttcatgcccgggagatcagctttaaagcttgcttcattcaaatgttctttgtgcatgctttctccttgctggagtcctcggtgctggtagccatggcctttgaccgcttcgtggctatctgtaacccactgaactatgctactatcctcacagacaggatggtcctggtgatagggctggtcatctgcattagaccagcagttttcttacttccccttcttgtagccataaacactgtgtcttttcatgggggtcacgagctttcccatccattttgctaccacccagaagtgatcaaatacacatattccaaaccttggatcagcagtttttggggactgtttcttcagctctacctgaatggcactgacgtattgtttattcttttctcctatgtcctgatcctccgtactgttctgggcattgtggcccgaaagaagcaacaaaaagctctcagcacttgtgtctgtcacatctgtgcagtcactattttctatgtgccactgatcagcctctctttggcacaccgcctcttccactccaccccaagggtgctctgtagcactttggccaatatttatctgctcttaccacctgtgctgaaccctatcatttacagcttgaagaccaagacaatccgccaggctatgttccagctgctccaatccaagggttcatggggttttaatgtgaggggtcttaggggaagatgggattga

SEQ ID NO: 45560 - DNA, 855 bp, Homo Sapiens
tgataacacacgccggagggtcgcacgcgggttccagttgtgattgctggagttgtgtattgccaggaggctctccgagattggggtcgggtcactgcctcatccaccggagcgatggcgtttctccgaagcatgtggggcgtgctgagtgccctgggaaggtctggagcagagctgtgcaccggctgtggaagtcgactgcgctcccccttcagttttgtgtatttaccgaggtggttttcatctgtcttggcaagttgtccaaagaaacctgtaagttcttaccttcgattttctaaagaacaactacccatatttaaagctcagaacccagatgcaaaaactacagaactaattagaagaattgcccagcgttggagggaacttcctgattcaaagaaaaaaatatatcaagatgcttatagggcggagtggcaggtatataaagaagagataagcagatttaaagaacagctaactccaagtcagattatgtctttggaaaaagaaatcatggacaaacatttaaaaaggaaagctatgacaaaaaaaaaagagttaacactgcttggaaaaccaaaaagacctcgttcagcttataacgtttatgtagctgaaagattccaagaagctaagggtgattcaccgcaggaaaagctgaagactgtaaaggaaaactggaaaaatctgtctgactctgaaaaggaattatatattcagcatgctaaagaggacgaaactcgttatcataatgaaatgaagtcttgggaagaacaaatgattgaagttggacgaaaggatcttctacgtcgcacaataaagaaacaacgaaaatatggtgctgaggagtgttaa

SEQ ID NO: 45561 - DNA, 255 bp, Homo Sapiens
caggtcacagactagccaagtggctgagacgagtgtggggtgcgtgactctgcctgcgcgcgcgccagccccgcagctctcgccagagccttgggatcaagggagaaagagaaccggcagctggcctcggactctaagcggtgcgcagctccagcccgagcggatcggccctgaacccacaaaggactcctcgctccttcaagcctccaccacctcgcagccggggaggcaactggagcgaaaccagcgacaggt

SEQ ID NO: 45562 - DNA, 468 bp, Homo Sapiens
ctgccactgaagccagagacggccatctccgtgcctgagggaggcctcccggtggcccccagccctgctctcccagaggctcacgccctaggcaccctttctgcacagcagccaccccccgccgctgccaccacctccagcaccagcctgcccttctcccctgactcccctggcctcctgcccaacttcccggcgcccccaccagaggggctgatgttgtcacccgcggccgtgcctgtctggtcagcagggctggaactaagcgcaggaacagaggggctgctggaagcggaaaaggggctggggacacaggccccccacaccgtgctgaggctgccagaccccgaccctgaggggctgctcctgggggccaccgcagggggtgaggttgacgaggggttggaagctgaggccaaggttctgacccagctccagtcggtgcctgtggaggagcccttggaactgtga

SEQ ID NO: 45563 - DNA, 456 bp, Homo Sapiens
atgattatccccaaagacggcatcaagctacaccgtggaaatcttggtgctatcactcagcatctgaagccacttctcgaaaacggtgagtgcttccggctccaactcaaagactggcgcgagaagagaagcctttcacaaaatagtctgagccacgtttggtacaaggaaataagcgactacctgatcaagtctgggcgcactgacgcaacgcctgcatgggtaaagcgaaacctcaaaaaaacttatctgggttatgaagaggttgagtacaccgatttcgtcaccggaattaagacgattgaattagaactccgccacacgtccgatctggacactggcgacatgcaccatttcatgtgccaggtggaaggctggtgcgctcagtttggcctggtgctcacaatccctcaaagcagcgaatttcaggtgctgcgcgataagcaggaggcctga

SEQ ID NO: 45564 - DNA, 1562 bp, Homo Sapiens
gtagcgagaggcgctagctgccagctccagcagcccagatcgcgcagtatttctgcgtggcaccggtgcggatgcggctgtaaagcagtggtcaccgcctccgggagcccacttctatgtggagaggggagcacccagagagggtcttagggtgaaatttcaattttggcatatcactcagtgggtactgttgtgaccatggctgtgttaacactccctcccgaggagacttccctgccacaggcgctggagtcctcccatggcttcacagaagcagatggaggtagtgaccaaaggaactgggttccggcgccgccccaagaccatcacttacaccccggggacctgcgagctgctcagagtgatgatgaaggaatccaaactgacgaacatccagcagcgccacatcatggacatcatgaaaagaggagatgctttgcccctacagtgcagcccaacatccagccagagagtcttaccttccaagcaaatagcctcgcccatctacctgcctcccatcctcgcagcccgtccccacctccggcctgccaacatgtgtcaagccaatggggcctacagccgggagcagttcaagcctcaagccaccagggatttggagaaggagaaacaaagactccaaaatatctttgccacagggaaggacatggaggaacggaaaagaaaggcccctcctgcacgacagaaggctccagcccctgagctagaccgatttgaagagctggtgaaggaaatccaggagaggaaagaattcctggctgacatggaggccctgggacagggcaaacagtaccgaggaatcatccttgctgaaatctcccagaaactccgggaaatggaagacattgaccacagaaggagtgaggaacttaggaagggtcttgccaccacttaatctgtctccagagacgggcagggtagcccaagctcgaccactggagtccactcctctgccaggcagggccatcctcaggccagcccatcctaccagccttctgccacgtcaggtggtggcatagcactgccctgcagtaccccaaggcatactcagcagcctagcccctgccccggaatgcagatggagcctctgagactcacagccccgtccgcagagaagcaaagcccgagcatccctactaggacatgtgtctaaaggtatccactgggcctgcttcccaccacttctgacctgtggcctgttcatttagttttctgaattcaggaatgaatatgattcctttcttcctgttttaggatttacttatttgatttcttaccgccttaggcaagtattcaaccacaatgattaactggccaataaaacatatttaacgtgggtcattacaagcaccattttgttttcagagggataagcttatttgttcaaggcattagactttgtcaagcccagatggtttctagctacctgtttgcatatttcaagtggcaacgggaaccaacctcttgggcaccccatggctggctgctgtggcgggtgctgaattccactctgttaatgatctcaataaacctctgcaacggtt

SEQ ID NO: 45565 - DNA, 569 bp, Homo Sapiens
gctgccatgaatgccttcctgctctccgcactgtgcctccttggggcctgggccgccttggcaggaggggtcaccgtgcaggatggaaatttctccttttctctggagtcagtgaagaagctcaaagacctccaggagccccaggagcccagggttgggaaactcaggaactttgcacccatccctggtgaacctgtggttcccatcctctgtagcaacccgaactttccagaagaactcaagcctctctgcaaggagcccaatgcccaggagatacttcagaggctggaggaaatcgctgaggacccgggcacatgtgaaatctgtgcctacgctgcctgtaccggatgctaggggggcttgcccactgcctgcctcccctccgcagcagggaagctcttttctcctgcagaaagggccacccatgatactccactcccagcagctcaacctaccctggtccagtcgggaggagcagcccggggaggaactgggtgactggaggcctcgccccaacactgtccttccctgccacttcaacccccagctaataaaccagattccagagt

SEQ ID NO: 45566 - DNA, 1925 bp, Homo Sapiens
atggacccaagagtcagcggtatattagttcagttaccactaccagaccacgttgatgagcgaacaatatgcaatggaattgccccagaaaaagatgtagatggatttcatattatcaatattggaagattgtgccttgatcagcattctctcatacctgccactgccagtgctgtttgggaaataataaaaagaacaggaattcaaacatttggaaaaaatgtggttgtggctggaagatccaagaacgtagggatgcctattgccatgcttttacacactgatggagagcatgaacggccaggaggtgatgcaactgtgacaatagctcacagatacacccccaaagagcaactgaagattcatacgcagctggcagatattatcatagttgctgcaggtattccaaagttgattacgtctgatatggttaaagaaggtgctgctgtaattgatgtgggtatcaactatgtccacgatccagtgacaggaaagacaaaattagttggagatgtggacttcgaagctgttaaaaagaaagctggctttatcactccagttccaggaggtgtgggacccatgacagtggcaatgcttctgaagaacacccttctggcagctaaaaaaatcatttactagatcacatgaaaggataaagcaaactgaagtcatgctatttgtttatttgacaaagggtaaaacctttatattttactacaaagctatttatttctacatggtatttattttttcatgggtgaaatcattgtgaatcaattgattcacatagttttatgcatttcctgctaatttattttgagttttaagaaaacaaccaaaacaattccaatgaaaattttagtaacaattgtttattttgagggtatttgttcataacattaaaacaataaagggctcataataaataaatatatttttgacacaattaaatattacatagagtatgtttacaacaaatatcctgtcagccaaatggttacccatataaaatgtaatttaggttttgctacttgcatgctaacatttttaatgtattttatgatctatgtcatatattaaaaaagagcttgcttactacaagaaaaatattgaaatattgaaaatattgaaaatattattattgaaaataaaatcttgatctcaactatcccccaaatgcatcctataagtccatcctaatgagaaatgatgttctatttaaggaaaggaaaatattccgggaaggcaaaaaatgcagtgctgtttggaagtgtaatgattttatcacatggtgaatgactactaagagtaatgattatatcacattgtgaatgactacttgccacagtaaaaatacatgaagaatgtgttaggtttaaacgtcgtttctttcttctaaaaaatatttggttagtaccttcactgagcaatagtggaaaaataaaaaaataagtaaacagaaaaaactaaagttgtattttcccacaaatatagtatgaatgaggtcatattaaagaacagcaactgttaatgtttgttcacaaattcagaaatctaataggaaaacatgatactttcaatgtgccaaaactaaaccttagtatacaactaaaaatctcctgccttcttgcctacctgtcttccctcttctgttacagaatttgttcctcaaagtagatgcaatgtttctaacacaatttaaattaggaaatatatatgaatgtcgttgaagtctattttgagactgctaaagctattaattgatactgtgtttttatgcccaaatcccagtatgtttatgtaccaataatgactcttacccagcgcatgtctttatcagtgtgtactcgtgacgatttgtgtgaaaatagacttgatgtttataattaataccattacaactgtataataaaagcaatttgaag

SEQ ID NO: 45567 - DNA, 483 bp, Homo Sapiens
atgcagcctgcttctgcaaagtggtacgatcaaaggcactatgtcttcattgaattttgtgttgaagacagtaaggatgttaatgtaaattttgaaaaatccaaacttacattcagttgtctcggaggaagtgataattttaagcatttaaatgaaattgatctttttcactgtattgatacaaacgattccaagcataaaagaacggacagatcaattttatgttgtttacgaaaaggagaatctggacagtcatggccaaggttaacaaaagaaagggcaaagcttaattggcttagtgttgacttcaataattggaaagactgggaagatgattcagatgaagacatgtctaattttgatcgtttctctgagatgatgaataacatgggtggtgatgaggatgtagatttaccagaagtagatggagcagatgatgattcacaagacagtgatgatgaaaaaatgccagatctgcagtaa

SEQ ID NO: 45568 - DNA, 546 bp, Homo Sapiens
atggcatctgtatcataccaaaagccaacatctactactgtgggaaaacaaatgatttttacaggtccagactacataaaggattatttacccaaaattcatcagcacacctcctatgtaggagaacagcatctggcgttagaaaaaactggagatctcagatatttatggaggcctgcctcaaatagaagcttgccagcaaaatataaacatgagtacgtcagtgaaattggttggagaataccacagtataattttatcaacaaatcaagactggggagtggctttcatatcaagtatgaagaactaagtcaagcttctcttgattcaataacccacagatatcaaaacccatggcaaccaaaacctcatgtcctggatatgcaaggaaaacagagtcgcgcttcttttgcctggcatatgagtgctttcgaggacactgatcagagaaattccaaatgggctattcttgttaggcagtgtaagtcatcattgccaagagcttccaaaccacctaagctgccgaagctaccaaaaaaggaaaag

SEQ ID NO: 45569 - DNA, 426 bp, Homo Sapiens
ggcggtagctggaacttttttcctgcgccaggttttcgcttccacccgggcccagttggggacggacgcactagaggcgacctaaacatggagacagcgggcgctgcaactgggcagccggcctctgggctggaggctccggggtccacgaatgaccggcttttcctggttaaaggtggaattttccttggtaccgttgctgcagcgggaatgctagctggatttattacaacattatcattggctaaaaagaaaagccctgaatggttcaataagggaagtatggccacggctgcattaccggaaagcgggtcttcccttgccttgcgagctctgggctggggctccctgtatgcatggtgtggggttggtgtgattagcttcgcagtctggaaagctttaggagttcacagtgtaagtaactac

SEQ ID NO: 45570 - DNA, 266 bp, Homo Sapiens
ttgcccccaagtttcctggcagtgtgtgatactgaggaggtgagcttgtttctggagctgtgctttaagattcatgttacatgtaaagctgtcctcatttgtgactatggacctatggagttgggacaatctctatgggaagcagaaggcaaggaccccggtcattttaggtagaaacaacagcatgctaatgcaaaaaattatgcagtgtgctactgaacttcagaggtgatcaataaaagaagaataaaaagactaataaaagt

SEQ ID NO: 45571 - DNA, 698 bp, Homo Sapiens
gtgattatgttgtcatgactatatattttgaattgagtagaagaatgggatacttcaccattcagacatacattccctgtatactgactgtggttttatcctgggtgtcattttggatcaaaaaagatgctacgccagcaagaacagcattaggcatcaccacggtgctgaccatgaccaccctgagcaccatcgccaggaagtccttgccacgcgtgtcctacgtgaccgccatggacctttttgtgaccgtgtgcttcctgtttgtcttcgccgcgctgatggagtatgccaccctcaactactattccagctgtagaaaaccaaccaccacgaagaagacaacatcggtgagctgcagtagcaaaggttctccgggagggtgtttttattgcattttacaatggttgttgtgtcatttttgttgcttgcagaactattccctcctggacatgaggccaccaccaactgcgatgatcactttaaacaattccgtttactggcaggaatttgaagatacctgtgtctatgagtgtctggatggcaaagactgtcagagcttcttctgctgctatgaagaatgtaaatcaggatcctggaggaaagggcgtattcacatagacatcttggagctggactcgtactcccgggtctttttccccacgtccttcctgctctttaacctggtctactgggtt

SEQ ID NO: 45572 - DNA, 1547 bp, Homo Sapiens
ggggacttcttgaacttgcagggagaataacttgcgcaccccactttgcgccggtgcctttgccccagcggagcctgcttcgccatctccgagccccaccgcccctccactcctcggccttgcccgacactgagacgctgttcccagcgtgaaaagagagactgcgcggccggcacccgggagaaggaggaggcaaagaaaaggaacggacattcggtccttgcgccaggtcctttgaccagagtttttccatgtggacgctctttcaatggacgtgtccccgcgtgcttcttagacggactgcggtctcctaaaggtcgaccatggtggccgggacccgctgtcttctagcgttgctgcttccccaggtcctcctgggcggcgcggctggcctcgttccggagctgggccgcaggaagttcgcggcggcgtcgtcgggccgcccctcatcccagccctctgacgaggtcctgagcgagttcgagttgcggctgctcagcatgttcggcctgaaacagagacccacccccagcagggacgccgtggtgcccccctacatgctagacctgtatcgcaggcactcaggtcagccgggctcacccgccccagaccaccggttggagagggcagccagccgagccaacactgtgcgcagcttccaccatgaagaatctttggaagaactaccagaaacgagtgggaaaacaacccggagattcttctttaatttaagttctatccccacggaggagtttatcacctcagcagagcttcaggttttccgagaacagatgcaagatgctttaggaaacaatagcagtttccatcaccgaattaatatttatgaaatcataaaacctgcaacagccaactcgaaattccccgtgaccagacttttggacaccaggttggtgaatcagaatgcaagcaggtgggaaagttttgatgtcacccccgctgtgatgcggtggactgcacagggacacgccaaccatggattcgtggtggaagtggcccacttggaggagaaacaaggtgtctccaagagacatgttaggataagcaggtctttgcaccaagatgaacacagctggtcacagataaggccattgctagtaacttttggccatgatggaaaagggcatcctctccacaaaagagaaaaacgtcaagccaaacacaaacagcggaaacgccttaagtccagctgtaagagacaccctttgtacgtggacttcagtgacgtggggtggaatgactggattgtggctcccccggggtatcacgccttttactgccacggagaatgcccttttcctctggctgatcatctgaactccactaatcatgccattgttcagacgttggtcaactctgttaactctaagattcctaaggcatgctgtgtcccgacagaactcagtgctatctcgatgctgtaccttgacgagaatgaaaaggttgtattaaagaactatcaggacatggttgtggagggttgtgggtgtcgctagtacagcaaaattaaatacataaatatatatata

SEQ ID NO: 45573 - DNA, 951 bp, Homo Sapiens
atggagaatgtcactacaatgaatgagtttcttctacttggcctgactggtgttcaggagctgcagcctttcttctttgggattttcttaatcatttacctgataaacttgattggaaatggatctatattggtgatggttgttttggaaccacaactccactcccctatgtatttttttctgggaaacctttcttgtctggatatttcttattcttcagtgacactgcccaagctgctcgtaaacctcgtgtgcagtcgcagggctatatcttttctaggctgtatcacccagctacacttcttccactttttgggaagcacagaggccattttactggctatcatggcctttgaccgttttgttgccatctgcaatcctcttcgctacactgtcatcatgaacccccaggtgtgtattctgttggcagctgcggcctggctcatcagcttcttttacgctctgatgcattctgtcatgactgcacacctgagtttttgtggctctcagaaactcaatcacttcttctacgatgtcaagccgctcttagaattggcctgtagtgacacattactcaatcaatggcttctttccattgtcacaggcagcatatccatgggagctttctttctgactcttctctcctgcttctatgtaattggcttccttctgtttaagaacaggtcctgcagaatactccacaaggctctgtccacttgtgcctcccattttatggtggtatgtcttttctatggacctgtgggcttcacatatattcgtcctgcttcagccacctccatgattcaggaccggataatggccatcatgtatagcgccgtcacccctgtactgaatccactaatctacacccttaggaacaaagaagtgatgatggctctgaagaaaatctttggtaggaagttgtttaaagactggcagcaacaccactag

SEQ ID NO: 45574 - DNA, 1011 bp, Homo Sapiens
atgttggtgataccccccggactgagcgaggaagaggaggctctgcagaagaaattcaacaagctcaagaaaaagaaaaaggcattgctggctctgaagaagcaaagtagcagcagcacaaccagccaaggtggtgtcaaacgctcactatcagagcagcctgtcatggacacagccacagcaacagagcaggcaaagcagctggtgaagtcaggagccatcagtgccatcaaggctgagaccaagaactcaggcttcaagcgttctcgaacccttgaggggaagttaaaggaccccgagaagggaccagtccccactttccagccgttccagaggagcatatctgctgatgatgacctgcaagagtcatccagacgtccccagaggaaatctctgtatgagagtgatcgacttcgagaactaggaccagatggagaagaggcagagggcccaggggctggtgatggtccccctcgaagctttgactggggctatgaagaacgcagtggtgcccactcctcagcctcccctccccgaagccgcagccgggaccgcagccatgaggatcgggagcgggatcgagaccgagaccgagagggtcctttccgcaggtcggattcattccctgaacggcgagcccctaggaaagggaatactctctatgtatatggagaagacatgacacccacccttctccgtggggccttctctccttttggaaacatcattgacctctccatggacccacccagaaactgtgccttcgtcacctatgaaaagatggagtcagcagatcaggccgttgctgagctcaacgggacccaggtggagtctgtacagctcaaagtcaacatagcccgaaaacagcccatgctggatgccgctactggcaagtctgtctggggctccctcgctgtccagaacagccctaagggttgccaccgggacaagaggacccagattgtctacagtgatgacgtctacaaggaaaaccttgtggatggcttctag

SEQ ID NO: 45575 - DNA, 1266 bp, Homo Sapiens
gaccacgtcctggtgctgcggaaaagcaacttcgcggaggcgctggcggcccacaagtacctgctggtggagttctatgccccttggtgtggccactgcaaggctctggcccctgagtatgccaaagccgctgggaagctgaaggcagaaggttccgagatcaggttggccaaggtggacgccacggaggagtctgacctggcccagcagtacggcgtgcgcggctatcccaccatcaagttcttcaggaatggagacacggcttcccccaaggaatatacagctggcagagaggctgatgacatcgtgaactggctgaagaagcgcacgggcccggctgccaccaccctgcctgacggcgcagctgcagagtccttggtggagtccagcgaggtggctgtcatcggcttcttcaaggtagagaccagagcattccagtcttccttccttccgtcatccattgaggaggggtccacagcctgcagctggcagttctgcacgggctgtgctcccagcagcaatgctcagtcagggccctctttctgtccacagtttgatgaaggccggaacaactttgaaggggaggtcaccaaggagaacctgctggactttatcaaacacaaccagctgccccttgtcatcgagttcaccgagcaggtgcgctgccctgcagcccccaggctggggatggggaggagtggggctggaggcagaggccagccgtctcccgcacctgtgcaacctccttttctcccccagatcctgttcatcttcatcgacagcgaccacaccgacaaccagcgcatcctcgagttctttggcctgaagaaggaagagtgcccggccgtgcgcctcatcaccctggaggaggagatgaccaagtacaagcccgaatcggaggagctgacggcagagaggatcacagagttctgccaccgcttcctggagggcaaaatcaagccccacctgatgagccaggagctgccggaggactgggacaagcagcctgtcaaggtgcttgttgggaagaactttgaagacgtggcttttgatgagaaaaaaaacgtctttgtggagttctatgccccatggtgtggtcactgcaaacagttggctcccatttgggataaactgggagagacgtacaaggaccatgagaacatcgtcatcgccaagatggactcgactgccaacgaggtggaggccgtcaaagtgcacagcttccccacactcaagttctttcctgccagtgccgacaggacggtg

SEQ ID NO: 45576 - DNA, 918 bp, Homo Sapiens
atgacctccaggaccccactgttggttacagcctgtttgtattattcttactgcaactcaagacacctgcagcagggcgtgagaaaaagtaaaagaccagtattttcacattgccaggtaccagaaacacagaagactgacacccgccacttaagtggggccagggctggtgtctgcccatgttgccatcctgatgggctgcttgccacaatgagggatcttcttcaatacatcgcttgcttctttgcctttttctctgctgggtttttgattgtggccacctggactgactgttggatggtgaatgctgatgactctctggaggtgagcacaaaatgccgaggcctctggtgggaatgcgtcacaaatgcttttgatgggattcgcacctgtgatgagtacgattccatacttgcggagcatcccttgaagctggtggtaactcgagcgttgatgattactgcagatattctagctgggtttggatttctcaccctgctccttggtcttgactgcgtgaaattcctccctgatgagccgtacattaaagtccgcatctgctttgttgctggagccacgttactaatagcaggtaccccaggaatcattggctctgtgtggtatgctgttgatgtgtatgtggaacgttctactttggttttgcacaatatatttcttggtatccaatataaatttggttggtcctgttggctcggaatggctgggtctctgggttgctttttggctggagctgttctcacctgctgcttatatctttttaaagatgttggacctgagagaaactatccttattccttgaggaaagcctattcagccgcgggtgtttccatggccaagtcatactcagcccctcgcacagagacggccaaaatgtatgctgtagacacaagggtgtaa

SEQ ID NO: 45577 - DNA, 681 bp, Homo Sapiens
atggctagctctaggtgtcccgctccccgcgggtgccgctgcctccccggagcttctctcgcatggctggggacagtactgctacttctcgccgactgggtgctgctccggaccgcgctgccccgcatattctccctgctggtgcccaccgcgctgccactgctccgggtctgggcggtgggcctgagccgctgggccgtgctctggctgggggcctgcggggtcctcagggcaacggttggctccaagagcgaaaacgcaggtgcccagggctggctggctgctttgaagccattagctgcggcactgggcttggccctgccgggacttgccttgttccgagagctgatctcatggggagcccccgggtccgcggatagcaccaggctactgcactggggaagtcaccctaccgccttcgttgtcagttatgcagcggcactgcccgcagcagccctgtggcacaaactcgggagcctctgggtgcccggcggtcagggcggctctggaaaccctgtgcgtcggcttctaggctgcctgggctcggagacgcgccgcctctcgctgttcctggtcctggtggtcctctcctctcttgggtggccattccattctttacgggccgcctcactgactggattctacaagatggctcagccgataccttcactcgaaacttaa

SEQ ID NO: 45578 - DNA, 498 bp, Homo Sapiens
atggcacagaaagagggagatgttagagattacaatttgactgaggaacagaaggcgatcaaggccaactatcctccagttaataggaattatgagtatttggatcatacagcagatgtccagttacacacatggggagatactctggaggaagcatttgagcaatgtgcaatggccatatttggttacatgatagataccaggactgtggagcctctccaaacaatagaagtagaaacccaagaagtttctacttttctttttcactttttagatgagtggctttataagtccaatgctgatgaattcttcataccctgggaagtgaaagtactttgtattgatcaaagacatttccaattacaatcaattgggtggagagaagaattttcattgtccaatcaccctcagggaaccgaagtcaaagttataacatattcagcaatgcaggtctataataaagaaaacccagaagtttttgtgatcattgacatttaa

SEQ ID NO: 45579 - DNA, 375 bp, Homo Sapiens
tataagccgtcgagcctggccactgtgcctgagaccctcgacccagccgaatacaacatatctctggaaacccagcgggtgcaagccgagcggttggccataagagcccggctgaaacgagagtacctgcttcagtacaatgatcccaaccgccaagggctcatcgaaaatcctgccttgattcgttgggcctatgcaagaacaacaaatgtctatcctaatttcagacccactcctaaaaactcactcatgggagctctgtgtggatttgggcccctcatcttcatttattatattatcaaaactgagagggataggaaagaaaaacttatgcaggaaggaaaattggatcgaacagttcacctatcatattaa

SEQ ID NO: 45580 - DNA, 511 bp, Homo Sapiens
caggcccacctgtctgcaacccagctgaggccatgccctccccagggaccgtctgcagcctcctgctcctcggcatgctctggctggacttggccatggcaggctccagcttcctgagccctgaacaccagagagtccagcagagaaaggagtcgaagaagccaccagccaagctgcagccccgagctctagcaggctggctccgcccggaagatggaggtcaagcagaaggggcagaggatgaactggaagtccggttcaacgccccctttgatgttggaatcaagctgtcaggggttcagtaccagcagcacagccaggccctggggaagtttcttcaggacatcctctgggaagaggccaaagaggccccagccgacaagtgatcgcccacaagccttactcacctctctctaagtttagaagcgctcatctggcttttcgcttgcttctgcagcaactcccacgactgttgtacaagctcaggaggcgaataaatgttcaaactgta

SEQ ID NO: 45581 - DNA, 1086 bp, Homo Sapiens
atggcctcacatgtgcaagttttctcccctcacacccttcaatcaagtgccttctgtagtgtgaagaaactgaaaatagagccgagttccaactgggacatgactgggtacggctcccacagcaaagtgtatagccagagcaagaacatccccctgtcgcagccagccaccacaaccgtcagcacctccttgccggtcccaaacccaagcctaccttacgagcagaccatcgtcttcccaggaagcaccgggcacatcgtggtcacctcagcaagcagcacttctgtcaccgggcaagtcctcggcggaccacacaacctaatgcgtcgaagcactgtgagcctccttgatacctaccaaaaatgtggactcaagcgtaagagcgaggagatcgagaacacaagcagcgtgcagatcatcgaggagcatccacccatgattcagaataatgcaagcggggccactgtcgccactgccaccacgtctactgccacctccaaaaacagcggctccaacagcgagggcgactatcagctggtgcagcatgaggtgctgtgctccatgaccaacacctacgaggtcttagagttcttgggccgagggacgtttgggcaagtggtcaagtgctggaaacggggcaccaatgagatcgtagccatcaagatcctgaagaaccacccatcctatgcccgacaaggtcagattgaagtgagcatcctggcccggttgagcacggagagtgccgatgactataacttcgtccgggcctacgaatgcttccagcacaagaaccacacgtgcttggtcttcgagatgttggagcagaacctctatgactttctgaagcaaaacaagtttagccccttgcccctcaaatacattcgcccagttctccagcaggtagccacagccctgatgaaactcaaaagcctaggtcttatccacgctgacctcaaaccagaaaacatcatgctggtggatccatctagacaaccatacagagtcaaggtcatcgactttggttcagccagccacgtgtccaaggctgtgtgctccacctacttgcagtccagatattacaggtaa

SEQ ID NO: 45582 - DNA, 381 bp, Homo Sapiens
atgcatctctcccagctgctggcctgcgccctgctgctcacgctgctctccctccggccctccgaagccaagcccggggcgccgccgaaggtcccgcgaaccccgccggcagaggagctggccgagccgcaggctgcgggcggcggtcagaagaagggcgacaaggctcccgggggcgggggcgccaatctcaagggcgaccggtcgcgactgctccgggacctgcgcgtggacaccaagtcgcgggcagcgtgggctcgccttctgcaagagcaccccaacgcgcgcaaatacaaaggagccaacaagaagggcttgtccaagggctgcttcggcctcaagctggaccgaatcggctccatgagcggcctgggatgttag

SEQ ID NO: 45583 - DNA, 897 bp, Homo Sapiens
atgggacctaaagacagtgccaagtgcctgcaccgtggaccacagccgagccactgggcagccggtgatggtcccacgcaggagcgctgtggaccccgctctctgggcagccctgtcctaggcctggacacctgcagagcctgggaccacgtggatgggcagatcctgggccagctgcggcccctgacagaggaggaagaggaggagggcgccggggccaccttgtccagggggcctgccttccccggcatgggctctgaggagttgcgtctggcctccttctatgactggccgctgactgctgaggtgccacccgagctgctggctgctgccggcttcttccacacaggccatcaggacaaggtgaggtgcttcttctgctatgggggcctgcagagctggaagcgcggggacgacccctggacggagcatgccaagtggttccccagctgtcagttcctgctccggtcaaaaggaagagactttgtccacagtgtgcaggagactcactcccagctgctgggctcctgggacccgtgggaagaaccggaagacgcagcccctgtggccccctccgtccctgcctctgggtaccctgagctgcccacacccaggagagaggtccagtctgaaagtgcccaggagccaggaggggtcagtccagccgaggcccagagggcgtggtgggttcttgagcccccaggagccagggatgtggaggcgcagctgcggcggctgcaggaggagaggacgtgcaaggtgtgcctggaccgcgccgtgtccatcgtctttgtgccgtgcggccacctggtctgtgctgagtgtgcccccggcctgcagctgtgccccatctgcagagcccccgtccgcagccgcgtgcgcaccttcctgtcctag

SEQ ID NO: 45584 - DNA, 282 bp, Homo Sapiens
cttctattttatacagaaattgtgagcatatcagcattaagtaccactgaggtggcaatgcacacttcaacctcttcttcagtcacaaagagttacatctcatcacagacaaatggagaaacgggacaacttgtccatcgtttcactgtaccaggcatgaggatgtggcctgcatgctgcctgatcttgcctagaaccggctgcacctgctgttctcttgtttatgcaaactggctgcacctgctattcctttgcttatgcccctacccctggctatcctaa

SEQ ID NO: 45585 - DNA, 762 bp, Homo Sapiens
gatagagctttggagccaaacccttctgatgatccaagggcaagcacagtcttcttgcaaaaatctcaaacagatgttcaagaaaagagaaagagcaacgacatgaaccatgtatctactaagcattttactaaaaagtacagctcgtgttcaaccatatacctagatgacagcacagccagccagcctcatcttacaatcatagtaaaatctgtggccttagcaatatattatcacatgaagaaaagagatgcagataaatccctcgatatgtttgacgagcaattacatccactcactcaagaaaagatgccaaaggaatactttgagtatgttcctgaacacaagtttatttacagatttgtccatgttctttttaaagccacaaacctaacagctgaatttgcaatagtaactttgtgctctattttgcatatttacatagaaagactcttaagttatgtggagatagacctttgcccgaccaactggaagagagtcatgggagccattcttctcacctccaaagtttggaaagatgtgactatatggaatagggaatactgcaggctctttgtgaacactagcattaaagacatgaatgagcttgaaagacagtttttgcagctaattgactataacgtcgaagtttctggaagtgtttatgccaagtactattttgatcttcgatccttggcaaaggacaatagcttgcattttccagtttatcttctcaacaaagaaagggcacagaacctggaa

SEQ ID NO: 45586 - DNA, 411 bp, Homo Sapiens
gccttgaagaactttgccaaatactttcttcaccaatctcatgaggagagggaacatgctgagaaactgatgaagctgcagaaccaacgaggtggccgaatcttccttcaggatatcaagaaaccagactgtgatgactgggagagcgggctgaatgcgatggagtgtgcattacatttggaaaaaagtgtgaatcagtcactactggaactgcacaaactggccactgacaaaaatgacccccatttgtgtgacttcattgagacacattacctgaataagcaggtgaaagccatcaaagaattgggtgagcacgtgaccaacttgtgcaagatgggagcgcccgaatctggctcggcggaatacctcttagacaagcacaccctgggggacagtgataatgaaagctaa

SEQ ID NO: 45587 - DNA, 860 bp, Homo Sapiens
cgggattcggatgggggcgggtgggggacgctgcagctggggccatttgaggggagcccatggggcctgaaaggcatctgtcaggcgcccctgcccggatggcaacagtagttctaggaggagacaccatgggccctgagcgtatcttccccaatcagactgaggaactgggacatcagggcccttcagaaggcactggggattggagcagtgaggagcctgaggaagagcaggaggaaacggggtcgggcccagctggctactcctaccagcccctgaaccaagatcctgaacaagaggaggtggaactggcaccagtgggggatggagatgtagttgctgacatccaggatcgaatccaggccctggggcttcatttgccagacccaccattagagagtgaagatgaagatgaggagggagctacagcgttgaacaaccacagctctattcccatggacccagaacatgtagagctggtgaaaaggacaatggctggagtaagcctgcctgcgccaggggttcctgcctgggctcgggagatatcggatgcccagtgggaagatgtggtacagaaagccctccaagcccggcaggcatcccctgcctggaagtgaccacagtgagagctgccttatattcctacattccaggccagaaccagcacaggactgaacacatccctggttgtaatgtccatttccatcttccccgtctccctttccacatcaaggcacatcagacttctcagagacccactttattcagttctgtacatatggggacatcggtccaagcccaacccaccttagcatgtatcactctgtggagaataaagcaccctatgtacacagccaaaa

SEQ ID NO: 45588 - DNA, 441 bp, Homo Sapiens
tgggctcaggcccagagtgccagctttgccctatcccatagcctggagccaccacaggaggggcactccactctcttgggctcctggagcctcagaggcagagccagccgggagtgcaggagggagaactttcctgtggacgtcctgtgttctccagacgcagagaaccctcatcaaccgagggggaggtcacttccgaatccacagatggcgtgtgagtgcatggcgagcgcctccaggacacacttactgttcccttgctctggccagacgccagccggaccctgtgtgtgcgcgccgtgctgctctttgcagctgcctgcaaggcctgcgaagaccagcaccttggggaagagcctgcggctgaacttgaactcgcagctacctgagtcagacctgtgctttttcacctctacggaagatgtcagagcgtttccctag

SEQ ID NO: 45589 - DNA, 528 bp, Homo Sapiens
gtccatgtgccctgctccttctgctacccccaagacagctggactgactctgacccacttcacagctattggttaggggaagtggcccttccagcctcagatgctccagtggccacaaacaacccagatagaaaagtgcaggaggagacccagggacagttgcaactttccagggaccgacagatcaatgactgctccctggggtcatacttctttcacatggagggagggaatatgaaatggagatacaaaattaaccagttgtccatgcatgtgatgcgtccaacccacaggcccgacatcttcatcccaataaccctggagtcggctcccagcaatctaacctgctctgtgccttgggcctgtgagcaggggatgcctccgacaatcacctggatggggtccatgttcccactgggctccacctcggtgccctccacagtccaggaccacgacgccagcctcacctgtcaggtgactttaccgagggctggtgtgaccacgaacagtaacatccaactcaatgtg

SEQ ID NO: 45590 - DNA, 375 bp, Homo Sapiens
aaaccatatgaatgtaaacaatgtggtaaatcctttagttattctgctacccttcgaatacacgaaagaactcacactggagaaaagccttatgaatgtcagcaatgtgggaaagcatttcatagtcccagatgctatcgtagacatgaaaggattcacacgggagagaaggcttatcaatgtaaggaatgtggaaaagcattcacgtgtccccagtatgttcgtatacatgaaaggacccactctaggaaaaaaccctatgaatgtacgcagtgtgggaaagcattatcctctcttacaagttttcaaacacacataagaatgcactctggagaaagaccttatgaatgtaagatatgtgggaaaggcttttgt

SEQ ID NO: 45591 - DNA, 657 bp, Homo Sapiens
gagccggtcaggttcaccatctccagccgcacggacgccggggtccacgccctgagcaacgcggcgcacctggacgtccagcgccgctcaggccggccgcccttcccgcccgaggtcctggccgaggccctcaacacacacctgcggcacccggccatcagggtcctgcgggccttccgagtgcccagcgacttccacgctcgtcacgcagccacgtcccggacctacctgtaccgcctggccactggctgtcaccggcgtgatgagctgccggtgtttgaacgcaacctatgctggactctcccggcagactgcctggatatggtcgccatgcaggaagccgcccagcacctcctcggcacacacgacttcagcgccttccagtccgctggcagcccggtgccgagccccgtgcgaacgctgcgccgggtctccgtttccccaggccaagccagccccttggtcacccccgaggagagcaggcaaggtggctctgggtcacaggtacggaggatgacggctgtgctggtggccgtggggctgggggctttggcacctgcccaggtgaagacgattctggagagccaagatcccctgggcaagcaccagacacgtgtagccccagcccacggcttattcctcaagtcagtgctgtac

SEQ ID NO: 45592 - DNA, 390 bp, Homo Sapiens
tctgtgattatcaaaaccatgttggaagattttgagtggatgatgaatgatgaaggatatgatgacctagttcctctaccaaatattaatgcagcagtatttaaaaaggtcattcagtggtgcactcaccacaaggacgaccctcctcctccccagggtgatgagaacaaagaaaggggaacagaccatactcctgtctgggatcaggaattccttaaagttgaccaaggagcactttttaaacttattctggctgcagactacttagacatcaagttccttgatgttacatacagcactcttgccaatatgatcaaggggaaagctcctaaggaaactgacaagtccttcaatatcaatgactttatggaagagaaggaagctgaggtg

SEQ ID NO: 45593 - DNA, 366 bp, Homo Sapiens
gccaggatcaaggcccaagaccttctcgggaagaaggaggaggagctgctgaaacagctggacgacctaaaggtggagctgtcccagctgcgcgtcgccaaagtgacgggcggcgcggcctccaagctccctaagatccgagtcgtccgcaaatccattgcccgtgttctcacggttattaaccagactcagaaagaaaacctcgggaaattctacaagggcaagaagtacaagcacctgcacctgcggcctaagaagacacgcgccgtgcgccgcccgctcagcaagcacgaggagaacctgacgatcaagaagcagcagcagagcgagcagctgtccccagtgcggaagtgcgcggtcaaggcc

SEQ ID NO: 45594 - DNA, 324 bp, Homo Sapiens
gcggaggtgcaggtcttggtgcttgatggtcgaggccatctcctgggccgcctggcggccattgtggctaaacaggtactgctgggcaggaaagtggtggtcgtatgctgcgaaggcatcaacatttctggcaatttctacagaaacaagttgaagcggaccgagcgaggcttgctgccccacaagaccaagcgaggccaggccgctctggactgccttaaggtgtttgacggcatcccaccgccctatgacaagaaaaaatggatggtggctcctgctgccctgaaggtcgtgcgtttgaagcctgcaagaaagtttgcctaa

SEQ ID NO: 45595 - DNA, 1156 bp, Homo Sapiens
aggaagcaggaaatccttttcctctcacgtttacatcccattcattcttcctccgggcaattcaagtccattcacagccgccacagatgcacgtgtgcacgcgcgcagctgcacctttaaagaaactctcaagtcctggcggccagaaaaccagctttcaggcggggcggtggggctccccctccccttgcttcgtctctgcagatctttgtgctctagggagggatggccgcacattctgacgaggacgagggtggtgcataacgcggaggtcaattttgcacagtccaggcaaaagagaccccccccccccaccaacatcccttcctgttcagtttccctctctggcccagcgcgaagggcgaggggcgacagaagcccgagggacagaaaaccgaggctcctcagtggccgagttgggagagagtgtgagtccaggagagcccgggggcagcagggagagggtgcagaagctcgagcgcaccgagccagaggccccctcttctcccgccacgcggggctggaggtgcaggcgccggttccgcggcgtggcccggctatgtgtcgctcctccgcgcgccgcccgccgcagcccgtgccctcgggccgccgccgccgccgctgccccccgtcgagcccgcggccgcaccctcgggccgatacttgagccagcagatgacccaggtgacaacgaccgagaagagtgccaggatgctggccaccgacaggcagatgggccccacgggcgagggcgagggcgacccggtggccggtgcctcgccagggggcgccccgcctccgggggttcccccgccgccgtagtggttgacgaagatgaggccggtgaagagcagcaccaccatggagaggaaggagaagaccacgcacacgcagccagcgtttctctgcagaagacagcaagatgccccagggaatgtttgtgaaaaaggatgactggatgggaagcaagctgaagaaaaagaaggaaagaaagagagaaatcagtaaatcaccacacaagaggtggagaagaggacttataaatattgtttctatgacatttgaaaataaatgttttactccatgctaatagtgaatgtgatgtcttcagtttgaagggctttaagtgaagctcattaaaacccactattttcca

SEQ ID NO: 45596 - DNA, 488 bp, Homo Sapiens
atatttacttacaagtgtgctcctggtggtctttaactgaagggcactgactgggtcactggtgaagttccccgcaggaactgagtcagaccccatctcagggccctgcacaagataggtgcctgctctaaggcgtggaccctcgccacagccctggcccgtcttgacgggcgagggttactgtacttgtcccaaccgtacagatgagaaagctgagactcagggcgagcaacccgggtcccagcggagcgcccggcacacgccgacacttcagcaccagtcgcggtggccaccactgtgcgcggagatggctgcgacgcgtgcgcagatctcgatcccaaactccctcctgccagaatctggacccgaatccacccattgcccgttttctgctgccgctggagagaatctctgaggtccccaggagagcctgcctgcacggaagagatgcctcctcagtatggccgcccccggagaggagcgattaa

SEQ ID NO: 45597 - DNA, 2395 bp, Homo Sapiens
atgccttggccgttttcggagtccatcaagaagagggcctgccggtacctcctgcagaggtacctgggccactttctgcaggagaagctgagcctggagcagctcagcctggacctgtaccaaggcaccgggtccctcgcccaggtccccttggacaaatggtgtctcaatgagatcttggagtcagcagatgcacccttagaagtcactgaaggattcattcagtcaatttccctgtcagttccatggggctctttactgcaggataattgtgcactggaagtgagaggattagaaatggtcttccggcctagacctcgcccagcaactggttctgagcctatgtattggtcaagttttatgaccagcagtatgcaattggcaaaagaatgtcttagccagaaactaacagatgaacaaggagaaggatcccagccttttgaaggacttgaaaagtttgctgaaaccattgaaacagtactaagaagagtaaaagtcacttttatagatactgttttgagaattgaacatgtgccagaaaattccaaaactggaactgcacttgaaattcgaatagaaagaactgtgtactgtgatgaaactgctgacgaatcctcaggaattaatgtgcatcaacccactgcttttgctcacaagttacttcagctctctggagtgtctctcttctgggatgagttttctgcatcagccaaatcttccccagtgtgttcaactgcaccagtggaaactgagccaaagctctcacctagctggaaccccaaaattatttatgagccacacccacagctaactagaaatttaccagagatagcaccttctgacccagtgcagattggacggttaattggtaggttggagttgagtctcacgttgaaacagaatgaagtgcttcctggagctaagttggatgttgatggacagatagactctattcatctactcctgtcaccaagacaggtgcacttgcttttggatatgttggcagctattgctggaccaaattctagcaaaatagggttagctaataaagataggaaaaatcgacccatgcagcaggaagacgagtatcgaattcagatggaattaaaccggtattatttgagaaaagattccctctctgtgggtgtatcttcagagcaaagcttttatgagacagaaacagctcgtacaccttctagccgtgaagaagaagtattcttctccatggctgatatggacatgtctcatagtctctcttctcttccaccccttggggaccccccaaacatggaccttgagttatcattaactagtacatatacaaataccccagcaggatctccattaagtgctactgtgcttcagcccacttggggagagttccttgatcatcataaagaacagccagtaagagggtcaacatttccatccaacctagttcacccaacacctttacagaagacatctctcccatctagatctgtttcagtggatgaatcaaggcctgaacttatttttagactagctgtgggaactttttcaatctctgtgcttcacattgatcctttatctccacctgaaacgtcacagaaccttaatccattgacacctatggcagtagctttctttacttgtatagaaaagattgatccagcaagattttcaacagaagattttaagtctttccgagcagtgtttgcagaagcttgctcacacgatcaccttagatttataggtactggcattaaagtatcctatgaacaaagacaaagatcagcttcccgatattttagtactgatatgtccattgggcaaatggaatttttggagtgcctatttccaactgattttcattctgttcctcctcactatacagagcttttaacgttccattccaaagaagaaactggttcccattcccctgtgtgtcttcagcttcattataagcattctgagaatagagggccccagggtaatcaagcaagacttagttcagttcctcacaaggcagaattgcaaattaaattaaatccagtgtgttgtgagctggatatcagtattgtggacaggttaaattccttgcttcaaccacagaaacttgccacagtagagatgatggcatcccacatgtatacttcatataataaacatattagtctgcacaaggctttcactgaagtgtttctagatgattcacatagtcctgcaaattgtcggatatcagtacaagttgccacaccagcattaaacctttctgttcgcttcccaatacctgatcttcgatctgatcaagaaagaggaccatggtttaagaagtcacttcagaaggagatcctttatttagccttcacagatctagaatttaagactgaatttataggaggatcaaccccag

SEQ ID NO: 45598 - DNA, 765 bp, Homo Sapiens
atggtgtcctccggaaaaaagtattccaggaaatctgggaagccgtctgtggaagatcagtttacgagagcctatgactttgagactgaagataagaaagatctgagtggatcagaggaagatgttattgaagggaagactgcagtcattgagaaacgtaggaagaaaaggtcttctgcaggagtagttgaagatatggggggtgaagtgcagaatatgctggaaggagttggagttgacattaacaaggctcttcttgccaagagaaagagactagaaatgtataccaaggcttctctcaaaactagtaaccagaaaattgaacatgtttggaaaacacaacaagatcaaaggcagaagcttaaccaagaatattctcagcagtttctgactttgtttcagcagtgggatttagatatgcagaaagctgaggaacaagaagaaaaaatacttaatatgtttcgacagcaacaaaagattcttcaacaatctagaattgttcagagccagagattgaaaacaattaaacagttatatgagcagttcataaagagtatggaagagttggagaagaatcatgataatctacttactggtgcacaaaatgaatttaaaaaagaaatggctatgttgcaaaaaaaaattatgatggaaactcagcagcaagagatagcaagtgttcggaagtctcttcaatccatgttattctgatgactctttgaagaaagaacttgaacctaagtaatatgatacaattataacgtt

SEQ ID NO: 45599 - DNA, 1479 bp, Homo Sapiens
cgacttccggcagctggacttggaaaagcaaggagtgtcgggaatggcgaccaagcggctcgcgcggcagcttggattaattaggagaaagtcaattgcgccagcaaatggaaatctcggaagaagcaaatccaagcagttgtttgactacttaattgtcattgattttgaatcgacatgctggaatgatgggaagcaccaccatagccaggaaataattgagtttccagcagtgttgctgaacacatcaactggacagattgactctgagttccaggcttatgttcaacctcaggaacatccaattctttcagaattttgcatggaattgacaggcataaagcaggctcaagttgatgaaggagtccctctgaagatttgcttatctcagttctgtaaatggattcataagattcagcaacagaagaacattatttttgctactgggatttcagagccttctgcttctgaagtaaaattatgtgcatttgttacttggtcagactgggacttgggggtttgcctggagtatgagtgtaaaagaaagcagctgttaaaacctgtgtttttaaattcttggattgatctcagagcaacttacaagcttttctataggagaaaaccaaaaggactaagtggtgccttgcaggaagtaggaatagaattctcaggacgagaacattctgggttggacgattctcggaatactgcccttcttgcttggaaaatgatcagagatggttgtgtaatgaaaattacaaggtcgttgaacaagggtcccttcctcttgccttcgtggacctggaacagtgatctggcctcaggggaccagcatgcttttcttcagcaagaatttggctgtggaacctacagaaccttacttcagaagcccaatatgagtaaacaggaaaaggggaatattctctggttgacaatggtgtggctgtcactggcatgtctgcaaaggaaaaactacaatgactgcatgttaaacacagcatcacagactgttaccactgaaaaattttgagaagctctccacttgaacctcttcatgtcatgaatcaggtgccagtggcttagcttgaattacagggtaaaagccatcactttctctatccttttaggtgctttctagaatcaaaactaaactttgtcatcaaaggcccatttataatagctgctttcctagctttttattctatgataaagaaggattgaagcatttttaaaacttgagatttttatcatacctccagcagagtaaggagtctgtgtgatcttgcaatcatggataaggaagaattttccccttccctcccctatggatgctttaaaatgtgattttttaaaaatgagtatgttaatacaatacatgttagtaaaagccatgggtactgatgggccaacacactacagcctactggcaaaatctgacttgcctcttgtttctgtaaataaaatgttattgcccattca

SEQ ID NO: 45600 - DNA, 396 bp, Homo Sapiens
atggggagggacagatgggtggaggagtggaagatggaggatggggagggacagatgagtggaggagtggcagatggaggaggatggctggagggacagatgctgggtgattgttgggggtgcaggtgcgggacgggtcggggacaggtggaaggaaaacagcacacagatgcggacagatggccagaaagattaatagttcagtggcagagacctaggcctggcggctgtcgtccccccactcacggatgcgcgcggtccagcactgctcccccagctgggtgcagttctccacctgcaggcagtcctcgttgctcacctgggctttgcaggagtagcacagcagggcagtgcctgtggggtggagtgggaggggcctcagaggctgccccatag

SEQ ID NO: 45601 - DNA, 843 bp, Homo Sapiens
atgccaaagaaagcaaagcctacagggagtgggaaggaagaggggccggctccctgtaagcagatgaagttagaagcagctggggggccttcagctttaaactttgacagtcccagtagtctctttgaaagtttaatctcgcccatcaagacagagacttttttcaaggaattctgggagcagaagccccttctcattcagagagatgaccctgcactggccacatactatgggtccctgttcaagctaacagatctgaagagtctgtgcagccgggggatgtactatggaagagatgtgaatgtctgccggtgtgtcaatgggaagaagaaggttttaaataaagatggcaaagcacactttcttcagctgagaaaagattttgatcagaaaagggcaacgattcagtttcaccaacctcagagatttaaggatgagctttggaggatccaggagaagctggaatgttactttggctccttggttggctcgaatgtgtacataactcccgcaggatctcagggcctgccgccccattatgatgatgtcgaggttttcatcctgcagctggagggagagaaacactggcgcctctaccaccccactgtgcccctggcacgagagtacagcgtggaggccgaggaaaggatcggcaggccggtgcatgagtttatgctgaagccgggtgatttgttgtactttcccagaggaaccattcatcaagcggacactcctgcggggctggcccactctactcacgtgaccatcagcacctaccagaacaatgatgctggagctagaatgagaagatgtgacttgagggccattgctccccagaaatga

SEQ ID NO: 45602 - DNA, 129 bp, Homo Sapiens
atgccaagaacccgaacaaactctgaagatgagaatgcggccctgtgccaagactggctgccttcccctgtttctgtaccacactggttcctgaagctatttgagtttgagactgctggggtaacctga

SEQ ID NO: 45603 - DNA, 651 bp, Homo Sapiens
atgctcgccagccccgcccggcccacattgcgcatgcttgccaaccacgccctgtccacaccacactgcgcatgctcgccggcccccgccccgcgcacggcgtcagcgtctagacgcaggtgcgttcccgtcgaggctcgcgcagcgggcgtttttggggatcgcctggcgggggtgttcgggagccgcgggctgaagcacgggggcgtgcaggcgcccaggcctcgtgtagtgagggccgagccccgcgccggcttcgctgtagtccgcagcccccggcggctttgtgggcgcagccacgctcctcagccgcccgcccacctgggcctgggccccggttgtttccctgcggtggctgtggtcgttcccgttccagggtctcgagcgcaccgccccttcgctgcgctgttagtcgagggcagttttctgggggatcccccgatccccccgcgccgctcaggcgtcttggctcgcggaagcgcaggcgccgactgcctggcgtcgtccgtgactcctggcccttctctgtggatccctttgcttctcgttgcgggttgtgtttcctgcttcgtgggcctggccgtttgcgtttggatgcaggcccgggtgagccctgcgtggcccgctggccttttcctgctccctaggtga

SEQ ID NO: 45604 - DNA, 792 bp, Homo Sapiens
atgaagattggaataattggtggaacaggcctggatgatccagaaattttagaaggaagaactgaaaaatatgtggatactccatttggcaagccatttgatgtcttaattttggggaagataaaaaatgttgattgtgtcctccttgcaaggcatgggaggcagcacaccatcctggcttccaaggtcaactaccaggcgaccatctgggctttgaaggaagagggctgtacacatgtcatagggaccacagcttgtggctccttgagggaggagattcaacctggcgatattgtcattattgatcagttcattgacaggaccagtatgagacctcagtccctctatgatggaagtcattgttgtgctagaggagtgtgccatattccaatgccaagcccccaaacgagagacgttcttatagagactgctaagaagctaggactcgacattcaaaggggacaatggtcacaactgagggacctcgttttatctcttgcagaaagcttcatgttctgcacctggggggtggatgttatcaacatgaccacagttccagaggtggttctcactaaagaggctggaatttgttatgcgagtattgccatggtgacagattatgactgctggaaggagcacgaggaagcagttttggtggaccgggacttacagaccccgaaagaaaatgctagtaaagccaaaagtttactgctcactgccatacctcagataggatccatggaatggtcaaaaaccctccatggcctgaagaatatagcccagttttctgtt

SEQ ID NO: 45605 - DNA, 1593 bp, Homo Sapiens
atggcaacctcctctgaagaagttttgctgattgtaaagaaagtgcgtcaaaagaagcaggatggagctctatacctcatggcagaaagaattgcttgggcacctgaaggcaaaaatagatttacagtcagccgtatgtatgtagatgttaaatgtcagaaaattagtccagaaggcaaagctacaattcagcatcagctggacctacatgaaggagatacaattaacttccgttttcccagtgaaaacacagcagtgaaagagcaagatgcagtaaaggaccttcagcagctgcttcccaaattcaagaggaaagcaaataaagaactggaagagaagaacagaatgctgcaagaagatcctgttttgtttcagctttataaagatcttgttgtgagccaagtgatgagtgctgaggaattctgggccaatcatttaaatgggaatgcaacagaaaattcttccacatccaatcataagcaggatgttggcatttctgctgcatatctggctgatgtctggcccgaaaccgatggctgtaacggtctgaaatataatttaacttctgatatcattgagttcatatttaggacctatccagcagtgaaaatgaaatatgcagaaagtgttccccacaacatgacagagaagggattctggacacgttttttccagtcccattattttcacagggattggctgaatacagggtcaaaggatctctctgcagaatgtgccaaaatagatgaaaaaggccttaaaacaatggtttcattaggagtgaaaaacccactactagaattaacagctttgggaaataagccattagatgagggctatggcatttcctctgtgccatctgcttccaattctaaatccatagaagagaatagtaatgctgccatcaagagatttaaccatcacagtgccatggtcctggcagctggactcaggaaacaagaagcagaaaatgagcaaaatagcccaagcatggatggaaattccagagatgcagactgctttcagccagtagtcaaaagggcgaaatcgcaagagtccagtgaatatgaagacttggggaaagataattctataaaaatgattgcactaaacctcaagaagtcaggtaggtattatcatggtctaactccagtcgtcactacagtatgcaacaataaggactattcttttcaaagtattgggcaagaaatggaagcttatatacccaagttaattgaggttctcttgagtagtgctgccagtagtaccatcatagcactgtcacctgcaggggaccttatgcagggaggaacacagcaaaccataaaccagatggtgccaagtgatattcagtctgaattgaaacacttgtatgtagctgttggagaacttctatggcatttctggtcctactttcctgttaatacaccattcctagaagaaagggtagtgaaaatgaaaagtaatttggaacgattccaagttaagaagatctgcccattccaagaaaagattcggaggcagtatttaagcacacatttggtaagtcacatagagatactccaggcagcctacaagctccacacatggcaa

SEQ ID NO: 45606 - DNA, 390 bp, Homo Sapiens
atgaagtcaaagctgcctcctccttcaggaagactttgctcccatagctggcgaacaggaagcggagcagcgccaggaggatctgcgggcgctgctgagggcttctttgcagggacagtgcagcaggcagccagggacaagactgcacggcagccccccatggccaggggaagctcagaaccggagtcgcccgctgcccggcgattctccatccctggatcggtacaggggcatttggacgctgtggggaagtcgcggtctggggatattgggtccagccttcgggtagaagcaggtgataaacgcactcaggccagcccggagcgtcagccacactgcggtgcccacgatgcccagggtgagcgccacgaggcgcaggaaattggctag

SEQ ID NO: 45607 - DNA, 609 bp, Homo Sapiens
atggaagactcaatggacatggacatgagtcccctgagaccccagaacaatcttttccgttgtgaactaaaggctgacaatcactttcaagtggataatgatgaaaatgagcatcagttatcttcaagaacggtcagctcaggggctggtgcaaaggatgaattgcacattgttgaagcagaggcaatgaattacgaaggcagtccaattaaagtcacactggcaactttgaaaatgtctgtacagccaacggtttcccttgggggctttgaaataacaccaccagtagtcttacggttgaagtgtggttcagggccagtgcatattagtggacagcacttagtcactgtggaggaagattcagaggcagaagatgaagaacaggaggatgtgaaactcttaaaaaaagcacccgtgaagaaatctatacaagatactcgagccaaaaatgcacaaaagtcaaatcagaatggaaaagactcaaaaccatcaacaccaagatcaaaaggacaagaatccttcaaaaaacaggaaaaaattcctaaaacacctaaaggacctagttctgtagaagacattaaagcaaaaatgcaagcaagtatacaaaaa

SEQ ID NO: 45608 - DNA, 3371 bp, Homo Sapiens
gcgggcgcatgcgcaagggggcgcgccgcctctgccccgcggcgagggtgtctatggagaggcggcggccgcggctgctgaggcggaggctgaggcagtggcgatggcgccctttcctgaagaagtggacgtcttcaccgccccacactggcggatgaagcagctggtggggctctactgcgacaagctttctaaaaccaatttttccaacaacaacgatttccgtgctcttctgcagtctttgtatgctactttcaaggagttcaaaatgcatgagcagattgaaaatgaatacattattggtttgcttcaacaacgcagccagaccatttataatgtacattctgacaataaactctccgagatgcttagcctctttgaaaagggactgaagaatgttaagaatgaatatgaacagttaaattatgcaaaacaactgaaagagagattggaggcttttacaagagattttcttcctcacatgaaagaggaagaggaggtttttcagcccatgttaatggaatattttacctatgaagagcttaaggatattaaaaagaaagtgattgcacaacactgctctcagaaggatactgcagaactccttagaggtcttagcctatggaatcatgctgaagagcgacagaagttttttaaatattccgtggatgaaaagtcagataaagaagcagaagtgtcagaacactccacaggtataacccatcttcctcctgaggtaatgctgtcaattttcagctatcttaatcctcaagagttatgtcgatgcagtcaagtaagcatgaaatggtctcagctgacaaaaacgggatcgctttggaaacatctttaccctgttcattgggccagaggtgactggtatagtggtcccgcaactgaacttgatactgaacctgatgatgaatgggtgaaaaataggaaagatgaaagtcgtgcttttcatgagtgggatgaagatgctgacattgatgaatctgaagagtctgcggaggaatcaattgctatcagcattgcacaaatggaaaaacgtttactccatggcttaattcataacgttctaccatatgttggtacttctgtaaaaaccttagtattagcatacagctctgcagtttccagcaaaatggttaggcagattttagagctttgtcctaacctggagcatctggatcttacccagactgacatttcagattctgcatttgacagttggtcttggcttggttgctgccagagtcttcggcatcttgatctgtctggttgtgagaaaatcacagatgtggccctagagaagatttccagagctcttggaattctgacatctcatcaaagtggctttttgaaaacatctacaagcaaaattacttcaactgcgtggaaaaataaagacattaccatgcagtccaccaagcagtatgcctgtttgcacgatttaactaacaagggcattggagaagaaatagataatgaacacccctggactaagcctgtttcttctgagaatttcacttctccttatgtgtggatgttagatgctgaagatttggctgatattgaagatactgtggaatggagacatagaaatgttgaaagtctttgtgtaatggaaacagcatccaactttagttgttccacctctggttgttttagtaaggacattgttggactaaggactagtgtctgttggcagcagcattgtgcttctccagcctttgcgtattgtggtcactcattttgttgtacaggaacagctttaagaactatgtcatcactcccagaatcttctgcaatgtgtagaaaagcagcaaggactagattgcctaggggaaaagacttaatttactttgggagtgaaaaatctgatcaagagactggacgtgtacttctgtttctcagtttatctggatgttatcagatcacagaccatggtctcagggttttgactctgggaggagggctgccttatttggagcaccttaatctctctggttgtcttactataactggtgcaggcctgcaggatttggtttcagcatgtccttctctgaatgatgaatacttttactactgtgacaacattaacggtcctcatgctgataccgccagtggatgccagaatttgcagtgtggttttcgagcctgctgccgctctggcgaatgacccttgacttctgatctttgtctacttcatttagctgagcaggctttctttcatgcactttactcatagcacatttcttgtgttaaccatccctttttgagcgtgacttgttttggccccatttcttacaacttcagaaatcttaatttaccagtgaattgtaatgttgtttctcttgcaaattatacttttggtttagaaagggattaggtcttttcaaaagggtgagaacagtcttacatttttcttttaaatgaaatgctttaaagaatgttggtaatgccatgtcatttaaagtatttcatagataattttgagttttaaagtccatggaggtgattggttctctttacacattaacactgtaccaagctttgcagatcttttccgacacacatgtctgaagacttattttcaaagacagcacatttttggaaactaatctcttttccgtaatatttcctttatttcaatgattctcagaaggccaattcaaacaaacccacatttaaggttctttaggattatagaataaattggcttctgagtgttagctcagtgagctaggaaagcaccaatcgatatttgtttcctttagggatactttgttctcaccactgtccctatgtcatcaaatttgggagagattttttaaaataccacaatcatttgaagaaatgtataaataaaatctactttgaggactttaccaagtaatactgttgtgttgtgatttttattataaatctcaatccaggtttactttagtatagaataggactacatactttgtctttggacctcccatgaacttattaccctgacaaatagttttagacagatactgaattttattgagctgaattttctttttgaaatgagttattcagtagtcaaaatttgaatccgtaagtatatctactttgctttgttaaaacatcatgagagtggaggcctgccacccagaaaggcacatactagtgccttttagtacaattttatgtcatgtagaagaaaatggcaatgttcctcctattgatacagatacaggcatatgtcatcttattgcgttttgctttattgcactttgcaaataatgcattttttacaaatggaaggtttatggcaactctgcgttgagccagtctattggtgccatgtttccaataaaacttctcctttcatgtctcgt

SEQ ID NO: 45609 - DNA, 295 bp, Homo Sapiens
tacaaaaacacaggacaccaacctctgaggagctgaaggagaaaattgataaaattatgaaggatcctcattcaacatactttttttttcttttcaactttcaggtggtttttgctcttacagactttgtgatagaaaatcttggaaaacagtttatagagacaccacctgtggacctgcctaccctgtatcaagacatgtcatgcaacactcccctggtattcatcctaagcacaggctcagatcccatgggtgcatttcagaggtttgccagggaaagtggatattcagaacg

SEQ ID NO: 45610 - DNA, 661 bp, Homo Sapiens
gaatctgaggtggtttattttgatggacaaagtgctctgctgtatacacttgataaaaaacctttaaaaccaataagagatgttatttctttgaaatttaaagccatgcagagcaatggaattctacttcacagagaaggacaacatggaaatcacattactctggaattaattaaaagaaagcttgtcttttttcttaattcaggcaatgctaagctgccttccactattgctcctgtgaccctcaccctgggcagcctgctggatgaccagcactggcattccgtcctcatcgagctcctccacacgcaggtcaacttcactgtggacaaacacactcatcatttccaagcaaagggagattccagtaacttggatcttaattttgagatcagctttgggggaattccgacacccggaagatcgcgggcattcacacgtaaaagctttcatgggtgtttagaaaatctttattataatggagtggatgttaccgaattagccaagaaacacaaaccacagatcctcatgatggtaaggaagcctaatgggaaggaaagaaaaaaggacattttattttttgcatttaaaaattattcatgtgaagtctccatttcatctaatattttaagaatcagttcttactttaacagctgcccat

SEQ ID NO: 45611 - DNA, 1938 bp, Homo Sapiens
caggcacgtcccgggggctccagcttctgctcagagcgcggagagccgggccgggcgggcgcgcgcgcaggactcgggccgctcgaggggtccggccggacggtgtcgggagccggacccgtcggcagaggagcgggcgccgcgatggctgagggcagtgccgtgtctgaccctcagcacgccgcgcgtctgctgcgagcgctcagctctttccgcgaggagtctcgcttctgcgacgcgcacctggtcctcgacggggaggagatcccggtgcagaagaacatcctggcggcggccagcccgtacatcaggacaaagttaaactataatcctccaaaagatgatggatcaacttataagattgaacttgaagggatatcggtaatggttatgagagagatcctggattacatcttcagtgggcagatcaggctaaatgaagatacaatccaagatgttgttcaggcagctgacctgctgctactgacggaccttaaaaccctgtgctgtgagtttttggaaggctgcattgctgctgagaactgtattggtatccgtgactttgcactacattactgcctccatcacgttcattaccttgccacagaatacctggagactcatttccgagacgtcagcagcacggaagaattcttagagctgagtcctcaaaagcttaaagaagtgatttctcttgagaagttaaacgttggcaatgaaagatatgtctttgaagcagtaattcgatggatagcacatgatacagaaataagaaaggtccacatgaaggatgttatgtcagctctgtgggtttcagggttggactccagttatttacgggaacagatgctgaatgaaccattagtacgagaaattgtcaaagagtgtagcaatataccgctcagccagccgcagcaaggggaggcgatgctggccaacttcaaaccccggggctactctgagtgcatcgtgactgttggtggagaagagagagtttcacggaaacccacagcagcgatgcgatgcatgtgccctctctatgaccctaacaggcagctttggatcgaactggcccctttaagcatgccgagaattaaccatggagttctctcagcagaaggatttttgtttgtattcgggggccaagatgaaaataagcagactcttagctcaggagaaaagtatgatccagatgcaaatacatggacagcattgccacctatgaacgaggcaagacataacttcggaattgtggagatagatgggatgctgtacattttgggaggagaggatggtgaaaaggagctgatttccatggagtgttacgatatttattctaaaacctggacaaagcaacctgatttgaccatggtcagaaagatcggctgctatgcagctatgaaaaagaaaatctacgccatgggtggaggctcctacggaaagctttttgagtctgtagagtgttatgatcccaggacccagcagtggactgccatatgtccactaaaagagaggaggtttggagcggtggcctgtggagttgctatggagctgtatgtgtttgggggagtccgaagtcgtgaggacgcccagggtagcgagatggtaacttgcaagtccgagttctaccatgatgagtttaaaaggtggatctatcttaacgaccagaatttatgcatccccgccagttcctcttttgtttatggagctgtacctataggagccagtatttatgttattggagatcttgatacaggtaccaattacgactacgtgcgtgagtttaaaagaagcacaggaacctggcaccacactaaaccactccttccatccgaccttcgccgtacaggatgtgcagccttacgcattgcgaattgcaagcttttccgcctgcagcttcagcaaggcttattccgtattcgtgttcattccccttga

SEQ ID NO: 45612 - DNA, 699 bp, Homo Sapiens
atgttttgttgcttaggatatgaatggctgagcggaggctgtaaaacctggcactctgcttgggttatcaatactctggctgaccatcgtcatcgtgggactgactttggtggaagtccttggttacttatcattactgtgtttctgagaagttataaatttgccatctccctctgcacaagttacctttgtgtgtctttcctgaagactatcttcccgtctcaaaatggacatgatggatccacggatgtacagcagagagccaggaggtccaaccgccgtagacaggaaggaattaaaattgtcctggaagacatctttactttatggagacaggtggaaaccaaagttcgagctaaaatctgtaagatgaaggtgacaacaaaagtcaaccgtcatgacaaaatcaatggaaagaggaagaccgccaaagaacatctgaggaaactaagcatgaaagaacgtgagcacggagaaaaggagaggcaggtgtcagaggcagaggaaaacgggaaattggatatgaaagaaatacacacctacatggaaatgtttcaacgtgcgcaagcgttgcggcggcgggcagaggactactacagatgcaaaatcaccccttctgcaagaaagcctctttgcaaccggtgcacttacaatttggtattacctgggagtgaaaagaaatattacagccatgcctaa

SEQ ID NO: 45613 - DNA, 461 bp, Homo Sapiens
ggtacccgaagcgaatttgcaccaaagcagcagctgcgttgctgcagttctatcttcaccttcacgatgtttctcttggtcaaaaacacactcaagtcgtctccaagttcgaagcattcagcaaacaatggcaaggcagagccaccagaaaggtacacctgattttcatgacagatatggtaatgctgtattagctagtggagccactttctgtactgctgtatggacaagtgtagcaacacaaatcgaaatggaatggaacccatcccctgttagctgagccaccccaaaaggacggatagatcagtgatcattccagctggtgtaataccgaattgtttaaaaaacagctcatgattgatgccaagtgaaagcactgtgtgcccattaagaattagccgggcgatatgacattattgaagaaataaagtatatttgaaaccttcaaaaaaaaaaaaaaa

SEQ ID NO: 45614 - DNA, 2031 bp, Homo Sapiens
ctgcctcctgcatacagcccccgatatgttgaggctgcctggtacccgtggtgggtacgagagggcttcttcaaaccagaatatcaggttagggagaccttttccatgtgtatcccacctcccaatgtcactggctccctgcacattggccacgcactcacggtggccatacaggatgccctcgtgcgctggcaccggatgcgtggggatcaagtgctgtgggtccctggttcagatcatgcaggaattgctacacaagctgtggtggagaaacaactgtggaaggaacggggagtgaggagacatgagctgagccgggaggccttccttagggaggtgtggcagtggaaggaggcgaaaggtggagagatctgtgagcagctgcgagctctgggtgcctccctggactgggatcgagagtgttttaccatggatgttggctcctcagtggctgtgactgaagcttttgtgcggctctacaaggcggggttgctgtaccggaaccatcagcttgtcaactggtcatgtgctttaagatcagccatctcggacattgaggtgaggcggagagagggaagcaggtttgtgagagctctgaggcagagtgatgcagaggttgtggtaggaaccacaaggccagagacgctgcctggagatgtggctgtggccgttcatccagacgactcgcgatacacacatctacacgggcgacagcttcgtcaccccttgatggggcagcctcttcccctcatcacagactatgctgttcagccacatgtgggcacgggggcagtgaaggtgactccagctcacagtcctgccgatgctgagatgggggcccgacatggcttgagccccttgaatgtcattgcggaggatgggaccatgacctccctctgcggggactggctgcagggtcttcaccggtttgtggcccgggaaaagataatgtctgtgctgagtgaatggggcctgttccggggcctccagaaccaccccatggtactgcccatctgcagccgttctggggatgtgatagaatacctgctgaagaaccagtggtttgtccgctgccaggaaatgggggcccgagctgccaaggctgtggagtcgggggccctggagctcagtccctccttccaccagaagaactggcagcactggttttcccatattggggactggtgtgtctcccggcagctgtggtggggccatcagattccagcctacctggttgtagaggaccatgcgcaggtggatcctgatgtcctagacacatggttttcttctgccctgttccccttttctgccctgggctggccccaagagaccccagaccttgctcgtttctaccccctgtcacttttggaaacgggcagcgaccttctgctgttctgggtgggccgcatggtcatgttggggacccagctcacagggcagctgcccttcagcaaggtgcttcttcatcccatggttcgggacaggcagggccggaagatgagcaagtccctggggaatgtgctggacccaagagacatcatcaggcaggggcaggacttctggtgctgctgccacctacatgcagactacctcgattcttcccttccagcgggcgacttgcacctgtcagtctctgaggtccagagctgccgacatttctgcaacaagatctggaatgctcttcgctttatcctcaatgctttaggggagaaatttgtgccacagcctgctgaggagctgtctccctcctccccgatggatgcctggatcctgagccgccttgccctggctgcccaggagtgtgagcggggcttcctcacccgagagctctcgctcgtcactcatgccctgcaccacttctggcttcacaacctctgtgacgtctacctggaggctgtgaagcccgtgctgtggcactcgccccgccccctggggccccctcaggtcctgttctcctgcgctgacctcggcctccgcctcctggccccactgatgcccttcctggctgaagagctctggcagaggctgccc

SEQ ID NO: 45615 - DNA, 518 bp, Homo Sapiens
caaatccatagggagctctgccttaccattgggttcctaattaactgagtgagtgggtgtgttctgcatggtgagaggcattggaatgatgcatcagaaaacatgtcataatgtcatcactgtaatatgacaagaattgcagctgtggctggaacctttataaagtgaccaagcacaccttttcatccagtctcagcgtggggtgaagcctagcagctatgaggatccattatcttctgtttgctttgctcttcctgtttttggtgcctgttccaggtcatggaggaatcataaacacattacagaaatattattgcagagtcagaggcggccggtgtgctgtgctcagctgccttccaaaggaggaacagatcggcaagtgctcgacgcgtggccgaaaatgctgccgaagaaagaaataaaaaccctgaaacatgacgagagtgttgtaaagtgtggaaatgccttcttaaagtttataaaagtaaaatcaaattacatttttttttcaaaaaaaa

SEQ ID NO: 45616 - DNA, 1053 bp, Homo Sapiens
gtggccttggcaaaagaggaagtcaaatctggaaccaaggggtcccagcccatgtccccctctgatttcctagacaaacttatggggcgaacatctggatatgatgccaggattcggcccaattttaaagcctcctggaatgccctgccaatggcctgtgctttgctaccctcaggcccacccgtgaacgtgacctgcaacatcttcatcaacagtttcagctccatcaccaagaccacaatggactaccgggtgaatgtcttcttgcggcaacagtggaatgacccacgcctgtcctaccgagaatatcctgatgactctctggacctcgatccctccatgctggactctatctggaagccagacctcttctttgctaatgagaaaggggccaacttccatgaggtgaccacggacaacaagttactgcgcatcttcaagaatgggaatgtgctgtacagcatcaggctgaccctcattttgtcctgcctgatggacctcaagaacttccccatggacatccagacctgcacgatgcagcttgagagctttggctacaccatgaaagacctcgtgtttgagtggctggaagatgctcctgctgtccaagtggctgaggggctgactctgccccagtttatcttgcgggatgagaaggatctaggctgttgtaccaagcactacaacacagggaaattcacctgcatcgaggtaaagtttcacctggaacggcagatgggctactatctgattcagatgtacatccccagcctactcatcgtcatcctgtcctgggtctccttctggatcaacatggatgctgcccctgcccgtgtgggcctgggcatcaccaccgtgctcaccatgaccacccagagctctggctcccgggcctctttgcctaaggtgtcctacgtgaaggcaatcgacatctggatggctgtgtgtctgctctttgtgttcgctgccttgctggagtatgctgccataaattttgtttctcgtcagcataaagaattcatacgacttcgaagaaggcagaggcgccaacgc

SEQ ID NO: 45617 - DNA, 821 bp, Homo Sapiens
ctgcggacttccgcagtgtttgtgtccctgggtacttgagattagggagtggtgatgactcttaacgaccatgctaccttcaaacatctatttaacaaagcacatcttgcaccgcccttaatccatttaaccctgagctgacacagcacatgtttcagagagcacgggattgggggtaaggttatagattaacagcatcccaaagcagaagaatttttcttagtacagaacaaaatggagtctcctatgtctacttctttctacacagacacagtaacaatctgatctctctttcttttccccacatttcccccttttcttttcgacaaaaccgccattgtcatcatggcccgttctccatggtcgctgtctcttcagaggtgttgggtacatctgcagaaaggctgtcacttcacacttggaagattgcacagcagccagtcagaggcgctcctcacctcccagacggggcggctgggcagaggcactcctcacctcccagatggggcggccgggcagaggcgctcctcacttcccagacggggtggcagccaggcaaagacgctcctcacctcccagatgggacggggcggccaggcagaggtgctcctcacttcctagacggggcggccgggcagaggggctcctcacatcctagacaatgggcggccaggcagagacgctcctcacttcctagatggggtggcggccgggcagaggctgtaatcttagcactttgggaggccaaggcaggtggctgggaggtggaggttgtagcgagccgagatcatgccactgcactccagcctgggcaacattga

SEQ ID NO: 45618 - DNA, 1011 bp, Homo Sapiens
aactcaaaaggccagagtgtctcttctcctccaaatgattgtaacatctctccagcaagggtacagaactggacggaggatgagatggaagaattgacagaagtaggcttcagaagatggataataaaaaacaagactccgtcaaaaaaaaaaaaaaagtacgctgagctaaaggagcatgttttagcccaatgcaaacaagctaaaaaccttgataaaaggtttgaggagctgctaactagaataaccagtttagagaggaacataaattacctgatggagctgaaaagcatagcaatagtacttcatgaagcacagagcattacactttgtgaagtggaagaaaggatttcagagtttgaagaccaccttgctaacataaggcatgcagataagattagagaaagaatgaaaaggaatgaacaaagcctccaagaaatatgggactttgtaaaaaagaccaaactacgattgattggagtacctgaagatgatgaggagcatggaaacaagctggaaaacacacttcagaatactatacaggagaacttcctcaacctagcaagacaggccaacatgcagattcaggaaatacagagaatgccactaagataccccttgagaagatcaaccccaagacacataattatcagattctccaaggttgaaattaaggaagaaaatattaagggtagccagagagaaggccaggtcacctatgcagggaagcccatcagactaacagcagacctttcagcagaaactgtacaagccagaagaaaatggggaccaatattcaacattcttaaaagaaaggattttcaacctagaatttcatatccagccaaactaagcttcataagtgaaggagaaataaaatcctgtacagacaagcaaatgctgagggattgtgttaccaccaggtctgccttgcaagagctcctgaaagaagcattgaatatggaaaagaaaatctggtaccagccactgcaaaaacacaccaaaatataa

SEQ ID NO: 45619 - DNA, 315 bp, Homo Sapiens
atgcctttcttggacgtgcagaaaaggtttggccttaacacagatgggtggttgacaatccaaagtgctgaacagccctacaagattcctgctcgacaccatccttttgaaaaagaatggagagaatgtgcacatggaattggtggtatttggggagagaaagagtgcagaatagaatacgactatttcatagagtgtatactttggcagaaaatgatgagatgtgtgagtaccatcaggaagcagtggaataagctgataaaggaagggaagtacacccctccacctcaccacgtgggcaagggggagcctcgg

SEQ ID NO: 45620 - DNA, 918 bp, Homo Sapiens
aatacaacctcagtcaccgaatttctcctcttgggagtgacagacattcaagaactgcagccttttctcttcgtggttttcctcaccatctacttcatcagtgtgactgggaatggagccgttctgatgattgtcatctccgatcctagactccattcccttatgtatttcttcctgggaaacctgtcctacctggatatctgttactctacggtgacactgccaaaaatgctgcagaactttctctctacacacaaagcaatttctttcttgggatgcataagccagcttcatttcttccactccctgggcagcacggagtccatgttgttcgccgtgatggcatttgacctctctgtggctatctgcaagccacttcgctacactgtcatcatgaaccctcagctctgtacccagatggccatcacaatctgggtcattggttttttccatgccctgctgcactccgtaatgacttctcgcttgaacttctgtggttccaaccgtatccatcattttctctgtgatattaagccattgctaaagctggcctgtgggaacactgagcttaatcagtggctactcagtactattatcctggcaacagccctcctcatcctctgcccctttggcctcatcctgggctcctacgggcgtatcctcgttaccatcttccggatcccatctgttgcgggccgccgcaaggccttctccacctgctcctcccacctgatcatggtctccctcttctatggcaccgcactctttatctatattcgccctaaggccagctacgatccggccactgaccctctggtgtccctcttctatgctgtggtcacccccatcctcaaccccatcatctacagcctgcggaacacagaggtcaaagctgccctaaagagaaccatccagaaa

SEQ ID NO: 45621 - DNA, 1613 bp, Homo Sapiens
acccctcaacttcaaagagtcacaaatcacccttaatcaaaaagggtgcagaaatttttttgggccctccccgccatgagctcctacgtagccaattcattctataagcagagccccaatatccctgcctataacatgcaaacttgtgggaactatggatcggcctcagaggtgcaggcatccaggtactgctacggcggattggacttaagcatcactttcccaccgcctgcgccttccaactctctccacggggtagacatggctgccaacccccgggctcaccccgaccgccccgcctgcagcgccgcggccgctccgggacacgctccgggcagagacgaagcggctcctctgaaccccgggatgtacagtcagaaggcggctcgcccggcgctggaggagcgagctaagagcagtggggagatcaaagaggagcaggcgcagacagggcagcccgccggactgagccagccaccggccccgccacagatttacccgtggatgaccaaactgcacatgagccacgagacggacggcaagcggtcccgaaccagttacacgcgctaccagactctggaactcgagaaagaattccactttaaccgctacctcactcgccgcaggcgcatagagatcgccaacaacttgtgtctcaatgagagacagatcaagatctggttccagaaccgcaggatgaagtggaagaaagattccaaaatgaaaagcaaagaggctctttagaggcagcgggggaggcccgcagagcgcgcccctagccggttcctgtccctgcgcctttccttttcgcctttcctctctatatttcgggtcgggggcaggtgctggagcactgggctcccgggccccacagacaaaagcgcttttccttggcattccgcatccctaccgacccagggttcccgcggggctgtcggcgctgccccatctcccctcagctcggctcagctcggtacccggggcccagggcaagctccgcaggacttccccggagggctgcggcgtacaggctggcgcagaacgaaccttggcctgggccgtatctccggctcccagcctcagcgcggccctcccgagttaaggtgggcccggcccgcgccacaggaccctcgccggaccctctaacctcgccctctcctttgttcccggctggacgggttagacagccaaaggctggcgagagtctggccctagactcggggtgcttccttgtagcgactaaactagattttcacttatgaatgatttgcatatgaaaggagagcatcggcctagggcccccacagttgctctatgctttccaaaccttatctccacaacctcttccccccaaaacccgggaacctccccagcctgcgcctgctgcatgccctctcaggccggcagccccagcctgctagctagctcaactagtggggtttcctggcactggaccccagcaagtggtcctagaggccctttgctgtcccatagtccctgccacgaatttctgtgccctcctgacccattgctgttgtccaactatttattgactctgggtccttcctgaaactatattttgtcatatcaaataaagagagaacaggactaaa

SEQ ID NO: 45622 - DNA, 456 bp, Homo Sapiens
atggccgcgtccagtcaaggaaactttgagggagatattgagtcagtggaccttgcagaatttgctaagcagcagccgtggtggcgtaagctgtttgggccagaatctggactctcagccgaaaagtatagcgtggcaacccacctgttcattggaggtgtcactggatggtgcacgggttttatattccagaaggttggaaagttggctgcaacagctgtgggaggtggattttttctccttcagcttgcaaaccattctgggtacatcaaagttgattggcaacgagtggagaaggacatgaagaaagccaaagagcagctgaagatccctaagagcactcagatacctaaccaggtcaggagcaaagctgaggaggtggtgtcatttgtgaagaaaaatgttctagtgactgggggatttttcggaggctttctgcttggcatggcatcctaa

SEQ ID NO: 45623 - DNA, 2015 bp, Homo Sapiens
gagaggaaaagggaaggaggagactgagtgattaagtcacccactgtgagagctggtcttctatttaatgggggctctctctgcccaggagtcagaggtgcctccaggagcagcaggagcatggccgaggatctgggactgagctttggggaaacagccagtgtggaaatgctgccagagcacggcagctgcaggcccaaggccaggagcagcagcgcacgctgggctctcacctgctgcctggtgttgctccccttccttgcaggactcaccacatacctgcttgtcagccagctccgggcccagggagaggcctgtgtgcagttccaggctctaaaaggacaggagtttgcaccttcacatcagcaagtttatgcacctcttagagcagacggagataagccaagggcacacctgacagttgtgagacaaactcccacacagcactttaaaaatcagttcccagctctgcactgggaacatgaactaggcctggccttcaccaagaaccgaatgaactataccaacaaattcctgctgatcccagagtcgggagactacttcatttactcccaggtcacattccgtgggatgacctctgagtgcagtgaaatcagacaagcaggccgaccaaacaagccagactccatcactgtggtcatcaccaaggtaacagacagctaccctgagccaacccagctcctcatggggaccaagtctgtatgcgaagtaggtagcaactggttccagcccatctacctcggagccatgttctccttgcaagaaggggacaagctaatggtgaacgtcagtgacatctctttggtggattacacaaaagaagataaaaccttctttggagccttcttactataggaggagagcaaatatcattatatgaaagtcctctgccaccgagttcctaattttctttgttcaaatgtaattataaccaggggttttcttggggccgggagtagggggcattccacagggacaacggtttagctatgaaatttggggcccaaaatttcacacttcatgtgccttactgatgagagtactaactggaaaaaggctgaagagagcaaatatattattaagatgggttggaggattggcgagtttctaaatattaagacactgatcactaaatgaatggatgatctactcgggtcaggattgaaagagaaatatttcaacaccttcctgctatacaatggtcaccagtggtccagttattgttcaatttgatcataaatttgcttcaattcaggagctttgaaggaagtccaaggaaagctctagaaaacagtataaactttcagaggcaaaatccttcaccaatttttccacatactttcatgccttgcctaaaaaaaatgaaaagagagttggtatgtctcatgaatgttcacacagaaggagttggttttcatgtcatctacagcatatgagaaaagctacctttcttttgattatgtacacagatatctaaataaggaagtatgagtttcacatgtatatcaaaaatacaacagttgcttgtattcagtagagttttcttgcccacctattttgtgctgggttctaccttaacccagaagacactatgaaaaacaagacagactccactcaaaatttatatgaacaccactagatacttcctgatcaaacatcagtcaacatactctaaagaataactccaagtcttggccaggcgcagtggctcacacctgtaatcccaacactttgggaggccaaggtgggtggatcatctaaggccgggagttcaagaccagcctgaccaacgtggagaaaccccatctctactaaaaatacaaaattagccgggcgtggtagcgcatggctgtaatcctggctactcaggaggccgaggcagaagaattgcttgaactggggaggcagaggttgcggtgagcccagatcgcgccattgcactccagcctgggtaacaagagcaaaactctgtccaaaaaaaaaaaaataaaata

SEQ ID NO: 45624 - DNA, 429 bp, Homo Sapiens
tgtgtgctggcactgcaaggcgggatgctgtaccccaaggagagtccgtcgcgggagcccaaggagctgggtggcctctggagcttccctgccgatttggacaaccgacgccagggctttaaggagaagtggtacccgcggccactgcaggagtcaggccccaccctggacgtgctggttcccttcagcttcaacgacattggccaggactggcgcctgcggcattttgttagctggatgttgtacgaatgggaggtgaccctgccggagaaatggacccaggacctgcgtgcaagagtggtgctgaggattggcagtgcccactcctatgatatcgtgtgggtgaatggtgtcaacacgctagagcatgagggggacatcagcagcttggtccaggtggggcctctgccctcctgcctctgcgtcact

SEQ ID NO: 45625 - DNA, 4356 bp, Homo Sapiens
gagcagcttaggcgccaccaaggcaagaacctagcctccgaggaccccaaaaagaagagagctcagaagccctcccacatgagaagaaacatacgaaagctactccgggaggatcaattggagcctgttaccaaagcagcacagcaagaagagttggaaagaaggaagcgcctggagcagcagaggaaagattatgcagcccctattcctactgttccgctggagttcctccctgaggaaattgctttaagggcaagtgacggtccccaactgcctcctcgggtcttggcccaggaagtcatttgtttggacagtagcagtggcagtgaggatgaaaaaagcagtcgagatgaggtgattgaactgagctctggagaggaggacactctgcacattgtggacagcagtgaatctgtcagtgaagatgatgaggaagaagagaagggtggcacccatgtcaatgatgtcttaaaccagcgtgacgcccttgggcgggtccttgtcaacctaaaccaccctccagaggaggaaaatgtcttccttgccccacagttggcacgggctgtgaaacctcatcagattggcgggatccggttcctttacgataacctagtggagtctctggagaggtttaagaccagcagtggctttggctgtattctggcccacagcatgggtctggggaaaactttgcaagtgatctctttcatcgacgtcctcttccgccacacgccagccaaaacagtccttgccattgtgccggttaatactcttcagaattggctggcagagttcaacatgtggcttccacctcctgaagccctcccggctgacaacaagcctgaagaagtccagcctcggttctttaaagttcacatcttgaatgatgagcacaagacgatggcatctcgtgctaaagtgatggctgattgggtgtcagagggtggcgtgctgctgatggggtacgagatgtacagactcctcactctgaagaaatcatttgccacaggtagaccgaagaaaaccaagaagcgttctcacccagtcatcattgatctagatgaggaagatcggcagcaggagtttcggagagagtttgagaaggctttatgccgccctggccctgatgtagtaatctgtgatgagggacaccgcatcaaaaactgccaggccagcacctcacaggctctgaagaatatccgctctcgccgccgggtggtgctgactgggtaccctctgcaaaacaacctcattgagtactggtgcatggtggactttgtgcgcccagacttccttggcacccggcaggagttcagcaacatgtttgaacgccctatcctgaatgggcaatgtattgacagcacacctcaggacgtccgcctcatgcggtaccggagccatgtcctgcacagtcttctggagggctttgtgcagaggagaggccacactgtgctgaagattcatctccctgccaaggaagaaaatgtgatccttgtgcggctctccaagatccagcgagatttgtatacacagttcatggatcgcttccgggactgtggtagcagcggttggctggggctgaacccccttaaggcattctgtgtgtgttgcaagatctggaatcaccctgatgtgctgtatgaagcccttcagaaggagagcttggccaatgagcaggacctagacgtggaagaacttggctctgcagggaccagtgcccgctgtccaccacagggaacaaaaggcaagggagaggatagcaccttggcttcctcgatgggagaggcaaccaatagcaagttcctacagggcgttggcttcaaccctttccaggagcgaggcaacaacattgtcacatatgaatgggccaaggaccttctgactaattaccagactggagtcctagaaaactctcccaagatggtactgcttttccacctgattgaggaaagtgtgaagcttggggacaagatccttgtgtttagccagagtctttccaccttggctctcatcgaggaattccttggaaaacgagaagtaccctgtccacctggtaccgaggggcaaggagcacagaagtgggttcgaaacatcagctacttccggctagatggtagcacccctgcctttgagagggagcggcttattaatcagttcaatgatcccagcaacctcaccacctggctgttccttctctctacaagggccggatgcttgggtgtgaatctgattggtgccaaccgagtggtggtgtttgatgcttcctggaacccttgccatgatgcccaggcagtatgtcgggtataccgttatggccagaaaaagccctgttacatctatcgccttgtggctgattacactctagaaaagaagatctatgaccgtcagatttccaagcagggcatgtcagatcgggtggtggatgatctaaatccaatgctgaacttcacacggaaagaggtggaaaacctactgcactttgttgagaaggagccagctccccaagtttccttgaacgtaaaggggatcaaggagtcagtcctgcaactggcctgtctgaagtaccctcacctcatcaccaaggagcctttcgagcatgagtcattgctcttgaaccgaaaggatcacaagctaaccaaggctgagaaaaaagcagcaaagaaaagctatgaggaagacaaacgcacatcagtcccctatacccgcccatcgtatgcgcagtattaccctgccagcgatcagagcctgaccagcatccccgccttcagccagagaaactggcagccaactttgaagggtgatgaaaagcctgtggccagtgttcgtcctgtgcagtccacccccatccccatgatgccccggcatgtcccattgggaggaagtgtaagctctgcctccagcacaaatccatccatgaactttcccatcaactacttgcagcgtgcaggagtccttgtgcagaaggtggtcaccacgacagatattgttattcctggactcaacagctccacagatgtacaggcaagaattaatgctggtgagagcatccacatcatccgtgggacaaaagggacgtacatccgtaccagtgatggacggatctttgctgtccgggcaactggcaaaccaaaggttcctgaagatggtcggatggctgcctcaggttcccagggaccttcttgcgagtccacaagcaacggcagacacagtgcctcatcacccaaagcccccgaccctgaggggctggccaggcccgtctctcctgacagcccagagatcatcagtgagcttcagcagtatgcagatgtggctgctgcccgggaatcccgtcagagctccccaagcaccaatgccgccctgcctggccccccggcccaacttatggacagcagtgctgttcccgggacagctctcggaactgagcctcgactagggggtcattgcctcaatagttccctcttggtgactggccagccctgtggtgacaggcacccagtgctggacttaaggggccacaagcgaaagttggccacaccacctgctgcccaggagtcatcccgccggcggtccaggaagggtcatctgccagcccccgtgcagccgtatgaacacgggtatccagtctctggcgggtttgccatgccacccgtctccttaaaccataacctcaccacccccttcacctcccaggctggggagaactccctgtttatgggcagtaccccctcctactaccagctgtccaatttgctggcagatgcccgcctggtgtttccagtgactactgaccctctggtgccagcaggccccgtcagttcctcttccacggctacctcagtcactgccagcaacccctccttcatgctcaacccttctgtgccagggatactacccagctattcactcccattctcacagccactcctgtccgagccgaggatgtttgcgccttttccttcccctgtcttgcccagcaacctttcgcggggcatgtctatctatccaggctacatgtccccacatgcaggctacccagctggtggcctcctacggtcccaggtgcctccatttgactctcatgaggttgccgaggttgggttcagctccaatgatgatgaggataaagacgatgatgtgatagaggtcactgggaaatagctagggagcccctccccacctcacttggggcccccagcaggttgcccaccaagctgaaaggcagtgatttagaccttttgagaataggacacttggcaggagggaaaaggaagaggacaaaggagggtggttggccaaagtggcagagctctgttgctgtttaacaaaagaggcaaaaaaaaaaaaaaaaaaaaaaaa

SEQ ID NO: 45626 - DNA, 480 bp, Homo Sapiens
atggttacatgtgagctctttgaaaactggcaagcattttgccaatataaagaacgacttctactctcagtagcagtgagaataaataggaacaacaatggctgtttgccatgcagcaggtgctcagaactatctgttgaaataatgagaactccacccctgcagtttgaaggcaagcaacccgcagggccccagagaggagccacaggaggctccaggagactgcgcaaggcccagaatggatgggcaaggcggggattcgacttggctcttgcagaggcagccaattggccctcatccagccctgccaaggcccgtgtggcatgggcaggcttcatggcaattctctctccaggtctgcccctctggcccagctgggacaggtgcctggctccacagcctctttgctgtggctttacaggaaacaggtgcttgtgccaatcagcagagagcgcctggtgcagggtgtggaggagatga

SEQ ID NO: 45627 - DNA, 642 bp, Homo Sapiens
atgtccgtggagctcgaggaggccctgccagtgacgaccgccgagggaatggccaagaaggtgaccaaggctggcggctcggcggcgttgtccccatctaagaagaggaagaatagcaagaagaagaaccagccgggcaagtacagccagctggtggtggagaccatccgtaggctgggcgagcgcaacggctcgtcgctggccaagatctacaccgaggccaagaaggttccgtggttcgaccagcagaatgggcgcacctacctcaagtactcgatcaaggcgctggtgcagaacgacacgcttctgcaggtgaagggcaccggcgccaacggttccttcaagctcaaccgcaagaagctggagggcggcggggagcggcgcggagccccggcggccgccaccgccccggcccccaccgcgcacaaagcgaagaaggcagccccgggcgcggccggctcccggcgcgcggacaagaagcccgccaggggccagaagccggagcagcgctcgcacaagaagggcgctggcgccaagaaggacaaaggcggcaaggccaagaagacggcggccgccgggggcaagaaggtgaagaaggcggccaagcccagcgtccccaaagtgcccaagggccgcaagtga

SEQ ID NO: 45628 - DNA, 2432 bp, Homo Sapiens
atgatgggctccgtgctcccggctgaggccctggtgctcaagaccgggctgaaggcgccgggactggcgctggccgaggttatcacctccgacatcctgcacagcttcctgtacggccgctggcgcaacgtgctcggggagcagctcttcgaggacaagagccaccacgccagccccaagacagccttcaccgccgaggtgctggcgcagtccttctccggcgaagtgcagaagctgtccagcctggtgctgcctgcggaggtgatcatcgctcagagctccatccctggcgagggcctcggcatcttctccaagacgtggatcaaggcgggaaccgagatgggccccttcaccggccgcgtgatcgccccggagcacgtggacatctgcaagaacaacaacctcatgtgggaggtgttcaatgaggatggcacggtgcgctacttcatcgatgccagccaggaggaccaccggagctggatgacctacatcaagtgtgcacgtaacgaacaggagcagaacctggaggtggtccagatcggcaccagcatcttctacaaggccattgagatgatcccacctgaccaggaactgctggtgtggtacggaaactcacacaacaccttcctggggatcccaggtgtgcccgggctagaggaggaccagaaaaagaacaagcatgaggacttccacccggcggactcggcggctggccccgcgggccgcatgcgatgcgtcatctgccaccgcggcttcaactcgcgcagcaacctgcgctcgcacatgcgcatccacacgctggacaagcccttcgtgtgccgcttctgcaaccgccgcttcagccagtcgtccacgctgcgcaaccacgtgcgcctgcacacgggcgagcgcccctacaagtgccaggtgtgccagagcgcctactcgcagctggccggcctgcgcgcccaccagaagagcgcgcggcaccggccgcccagcaccgcgctgcaggcacactcgcccgcgctgcccgccccgcacgcgcacgcgcccgcgctcgccgccgccgccgccgccgccgccgccgccgccgcgcaccacctgccggccatggtgctgtgagcgcgcccgcgcccccgccgggccccgcgcgctcctgggtccccggcaccccggccccgcagcgcgactcgccctccagccccaacccccggcccggcgccgccgcggagccccgcgcgctggggttgcgccccggaggcggatctcaggcacccccgccttggcccgtgtcgcagatgaggacactgagggcggcgtccctcacccaggccacgcagctggtgcggctgttcggccgcctcctctgggagggggtccccctgcctggcctcgcccccgagtctccctgctgctgtagagccgggcgcccaggccggcatccccctcgtgggtggcaggagagcggacttagagcccccgagggcccctcagcagaggaaggggagtcccctcctccgccaccgagagtcctgtgcttcggaatgaagggagggcgacctccttgtccgggtgtggtcgggcgcgggggttgtgggggcgccatctcctcttccggcccctgggactggtgtcctgaagtgtcgggagtccttacgcaaccttgacatgtgcgggctactggggtccatcggcagcgggaagagacccggagagatgcatcttctgggcccttctctcctttaggccagcttacccccaaacctggctcctggggacggatgaggaaggagctctttgcagtgcaccaggcacgttgagagtggaggcacaatggaaatcctctgtgggaccccgagcaagaccctgcacctctttgggcctcagtttccccatctgtaaaatgaaggagttggaccaatgccccctccccttcagctgtgacatcgtgcctgggaaggcgaaatatacccccagccccttccaacacacacactccagcgagaggagggcaagactggaaccgctgcccgagaggttaaggtggcttctgtggccacgaagcgcttccgagctgtgcccagtcccgggaattccgcccagtctgcccacacttccctcggtccctgcccgtttcctcaaattcgggccgtgcgcgccctctggtgtcgcctctcacactttgcagtcatttaccaggattcccgtagggcgttttgtaaaataaactataatattaatgaaaagtataaaatgtatagagttttcaagaaactgcgttctacttccagaagatggtcactttaaccttgtaaatatttatctaaaatgatatttacaaaactgtaatatattattatttgattgtatatgtacaactgtaaatacatttgtacctctcttgtattctaaaataaaaattacttggaacatttatcatttagcatctg

SEQ ID NO: 45629 - DNA, 354 bp, Homo Sapiens
atggcagctgtgccagcgccaatagacctggatgatgcggacagcgttgagcaaacgacagtaacgctggcggacacaccacatgcggacccaggactgcagcctgactgctgcccattcctgctgcacatagaactccaacaccatcctccgcctctttgccagcagcttctccagcacctgcctccaccagcactgaatgatccaagccctgagggctgcatgcagcagtgtgcgtcgcaccagcatgccccgccaccaggcctggatgaaaacagctgcagacctttctgtcatgatggtcttctcttctgggccttacaagagaaaacagacacactcagggtatgctag

SEQ ID NO: 45630 - DNA, 2044 bp, Homo Sapiens
tctaaagcacccactatggatgcacagcaggacagacccaagtcccaagactgcctgggcctagtggcccccctagcatctgctgcacaggtcccctctacagctcccgtgtctgggaagaagcacagaccaccaggacccctgttctcctcctcagatccccttcctgccaccttttcccactcccgggactcagcccaggtcacctcgctgattcctgcccccttcactgctgaaagcatggatgccggcatgagaagaacaaggcctggcacgtcggctgctgcaggtgccgcagcagcccctctccccttcacattgaaccccatgttggggttactactcaatgcaatggatgcaggcccctcatgtttctgggcctcagccacagctgcagcaggtgcccagaggtcagaagtgagatataaccagagatcccagacctcccggaccagatcgtgcaccaaacgaaatgccagctcgagctcctacagctctacggaaggcctcccggaactaaagcggaggagggggccagcctcatcccactgccagctggccctcagttcctcaaacacagtgagtgaggacggacctcaggctgtctcttcgggtcacagccactgtgaaaacaacgcagatacagcaccagggcagacactcgcccccaggggtggctcccccagatcccaggcctctaggccccgcatcaacagtgcactgcaagttgaggacaaggccatctcgcactgcagaccctcatggccttcccacactttgtcctcacttgcaacaggggcttctggtgggtctagcgtttctaaagcacccactatggatgcacagcaggacagacccaagtcccaagactgcctgggcctagtggcccccctagcatctgctgcacaggtcccctctacagctcccgtgtctgggaagaagcacagaccaccaggacccctgttctcctcctcagatccccttcctgccacatcttcccactcccgggactcagcccagtatacctcgctgattcctgcccccttcacagctgcaagcatggatgccggcatgagaagaaggaggcctggcacgttggctcctgcagctgccgcagcagcccctcccccctccacattgaaccccatgttggggttactactcaatgcaatggatgtaggcccctcatatttctgggcctcagccacagctgcagcaggtgcccagaggtcagaagtgagatataaccagagatcccagacctcccggaccagatcgtgcaccaaacgaaatgccagctcgagctcctacagctctacggaaggcctcccggaactaaagcggaggagggggccagcctcatcccactgccagctggccctcagttcctcaaacacagtgagtgaggacggacctcaggctgtctcttcgggtcatagccactgtgaaaacaacgcagatacagcaccagggcagacactcgcccccaggagtggctccgccagatcccaggcctctaggccccgcatcaacagtgcactgcagcttgaggacaaggccatctcacactgcagaccctcacggccttcccacactttgtcctcacttgcaacaggggcttctggtgggtctagcgtttctaaagcacccactatggatgcacagcaggacagacccaagtcccaagactgcctgggcctagtggcccccctagcatctgctgcacaggtcccctctacagctcccgtgtctgggaagaagcacagaccaccaggacccctgttctcctcctcagatccccttcctgccacctcttcccactcccgggactcagcccaggtcacctcgctgattcctgcccccttcacagctgcaagcatggatgccggcttgagaatgaatgccggcatgcgaagaatgttttgtgttcgaaattgtttgaggggtttgggtttatatttgttggttttttttttttttttttttttttttttttgcttacatgggcatccttcagcttttaattatccgaaaaattctattt

SEQ ID NO: 45631 - DNA, 1401 bp, Homo Sapiens
atggagccatggccctgctccccgggcggcggcggcgggacccgcgcccggcacgtcatcatcaacgtgggcggctgccgcgtgcgcctggcatgggccgcgctggcgcgatgccccctcgcgcgcctggagcgcctgcgcgcctgccgcggccacgacgacctgctgcgcgtgtgtgacgactacgacgtgagccgcgacgagttcttcttcgaccgcagcccgtgcgccttccgcgccatcgtggcgcttttgcgcgcagggaagctgcgactgctgcggggcccgtgcgcgctggccttccgcgacgagctggcctactggggcatcgacgaggcgcgcctggagcgctgctgcctgcgccgcctgcgccgccgcgaggaggaggcggccgaggcccgcgcggggccgacggagcgcggggcgcaggggagcccggcgcgcgccctgggacctcgggggcggctgcagcgcggccggcggcgcctgcgcgacgtggtggacaacccgcactcggggctggcgggcaagctcttcgcctgcgtgtccgtgtccttcgtggccgtcacggccgtgggcctctgcctgagcaccatgccggacatccgcgccgaggaggagcggggcgagtgctcccccaagtgccgcagcctgttcgtgctggagaccgtgtgcgtggcctggttctccttcgagttcctgctgcgctccctgcaggccgagagcaagtgcgccttcctgcgcgcgccactcaacatcattgacatcctggcgctcctgccgttctacgtgtcgctgctgctggggctggcggcaggcccgggcgggaccaagctcctggagcgcgcggggctggtgctgcggctgctgcgtgcgctgcgcgtgctctacgtgatgcgcctggcgcgccactcgctggggctgcgttcgctgggcctgaccatgcgccgctgcgcgcgcgagttcgggctgctgctgctgttcctctgcgtggccatggcgctcttcgcgccactggtgcacctggccgagcgcgagctgggcgcgcgccgcgacttctccagcgtgcccgccagctattggtgggccgtcatctccatgaccaccgtgggctacggcgacatggtcccgcgcagcctgcccgggcaggtggtggcgctcagcagcatcctcagcggcatcctgctcatggccttcccggtcacctccatcttccacaccttttcgcgctcctactccgagctcaaggagcagcagcagcgcgcggccagccccgagccggccctgcaggaggacagcacgcactcggccacagccaccgaggacagctcgcagggccccgacagcgcgggcctggccgacgactccgcggatgcgctgtgggtgcgggcagggcgctga

SEQ ID NO: 45632 - DNA, 1152 bp, Homo Sapiens
atgctgtcccgaaagaaaaccaaaaacgaagtgtccaagccggccgaggtgcaggggaagtacgtgaagaaggagacgtcgcctctgcttcggaatcttatgccttcattcatccggcatggtccaacaattccaagacgaactgatatctgtcttccagattcaagccctaatgccttttcaacttctggagatgtagtttcaagaaaccagagtttccttagaactccaattcaaagaacacctcatgaaataatgagaagagaaagcaacagattatctgcaccttcttatcttgccagaagtctagcagatgtccctagagagtatggttcttctcagtcatttgtaacggaagttagttttgctgttgaaaatggagactctggttcccgatattattattcagacaatttttttgatggtcagagaaagcggccacttggagatcgtgcacatgaagactacagatattatgaatacaaccatgatctcttccaaagaatgccacagaatcaggggaggcatgcttcaggtattgggagagttgctgctacatctttaggaaatttgactaaccatggttctgaagatttaccccttcctcctggctggtctgtggactggacaatgagagggagaaaatattatatagatcataacacaaatacaactcactggagccatcctcttgagcgagaaggacttcctcctggatgggaacgagttgagtcatccgaatttggaacctattatgtagatcacacaaataagaaggcccaatacaggcatccctgtgctcctagtgtacctcggtatgatcaaccacctcctgtcacataccagccacagcaaactgaaagaaatcagtcccttctggtacctgcaaatccatatcatactgcagaaattcctgactggcttcaggtttacgcacgagcccctgtgaaatatgaccacattctgaagtgggaactcttccagctggctgacctggatacataccagggaatgctaaagttgctcttcatgaaagaattggagcagattgttaaaatgtatgaagcatacagacaagcccttcttacagagttggaaaaccgaaagcagagacagcagtggtatgcccaacaacatggaaaaaatttttga

SEQ ID NO: 45633 - DNA, 765 bp, Homo Sapiens
atgtccgcgggcggagacttcgggaatccgctgaggaaattcaagctggtgttcctgggggagcaaagcgttgcaaagacatctttgatcaccagattcaggtatgacagttttgacaacacctatcaggcaataattggcattgactttttatcaaaaactatgtacttggaggatggaacaatcgggcttcggctgtgggatacggcgggtcaggaacgtctccgtagcctcattcccaggtacatccgtgattctgctgcagctgtagtagtttacgatatcacaaatgttaactcattccagcaaactacaaagtggattgatgatgtcagaacagaaggaggaagtgatgttatcatcacgctagtaggaaataaaacagatcttgctgacaagaggcaagtgtcaattgaggagggagagaggaaagccaaagggctgaatgttacgtttattgaaactagggcaaaagctggatacaatgtaaagcagctctttcgacgtgtagcagcagctttgccgggaatggaaagcacacaggacggaagcagagaagacatgagtgacataaaactggaaaagcctcaggagcaaacagtcagcgaagggggttgttcctgctactctcccatgtcatcttcaacccttcctcagaagcccccttactctttcattgactgcagtgtgaatattggcttgaaccttttcccttcattaataacgttttgcaattcatcattgctgcctgtctcgtggagatga

SEQ ID NO: 45634 - DNA, 759 bp, Homo Sapiens
atgcagccagcaatgatgatgttttccagtaaatactgggcacggagagggttttccctggattcagcagtgcccgaagagcatcagctacttggcagctcaacactaaataaacctaactctggcaaaaatgacgacaaaggcaacaagggaagcagcaaacgtgaagctgctaccgaaagtggcaagacagcagttgttttctccttgaagaatgaagttggtggattggtaaaagcactgaggctctttcaggaaaaacgtgtcaacatggttcatattgaatccaggaaatctcggcgaagaagttctgaggttgaaatctttgtggactgtgagtgtgggaaaacagaattcaatgagctcattcagttgctgaaatttcaaaccactattgtgacgctgaatcctccagagaacatttggacagaggaagaaggcaaggagctagaggatgtgccctggttccctcggaagatctctgagttagacaaatgctctcacagagttctcatgtatggttctgagcttgatgctgaccacccaggatttaaggacaatgtctatcgacagagaagaaagtattttgtggatgtggccatgggttataaatatggcccaagactgttagctgctattggcgactgggaatttcagctcttttctgtatcaagttctttgagctcaagctccttgtgtatgttgagcgtgcacatattgatggatgttagatccattgttgttgctgttgatatttaa

SEQ ID NO: 45635 - DNA, 2098 bp, Homo Sapiens
acggtggtgctgtatggtcctgcaggccttgggaaaaccacgctggcccagaaactaatgctagactgggcagaggacaacctcatccacaaattcaaatatgcgttctacctcagctgcagggagctcagccgcctgggcccgtgcagttttgcagagctggtcttcagggactggcctgaattgcaggatgacattccacacatcctagcccaagcacggaaaatcttgttcatggagaagggggaggacccggtccccacctgcctcacccgcacggggctgttcctgcgtttcctctgcagccggttcccgcagggcgcacagctgcggggcgcgctgcggacgctgagcctcctggccgcgcagggcctgtgggcgcagacgtccgtgcttcaccgagaggatctggaaaggctcggggtgcaggagtccgacctccgtctgttcctggacggagacatcctccgccaggacagagtctccaaaggctgctactccttcatccacctcagcttccagcagtttctcactgccctgttctacaccctggagaaggaggaggaagaggatagggacggccacacctgggacattggggacgtacagaagctgctttccggagtagaaagactcaggaaccccgacctgatccaagcaggctactactcctttggcctcgctaacgagaagagagccaaggagttggaggccacttttggctgccggatgtcaccggacatcaaacaggaattgctgcgatgcgacataagttgtaagggtggacattcaacggtgacagacctgcaggagctcctcggctgtctgtacgagtctcaggaggaggagctggtgaaggaggtgatggctcagttcaaagaaatatccctgcacttaaatgcagtagacgttgtgccatcttcattctgcgtcaagcactgtcgaaacctgcagaaaatgtcactgcaggtaataaaggagaatctcccggagaatgtcactgcgtctgaatcagacgccgaggttgagaggttggtgtcttgttccgctaccactcagcagtgggctgatctctccttggcccttgaagtcaaccagtccctgacgtgcgtaaacctctccgacaatgagcttctggatgagggtgctaagttgctgtacacaactttgagacaccccaagtgctttctgcagaggttgtcgttggaaaactgtcaccttacagaagccaattgcaaggaccttgctgctgtgttggttgtcagccgggagctgacacacctgtgcttggccaagaaccccattgggaatacaggggtgaagtttctgtgtgagggcttgaggtaccccgagtgtaaactgcagaccttggtgctttggaactgcgacataactagcgatggctgctgcgatctcacaaagcttctccaagaaaaatcaagcctgttgtgtttggatctggggctgaatcacataggagttaagggaatgaagttcctgtgtgaggctttgaggaaaccactgtgcaacttgagatgtctgtggttgtggggatgttccatccctccgttcagttgtgaagacctctgctctgccctcagctgcaaccagagcctcgtcactctggacctgggtcagaatcccttggggtctagtggagtgaagatgctgtttgaaaccttgacatgttccagtggcaccctccggacactcaggttgaaaatcgatgactttaatgatgaactcaataagctgctggaagaaatagaagaaaaaaacccacaactgattattgatactgagaaacatcatccctgggcagaaaggccttcttctcatgacttcatgatctgaatccccccgagtcattcattctccatgaagtcatcgattttccaggtgttggtgaactgcctgtgactcctctcctccccggcccctacccctcagggataatgagttcattgctgggctagatgttttagccatgattctgcctctgttttatacctgcacacatccttatctttgttacatatgaaatatctgtatcacgggtatattgagagaaataaaggtgagagcattcacaaatgaa

SEQ ID NO: 45636 - DNA, 1761 bp, Homo Sapiens
atgagtgccaacccccggtgggacatcagcagggcgctgggggtggccaagctcttccacctggtgtgcggggtgcgggaagcctgcgtgaccccgttcctgaccctttacctgaggcagctgggcttggccgcgccctgggtgggcaccctaatgggaaccaagcacctaatcgctgccttctgggctcccgtctgtgccttcctggccaaaagctaccggaaaaggagagcgcttctgatcggctccctgctcggctcggtgggggccagcctgctgatggtcctggtcccaccggtagacaaaaatcgggtgcacttcccttgtaatggaagcagcggcctgaccagcacagacgcactcccgggggtcacgctacctgtgaacatcacctcggcccaagagtctgcctccagccacccagccaagaggactgcagaggtggaaatgcctggcttcagaaacccacctggtgaaagtgaccgagaaactttccgtgatctgcacgtctacttagcgccctccgttgaaggagctaggaccacatcccaagctctcctccatcctgtcacttcggggctgaaagatcatccctgggaagttacttttgaggtggtcaagacagccctccccttgcttcctggggggaaagggcccgggaatccagccaatttgtcagggaccaaggggaaagcctgggcttttgacctgtccttggaggcgttgcggcggacttttatcctctccttggggtccgtggcgttctgggagctgctgacagcgcctctggagcaggtggcagatgacagcctttatgagttcctggattttgtggatgccactgaccgatacagaagcctgtgggtctggaggttgctgggcatgtcggcaggcgtgtgtggcatcacagccttggtggggcagctggactgcttcctgatgaccagtggcccccgaggtgtggtccacttctatgggtactcggtggtcagcaccctggccttactggtgagcattgcctttcccattcccatctgtcagcagtgggagcccagctacaaaagggtcaaagcactgtccattgtggggggtgacccccacctcattctcctcgcctccaccactgttttggtaggagccatcgtcagtactgtccagaactttctgttctggcacatgaaggaccatgggagcggcgagctggtcatgggtttctcggtcgccctcagcttgctgggggaaattctgcttcatccgttcaaagctacattgcttaggaaactgtccaggacgggcctggtggggctggggctgagctgcctcgctgggcagctgctgtactactctttcctctggagctggtggtccgtcctccccattcagatcttgagtgccattagcaacagagctttgtggtgggctgtgggggcctcagtagaggacctggccactccccgcatggagagggctctgagtgccttgttccgaggccacttttacgggagtggctgtagcctgggcagctttgtcgggggcttcgtggtgatgcgcttcagcctggctgtgctctaccaggcctgctgtgtggccctgttgctctggttggccttgctcctgtccatacagcggaggctgccccgagagcggaaaatcaagtactcgaagctgctgtccatggaggtgagtgacaccagtgactctgagcaggggacagaacaggactggcttgtgaaggccatgagggaggaacactcagactga

SEQ ID NO: 45637 - DNA, 1507 bp, Homo Sapiens
cgggagtgggaacgccacacagtgccaaatccccggctccagctcccgactcccggctcccggctcccggctcccggtgcccaatcccgggccgcagccatgaacggcgaggagcagtactacgcggccacgcagctttacaaggacccatgcgcgttccagcgaggcccggcgccggagttcagcgccagcccccctgcgtgcctgtacatgggccgccagcccccgccgccgccgccgcacccgttccctggcgccctgggcgcgctggagcagggcagccccccggacatctccccgtacgaggtgccccccctcgccgacgaccccgcggtggcgcaccttcaccaccacctcccggctcagctcgcgctcccccacccgcccgccgggcccttcccggagggagccgagccgggcgtcctggaggagcccaaccgcgtccagctgcctttcccatggatgaagtctaccaaagctcacgcgtggaaaggccagtgggcaggcggcgcctacgctgcggagccggaggagaacaagcggacgcgcacggcctacacgcgcgcacagctgctagagctggagaaggagttcctattcaacaagtacatctcacggccgcgccgggtggagctggctgtcatgttgaacttgaccgagagacacatcaagatctggttccaaaaccgccgcatgaagtggaaaaaggaggaggacaagaagcgcggcggcgggacagctgtcgggggtggcggggtcgcggagcctgagcaggactgcgccgtgacctccggcgaggagcttctggcgctgccgccgccgccgccccccggaggtgctgtgccgcccgctgcccccgttgccgcccgagagggccgcctgccgcctggccttagcgcgtcgccacagccctccagcgtcgcgcctcggcggccgcaggaaccacgatgagaggcaggagctgctcctggctgaggggcttcaaccactcgccgaggaggagcagagggcctaggaggaccccgggcgtggaccacccgccctggcagttgaatggggcggcaattgcggggcccaccttagaccgaaggggaaaacccgctctctcaggcgcatgtgccagttggggccccgcgggtagatgccggcaggccttccggaagaaaaagagccattggtttttgtagtattggggccctcttttagtgatactggattggcgttgtttgtggctgttgcgcacatccctgccctcctacagcactccaccttgggacctgtttagagaagccggctcttcaaagacaatggaaactgtaccatacacattggaaggctccctaacacacacagcggggaagctgggccgagtaccttaatctgccataaagccattcttactcgggcgacccctttaagtttagaaataattgaaaggaaatgtttgagttttcaaagatcccgtgaaattgatgccagtggaatacagtgagtcctcctcttcctc

SEQ ID NO: 45638 - DNA, 876 bp, Homo Sapiens
atggaggcgcccgccagcgcgcagaccccgcacccgcacgagcccatcagcttcggcatcgaccagatccttaacagcccggaccaggacagcgcacccgccccgcggggccccgacggcgccagctacctgggagggccccccgggggccgtccgggcgccacatacccgtctctgcccgcctcctttgcgggcctcggcgcgcccttcgaggacgcgggatcttacagtgtgaacctgagcctagcgcccgcaggcgtgatccgggtgccggcgcacaggccgctgcccggggccgtgccaccgcctctgccaagcgcgctacccgccatgccctccgtgcccacggtctccagccttggcggtctcaatttcccctggatggagagcagccgccgcttcgtgaaagaccgcttcacagcggcggccgcactcacgcccttcaccgtgacccggcgcatcggccacccctaccagaaccggacgccgcccaagcgtaagaagccgcgcacgtccttttcccgggtgcagatctgcgagctggaaaagcgcttccatcgccagaagtacctggcctctgccgagagggcggcgctcgccaagtccctcaaaatgacggacgcgcaggtcaagacctggttccaaaaccggaggaccaagtggcggcggcagacggcggaggagcgggaggcggagcggcagcaggcgagccggctcatgctgcagctgcaacacgacgccttccaaaagagcctcaacgactccatccagcctgacccgctctgtctgcacaactcgtcactctttgctctgcagaatctgcagccctgggaggaggatagttccaaggttcccgctgtcacctccctggtgtga

SEQ ID NO: 45639 - DNA, 162 bp, Homo Sapiens
atgggtgaagaggagcaagactctggcactaccacgggctgcgggctgcctagtgtagagaaaatgctggccaccaacccgggcaagaccccaatcagccttctgcagaagtatggtaccagaatagggacacctgtgtactaccttctcaaagccgagggc

SEQ ID NO: 45640 - DNA, 405 bp, Homo Sapiens
ccgcactttgacagcaagggcgaggtggaggagtacttctggtccattggcatccccatgaccagtgtccgcgtggcggcctactttgaaaactttctcgcggcgtggcggcccgtgaaagcctctgatggagattactacaccttggctgtaccgatgggagatgtaccaatggatggtatctctgttgctgatattggagcagccgtctctagcatttttaattctccagaggaatttttaggcaaggccgtggggctcagtgcagaagcactaacaatacagcaatatgctgatgttttgtccaaggttttggggaaagaagtccgagatgcaaagattaccccggaagctttcgagaagctgggattccctgcagcaaaggaaatagccaatatgtgtcgt

SEQ ID NO: 45641 - DNA, 2290 bp, Homo Sapiens
gttccgggctcggtgcgactgcgcagctcctcggcgcttcctcggtggcttccccgggtcgagcaaacaggtaagttcggggagacttcaggccagggcagtctcctgtcttctcttggaaaccacagcagcccatgcacacagaatggcagccacattccagcttccagggcaccaggagatgccgctgaccttccaggatgtggccgtgtacttctctcaggcggaggggcggcagctgggcccccagcagcgggcgctctaccgggatgtgatgctggagaactatgggaacgtggcctctctgggattccctgtccctaagccggagttgatctcccagctggagcaggggaaggaactttgggtcctgaatcttctgggagctgaggaaccagatatcttgaaaagctgccagaaagattctgaggttgggaccaagaaggaactatctattttaaaccaaaaattttccgaagaagtaaaaaccccagaatttgtatcaagaagactcttaagggataatgcacaggccgctgagtttcgggaagcatggggccgtgagggcaaactcaaagagcgcgtgggaaattctgccgggcagagtttgaacaaacccaatattcacaagagagttttaacagaagctaccgtgggcagggaaagatctttgggagaaagaacccaagagtgtagtgcatttgatagaaacttgaatctggaccaaaatgttgttagacttcaaagaaataaaacaggagagagggtctttaaatgtgatatatgcagcaaaaccttcaaatataattcagacctaagtagacaccagagaagtcacactggggagaagccgtacgaatgtggccggtgtgggcgagcctttactcacagctcaaatcttgttctgcaccatcacattcacactggaaataaaccatttaaatgtgatgaatgtgggaaaacttttggactcaattctcacctccgtcttcatcggagaattcacactggagaaaaaccctttggctgtggtgagtgtgggaaggctttcagtcgaagctcaactcttattcaacatcggatcattcacacaggagagaaaccctacaagtgtaatgaatgtggaagaggctttagccagagcccccagttaactcagcatcagagaattcacactggagagaagccgcatgaatgcagtcactgtgggaaggccttcagtcgaagctccagccttattcagcatgagagaattcacactggagagaagccccataaatgcaatcagtgtgggaaggccttcagtcagagctcaagccttttcctccatcatcgggttcatactggagagaaaccctatgtatgtaatgaatgcggcagagcctttggttttaactctcatcttactgaacacgtaaggattcacacaggagaaaaaccctatgtttgtaatgagtgcggcaaagcctttcgtcggagttccactcttgttcagcatcgaagagttcacactggggagaagccctaccagtgcgttgaatgtgggaaagctttcagccagagctcccagctcaccctacatcagcgagttcacactggagagaagccctatgactgtggtgactgtgggaaggccttcagccggaggtcaaccctcattcagcatcagaaagttcacagcggagagactcgtaagtgcagaaaacatggtccagcctttgttcatggctccagcctcacagcagatggacagattcccactggagagaagcacggcagagcctttaaccatggtgcaaatctcattctgcgctggacagttcacactggtgagaaatcctttggatgtaatgaatatggaaaagctttcagtcccacctcacgacccactgaagatcagataatgcatgctggggaaaagccctataaatgtcaagaatgtggaaacgccttcagtggaaagtcaacccttattcaacatcaggtaactcacactggtcagaaaccatgtcattgcagtgtgtatgggaaagccttcagccagagttcacagctcacaccacctcagcagactcgtgttggagagaaacctgctttaaatgatggctctaaaagatactttattcatatcaagaagattttccaagaaagacatttttaatgtgataaatgcagaagacagtttagcaactgttcacttgacattagaagataagatggcataatgaaagatatataaggtctaaatattactggcaaagtaaaataaatagttcagatgactactaaa

SEQ ID NO: 45642 - DNA, 339 bp, Homo Sapiens
atgtggaaaggaggtagaagtcatcctttcctcccctgtagcagcaggcgtgcaggctctggtggtcagctggactccatactcccccaccagtcaccagcctggggaccgtggggctgcaaggacctcagcagcggtgtcccaagtttcctgacttcttccatcctctggaaatcagctgtgtttgctgaggataatggcctcaagatccatctgtgttcctacaaaagagatgatcttgttcttttttatgattgcacatcttttgttctaacgtttggtccttcaccttggttcctgacacaaggattcctaaatcccttggaattttctgcatga

SEQ ID NO: 45643 - DNA, 735 bp, Homo Sapiens
ctctctacaggtcagtgcgagcccatgaccaggattatgaacacagagttggcagtttgcctgcttgaagatccagcaatgcagccccctggctctgaggctactgtcaccctgcagcatctcaagcgttccctctggcaggagaaggtaccttccagccatgtgacttatgaaatccataatgaatacagagccatcctaagaatatcagttgttttacagaacaaagacaacactatcactagcaaaaagcctaaaaaagcaaagaagctgatttcagccaaaattcctagacatgggtacactataaaaaaagaactcactcaacaagttcataagcataaagactggacagtgccgtgggcaggggttgggccagggtacagctgtcaggacctcactggacaggaccggagaggaccccgcgtaaccgcggaacagacactcccggcagcggccgccgccgcggcactgctacgggacgagccggagcgcttggccatggcggcccgatccgcactggcgctgctgctgctgctgccagtcctgctcctgccggtgcagagccgctcagagcccgagaccaccgcgcccacccctaccccaatcccgggtggcaactcgtcagtgagcaggcccctgcccagcatcgagctccacgcctgcggcccataccccaaaccaggcctgctcatcctgctggccccgctggccctgtggcccattctcctgtag

SEQ ID NO: 45644 - DNA, 954 bp, Homo Sapiens
ctcgctcgccctgttcctcctctagtccctcggctccgtgcccgggaccctgccagcagaggagacaggtatatgctcgtcactttcgaagagccgccctgtgctatcaaggctggatggaaagaaaaccatgcaacgtttatgaatgaactgaaaaaccttcaggctgaaggacttaggactcttggccaatccctaaggacagcttttgatttattaaatttaaatagattagcaactggcatagacaactatgggcagggaagaaacccttttttcttggagccagcaataattatcacaattactgatgggagcaagttgactaccaccagtggagtccaggatgagcttcatttacctcttaattctcctttgcctggaagtgaattgaccaaggaaccttttccttgggatcagagattctttgcattagtgttgcagttgcctggcaccatgtcagtagaatcagaacagttgacaggtgtgcctttagatgaccctgcaatcacaccagacggctggtcgtattttgtgtgttctccaagaatgcttaatcagtgtctggagtccttggtgcagaaagtacaaagttgggtggtaataaactttcaaaaagcaggaccggatccttcccctgtagaagatgggcagccagatatatcaaggccttttggatctcagccttggcataactgtcacaaactcatatgtgtcagaccaaatcctaaaactggggttcctataggtcattggcctgttccagagtctttttggccagatcaaaattcgccaacaccaccacttcgtacatctcatcctgtagtgaagttttcctgtacagacgaaccaatggttattgataaacttccttttgacaaatacgagttggaaccttcatcactgactcaatttatcctggaaaggaaatctcctcaaacatgttggcaggtg

SEQ ID NO: 45645 - DNA, 666 bp, Homo Sapiens
cctgaagctgcctgtgctgtacaagagcagcctttgctatgccaggagtcactgagtggccaggccatgagcctgtcttgggtcaactctgtgggcctcaatgtccctgcttctgttcgttattcccatacagacatcaatgtgcctgacttccctgattactgttgcattgagatttttgatgggacaaagtcttcaaaagaggatggcgaggctaggaaagggttctcctatttggtaactgcaacaactgctgtgggtgtcacatatgctgccaagaatgtcatctcccagtttgtttccagcatcagtgcttctgctgatgagtcggccgtgtcgaaaattgcaatcaagttatttgatattccagaaggcaagaacatggctttcaaatggagaggcaaatccctgtttgtatgccacagaaccaagaaggaaattgaccaagaacctgcagttgaagaggtaacccattcgagtttctttactaggcgtttgcattcatcctgttgtacacctattgcaaatgaagattttggtggtgattactgcccttgctgggggtcacacgatgcatctgggaggatctggaaggggcctgcccctcttgagcttggagctccctcatatgggttcaccagtgaggacacagtcattgttggttag

SEQ ID NO: 45646 - DNA, 168 bp, Homo Sapiens
atgttagagaactacagaaacctggtcttcctgggtattactgtttctaagccagacctgatcacttgtctggagcaagggaaagaggcctggagtatgaagagacatgagatcatggtggccaaacccacagaatcttactctgtcacccagtctggaatgcagtag

SEQ ID NO: 45647 - DNA, 2964 bp, Homo Sapiens
atgaaataccttactgtgggagacttagaagattgcctactgaataaggtggacttgaggcgccagcagatttcccaggctgtggaggaggtgcagaaagtcgttcatcatttgaccacaaacatcagcaaccaagacattagatttcaagctgtgccttactctgacacgtacaatgaaaatattaaggttttggctcccagtcagttcctcgtcacagtcccaataaaaggcctggccgggtacagggaggccagggagcagcactggcggtactacacactgcagggcaccaggctgccctgcccgttgcgggaccctgagggtctgcagcagtggctggaggtggaacagtttatgaagagcctgtggcagtggcatgagacagatgtgaacatcgacggagacattgtgcctgccaaggtcctcctagtgttccggaagctggtggaaaatgcagttagaacctgtcacctctcaggtaaggtcagcctgctaggaaaccgctctgcagtttgggttgctgtggaaacatctgcatatcaggtggaactggagctggtccccgcagtggagatccccaccacctggtccaagaaagcccggtggcctcgatgtctgcagcgctggccttcccaagagagagtggagtgcatcaagtcgtttggatttaacttgttggcctgttcaaattatcactggcagctgagcttcctccgtgctgagcaggtgttactggaacagctggatgaagatgggggctgccgtaggaagtgttttcaggtcatgaggcacctgaaggaggacatctggtgcccagggaacaggccggttatcacgtcccaccatctgcagactgtgctcttttggacctgcgagaaatatccccactttaaagactggcaggtcttcagcaaagcatttctgcgcctggtgaggaaactgcacaagtgcgtgagccagcacttcctgaaacactatttcgtccggaacagcaacctctttcagtgcaccaacccgactgaactggacactgtggcccaaaagctggccaccttcctgaagaacccccagatcggcccgccctgatggttgccccggcctgggaggctcttggacattttattctggcttaacattgttctttggatggttcctcagtcaggtgccaggatcctgcctaggagaaaggccacgaatggcagcggaaattacatcaaaccagaaacacttcagcagggggaaaactgtgccccaggatgtctggcccaggcctccctggagcccagcaagcatttctgccctagctaattctcctggagacagctctcatcaggcttccccaggcacagatttggaactggtgacagttctgaacttagtttcccttgttcaggctgtgatcgtctcacagtgaagatggagacagaacccctggaagtctggacatgagcctgctggccaatactgtgcccagcccactgatcatgggcacattctcctgccatttgtaaaatgggaatgttaacgtgcctacctctgagcagggctgtgtgcctatgaaactgtgctggcgccttttcaaggggaaggcattggatcaacacaaagtgttcctggttggttgagtagctggtgtttgcatcctggatcggtacccacagcactgacgcaaaattgcacctgatgagttagtgagcctgtgcttccttgctgccctccagcttccttagcatgtgggtcagtggctcctgatgttctgtctgcttcgctggtattctctaagcagggaggggaatggttttgatgataagtgtaagtcaaagatgaaagtacaactcttggcctgatcccaaccatagccctctctttgcttcccatgccatgggccatggatggaacttccttatatatttatgtaaataacctagtactatgatctgcatggagtgaccttaggtgtctgtcactgctcagtgtgttcctttgctcacttcattcactcactcactcattgacaaataatgctcattaggcaccgggaacacagcaaagagcaaagtggatgaggacctccccctggggatgccacctaatggtggagacaagaaatgaacgacagataaacacgcacagttattacagatggaagcaagtgcttcaaaggaaataaacagaatgttgaagtagagtccacagaaaggtccccgaaggatgaaaatgcaaatagctgaaggggaaggaaaagtgaccaaaggcaggcatggtggggctggcatgagtcagagcacctggccttgtaaagccaggaaggaatcagtattttattctaagatcaaaggtgtgacatttggcctctccagaagcagaagagtatcacgatctgactgcattttaaacaattgttctggtaactgcatgaagaaggtctggggactcacacaggagctgggcactgagtgctcttgagccacccatttggaatttcacagaggcccacaaggcaacatattctgtgtggcacaaccgatcaggaattctaggagttctcggtgagatcaatggtttttttctggcgtttatgtaatgcttctcaactcaaggggctcctttattacttttgaatgtttttgcccaaatgtctataccaaagataaatttctaaagcatgaactactgattttgttttcatgaaaattcacatttgaaaatgaaaatgattacttttcaaaagtactgtaaacggcaggaaagatccaaaattgacaccctaacatcacaattaaaagaactagaaaagcaagagcaaacacattcaaaagctagcagaaggcaagaaataactaaaatcagagcagaactgaaggaaatagagacacaaaaaacccttcaaaaaattaatagatccaggagctggttttttgaaaggatcaacaaaattgatagactgctagcaagactaat

SEQ ID NO: 45648 - DNA, 399 bp, Homo Sapiens
atgcgcgcctcaccctgcatctcccagcccgcagccagctggcatcctagaccctctgccctgcgaccaacagccgggagcggaccagacaccagaactcccggaacggttgaagacggttccgctccctgtcccgcctttcgcagcccagcagtttcgccctgcggagaggagccttgctgtttccaaatctctcctgctgaagagacattggagctagggcggctagtttcacctggtaattgtgacaccctgtctcctcgagctgcaggcttttatgcttgtcatgttcgaagtttgataccttgcagatcaacaaagggccggtggcctctcactgcctccgcggcagggttgtcaagacatgcgcagtgcggcccgtccctagggctgggttaa

SEQ ID NO: 45649 - DNA, 1365 bp, Homo Sapiens
atgtcccctcaccgccttctgatgtcccctcattactctctggtgtcccctcaccaccttctgatgtcccctcaccgccttctgatgtcccctcattactctctggtgtcccctcaccgccttctgatgtcccctcattactctccgatgtcccctcaccgccttctgatgtctcctcattactctctggtgtcccctcaccgccttctgatgtccccattactctctggtgtcccctcaccaccttctgatgtcccctcattactctctggtgtcccctcactgccttctgatgtctcctcaccgccttctgatgtcccctcattactctctgatgtcccctcattactctctggtgtcccctcaccgccttctgatgtcccctcaccgccttctgatgtcccctcaccaccttctgatgtcccctcattactctctggtgtcccctcaccgccttctgatgtcccctcaccaccttctgatgtcccctcaccaccttctgatgtcccattactctctgatgtcccctcaccgccttctgatgtcccattactctctgatgtcccctcaccgccttctgatgtcccctcactgccttctgatgtcccctcactctctggtgtcccctcaccgccttctgatgtcccctcattactctctggtgtcccctcaccgccttctgatatctcaccaccttctgatgtgccctcattactctctgatgtcccctcactgccttctgatgtcccctcattactctctggtgtcccctcaccgccttctgatgtcccctcattactctctgatgtcccctcaccgccttctgatgtcccctcaccgccttctgatatcccattactctctggtgtcccctcaccgccttctgatgtcccctcaccgccttctgatgtcccctcaccaccttctgatgtcccattactctctggtgtcccctcaccgctttctgatgtcccattactctctggtgtcccctcaccgccttctgacgtcccctcattactgatgtcccctcaccgccttctgatgtcccattactctctggtgtcccctcaccgccttgatgtcccctcattactctctgatgtcccctcattactctctggtgtcccctcatcgccctctggtgtcccctcactgccctctggtgtcccaatactctccggtgtcccttcactgccctctggcgtcccctcaccttctggtgtccccattactctctggtgtcccctcaccaccctctggtgtcccctcagtactctctggcgtcccttcactgccctctggtgtcccctcaatactctccggtgtcccctcatcgccctctggtgtcccatcaccctctga

SEQ ID NO: 45650 - DNA, 4660 bp, Homo Sapiens
gcggcgcggtgcggcacggcacggtgggagtgtctccggctggcttgcagggagaacaccgactgagacctcaaaccctggctccagtgtcatggaatccgtcacctttgaggatgtggccgtggagttcatccaggagtgggcattgctggacagcgcacggaggagcctgtgcaaatacaggatgcttgaccagtgcaggaccctggcctccaggggaactccaccatgcaaacccagttgtgtctcccagctggggcaaagagcagagccaaaggcaacagaacgagggattctccgtgccacaggtgttgcctgggaatctcaacttaaacccgaagagttgccttctatgcaggatcttttggaagaagcatcctccagggacatgcaaatggggccggggctgttcctgaggatgcagctggtgccctccatagaagagagggagacaccattgactcgagaggaccggccagctctccaggagccgccttggtctctgggatgcacgggactgaaggccgctatgcagattcagagggtggtgataccagtgcctactctgggccaccgcaacccatgggtggccagggattctgctgtgcctgcacgtgaccctgcctggcttcaggaggacaaagtggaggaagaagctatggctcctgggctgccaaccgcctgttcacaggaaccagtcacctttgcagatgtggctgtggtgttcaccccagaagaatgggtgtttctggactctactcagaggagcctgtatagagatgtgatgctggagaactacaggaacctggcctctgtggctgatcaactgtgcaaacccaatgcgttgtcttatttggaagaaagaggagagcagtggaccactgacaggggcgtcctctcagacacctgtgcagaacctcagtgtcaaccccaagaggcaattcctagccaagatacttttacagagatcctgtccattgatgtgaaaggggagcaacctcagcctggagaaaaactctataaatataatgaacttgagaaaccttttaacagcattgaaccacttttccagtaccagagaattcatgctggagaggcatcctgtgaatgtcaagagattagaaattccttcttccagagtgcccacctaattgtgcccgagaaaatccgtagtggggataaatcctatgcatgtaacaaatgtgaaaaatccttcagatacagctctgaccttatcaggcatgagaagactcatactgcagagaagtgctttgactgtcaagaatgtgggcaagccttcaaatattcctcgaatctccggcgacacatgagaacccataccggagagaagccatttgaatgtagtcagtgtgggaaaaccttcacgaggaactttaacctgattttgcaccagagaaaccacacaggagagaagccctacgagtgtaaagattgtgggaaagccttcaatcagccatcatccctcaggagccacgtgagaactcacactggagagaagccctttgaatgcagccagtgtgggaaagccttcagggaacactcttcactgaagacacatctgcgaacccataccagagagaaaccatatgaatgcaaccagtgtggcaagcccttccggacgagcactcatctgaacgtgcacaagaggatacacacaggggagaaactgtatgagtgcgcgacttgcggtcaggtcttgagtcgtctttcaaccctgaagagtcacatgcgaactcacactggagagaagccctatgtgtgccaggaatgtgggcgagccttcagtgagccctcatccctcaggaaacatgcaaggactcacagtggcaagaagccctatgcatgccaggaatgcgggcgagcctttggtcagtcttcacatcttattgtacatgtgagaacacacagtgccgggagaccctatcaatgtaatcagtgtgagaaagccttcaggcacagctcctcactcactgtacacaaaagaacccatgtgggaagagagaccattaggaatggcagcctgcctttatccatgtctcatccatactgtgggccccttgctaattaacttccattttgtaaaaatataaacacatggggctatgactttccctcgtaatactcctttagctgcatcctgtgtttcaatgtataatattttcattttggtttaattgtaagtattgtcttaacctccattatcgtttattctttgacccatctattatttggaattagatttttcaaaactaatatgtggatatattttcatagaggtataatgacttatagtgaaatgcatacatctgaagtgtacagttggatgagtttgacagatgcatacatgcatgtaaccaccaccccattccagatatagaatgtttctatctctctggaaggttcctgcatgttatatggctatttcttagttgcctttttgttgttggtttctaatttaattacatggtgagaagagtatgtggcctctttgttactgagtcataggtatttgctgagatttgctattaggtctggtgtggcttattcttctagctgccaacccaaattaccccttcctccttagaaaagaacctgggttttctgttcagattggcagtgtgcactattaaaaagcttccatctcccggctgggcacggtggctcatgcctctaatcccagcactttgggaggctgaggctgggggatcacctgaggtcaggagttcgagatcagcctggccaacatggtgaaatcccctctctactaaaaatataaaaattagccaagtttggtggcatgcacctgtaatcccagctacttgggaggctgaggcaggagaattctttgaacccaggaggcagaggttgcagtgagccgagattgcgccactgcactccagcctgggcaacagagtgaaactctgtctcaaaaataataataataaaaaaaagcttccatctcccagcccttcttgcaagcaagggcaggccatttcctccggtcctggctagtatgaatatgagaagtcactggatgtgactctggggaagatattgtgttcagggatggtttcatgtagccacatctctccacttcttgccttttggacaagtagacatgatttctagacctagaggagccctcctgtgaccataagggtaaaagccgcaagctaagaagagggtggccggaagtcataaccatcttgcttctgtaatctaaaaaatatttaggatagatttaatagaattggcatatttatgtgattgcagcagccctggactatttatttctggatgtcccatacatgaaaaatatgcacttcttactggtacagttttcttttgtttgtttttgtttttggtgggaggtttatttcacctgaatataattcctaactgatgcacttagtatatgtcagtttttataaatgcttcatggatggttgaaatcaatgtattgtattctacaaatgtctgctagatcaagcaaatgtgtttaaaaaccatctacacatttataaatgttgatctgtgatctagcatttattgagagaggtatgttaaactctcccaccatgattatgtattgctgaaaaatctttgtcattctgtcagtttttaaatttatgtatatacatacatatatatgttttgaagcaatgaaattaaatatagatactgacattttttacatttccaacaaattgttacttttattcttataaagtgatcatccttttccctattactgaacattcaaccattcattgtaatgatagtaaatacttatttagagtttactattaatagatagtagccactgcctgaagctttgcatcttttaatttagtcctcacactgacactttgaggtatgtactgttatccccaattcccagatgaggaagctgaggcccagcaagttaaggtgggctatcaaagtcatctgggtggcatgtgacaggcctgactctctctacagtggcagacccaggggactagtctccatttttacttgttctttttttttttttttttttttttttggttttaaagttctcttaggtataacttacataaacgttaataaatcttagggtacaccttggtgaattttgtatatgtctatacccaccacggtctccatcaaaatattttatcgtcccagaaatttcccttgggccccacctcatcctcaaaggttatcactattctgatgtctatcaccatagatttgtttttcctgttcatgtaaatggaaccataaacagccctcttgtgtctgttttcttcacttaatatagtgtcattgagatttatctatgttgtattatcagtagtttatgctttttaattgctgtgtaatagtccatagtctgaatataccacaatttaaaaattctattctgtttacaaacatttgagttctgtcctccaggttcatccatgttatcacaaatgacagaatttccttcctcatcaaggctgaatagtattccattgtgtagatataccacattttctttatccattcatccaccgatggacagttaggttgattccatatcttggctattgtgaataatcctgcaggttttattgttatgaataaagctgctgtgaatgttcttgttaag

SEQ ID NO: 45651 - DNA, 292 bp, Homo Sapiens
tctgcagttgggaagaatttattatcactaagtggccctgacagatcagggaggagggggtgacactaacgaggctgctacaatcagctcccctagaggcagcgattaagggctcattacccgctggggtgaggggagcctgggaaaggcagcggggcggggggattaggttaggaggtggggcagtttagagggaagaagagtgggacacccccaggggagtccaaggaggcctggcctggagaagagtgaggatgtcctcatacatggagcagtcgtccaggttcaggcc

SEQ ID NO: 45652 - DNA, 405 bp, Homo Sapiens
atgggcaagttcataaaacctgggaaagtagtgttggtccaggccagacactacaccggatgctactctggatgcaaaaccatcatcgtgaagaacattgatgatggcaccttagaatgccccgtcagctgttctctggtggctggaattgactgttatccttgcaaggtgacagctgccatgggcaagaagagcacccagaggtcaaagaccaagtcttttgtgaaagtttataactacaatcatctcatgcccacaaggcactctgtggatacccccttggacaaaactgtcatcaacaaggatgtcttcagagaccctgctcttaaacacaaggcccaaaggccaaagtcaaaatcaaagagaggtaaaacctgggcaagaacaagtggctcttccaaaagc

SEQ ID NO: 45653 - DNA, 426 bp, Homo Sapiens
atgtcattcttccctgctcagactcctgcagtggttcccctcgcaccccagtcaatgccaaagctgccaggtggcctaccaggtcccgcaccgtctcgttgccctgctcacctcatgacccagcacctcctgctgagctcgtgctctttccatgcctggaggactcccagtgaccccgtgctggctccttcggtccttgctctgctcctgctcgcctcagaatctccctggcacagcttagtgcttcctctcctccttccccactttgcgggcccccctgggtcaaatctgaccccggggcgggtgtctgtttccaaatctgcctccttccccccaccctctcacccccatggtccttccctaagcggacggggacacagtctcacacccacaggatctgttcccggagccccttgccaatcctga

SEQ ID NO: 45654 - DNA, 468 bp, Homo Sapiens
atgttaatccccaagaccatggggaaaatgtctccaggtcatgtcagagaccttcatggcagcccctcccatcacaggcccagaggcccaggaggaaaaagtggttttgtgggctgggcccagggtctctgtgctgtgtgcagcctagggacttggtgccctgtgtcccagctgctccagccatggctgaaaggagccaacatagagcttgggctgtggcttcagagggtagaggccccaagcattggcagcttccatgtgatgttgagcctgtgggtgcagagatgtcaagaattgagatttgggaacctctgcctagatttcagaatatatatggaaacacctggatgtccaggcaaaagtttgctgcaggggcagagccctcatggggaacctctcctagggcagtgtggaagggaaatgtggggcagagcccccacacagagtccctgttggggcactgcctag

SEQ ID NO: 45655 - DNA, 1942 bp, Homo Sapiens
cagcaacagaaggcgtcggagcgggcgtcggagctgcccgctgtgggagagagaggagacagaaagagcgagcgaggagagggagcccgaggcgaaaaagtaactgtcaaatgcgcggctcctttaaccggagcgctcagtccggctccgagagtcatggcgaccgcagcgtctaaccactacagcctgctcacctccagcgcctccatcgtgcacgccgagccgcccggcggcatgcagcagggcgcggggggctaccgcgaagcgcagagcctggtgcagggcgactacggcgctctgcagagcaacggacacccgctcagccacgctcaccagtggatcaccgcgctgtcccacggcggcggcggcgggggcggtggcggcggcggggggggcgggggcggcggcgggggcggcggcgacggctccccgtggtccaccagccccctgggccagccggacatcaagccctcggtggtggtgcagcagggcggccgcggagacgagctgcacgggccaggcgccctgcagcagcagcatcagcagcagcaacagcaacagcagcagcaacagcagcaacagcagcagcagcagcagcaacagcggccgccgcatctggtgcaccacgccgctaaccaccacccgggacccggggcatggcggagcgcggcggctgcagcgcacctcccaccctccatgggagcgtccaacggcggcttgctctactcgcagcccagcttcacggtgaacggcatgctgggcgccggcgggcagccggccggtctgcaccaccacggcctgcgggacgcgcacgacgagccacaccatgccgaccaccacccgcacccgcactcgcacccacaccagcagccgccgcccccgccgcccccgcagggtccgcctggccacccaggcgcgcaccacgacccgcactcggacgaggacacgccgacctcggacgacctggagcagttcgccaagcagttcaagcagcggcggatcaaactgggatttacccaagcggacgtggggctggctctgggcaccctgtatggcaacgtgttctcgcagaccaccatctgcaggtttgaggccctgcagctgagcttcaagaacatgtgcaagctgaagcctttgttgaacaagtggttggaggaggcggactcgtcctcgggcagccccacgagcatagacaagatcgcagcgcaagggcgcaagcggaaaaagcggacctccatcgaggtgagcgtcaagggggctctggagagccatttcctcaaatgccccaagccctcggcccaggagatcacctccctcgcggacagcttacagctggagaaggaggtggtgagagtttggttttgtaacaggagacagaaagagaaaaggatgacccctcccggagggactctgccgggcgccgaggatgtgtacggggggagtagggacactccaccacaccacggggtgcagacgcccgtccagtgaactcgagctgggggaggggcagagcgcggggctccccctccccttcggtccttggccctttcccggccctcttgttccctctctaacttctgattgttcttttatttttaattattatttccccgtcccttaaaaagacaaaaaaaataaggcaaaaggaaagcaactaagacactggactatcctttaaaggtagcaggtgtaatgatgtgttttgacctttgcaggcgagtaaccaggcaatggagtggagtgtctcctggagagagtgaggagagtgtgtgatagctagaaagagagagagacagagagatggcaagcactgagataaatacctggcaaaactaaataaattaccaaaaaggaaaaaaaatccaccaaaccatgataaacacaaaatgcagcttcctgatgcttagagttggcacatgctgctgtgtttatttattgtgga

SEQ ID NO: 45656 - DNA, 270 bp, Homo Sapiens
gacagtcccattgagcaacacttcaatgaatgcacccctccaaattgagaaggccatgaagatgaaatgaaatagtctagattcccaggatgaagttgcaagacatcttctacccctcaacagactgtatcttcacctctatctgaccttattgctgctcacattatttgtctcaagataaaatcccaaaactctggaggggtgctgcctcacaagatgcatcacctgctcagttgggaaccaaatttgaggtaaattcaaggtgccctg

SEQ ID NO: 45657 - DNA, 399 bp, Homo Sapiens
atggagaagaggaaggggagcccctctctcaacctcatagattctagattagctcctctggcccagcagggctacagaaatctgaggatccctgccagccaatcctcttctccccagcaagagtttccctggtgccctccagtgggcaaaggacaggacaggatcaccctctgccacccccatcctccaccttcatcccaatctcatgggattgctacaacgcaacagagggcgaaggagtcaggctctcatactccattacaaatgggaagactcagcccgggcatggtggctcacgcctgtaatcccagaactttgggaggccgaggcaggtggatcacttcaagtcaggagtttgagaccagcctggccaacgtggtgaaaccctgttgctactaa

SEQ ID NO: 45658 - DNA, 1834 bp, Homo Sapiens
gagtgggggacctggagggaggtggtgaaatagaatggtcctgggggacgggactccaggggtttgacgattaggcgtcaagactgacttagacctgggaagaaaaccagaggcagtcgagcagagaggccaaacgccaggcagggcgaagtcagccggagatggagtggaaactggagcgcaccgcgcctcggagggtccgcacggaagaggagatgctgtgggtactcgattcagttaatgctacgtattctgactttaagagcaactttgcgaagaggctgtccgcagaggttcctgttgcgagtagccccattaccacaaggtggcagcaaagtcaaactagggctctgtcctctgattcctttggggaagagcagtcaaccacctacctcccagaagcttccggatcagtgctgaagacaccgcctgagaaagagaccttgactctaggatcccgcaaagaacaactgaagacccccagcaaaggaatttctgaaacaagtaactctgctctccatttttgcaaggcacctcatgcaatggacagagactggaaagaaagtgttgcctcaaaagggcagaaatgcctaaaacaactctttgtaacccagaacgtggttcagcaggctaatggaaaaatgcagctctgtgagcaatccgaatgtgtttggaaagatcactttagtggcagcatgaagaaacgatttgaacaggaggatgttggtggcaaagactaattgagaggccctctgaatactctatgcaaggctctgttgttgattcttttaagggaacttaaactatgaaacagatcccacataagccaagtaattgctcatcagtggatcacggggacaaatgttatccaaatgctgtgtatataaagcaattctttatgccttgtccatatctaatgactctgaaaccttacagcaggcagcccctgtaaactttcaggtgtacctctttgccgaaagctggtaggaaactttggatggtggtgttgtgagcgttatcagggaagctctgtagccatgcagtggggagataattgcctgtggcaatttctagaaggtcctgttccatgctacatttggagctctcagtgctttctttcttttttttttttttttttgagacagagtctcgctctgttgcccaagctggagtgcagtggcgcgatctcagttcactgcaacctctgtctcccgggttcaagcgattctcctgtctcagcttgggattacaggcacacaccaccatgcccagctaatttttgtatttttagtagagaaggggtttcaccatgttggccagactggtctccaactcctgacctcagatgctccacccgcctcagccttccaaaatactgagattataggcatgagccactgtgcttggcctcccaaagtcttttgaccctgagccccatgtgttttcattcctactttctgttgccatcatggacgtttttgtgttattcatgagattattgtcatggctggaaaataattgtttgggagccagaattctgtgtgagaatcctcttgagagaactagcgtggttcatttcataaatgccaaggaaacttgcctgctacatttcccctctggaataagttctggtaagcatatccatggggtgctttggcaaggtctcaaaaataaatgtgaacaaggagacagaaatcctcaatgctaaagtagacttctatttttatggcttgtcctattttttttttttttttttgagatgaagtcttgctctatcgtccaggctggagtgcagtagtgtgatcttggctcatggcaacctccacctcccggg
